United States Patent Application Publication US 2026/0103690 A1 - sequence listing, part 19

SEQ ID NO: 80171 - protein, 462 aa, unidentified
MLTSPSAERFVALDVHKHYVVAGAVTAGQQVVLAPRRVDLDDLPDWSQRHLRPTDAVVLEATTNAWHLCDQLRPLVASVTVAHPLLVKLITSARVKTDARDTLHLARLLAAGLIPAVWIPPQDVRELRALVAHHTRLIRQRTQAKNRLRSTLHRYNIVPPDGGLFAAAQRSWWEALALSAGEKLRIRQDLSVLASLEPLIAEVEEELTRLSGTEPWLSQVVFVLQVPGIGVINALVLLAAIGDITRFPTAKQLVGYAGLGASVHASGQTYQTGHLTRQGRKEMRAALVESAWMAVEHHPYWKAQFERLSARIGKKKAIVAIARKLLVVVWHVLSKQEADRNADQAMVTRTMMEWARNKSTATRQGLTRVEFVRRELDRLGIGAEMDSFVFNGRTYHLPASASARLRTATAALSRMVLEARASTAEGTTALAASPSWNVRKKPAQRQVLLCSSRGIAPLPIRT

SEQ ID NO: 80172 - protein, 342 aa, unidentified
MSEVTIIGIDLAKRVFQLHGARVDGSVVFRKKLSRGQLLVFFAQQPNCVVAMEACATAHGWGRELEKLGHSVRLIPPVYVKPFVKRQKNDAADAEAIVEAALRPTMRFVAVKTEDQQARAMLFRTRQMFVGQRTQMINALRGHLAEHGLVAATGTAQLKRLADAIEDSDTALPEGVRNLGQMYLAQIAGLNARVAELDQKMRCAAKEADLARRAQTMPGVGPITALAIETFAPDLATFRRGRDFAAWLGLVPKQHSTGGKARLGKTSKMGQRDIRTLLVSGAMAVLQAVERFGTPNNGWLSRLRARKPRMVAAIALANKMARGLWAMMTKREDYRDPVATMV

SEQ ID NO: 80173 - protein, 413 aa, unidentified
MDALRPSYFVGIDWASATHAVCVLDVAGRFVWQGMIPHTAAGLTDLVRRLARLAPPVEIAIERPSGLLVDTLVEAGFRVVPIHPNALKATRPRYAAAPGKSDPGDAYILADVLRTDGHRFRPLRAPSDATRALRAAVRTRDDLVATRIHLANQLRSVLESFWAGAAALFADIDSPIALAFLDTYPTPESAARLGEQRLARFLQRHAYCGRRSAAALLTRLRAAPEGRAAALESETRGQLVRSLVAVLRPLVEQLRELEGLIAAQLAQHADGALLQSFPRTGTVNAAQLLAELGDDRVRFASAAQLAAEAGVAPVTHSSGKHRGVACRFACNKRLRQAATTWADNSRHGHPWAAAVYRQARARGCDHPHAVRILARAWLRVLWRCWQDHTPYDPQRHGRALPFLTSPHRAPAAA

SEQ ID NO: 80174 - protein, 400 aa, unidentified
MHYLGIDWATDKHDICLMADDGTILSQFEITHNMKGFRQLHHLLENLPDVRINIERSDGLLVDWLVQQNYDLFITPPNVLAHRRPTRVKDDKGDAFLLAYLLRLQDLDCRPYSHQSQIVTHLKQLVRAYDHTLNEQRRLNNQLIYNLRQYYPLALTLFTQSYSLILLAFLEQYPTPQEAAQITYFDLETFLRSQKYSHIKRLDLLYKRLKVPMPEASVQDGYVEHIKVLIPLMQMLYRQKADLIKQITQVFRSHPEAEWWLTFPGTRGPLTPARLLAWIGDNRGRFPTAEVLQATAGTVPITRRSGKSLSVEFRNGCSHPLRNVADDLARQSLRHSGWARAYYQQQLDRGHSAARSYRALANRWMKIVWTLWQRRETYDEAKHVANRSRKGMQLLLADAI

SEQ ID NO: 80175 - protein, 411 aa, unidentified
METLIARCCGLDVHKAQVTACVRLLINGAVTEIVETFGTTTPDLLALRDWLTSHGVTHVAMESTGVYWKPVYYTLEDEFEVLLVNAQHVKHVPGRKTDTIDAGWIAKLLAHGLLRGSFVPPKPIRRLRDLTRFRKALIEERTRAVNRLHKLLEDAGVKLACVATDVMGVSGRAMMRALIEGQAEPEALAELAKGKLRKKLPELRKALTHRFSGHHAFLLERMLAHVEELEDDIGALSVRIEEEIGPFEPAVELLRSIPGVERRAAEALVAELGTDMTVFPTAGHLASWAGVCPDQNESAGKRKSAKTRKGSKWLRKTLTESARAAARTRETYLSERYRRLAARRGDKKAVIAICHEILCAAWHMLQTGELYREQGADQFRQRDQDRIRKRAINQLEKLGHKVILEELPQAA

SEQ ID NO: 80176 - protein, 339 aa, unidentified
MKEVSTIGLDLAKKVFQVHGVDAAGEAVVQRTVRRSRVVAYFAKLPPCLIGMEACATAHYWARELGKLGHKVKLIPPAYAKAYVRRNKNDAADAAAICEAVSRPSMRFVEVKTEAQQAAAGIHKVRETMMKQRTMLINALRGLMAEFGIVVAEGTRHVGELEAILADPQEQRIPAPLHDGLVRMAQSLRGLERQLEGIDKQIVDWGRANATCRHLITAPGYGPILSSAMAAMVVKPAVFRSGRDFAASLGLVPRQDGTGGKVKLGPISKRGNGYLRRLLVNGAMSVLNSKRAKQDPWLVKLLANKERKVAAVALANKMARIGWALMMRQEDFRATPAAA

SEQ ID NO: 80177 - protein, 337 aa, unidentified
MDYFAGLDISMDETYVCVVDRDGAVVYEGKSASTAEAIAGELAKAPICCRIVFETGRMAPILFHGLIEFGLPVVCVESRQAYQALKSLATHKTDRNDARGLAHLARIGFFKPVHVKSLSAHALRSLIIARKKLVGQRVTLENQIRGLAVVFGVRLPRALTAAFVNQALKASEGVAGLCVAMRGLIAARTAVMTAVAPIDADMRRMTRASAACRRLMTIPGVGQLTALAFVAAIDDPFRIRRSRDVGAYLGLVPRRYQSGEVDYVGGISKCGDRRVRTLLYEAANVMLTRYKGQLKLKDWAFAIARRSTMRKARVALARRLAIIMHAMLRNETEFAPA

SEQ ID NO: 80178 - protein, 354 aa, unidentified
MEPQNKLLDFTGYKLYIGIDVHLNQWTVTIRMRDLELRTFSMNPSPQKLLEHLKKNYPHGDYYSTYEAGFCGFWAHRQLTQLGIKNIVVNPADVPTTHKEKTQKRDKRDSRKLDRELADGSLEAIYIPTTQQEALRLLSRLIIQIAKRTKQLKCRIKHFLHTQGIILPKRSEMSHWSGRFIHWLKSLEFEHDEARDYLDQLLLSLEQARKQKTQHLRKIRTRIKGNNIIPYLRTVSGVGFITAFTFYTEIMDIFRFQKLDHLIAFIGLIPSVEASDKTEKIIGLTNRCNKYLRYLLIEATWVAVRKDPALTLAFQNLLKTKSKQRAIIRMTKKLVNRMRHVWKNQREYVIAVIE

SEQ ID NO: 80179 - protein, 425 aa, unidentified
MNYKQNEKINQVKESTLVVGIDIGSTTQYARAFDWRGIELGKVFPFSNSREGFESFKAWMQHLQDKYRKSDVIVGIEPTGHYWFDLGAYLEDEGILLVMVNPYAVKQTKELDDNSQSKNDRKDPKVIAKLVTEGRYSAPYTPDGVYADLRIMVANRKRLIREMTQIKNRFARWFAIYFPEYTDVFGDYEAQSSMLLLKKVCTPEAIVELGAEKINQIWRDAKLRAVGMKRATTLCETAKRSIGLKKGSSAARYEMKLLLEDYEYKKAQLDAVMEEIEKLCRKIPESEQMLAIKGIGVITVAGFLAEVGDVRRFESPRQIQKLAGLSLRENSSGKHKGQTSISKRGRSKLRAVLFNAAIPLIAKNPEFKSLHEYYTTRANNPLKKKQSVIAISCKLIRVFYAILANGVTYDAQKMLSDIHRQPQAA

SEQ ID NO: 80180 - protein, 464 aa, unidentified
MDWSFVQPGDAGRAVLQARWALVEAAGSVVRQPGPLHAFYERLRARRGHGIAVVGAARKLAVLFWCLLTREEQYAHQQPSPTQEDAAARDPSPKKDGMNRASLGSARDTRAKRLPELEGGPEMTIVAGFDVHRRPITFDALDTETGELMRGRIDSTPAAVEQWATRFQGRGVQVALEACTGWLFVSRALERAGVVAHLAEPVETSALRGRKRRAKTDREDARWLRTLLGEGRLPEAWIPPEHVRQWRSRARLRKTLVDERTQWLQRIQATLFHHGVDGVPAELRSGAGREFLDELELPADARERIEIALGMIDALEGQLRPLEAALRKLALRQTGCRALMAQFGMGELTSLVTLTELGDVGRLSASRKAVRCAGLDIGVHRSDRRSRVGKLNRQGSPHLRWALYEAALSATRPTSPDHQDYLALKARGLSHTRASLTIARKLARRSFHILRELGPSALDPIPTS

SEQ ID NO: 80181 - protein, 322 aa, unidentified
MRYIGIDVSKATFVVAYSSDKGGEIRTFNNTTAGIRQFIGTLPKDGSIHCVMEATGNYSALLLYMLNVAGITVSMENPLKVKNFAKALLSTVKTDKSDARLITLYGEKMNPRPFKVQGEAILRLRQKRTVIRQLTKQITAMSNLRGSLACLPVPDKGATHTVDETIKFLEKKRDRLQAELTDLVEVDFSRQLALLTTIKGIGITLATALIITTGGFTYFQNAKQVSRYLGICPTYEQSGTSVNIKGHINRNGDAYTRGLLYIAAWPASRFNAQCKETYTRLRQNGKSGKLAMIAVANKLIRQAFAVVAHDKEYIDGFVSNRP

SEQ ID NO: 80182 - protein, 339 aa, unidentified
MFNVKNEVMDYLTIIGIDVSKLTLDLHVLPHHLDFQTENDVKGFKKIFKWLEKECGVCVSKSLFAFECTGHYSFRLALWMQKNEYNFVMLPGLEIKRSQGITRGKSDPADARVIAEYTYLRRDKIALTQLPEKDIIRMNLLLSLRAKFVRQRAGYKATIKEVKRAFSRKQEPLYFKTQENLVKNLDTQIKSLETELQKIVAQNPKLQEQYDLIVSIKGVGPLSAQTIIAVTHAFQKFPTWRKFACYCGTAPFPYQSGTSIHGRTKVSHLANKRMKSLLTNMASSAIQHNPEMKLYFQKRVENGANKMSTLNIIRNKLISRIFAVVDRGTPYVEIMKYAA

SEQ ID NO: 80183 - protein, 417 aa, unidentified
MPLAPALYVGTDISEATNRTRFLDPGGTEVGRGFSSANDLPGSEALADEAMRRARTIEATEIRWGLEATNLFWWHLATYLTTNPELLAGGLRCWVFNPRQVAGFKEAYGDLGKGDWVDALVIADRLRFGRLPAECYLDERYQPLQRLTRHRRHLVKTLVREKQVALGYVYLKLSAYNLAKPLADTFGATSQVLLSDYLTPDEIVAAPLEDLAAVIARESRGRVADPGEVAEAVKQAARRSYRLPARMVEPVNLVLSSSLATIRTLGAQLKPMDKAIAAELGAVPPQTVDTVPGLGPVFTAGIVAELGDVRRFEGEESVAKFAGLTWRWHQSGEFEGEDRPLTKTGNVYLRYYLVEGANSVRLKCPEFRSYYDRKFAEATRHHHRRALVLTARKLVRLVDSLLRSGQIYRPPSARKAS

SEQ ID NO: 80184 - protein, 318 aa, unidentified
MEPNVFVGIDVSSKNLDVATRPTNNQRRVSNDAEGHLAIVEMLRGQAVLVVLEPTGGYERPLVAALVEAKIPIAVVNARQIRDFAKSRGKLAKTDKIDAQMIAAFAEANRPEPREIPDEETRGLEALVNRRRQLVDMRATEMARRNLASKIVRPSIEKVIKLLSDQIDEVDSDLGTRIKKNSVWRAKDALLQSPKGVGPVLSRTLMALVPELGTLDRKQIAALVGVAPFNNDSGTKRGRRSCWGGRAAVRSVLYMATVVAATHNPVIAATYKRLMARGKLARVALVACMRKLLTMLNAMVRDGRPWCPPLLAEGAKNA

SEQ ID NO: 80185 - protein, 433 aa, unidentified
MNPSHPYDLVIGLDRSDQQADLRLIDPRTGEHRSAVIDTAPEALWEWLLELRQQHPEARVGLCLEQPAVHLIAFLEAYAWITLHPINPITLQKYREAFVTSRAKDDAKDAEYLAGLLLTHHAQLQPWAPEDSATRAVQQRVFHRRAVVDERTALSNRLIALLKQYYPQALILCGADLWRSLATRFLLKWPSLQAVQKARPATLKEFYYLNGSRSAKLLEQRLALVEKAVPVTDEPAIIASFVLRVQLICRQLQLVQQSVAAFDRQIAQAYTAHPDRAIFASLPGAGPVLGPRLLASLGAQRERFGSAASLQHYTGIAPVTKKSGGSCHIHRRYLCPKFHRQSFHEYAKESILWSRWAAAYYWQQRRKGCPHHTAVRALAFKWQRVIWRCWQDRTPYREQIYEAALRKRGSRLVALFDRVELGKSPWKNPVKKS

SEQ ID NO: 80186 - protein, 322 aa, unidentified
MSECILGVDIAKKKFDAALLINDKLKHKVFKNNQEGFTELSSWLEKQGVGYIHVCMEASSTYGDELATSMHDAGHTVSIINPARIKGFARSELLRTKNDKVDAGLIARFCLAMHPEPWTPVPPEMRQLQSLVRRIDTLISMRTQEMNRIDVSHESIRASLGNHIAYLDKEIGGLRKQIATHITDDPNLTTKRDLLKSIPGIGEATIASILAELHMFERCERVEKVVAFIGLAPRQFISGSSIKGKARLSKIGHARLRKALYMPALVSIQCNPIIQTFYHRLKENGKNGKVIVCAIMRKLVHLIFGILKSGKPFDAHYTPYCA

SEQ ID NO: 80187 - protein, 344 aa, unidentified
MLYVGLDLSRKRLDFDARLRGGELVERGAVPPDADGLAGLVRRLGAAQVLAVIESMNGARFVHDRLEREGWDVRIADAVKAKGLAPLACKTDKIDAWVLAELARLDLVPEIWLPDPAVRGERERARFRLHLVKHRSALKNRVHSILIAHGIGSPSSDLFGTSGRRMLERLSLPEPWRSTTAASLALIDTLDEEIDRCERELRLLGADHRYVPLLMTCPGIAWILAFTIASEIGDIARFPTPVKLVGYSGLTPRVEQSGESDRRGPLRKNGPDHLRWALVEAAHSASRHPLYRPILERSRARHGRKRGTKIAALTIARKLAEASWYMLTRNQPFAPAGATRPLAA

SEQ ID NO: 80188 - protein, 345 aa, unidentified
MELHTIGIDLGKTVFHLVGVDLRGEVVVRKKFSRKQLLHFTANLQVELIGMEACGGAHFLGRALREQGHEVRLMPAQYVKPYVKTNKSDYVDAEAIAEAVGRPTMRFVPIKSDDQLDLQSLHRVRERWVMRRTAVINQIRGLLLERGITLRKGRRHVDEALPGILEDGSAKLSGALRVLLAQLKLELDHLQMRIDEADAVIKKTAGENEACRRLVAIPGIGPITATAIIAAIGNGAAFKKGREFAAWLGIVPGEYTTGGKQKLLGISKRGNSYLRRLFVHGARAVLQQSAKQSSGLSSWLAQLTSRTHRNVAAVALANKLARMAWAVLAKNEPYRPPVLADSAAA

SEQ ID NO: 80189 - protein, 309 aa, unidentified
MDNTIVGIDVAKDRLDVAVRPSGELFRVERNAGGLERLVERLRPLAPSLVVLEATGGFETVVAAALAAAGLPVIVVNPAQVRAFAKAIGQRAKTDPIDAAVIAHFAEATKPEPRPLPDEATRMLADLVARRRQIVEMIGAERQREKLATVRIKKSIARLIKALEKELDSVNSDIDDAVHSSPAWRDKEDLLASVPGIGPIIARTLIADLPELGRLDRKKIAALAGLAPFTRQSGQWRGRSFIGGGRTSVRTALFMGAMAARRHNPILKAFFCRLVAAGKPKMVALIAVARKLLTILNAVLRDQKPWQTA

SEQ ID NO: 80190 - protein, 360 aa, unidentified
MKKVNKQMRKMEAADKPEMTLGLDMGDRYSHYCLLNAEGDVVEEGRMQSTEAALRRHFEGKPRLRIALECGTHSPWVSRLLTELGHQAIVANARKIPAITGSESKNDRNDAEKLARFAAYDPKLLSPLEHRSPERQLDLNLIHARSTLVRARTMIVNALRGLIKSAGGRLPACSTESLPDRASSAIPAALAVVAKPLLQQIAFLNGQIDGMDKQIEKLAAKYPEIGLLRTAPGVGPIVAAAYVLTLDRPNAASNRSAGAFLGLRPGQSQSGDADPQRRISKTGDGCLRSLLVQSAQYILGRFGPDSELRRWGLKVAATGGKRGKKRAVVAVARKLAVVLHAMWRNSQRFQAFPQPVTAAA

SEQ ID NO: 80191 - protein, 354 aa, unidentified
MSQTPNTAIAVIGIDIGKNSFHVVGHDARGAIALRQKWSRGQVEARFANMPPCLIGMEACVGAHHLSRKLASLGHDARLMPAKYVRPYSKGQKNDFNDAEAIAEAVQRPTMKFVATKTAEQLDLQALHRVRERLVSQRTGIINQIRAFMLERGIAVRQGIGFLRTELPTILATRTDALSPRMLRVIEELAGDWRRLDQRIEGLTGEIAALAHQDQACSRLMTVPGIGPIISSAMVAAIGTGDVFSKGRDFGAWLGLVPKQISTGDRTILGKISKRGNRYLRVLFVQAAWVVLVKIKDWERYGLKSWIEAAKKRLHHNVLAIALANKLARIAWAVLAKGRAFELTRTNDAGVRPA

SEQ ID NO: 80192 - protein, 367 aa, unidentified
MKKISTVAAKATKNFSQPKLTMGLDLGDRSSWYCLLDEVGEVRQEQKLSTTPKAMRGVFGVMPRCRIALETGMHSPWVSRLLSELGQEVIVAHARKVRLIGESRKKDDRLDAQTLARLARIDPQLLCPVKHRSAKAQVDLTVIRARAGLVRARTALVNTARGLAKSYGERRRGCNVRIMNPEKAEGLSPELQAALKPLLTALQALSEQIAEYNQRIEQLAQQSYPQVGLLKQIKGVGTLIALTFLLTLEDPHHFRKSRDVGCYLGLQPGRRNSGQSQPQMHISKEGDPSLRTLLVQGAQPILGPFGVDCDLRRWGLKLAERGGKSGKKRAIIATARKLAVLLHHLWVSGEVYEPWHNRQPMTMPAAA

SEQ ID NO: 80193 - protein, 370 aa, unidentified
MKRIIKIGMDVHSTNFTLCAMEPTIGAEERVYGAVQVAPDYKEVLRFIESVKMKLGLHEDYSFECGYEAGCLGYTLYHQLHKAGIKCVILAPTTMLTQQGKRVKTDKRDAFLIAQCLCYGTYHSVYIPTGKDDAVKEYLRMRDDHKQELKRRKQQINAFVLRHGHQYAGTKWTIKHVTWLHRLELEPMYRETLNEYMASYEQLEAKIERFDKRIEEIAAESRYQENVKKLGCFLGIRTHTALSLIVETGDFKRFAKGNTYAAFLGLVPGERSSAANVNRLGISKAGNTHLRTLLIEASKGLCKGAIGYKSKALRARQSGQAADVIEYADMANIAVAAVARELACFIWGMMTGNISIASRGTTSAPAGSQG

SEQ ID NO: 80194 - protein, 426 aa, unidentified
MTSRTPRSDVLKESAMDVVYERCCGLDVHKKTVVACVLVTVGKGEPKREVRTYGTMTEDLQRLSAWLREARVTHVAMESTGVYWEPIWNVLEGRFELLLVNAQHIKAVPGRKTDVKDAEWIAGLLRHGLLKGSFVPEREQRELREVVRYRTTLIHERIDAVNRLQKTLEGANIKLGSVVADVQGKSAREMLAALVGGETDAAKLAELAKRRLRQKLPELKQALTGQFRPHHRFLVAQHLAHLDDLEASIAALDAEIEDRMRPFTAAIERLDAIPGVGQRTAEVILAEVGTDLTRFPTNGHLASWAGVGPGNNESAGKRLSGKTRKGNRYLRAALVEAAHGAAHTKETYLAAQYRRLAGRRGKKRALVAVAHTILIIAAQLLRSPDGAYRDLGHQYFDQRDREAVQRRLVRRLESLGLQVTVGPAVA

SEQ ID NO: 80195 - protein, 346 aa, unidentified
MMIIGCDFHPSWQQVSWLDTETGECGERKLAHASGDAKLFYQQLAAPVLIGMEATGNSQWFIELVEDLGHEVWIGDAAQVRASYVRKQKTDKRDAAHILKLVVEGRFPRLWTPDREQRDRRQLVLHRHKLVEIRSRVKNELQHLSLSRGVQRKRKLWSQAGQKLLRELPLKPWACCRREDLLGLLVMLDQQIGKLDWAVQKAAEENPQAKLLMTQPGVGPNTAMAFVLTIGDVSRFPRGKQVASYLGLIPREESSGGRQKLGAITKQGNRMLRSLLVEAAQIAVRFDPEMKKQYLHRCHQKPKGVAKVATARKLAVRLYWMLRTNVAYPEVVRIESSPRVPLVGAS

SEQ ID NO: 80196 - protein, 410 aa, unidentified
MDALVERCAGLDVHQASVVCCILIGVPGRKPQKLLRRFGTTTRELKALRAWLAEHGVTHVGMESTGVYWKPVYAVLEGHVDLIVGNAHHIKNVPGRKTDVKDAEWIAQLVRYGLVAKSFVPPPAIRDLRELVRYRRTLIETRTATRNRVLKLLEGANIKLSGVASDVFGVSGLAMLEALAAGVTDASEMAGLARGRMRRKQAALEAALEGHLREHQRFLLAMQLCALKAIDHDITALDTHIEAQLEPFRAQHQLLMQIPGVDWATAAAILAEIGPDMSVFTTARRLAAWAGVAPGNHESAGKPKGAAVRRGNVFLKSVLFAAASAAVRTKGSYYRDKYNRLRSRRGPVRALMAIAHKLLIAAFHMLTTGETFRDLGESYLDQVTRKRSTTRLVQRLSNLGYDVVLVPKAA

SEQ ID NO: 80197 - protein, 326 aa, unidentified
MRLRLRSASRRNPIQFPTNIGRPNPGDANKIQGCDYHPGFQQIAFVDTETGDYGEQRLAHSEGAEKFYRDLAAQGKKVRVGMEASGHARWFERLLTELNFELCVGDATEIARKRERKQKTDRQDAQHILQLLMENRFPKIWVPSGENRDLRQLLWHRHRMVQARTRIMNQLQAVALNEGLRCKKKLWREKGRQQLEAFRLAPWASRRREDLLQLLDRLNPTISDLTQAIEQEVEKCPEARRLRTHPGVGALTALAFVLIIGRAERFQCGKQIAAYLGLVPLEDSSGNRRRLGHITKQGVRYCASCWWKRPKLLRAAFQNGAISMSI

SEQ ID NO: 80198 - protein, 412 aa, unidentified
MDIVSERVAGLDIGKEEVVAAVRTPGRGAQRREEIRTFPTFTASLEALGEWLTAEGVTQVVMEATGQYWKPVWYVLEGRGDVELLLVNARHVKILPGRKTDVSDAAWLAELLEHGLLRSSFVPPAEIRRLRDLTRYRKRLIQTHTAECQRVQKTLEDAGIKLDSVASDVLGVSGRLMLKALVAGERDPDTLADLARGTLRNKIPALRQALYGRFEDHHALLVGLALEHLEQLEAMIAQLDAQVDRVIAPFSTARDHLDTITGVGKRAAECIIAEIGTDMTRFPTAGHLASWAGLCPGNNITGGKRKSGKTTKGNRWLREVLDQCAWSATRSRNTYLAAQFWRLARRIGKKKAAIAVSHSILVIAWHVLSRDQDYHDLGGDYFTRHTDTDRHRNNLVKQLQALGYAVTLRPAA

SEQ ID NO: 80199 - protein, 425 aa, unidentified
MNKDVLSTLFVGIDVSSASNYFCAINFEGKHILDFSTTNDLPSSELAIEKIYNSLKSNDLKFVTMVLESTNVFSFHIANLLASNNSLFNFNSKVFVINPKESSNFRKTYSDMDKTDPKDAFVLADMARCGRIKQQHYKASQLFALQRLTRQRFHLVKTIMREKAYMMSNIYLKFSSLYIAKKEDEPFSDMFGNTSKSIISDFTPDDIVNMSDDDMINFIMDKGKSRFSNPEQNVKLLKKIARDSYRLDKLAYDPINVAISSSFNTIKALEDNLKVIDKAIEKNVKGLCDNEFTILKSIPGIGDVYAAGIISEIGSISFFKDNNTLAKYAGLTWRKTQSGSFEAETTRMTKTGNKYLRYYLIEAVSSVKNHSQDFKDFYTRKYSEVSRGAHKRALALSARKLVRLIFGLLHHNQLYSTNKMDNRAN

SEQ ID NO: 80200 - protein, 343 aa, unidentified
MQYFAGLDLHKEFIQAVVVDSQGKKVKEVKFMNNTQALDAFLNSVSPETEFALEACSMYEPVYDWIDDRNFGVTLCHPKKVKAIASAKIKTDLIDATTIAQLKRCNLLPESFVPAKHIREVRNIVRHRASLVRHRARIKNAVQSLLLKEGIKHPFSDLFGKAGLEFLKKVPLKYSNRLALENYLAILSSMTEKIEIAAANIDAVVDSTPKVKLLTTMPGIGKYTALLIASEIAEVKRFPSAEHLCSFAGLVPSLHQSGMELRRGHITKEGNKLLRWALVQSAHKAVVADPHLKKIYTKLKQKKGSNIATVAVARKMLSYIYIMLTQNLEYNQLKVVSGGKARE

SEQ ID NO: 80201 - protein, 427 aa, unidentified
MKNSTARKLEQIPADYLIVGIDAHKKKHAAVIKTPDAFTRAKFKVENSRPGFEELLERVQSQMTKTGCKGAIFAIEAGGRYWRTLAYFLEERELPFRLISPFTLKRRREGEDIDRKKNDYRDADMAAELLRTGKFTETKLPQGNYADIRAAYHSYYRLGRERSRATNLLSALLDSLFPEFHTVFKDVSAKTGLAVLATYPCPHTIAGMTMEKFMDTMLAKYKGQHIIRKKLSEVYQAAQRSVGIQAGAGVISFELSLLIERVRLLTEHRQKAEDLIIALMEWIPESKYLLSVPGLGYITVAGILGELGPLTHYRDAKQLIKMAGINPTQSDSADKKGSRTPMSKKGRPLLRHCLWEAALNLLRYNEEFKAWAKRLQERPLHQNPLKKREARGAVCRRLLCLVFALFNKRSFYQKNYKIETEVELVTA

SEQ ID NO: 80202 - protein, 309 aa, unidentified
MEHFVGIDVAKDRLDVHLRPSGETFAVARDGEGLAQLVDRLQTLAPQLVVMEATGGYETIVASAVVAARLPLAVVNPRQIRDFARATGKLAKTDRIDAAAIAHFAEAVRPPARPMADAEARALGELVTRRRQVIEMMVAERNRRRRVTQSRVLRAIDRHLELLQTELSELEHDIDGAIRKSPAWQADADLLASVPGVGKATLRTLIAELPELGRLDRRKIAALVGVAPINRDSGTMRGRRTIAGGRPTVRSALFMAALVASRANPIIASYYVKLRAAGKTGKQALTACMRKLIVILNAILRDRKPWQPA

SEQ ID NO: 80203 - protein, 357 aa, unidentified
MESQEVKYVGVDCGKKSIEVVRINSENSLERRQFSTTESGINNLLQWLTLNDIVGLEAGSQSFRIAKSILNKGVQVIVLNPGNLATIYQSLKKTDKEDSLKIARLIQRFPIEELPVVPIPNDEEEDNRRLCTEQENWTRQLTQSKNRLHSLFTQAGLTHITKKHLRTKANREISVALLPSRYQKEAERILKVLDLVEQNLKLIEKEIQEALKKNKAYVQTIMSMPGIGMITSLAIMSYMGDCKRFSSAKQAAYYAGLVPRVDISGDTVRYGRIINRGCHSIRRVIVQAAWSLVRCQHGGKVKEFYQRLYLKKGAKKSIIATSRKMIEVLYVMIRTGKLFDSMPENILNRKLTQYGLM

SEQ ID NO: 80204 - protein, 345 aa, unidentified
MKITTVGIDLAKNVFQMHGVDDRGRAVLRKQLRREQVSKFFGNLPPCLIGLEACASAHHWGRTLQGFGHTVRLMAPQFVKPYVKTNKNDVTDAEAICEAVGRPNMRFVPIKSIEQQAILSVHRVRQGFVKARTAQANQIRGLVGEFGLIIPQGIGHIGKCVPQLLEDASNELPGTFRQLIDRLTRHLRELDLQVKEFERQIIDWHRGSELSRRLEKIPGIGPLAASALVASIADANSFKNGRQVSAWLGLVPRQHSSGGKATLLGISKRGDAYLRTLLIHGARSAIRVAQLKPGNTNIWLAKLLNRRHQNIAAVALANKNARTVWAMMAHGREFKADYISRVATE

SEQ ID NO: 80205 - protein, 389 aa, unidentified
MKIYVGIDIAKLNHFAAAISQGGEIILEPFKFTNDADGFQLLVSKLESFDKNSLIIGLESTAHYGDNLVRYLVTELYQVCVLNPIKTCQMRKNNVRKTKTDKVDTYVIAKTLMMQDNLRFVSFFDLDMMDLKALGRFRQKTIKQRTRLKIQLTTYVDQVFPEIQYFFKSGLHQHAVYALLKEAPSPKEIASMHMTHLANLLKVNSHGHFTKEQAKELRILAQKSVGANDSAISIQITQTIQQIELLDSQLEKIEAEMTDIMKFNDSVIITIPGIGYINGGMILGEIGDIHRFSNPNKLLAFAGLDPSVYQSGNFQAKTTRMSKRGSRVLRYALVNAAWNVVRNNATFKAYYDAKRAEGRSHYNALGHCSGKLVRVIWKMLTDNVEFNLK

SEQ ID NO: 80206 - protein, 464 aa, unidentified
MPSAPTHRKRTLDELACVHPNAAGLDIGSEEIVVAVPPDRDLQSVRVFQTFTADLHALVAWLVACGIDTVAMESTGVFWIPIYELLEAAGIVPYLVNARHIKTVPGRKTDWNDAQWLQKLHALGLLQGSFRPDAEIRTLRTLARYRAELIERRAPHINHMIQARKHMNIQLNLVLTDITGMSGMAMLRAIIAGERDPMQLATFRQPGCKHSEAEIVKALTGTWDDGQLFILQQSVALFDDYTTKLGECDAQLERQYQAMVSRGEPNAVLPDLPPAKGDSKSKNAMTFNARAQLARVIGVDLVAVMGLSAITVQTIISEIGTDMERFPTVKHFCSWLGLAPHNDISGGKVLRSRTMKVHSRANQAFRQAAHSVTRSHSSIGAYYRAMRARLGPKQAIVATAHKIARIVYHLLKTGEPYREESDTEYERKRQERELKHLARRAHKLGYTLTAVPATAPKAQSEGGG

SEQ ID NO: 80207 - protein, 446 aa, unidentified
MKRTKKMQENGHRISGKTIIGIDPAKNKHQAVILRPDGSVCGRSFSFETNHTGFTETLPRRIEQRLATPTDVVYAIEGSCALWQNLAFHLSEQGHEVVLISPLATYHARPSITGDFSRTDSKDAELIARLAQQGSYREMPGHSDHERALHRMAICYDKLRKSRQRHYARLRALVERLFPEFLSVLTLDTKTARYLLSEALLPDEFLSLETGRVVVGMQRASRHQHGQATLLRLQELARHSVGQTRGRAERGVEHLVAETWLAVLERIETQIKTLTEALVEAASESPCFAPIKSLRGISSLMAALFIAELRDPGLFTHWKQIEKMAGVNLYVSDSGQYRSRRRISHLGNSRLRWLLYQMVSETSKYVPEVRIKYLTRRLKHGGSRTKHLVACIPQLLQLLMALMCQGRCYEQRPASLAQMQQLETRYQAVQKSKGKRRAQGTRQKAA

SEQ ID NO: 80208 - protein, 438 aa, unidentified
MSNKVIFNLDEPFISVGIDVGADFSWMSIALPNQQFVGKPYKILHNSIDSLTTAVSKIKEAEELYSLESRIFLESTGIYHYPLFCYLRDKGFNCSVINPIITKNSTNINIRKVHNDRFDSKKAALVGLKPDLKVSLMPSDLALNCRNLCREYYDLMDNRSAYVNKLQGELRMAFPQYLGIFSKVTINTSLTLLETYTSPSAFLEADKQEIIDIIKSTARFGLTYAQNKYNAIIQAATDANQFGYIIESNIKRIRLYISFIRKYDEEINGILESLHELVDANEDADFVKQIHLIETFKGAGFLSAVSIMGEIGDFSAFSKPKQLFAYFGLDPAVKQSGKFEGTKVQMSKRGSAIARRVIHTLTLQSISISRNREAKNPVLREYYLKKCDSKPKLVAMGAVSHKVCNMIFAILRDNKPFKIIAPQEHIKQYNAAKCDIAA

SEQ ID NO: 80209 - protein, 360 aa, unidentified
MDVHKETIVLAGMRDGNQFAEFERTIRNEPGQVKKFFQRLSERETNMFTCYEAGPTGYTLYRQLEELEIPCLIAAPSLLPRKPGDRVKTDKRDAFMLVRNLRNGEITPVHVPAEEDEAVRDYLRMCADMKTDLKKCNQRLLQFLLRQGKKYETGRNYWTLAHRRWLKSMEFAHSLQQETFDEYYTAICELEEKIARMEDRIEELGAQQRYAQQVSKLKCFKGINTLSALSFVVEIGDFRRFKKAHELMAYLGLVPSEYSSGVSRRLGGITKAGNSRLRRLLVEASWHYRHQYTPSKRLAARRKGQEVEVIAYADKAGRRLTRKFNKLVYRGKRSQTAVTAVARELSGFLWGMMTGNTSAA

SEQ ID NO: 80210 - protein, 421 aa, unidentified
MFKIFRKNCCGLDVHKTWIYACVGITDENGRTAYHQSRFSSFSRGLRELAEWLAKHECVEVCMESASKYWIPVFNILEKTCHVTLSHPKYTKPQKGNKTDRKDAKWICDLFMCDMVKPSFIPPPDIRHLRDLMRYRFKLTNILTGEKNRAQNCLTVSNLKLDDVFSDVFGKSSMSITKYILDHPGEQFDVAPFIDRRCKKPIEEIQAAVDGSISLEQAAKLREIFRHIEEIEIHKLNIESEILRLAEPYLHQLDLIHSVPGFFANPMTAIALISEIGVDMSVFPTAKNLSSWAGCCPRNDSSGGKRKSTRISRAGVYLKPLLIQVANAIVKTDKYPEFRDRYRRIKSRRGHKKAIIAICRMLLTAIWNILSKGEPYDSAGYLVNRFIPKGDTFITRAQALNYMRSRGFVIFDDSEPEEALT

SEQ ID NO: 80211 - protein, 347 aa, unidentified
MSYFAGIDLHKRYLTLCVLDRIGNVVVQHRRLTTDGLFAVLAELDGSITVAVEATLHWAWLYDRLVAQGYAVQVADPGQVKLICKARCKTDPIDARKLADLLRSNLLPAIWVPDPTTRANRKLLRGYAFLVRSRTRIKNRIHAYLAEINLASPATDLFGKQGRIWMDSLSLPDEVRFQVDGLLELLDQLELRIRKVAKRIEQRVDMTPEAQLLLTVPGIGAKTAMLIMAEIGDISRFPSSHDLTSFAGLVPTTRSSGGKTTHGSLPRAGSPWLRWALVETTQTLKMKPGPVRAHFTRLTRAKGNSKATVAAARKLCCYLFWMLKEGRTYPEWLHNRHSNHLLEVRPT

SEQ ID NO: 80212 - protein, 347 aa, unidentified
MLADQLDYIVGVDPHRDSHALVVLHVISGAVVFEAAVSANSEGYAQALELVDQHAAGLRAFAVEGTGSFGAGLTRFLTGQGERVLEVSRLRRERRSGGKTDALDAIRAARSVLAQERPATPRAGGERQALQALVAAREGAVNAKRAGLCQLRDLLITTPEPLRSELRPLTRARLLQRLAATRPDARRDPELRGSMLALRSIARRVLQLTAEERELAREIETLTRKLAPQLLEQPGIGPHAAAQLVLSWSHQGRITSEAAFARLAGAAPIPASSGQTIRYRLDRSGDRKLNRALHMILVTRKRSHPATIAYIARRVEQGKTRREANRCLKRYLARNLYRLLEHPPMTT

SEQ ID NO: 80213 - protein, 443 aa, unidentified
MSKKRSVHLRGERGQAFADLIRGISPEKILCVSLDISKYFHVAMIHNGLGEIVTPTFEVDIYQSGFDQLCQKIEQAKSCAQAEVVLVGMEPTSHYFENLARHLLQRSQAVKLINSFAVKQNREQQLMRREKTDQIDVAAIGDLLRRGEGTAYKPATGIYLQLQQIDRVRLGKVKIAGILKNQIIAHLDRIFPGLVILDDAAKERCVPLFNTDFWQCQSLQDLIRVCPNPHELVAMSPEELVQAFHAQHRRLGPATAAKIIAQAHKTLLPDPELAAVRCELLQHDLALLETVQAHITLLEQRLTELVAHTPYQVCAKLKGLSIVQVASLAAAIGDPANYSDASQVFRRSGLVSGRNDSGNHQRKGKGNHVLKTGDVYLRRALMNAVATLILHQPSLARYNKQLQMTKPAGVARVATARKTIGILWAILRDQSSNTLIFCKGADM

SEQ ID NO: 80214 - protein, 451 aa, unidentified
MEQEVISMEIVNPQAAGIDVGSRSHWVAVGQSEKDIREYGVFNEDLFAMADWLEQQKIRTIAMESTGTYWQNLYAVLLSRGFHVILCNGKFTKNIKGKKTDVKDCQWIQKLHSLGLLSSSFLPDEQTEILRTYSRQRANLIHSSAATSKKMQKYLRLLNLRLDVVVKDICGLTGLAIIDAICKGENNPQKLASLRHGNCRKSEEEIAKALHSNNRKDYLFALKQELDTYEYLQKKIVECDLEIEKQLNKIIGDDDNKKQHYIDPKPHKRINKNTPKNIDLNLKSYQMFEGSDLLAIEGMSYSTVLALMSEVGIEGIRKFRTAKHFASWLRLAPNNKVSGGKVLSSRVPRGSNRLKIALRNAANAIGNLKESTPLRDFFHRINFRKGRVSAISATARKLAVIIWNMVVKGVPYVNPEGYLFLDQKRKLGLVKRIKKQIDKFALTNKDLGLST

SEQ ID NO: 80215 - protein, 335 aa, unidentified
MHKQGGKRKLEAAVGIDVGARELAVAMVDEGGWQERVVRNTAAGQRELLAWLRARGRRVRVCLEASGNYGLDLALALKARAEVEVSVVNPRQVRRFAESLGERNKTDGVDARVLAEYGRRMQPAPWQPPSRSALELRAITRAVAALTHISVQQQNRRHAAQAAEALPPLVRRELERHLRDLERRIRRLRQAARKLIAGDAELEGCYRHLLSVPGIGEVSALQILGEVATLPGMLDARQWVAYSGLDPRRYQSGSSVARPPRISRSGNQRLRAALYMPALVAVRHEPHLRAFYQRLIAHGKAPLAALTAVMRKLLHGIHAMFRRDENYCGSKLCPA

SEQ ID NO: 80216 - protein, 355 aa, unidentified
MESVKYLGFDVHQSTISVAVVNADGKLVMQSVIATHAATILDFIHGLRGTLHLTFEEGTHSAWLYDLLARRVARVVVCNPRQNALLKAGNKSDTSDARKLAELLRAGLLAPVYHGEGSTRTLQELVRSYAALTEDTTRVMGRVKALYRSQAIACAGKKPYGRRHRREWLSKLSEAGLHRRAERLYEELDALQGLRRAAKRELVLESRKHAAAKLLRTVPLLGAIRAALLIGRVQTPHRFRSKRQFWAYCGLALETRSSADYRFEDGQLVRAKKPVFIRGLNRNHNHDLKNLFKSAATTASALHGPFREFYEGLLAKGMQPAMARLTLARKIAAITLSVWKKGESFDAEHLKPQAA

SEQ ID NO: 80217 - protein, 317 aa, unidentified
MSAPAASFVGIDVSKQQLEIAVRPSGETWTAAHDEAGLSALVARLRDLTPTLIVLEATGGWEVAVAGALAAAALPVAVMNPRQVRDFARSTGTLAKTDRLDAQMLAQFAEAVRPEPRPLPDVQAQELTALLQRRRQLVEMLTAEKNRLTVASRRIRPQLQAHIEWLHKQIAQFDEDLRQLIRASPLWREKDDLLRSTPGVGPVLATTLVAALPELGLLTRRQIAALVGVAPLNRDSGTRRGRRAVWGGRAQVRAVLYMSTVVAVRHNPVLSAFYQRLRAAGKAPKLALTACMRKLLTILNAMLKHHTRWVPTLAQHA

SEQ ID NO: 80218 - protein, 416 aa, unidentified
MKIVRPICCGMDVHKNIIVATIGITNKKTRITEYIQETFSTLNPDLLNLKQWLINHKCFDACMESTGKYWIPIFNILEDEINIYLTHPKYVKAIKGKKTDKKDSKWICDLFKHDLIKFSFIPPKEIRALREISRYRYKLVGMRSSERNRYQNCMTVSNIGIGSVFSDPFGKSAQAIMKEVLESDIIEDEKILKCIHGSCKNKDKILDSIKHCNIETDQRFKMNESMTHMEELQVHIDNCEIEMMKRAAPMFDQFMHITQLPGISTLSAILIISEIGVDMKQFESDKQLTCWAGLAPANNESANKKKSVRISKAGQYLKPLLVQCALGAIKDKEGYFGIKYSRIKKRRGHKKAIIAIARMMLVSIYHMILTGETFNPSDYESFRNPKPPIKQQDLTEESAIEFLKKSGFDVSKLAKQ

SEQ ID NO: 80219 - protein, 417 aa, unidentified
MRIVRPICCGADIHKDLIVATIAATNQDGVTEYIQSSFSSQNFDLVRLKAWLIEHHCFEIAMESTGKYWIPVFNVLEGEIKVFVVHPKYTKAIKGKKTDKKDSKWIADLFKHDLLKFSFIPPKEIRELRELSRYRIKLIAMRSSERNRYQNSMTISNIGLASILSDPFGKSSRAVMKEVIRSSSVTEEKISKLLERNAKKKVKEVLQSLVGSHIESDQRLKMNIASQHMDQIDSHVRRLETEMAIRCIPYATLINLLLDIPGISYLSAMTIIAEIGTDMSVFETSKQLSCWAGLAPANNESANKKKSVRISKAGSYLKPLLVQCALAAINSKSNPYYRIKYNRIKKRRGHKKAIIAIARMILVNIYHILSTGEVYSPCDMEQIINPKPVKKVMTIQNAIEFLQSQGFDTSKLISSSS

SEQ ID NO: 80220 - protein, 355 aa, unidentified
MIIIGTDYHPSFQQIALVDTESGEFQEKRLTHREEAESFYRALAGAEKKVRVGMEASGYARWFERLLTELQIELWIGDATEIERKRARKQKTDREDAQHILQLMLKDDFPKIWVASWENRDLRQLLWHRHRLVQARTRIMNQLQAVALNEGLHYKKRLWRGSGRQPLEGFQLGPWASRRRRDLLELLDRLNPTIEELSQAVEQAAEKCPEAQRLMTHPGVGALTALAFVLIIGNAQRFECGKQVASYLGLVPLEKSSGQRRRLGHITKQGNSILRFLLVEAAQATVRKDPEWRSKYFHLALRRGRNIAKVAMARRLAIRLYWMWREGQEYQQTKSSVRTQDSPEIPMVCSRTPSY

SEQ ID NO: 80221 - protein, 383 aa, unidentified
MDKESSSQQKLYLGFDVSEKSIEVFGVCGTQSTEKAIRIENSRSSIQSLLTHLKDKEQVCIVMETGTHSTWMSRYIREIGFEVIVAHARDLALIYGASKKNDRIDAEKLARLAQADRKLLHPIEHMSEERQQDLMIIKCRALLIKQRTQLINTIRGMLRTFGIKDHSTSVRNVKNFELSNLPSQVITALSPLLQQIRFTEMQIRYYDREITKLYKKYQVTEILRQIRGVGPAISLTFVLLVGDISRFPDPKRLAAYFGVVPKQDQSGETDKQTNITKAGNSLMRVLLIQGAQYILGPFGTECDLRDYGKRIEARGGAIAKKKARVAVARKLIILMHRLWSNPEKEYIPCFKALNREKHIKLRKVLEQQGYRQGIIHNPLTNLV

SEQ ID NO: 80222 - protein, 401 aa, unidentified
MKEFNPERHRIETASALEVVTSAGHQEHHAAYVGLDVHKEAIAVAVAEPGRAEPVYRGEIANKPKSIEKLIGKLSAAYDGALLQFCYEAGPCGYVLYRQILACGHDCQVVAPSRIPRTPGERIKTDRRDALKLARLLRAGDLTAVWVPDRDQEMMRDLSRARDDMKGQERKARQQLNAFVLRHGHHWPRGKSRWTPAHYNWLESLRFERPWQHVVLHEYIDAVKAASARVAQLNDHLMRALPEWSLAPVVDSLIALRGIDKLAATVLLAELGDISRFDSPRELMAFLGLVPSEHTSGPRRRQGGITLTGNGHARRMLVESAWSYRFPARQTMHLKRKAVNASELAKKIAWKAQVRLCGRYRTLTRAGKNTKVVCVAIARELAGFIWDIVRQQMARPAPQAA

SEQ ID NO: 80223 - protein, 281 aa, unidentified
MKIVGCDLHARQQSIAMVDTETGEFTEKTLCHEGNAVRAFYASLEGPVVVGIEATGAMQWFLELLDELGIEGRVGHPAKIRAQETRKQKHDRRDARLLLQLLSEDRFPEIWMPSTEQRDLRTLLRDRDQWVRMRTRVQHRLQAIALNHALRQGRALWSATGQTALEALPLPPYTRQRRDELLALYAQLQKRIQELNKEVEAQARQRPPARRLLTHPGVGPVTALATDVFPGDPSRFASGNQVASYIGMIPSERTSGKRQRLGKMSKQSNALLRYLWTEAAM

SEQ ID NO: 80224 - protein, 343 aa, unidentified
MQAVTTIGLDIAKSVFQVHGVDAAGQVLIRRQLKRRAVLAFFQKLPVCLVGIEACASSHYWSRELQALGHSVRLMPPAYVKPYVKRQKNDMADAEAICEAVARANMRFVPTKTPEQQSCLMLHRTRHLFIRQQTAVINSIRAHLAEFGIVAPVGRKGVTELLHIVADPSDKRVPEVARACLAALGNQLLSLKEQIVEFDRMIMVWHRSNETSKRLHYIPGVGPMLATALVASVADPRTFRSGRNFSAWIGLVPKQHSSGGKDRLGSISKQGDRYLRSLFVAGALAVIRYAKVHGTKHRPWLTALLARRPTKVAAIALANKLARMAWAMMAKGERYRQPVALAA

SEQ ID NO: 80225 - protein, 355 aa, unidentified
MDSVKYIGMDVHKEAIVIAVLNSSGKLVMECVIETKAITIVDFLKGLRGSLHVTFEEGTWAAWLYDLIKPHVTELIVCNPRRNALLKEGSKSDRIDARKLAELLHSNLLRSVYHGEHGVRKLKELARSYLAISKDLGRVMSRVKAIYRSWGIPCGGKQVYAGRYRSQWLGKIQEAGVRRRAEFYYQQFDALRVLRQEVRRELLAEARKHDAWKLLRGIPFIGPIRAAVLIALMQTPHRFRTKRQLWTYSGFGIETHSSAEQRFINGELRRAKKPVSIRGLNRNHNHDLKSVFKSAATVAAAKAGPFKEFYDALVAKGIRPEMARLTLARKIAAVTLMVWKKGVLFDAQHLKPQTA

SEQ ID NO: 80226 - protein, 351 aa, unidentified
MLYLGLDVHSKWMTIRGFDPATGEVVEVKRQPNDEESLAECFGSLPGPLYGVMESGTNSWAVYRILEWYFEKLIVVDPATVWGKQVRRGAKTDRRDAMKLALKMHRGELEPLYVPDVVTQDQRVLGRGKINASRRVTKLVNEIGSLLRSWGIIVDCSLLSKKGQELIESSKAKLPKHSLKVLELSLAMLKMAQEAEDELERAVEAEAAEDEDCQRLMSIPDVGPLSALVVKAEIGDINRFAGAAALVCYSGLSPSLSQSSDSIYYGKLNKFCNKFLKYVLVLRAQGMARSKKENPMRQTYWRVALRHKSNHAKIAVARQLARVIYSMLKKKECWDASKITQRRGSRAPTAA

SEQ ID NO: 80227 - protein, 338 aa, unidentified
MKLYAGIDLHSNNSMVAIIDEQDRIVLQKRFANDLKQILLALASFEQHLRGVVVESTYNWYWLVDGLMEAGYTVHLANPAAIVQYQGLKYSADEHDARWLAHLLRLGILREGYIYPREARAVRDLMRRRLQLVQTRSSQLNCMQTQYMRSTAQRPSSNALKRMRPEEVDAQLRQPNVASGIRANLAVVHTLSGEIARLEHEVLEQVRLAAQFEPLLSIPGVGRILALAIMLETGEIGRFERVGNFASYARCVQAKRLSNDKKKGEGNSKCGNKYLSWAFVEAAHFAVRYNAHIKRFYQRKAAKTNAIVATKAVAHKLARAAYHVMREGVPFDETRAFA

SEQ ID NO: 80228 - protein, 406 aa, unidentified
MSMNAVGIDVSKRKSTVAILRPGGEVVASPFDVPHLSGCFQPLIQHIRALNGQTRIVMECTGRYYEPVARQLSQAGFFVCAVNPQIIHGFQGQDNPLRRVKTDKADSIKIARYTLDNWANLKQYTLMDELRTQLKTMNRQFDFYMKHKTAMKNNLIGLIDLAYPGANTYFDSPAREDGSQKWVDFLDTYWHVDCVRKMSCNAFTLHYQKWCCRKKYNFSRLKAEEIYETAKELIPVLPKDDFTKRIIKQAIQQLIAASQTVEQLRILMNETAAKLPEYPIVMAMKGVGPSLGPQLMAEIGDVARFTHKGAITAFAGVDPGVNDSGDYSQKSVHVSKHGSPALRKTLYQVMDVLIKTKPDDPVYLFMDKKRAQGKPYYVYMTAGANKFLRIYYGRVKEYLASLPASE

SEQ ID NO: 80229 - protein, 345 aa, unidentified
MLYVGVDLGKQSSQIAVVNEAGEIQSEAKIKNQKEKILKYIKYLDEPAEVVCETGSRSFWLADMMKEKEIPVHVAHAYKVKLIAEARVKTNKVDARVLGQLLRAKFIPEVYVPSPEMRMWKEVVRGRGGLIRMRTQAYNKIHSILDRNGVEYEGKDIRGKGARSWLESVELPEPTRRVLIEYADLVGQLNEHIGDFEKELKERIKQDEEMLRVVGLLSSIPGIGWLSAITFYLELADIGRFASVKKLWGYVGIVPGVHQTGDMVQRGGRLTKQGNSLLRCLIVEDAWVAIRYDHFYRHLYKRHLIKIGKTRAILPVARALLYAVFRVWSEGKRYEEIFQQQQRVG

SEQ ID NO: 80230 - protein, 356 aa, unidentified
MLNSNKLDFTGQPIYIGLDVHKKSWSVSIHTALCEHKTFTQPPEVDILVNYLRRNFPGATYHAVYEAGYSGFWAHDQLTEKGVACTVANPADVPTKDKERRTKRDRIDCRKLARSLRAGEIEGIYVPCREKLEDRSLVRTRQSMVRKQTRCKNQIKSLLLFYGIGLPEEWAERRWSGPFVKWLESLPMKRASGEVALRIHLDELKHLRQILARLDREIRVLAQTGEYVVQVRLLRTIPGISTLTAMILLVELQEISRFRSLDELASYVGLIPDTHSSGETEHTGSITQRRHAQLRACLVEAAWVAVRKDPALLMAFQESCQRMRKTRAIVKIARKLLNRVRFVLKNQTPYRMGVVQ

SEQ ID NO: 80231 - protein, 331 aa, unidentified
MQNQTHVGIDVSKDRLDVAIGSDGELWQVSNDSAGHSELVERLGGVKPALIVLEASGGYEAVVAGVLWDAGHPVAVVNPRQVRDFARGMGKMAKTDQIDARVLALFGEKVPVEVRTPLDAEARELQTMVLRRRQLVEMLTMEKNRRGLVPTGRARKSLDKHIAWLEEAVRRASDDIDQAVRQSPIWREKEDLLRSVKGIGPVSARTILVELPELGRLNRKKIAALVGVAPFNQDSGRFKGQRRIAGGRSHVRTVLYMAAVTAARHNPLIRPLYQRLIAAGKKKKVAIVACIRKLLTILTAMVRDGAHFSVTPHPIPLPTAAAAGRGGKISP

SEQ ID NO: 80232 - protein, 353 aa, unidentified
MAIFIASDFHCKYQKVAWMDDTDGELHIADVHHQDVNEVARFYRQFPRGSILGMETSGYSHWFEELVVGLGLELRIGNSQVIASKRPRRQKNDQLDAEQMLCMLLENRFPTIWRPTPENREKRVLIRQRCRLVKMRTQLINALRALLYNHNLHLKRGQLSKKRRQQIADLPMSPILDQQRREMLGLIEQLDASVKSKEAQIERWARQDQEAARLLTIPGVGPCTALTAVLILGPVGRFPSAKKVVGYVGLDCSEHSTNNVHQKRRYGQISKQGNKLLRWLLTEATGSAIRTDAQRKRYYARLKYRKDWRVAKTAVARKILVCIYVLLRDGIDYPEFLRRGPGFGMPAETAGRK

SEQ ID NO: 80233 - protein, 312 aa, unidentified
MAILSFCGIDVSKDRLDVVVLPEGRFCSVSNDAAGWAELVARLHPLTVSAIGLEPSGGYERGIIRALLAAGLSVRRINPNKLRQFARARGILAKNDRLDARLIAEYVAIMPTRVVQRDDAVERLAEIVTMRRQLCDEHVAVENQAAHLEDAMLRRLSKRRLTRLEADIRLLDRRLAEMVATNAAFARLYDLLTSMPGVGAVLAFTLIALLPELGKMSRKQIAALVGLAPYDFDSGKLRGHRSIFGGRMPVRNVLYMAALSASRYNPALKAFSNRLAGADKKSKVIIVAVMRKMITTLNAMLRDNAAWQLKPT

SEQ ID NO: 80234 - protein, 338 aa, unidentified
MTYIGFDHHKKWTQAAAMNDQGRIIREMRVLNDSNSLKGFLKGLPKPLKGVIEAGPTWGWIYDTLGELGVKMVVANPSAVRAIAEAKIKTDKIDARMLASLLRVGLIPEVYVPTEEVRAQKMLWRERIWLVRMHVRLKNRIHRLLNHYHVELPEFSDLFGAAGRRFLEGLELPDPGNRILKAQLKLLQSYRLQIDEVQRWAVKATQGHPNRAYLESLPGFGKVFAPIVALEIDDPKRFANPGKLASYCGLVPSLYSSGGKSWQGGIGKQGNHWLKWAFIEAAWAAIRSSAYFRLVYQRLRQRKTAQVSIIACARRLCEIAYHLLKERRCYEERPYRYA

SEQ ID NO: 80235 - protein, 367 aa, unidentified
MNQQTSATSETLIKGRDIADFSGKTIFVGIDVHLKDYQVAKVYNGVCLGNHRMKADSATVIHHLRSHYPGADFKCVYECCAWGFELQRQLTSAGIDCIIVHAADVASSDKEKRRKADKVDALKLARQLACGELKGIHVPEESLQKERNLIRYRGRLGGDVNRIKNRIKSLLKYQGIEVPGQYSKNNSSNNFMTWLEEQALKDPLLAETLLLMVKQLKMLRQLLLETEKRLRVLRNTKYAAQVKLATSLPGIGVGTAMYFLLEVGDVRRFRGFDALNDFIGFCPDTGSSGETDRDLGITTRRHKKLRSLLIEAAWTAVRIDPAMMNSYEALCKRMKPTYAIIRIARKLLRRLRSVMITGIEYQKGVVS

SEQ ID NO: 80236 - protein, 455 aa, unidentified
MFKNNDVKLLEKRERIKDSTLVIGMDVGCEFNAMALMNKEGKVLGRYPKIYNSRKGYDYFTKIIDETKERNGLEDVLVGMEPTGHYWRKIAYFSQDQGYEVRFVRTTALKAQRELDESSPAKCDIKDAVTISNITREGKYIDTVIEDGIYRQLRTLAKLRERIQRYNTGSKHALKAVLDDYFPELKGIFWSMDAKGLWAVLENCPFPCDVLKIGVEGLATVIAKGSRRKGEARVKAEKIYAAAKETVGLKNIGIAERFRVKMLLEEVKRSTSRLKEIEEQMEVLLMKIPCAKYLLSIPGIGVLSCAVFLGELGNPRNFTNYKQVVKYAGYDPVESDSGQKVWRKRISKKGRYLLRKYLYFMSMRVIHRSPYFRGYYERKLACKNRFGQVLGKKEVLCAVAIKLIKVICALLRDEREFSNEPPQRVSRVFCNKSERLVESNLSRTELSEVEALELV

SEQ ID NO: 80237 - protein, 390 aa, unidentified
MPLDHHSEEPTAIRTNLGAIFVSLELSRSTWLITSLSPGGGEKMSKHSVSAGDIAALLSRFSELKQKAFARMGQSFPIIVIQEAGLDGFWIHRVLQSEGIESYVVDAASIATSRRRRRAKTDRIDGEALVRALLAYKRGEPRVCAMVRAPTPEDEDRRRLCRERKTLTVERVQHVNRIKGLLFSQGVSGYEPLRRNRRQRLDELKTGDGRPLPPHLKGQIGRELDRLELLLGQIKAVEAERDALLTPATETEGMPAPQAMLIDLRGIGAEFAAVVWSEGLCRSFANRRQVAAYGGLAPTPWQSGIVAREQGVSKAGNPRLRTTMIQLAWLWLRHQPNSALTQWFKERVKCNGGRLRKTTIVALARKLLVALWKYVTAGVVVEGAVMKAVS

SEQ ID NO: 80238 - protein, 379 aa, unidentified
MDHAITDTPAETVLYGALELSKNTWLLALQFPDRAQPSLYPIRGGDTEGLMGRLMAARDRWARVSGKSPSIVLCYEAGYDAFWLARFLKARGIECLVVDAASMQVNRRARRAKTDRIDVGMLLRALIKWCQGDRHVWSVVRVPSVDEEDLRRSHRERDRLVRERTAHINRIKGLLFGQGIRGINVKSKYKTLQIDKLVTGDGRPLPPRLASEITREIARLALIQEQLAALERERDQAPTPCKATEKKRVQLMSLSGIGPAIAAVMTREVYYRQFDNRRQVAGFLGLATSPHDSGDVERSQGISRAGRGQVRGTIIQAAWLWLKHQPKSAITRWFLRRTAGQSGRIRRIMIVAVARKLAIALWRFLEQGLVPQGAMLANR

SEQ ID NO: 80239 - protein, 323 aa, unidentified
MNKDIKYFGIDISHLVFDVTDFDGNYYQFKNNPVGFKKFIKLLDIDSHCVMEATGYYHYQLAYYLLESGIKVSVENPLAVKRFIQMKLSKIKTDKSDSKLICEYAKQVELKLWQGNSKHQTECLQMTRLLSVYTKQSTMLKNKLHGESVLGNPSKAVVSSLKRSLKQVQKEIKTLEEKLMILVKQVHQDVLTRLKSIPGIGNKTALMLVVLTDGFERFTSGSELCSYAGLTPVIRKSGSSVNGRSRISKIGNQKLRNLLFMCSFNACKYNKACRDIYERIVAKGKSKKLALIAVCNKLLKQAFAIAKSGLTYNDSYRSILVKN

SEQ ID NO: 80240 - protein, 428 aa, unidentified
MNYNQNEKIAQITSQTLIVGVDIAKYKHVARAQDFRGQEFKKAFHFENTNSDFNHFLGWIQQLMKDQGMEKVIVGMEPTGHYWLNLAHFLKDQRIQFVVVNPMHVKKSKELDDNSPTKNDVKDARVIAQLVKDGRYAVPNIPQGVYAELRVAKKIRDLLSVDLQAVQGQIHNWLDRFFPEFLTVFKDWEGKSALQLLKLNVLPHELSKISDHEILTHLRKAVSRAVGLSRISELKQAASHSIGILEGSTMAKLELRTLIDKYELINNRFEELDSNIDGLLEQIPGVEQMLAITGIGRDTVASFFSEVGDLSYYSHPKQIIKLAGLSLRENTSGKHKGQTKITKRGRKALRALLFRVAMPLVAKNSAFKALHQYFTTRSNNPLKKMQSLIAICNKLIRILFTIGKKQCEFSEEHMLRDIPHMAELTRVA

SEQ ID NO: 80241 - protein, 374 aa, unidentified
MNDFSKFVGLDTHKSTIAVAVADSLGGSARFYGEIANTPAAINKLVGKLCPDGEVLSFCYEAGPCGYEIYRQINRLGHHCSVVAPSLIPTKPGERVKTDRRDSKKLCRLDRAGELTPVWVPDQEQEAMRDLTRAREDMKDLERRTKQRLNAFLLRYGRIYSDGKSRWTQAYFRWLERQKFDHVVQQIVFQEYVDAVKQSETRVAGLVKEMERALGSWALAPVVEALMALRGVKLITAMTIMAELGDITRFDSPRQLMSFVGLVPSESSSGPNRRQGGITKTGNGHVRRLLVEAGWCYRFPARKTAHLQRRAEKCSSAVQAIAWKAQKRLCGRYTHLLGRGKLKVQVCTAVARELVGFIWAIACEEMNQHVPSAR

SEQ ID NO: 80242 - protein, 346 aa, unidentified
MKFYTKEHRNYCGIDLHAKSMYLCILDNKGTVLLHRNIKTDREIFLKTIRKYRDDLVVAVECTFTWYWIADLCEKEGIAFVLGHALYMKAIYGGKAKNDRIDAQKIAMLIRGGMFPVAYVYPPKMRSTRDLLRRRMYLSRKRAELLTHIQNTAYQYNLPDIENNVCRKSQRVGVAQLFPDKSVQKSIQLDLDLLDFYDTILPKLEKEISAIAKEHDADSYFRIRSIPGIGRILGLAILYEIHDIKRFPKVQAFASYCRLVKPAKESAGKKSGSSGAKIGNVHLKWAFSEAVVLFLRRNEKAKLYRARLEKKHGKAKSLTIMAHKIARATYYILTRNTVFKMEEFFK

SEQ ID NO: 80243 - protein, 342 aa, unidentified
MEIAVLGVDLGKNSCSVVGLDGTGKVVMRRRMQRDSVIKFACKLTPCVVAMEACCGAHHLGRIVRDHGHQVRLMSPEYVRPYVKAQKNDDRDAEAIAEAATRPTMRFVELKSADQLDMQSLHRVRDRLVGERTALMNQLRAVLMERGITIPKGRRKLEQHLAVMLDGDEVRLSPRVRRLVEDMRAEWSALDHRIETFDDEFAAQAKTDDAARRLASIPGIGVLNATALAAAVGDAATFARGRDLAAWLGLVPRQMTTGGKPRLLGISKRGNKYLRKLLVHGARAALPSLSASTTPLGTWLRGLLERAHKNTVVVALANKLARIVWAVLRHGGTYDATAVKAA

SEQ ID NO: 80244 - protein, 387 aa, unidentified
MEVLHECVAGLDVHKDNVVACVRTVSGDKTTREHRTFDATTDGLLALLEWLTSCRCELVAMEATGVYWMPVWRILSDGAFKLIVVNAAHIKAVPGRKTDMKDSTWLADLAAFGLLKASFVPDEEQHELRALMRTRKQLVREQTRHVQRIQKTLTEANIKLDSVISDIMGRNGRRMIEAMITGVRDPRKLAALADQRLKATPKQLYDALHGRLTDHHRFLLQLHLGQWDTLDATIKGVDREVATRVFRMDTEGTRFATAGHLVAWAGMCPGQNESAGKRKRTRLRKGAPWLKTMLVQCAWAAKRKKDSYYKAQFFRLQSRRGPQKAICAVAASLLTAIYHMLKDGTIHQDLGSGYFDQRPPEIKVKRLVNQIAKLGFEVTLQPIAKAA

SEQ ID NO: 80245 - protein, 421 aa, unidentified
MPNIEIGVDSMDKENFIYVGIDLHKETHTAVMIDCYNQKLGEITFPNRPADFPKLVTKVKKCNTDGKEVVYGLENAYGYGRALAVWLIDKGYLAKDVNTAISHQQAKHRGAMYRKSDSDDAKAIALATLNMLDKLPDACPNDAYWSLGQLVHRRDNIMKQRTRLVNQLHEQLCIAYPSYKQFFNDISRPTALYFWEHYPSRKYLKGRSVEDLRAELVPVSHNKCSTKTCEKILDAVASDKVKNNAYQDARDMVTLSIVSDLQHYDSQLAEVDKMLEQMYKMLGCTLTTISGVNVITAVKILAEIGDIKRFSNANKLAQFAGIAPLHLSSSGKGKDVATKQGNRRLQATIYFLAIQMVQVSSKGTPRNPVVRAYYEKRKAEGKTSQQALICISRRLISIIYGMLKYGTEYRMPVVENAGEKL

SEQ ID NO: 80246 - protein, 421 aa, unidentified
MSYRVAAIDIHKKVLMVVVATGAEEVADVTGEALDFECRRFGAGSSERNRVVEWLQEHGVSEVVMESTAQYWKPVWLDLEPHFGKLHLAQAHSNRAPKGRKNDFGDAKRLARRLLAGELLLSFVPVPEQRTWRTLTRGKQQLVRDRVQLQNQLEALLEEMRIKLSSVISDLLGVSGRRILTALSDGESDPVKLAQLGDDRLKCTQTELADALRGVPGPVHLAVLKLFLKRLTLLDEQIQELDKLVAEELKKHEEAVIRVAEIPGFGVDSAQQIIAQVGVDAETFPSAGEFSSWVGVCPGSNISAEQNHSSRSPKGNRFARKILTQAAQAAVRKKGGHFQSVFRRFVPKLGYNGAIWVIAHRLACVLWKILHAGVRYIEQGNETNPRAKKRRAQKLAQALRRLGYAVTLAPLTPDAHVARQP

SEQ ID NO: 80247 - protein, 343 aa, unidentified
MQMVTTIGFDIAKSVFQVHGVDAAGQVVVRRQLKRRQVIAFFQKMPPCLVGIEACASSHYWSRELQVLGHSVRLMPPAYVKPYVKRQKNDMADAEAICEAVARVNMRFVPTKTPEQQSGLMLHRTRHLFMRQQISVINAIRAHLAEFGIVAPLGRRGIEELLRVVGDPSDERVPEVVRVCVAALGSQLLSLKKQILDFDRMIMAWHRSNQTSKRLNCIPGVGPLLATALVASVADPKTFRSGRNFSAWIGLVPKQHSSGGRDRLGSISKQGDRYLRGLFVAGALAVIRYAKIHGTKHRPWLTALLARRPTKVAAIALANTLARMAWAMMATGKRYNYPASLKV

SEQ ID NO: 80248 - protein, 360 aa, unidentified
MNTKNIYRNNNQILKETLSMYKPENILYVPIEIGKFNHKAGIVNFFGDVVINPFEFPCNKHGLDFFLKKLQLAMKISSAKKIFIGCESTGHYHLNLVYHLKQFSLPVESINPRDTSRENPNKNAKSDIIDLNAIARCLISNKGARQVIPEGIYYNLQRATRTRRKFVQRETSSKNTITRFAYAQQIISYAGSSSRKFSSAEYQAENLPITHFGSVFLRTTLNQIALSLNAWSQPFHLYYTKKTLEKKDRPGIARIATGNKFVKLAFALMKEEQLYRPKGVLLDEKSYYLGLWKKILTKLDGLDLSQVPPETNYLLKIKKQLQEQYGLKIEQPKLSKNGNFIPYLSGKRSFLLPYRSNVVS

SEQ ID NO: 80249 - protein, 369 aa, unidentified
MTEQRISYAGERVYVGVDVHKETYTVTCVCHTQRVKTATVPAEPASLAASLLRWFPGATLASAYEAGFSAFVLHRALIQAGITNIVVNPASIAVAAHDKVKTDRRDSKRLAIDLADGRLRGISIPTEAEELARLLPRTRAQIVEHRATIARQIKAKLHQFGLIAPSSRRLISNRYLRERATWPLPPELGVSLTLLAEQWRFATRQLIEMRRLLRDQAKAHEETEKVYRSVPGIGAVVARTLATELGDMTRFANERALFSYTGLTPSEYSSGSSVRRGHMSRQGSSRVRHLLVATAWRALPRDEVLKEIFDRIAATRGKKGLQALLEVNLRLATTDYLSDGYNNLQTGVPLPVLLSRTVTSLSVCEVAQA

SEQ ID NO: 80250 - protein, 405 aa, unidentified
MNAVGIDISKGKSMVAIMRPMGEIARKPFEVTHNHESLFNLANQLMALGDDVRVIMEATGRYHEPVAAVLRHYGLFVSILNPIVIKQSGAGSVRKVKSDKKDALKIAKYGLDNWIVLREHTPMDTTRQQLKLFSRQYNMYMKMATSMQNNLISLLDKTFPGANDLFDSPVREDGHQKWVDFVLEFWHCNVIAELSEEDFIDRYRLWCKCNGYNFSLAKAQKVYDASWNLCPTLSICQATMMLVTSAAQGLLSVMQQRAAIKAEVINLAQMLPEYECVKAMYGVGEITAAQLMAELGDIRKFANRRSIVAFSGIDPTINSSGAYNSDSNPSSKRGSPHLRKTLFQVVSTYLKKSPPDEPVFLFLDKKRNEGKPFYVYMNAAANKFLRIYYARVKEAFVNASSLDNE

SEQ ID NO: 80251 - protein, 343 aa, unidentified
MEQYIGLDVSLKETAVAIREGGKRIWRGKCPSDPRLLADVIRKRAPHAVRVVFETGPLSTWFHHALVAEGIPAVCIEARHAQKILNETLNKTDANDADGLAQLAEAGFYKTVRVKSFDAMLSRTLVGARNQLLDISTKLSNQIRGLMKMFGLVVPPGKGAVFHRNVREFLDGQDRLAMIILPLLEAWRDIRKHIVDLDRQLLTVARQSQAVQLLMTIPGIGAVTAVSYVSAVEDPANFRTSRSVGAWLGLTPRRYQSGEVDYDGHISRRGDNRLRGLLFEAATAMLTRTTARTESSLKDWGLKLRERLGYRRPAVAVARKLAVIMHTMLKTGEAFNASAGAVA

SEQ ID NO: 80252 - protein, 332 aa, unidentified
MLTESGYKERHPQQASAKTLFDFLKKHFPDGEYHAVYESGFSGFSTYYALKEYGINCVVTHAADVPTTQYEEVMKTDKVDAAKLARSLRAGDIRPIYIREKENIDDRSVIRIRKTIQKQLSGYKARVKHLLHCNGVEIPEQFARPGTHWSRAFIKWLKEDVVLLSSSRLSLDLLVKQVETIRQTLLDATKSIRRLAQTNRYRNNYELLMSIPGIGVSVAMCILTEIYDVKRFRNENQFASYLGLIPTCHNSGEKTASGEKTFRGNKHLGPMIIEAAWIAIYRDYGLGMAYARYKQSMKPQEAIVKIARKMSNIIFSVLKNSRKYEPYRWDKE

SEQ ID NO: 80253 - protein, 343 aa, unidentified
MQNDTRIAVDLAKSVFELAVSDRPGRVVRRERLPRSQFLAFFAQQPAATVVMEACGSAHYWGRRIEQLGHKVALLPPHHVRPYVRRNKTDRTDAKGILEASRNEDIRPVPVKTVAQQVLTSLHRLRSAWMAERTARLNTLRGLLRELGVFIPVGARQVVPAVWSLVEDADSDLPDALRPSFAEACREIRDIEARIKQVERQLEAMAQPLPVVAHLLTIPGIGLLTATALFAFIGDIRRFPSGRHLASWLGLTPREHSSGLKRRLGGISKRGDGYLRTLLIHGARSVLLHARKEQPDHLREWAHKLEHNLVHNKAAVAVANKMARIVWAVWYRLEDYRRIQTAA

SEQ ID NO: 80254 - protein, 406 aa, unidentified
MELIAIYKRVIGLDVHQAKISACALVQQPDGTTIVEQREFGAFKRDRRALAQWTRSLEPEVVVMESTGIYWKSPYAALEAQGIAAWVVNARHVKNVPGRKTDVGDAHWLATLARAGLLRGSFIPQADMRHLRLIARQRQKLGGMLASEKNRLHKVLSDSGVRLNVLVSDIHGQSARAMVKALIAGQPMDQILDLAGRLQAGREKLFEALQPEELSTSHVFVLTEIMQHIEELEARISRFEQALIHGLDAWAPQLVLLQTIPGIDRMGAAMLLVEISAEMHNFGSAERLASWVGICPGNNESAGKRKSGKTRKGNAWVRRLLCEFAQAASRSRCALKDKFAALSIRKGHKKSIVALAHKMLRIIFAMLKTNQPYRERVVDYEALSVQRNAPRWIKMLVKHGFMPATA

SEQ ID NO: 80255 - protein, 376 aa, unidentified
MERGSLMLNTTTFVGLDVHARSIKAVALDAMTGEVRSATFGYDAAAVAEWVRSLDPAAKCVYESGVTGFDLQKRLTALGVDCVVGAVSKMIKPPADRKRKNDRNDAEFLARMLSVGNVVEVWVPDDGCEAARDLSRALDDAREDLKRCKQRLSKFLLRHGYVFSETTPTGRRKGNWTAAHWAWIKSISFPEKADGDALAYYVDAVRQAMEDKARLERLVEAEASKPRWKRRIDSIRCLKGIDVTSAADLVFEAGEFSRFKSARSFAAWLGLTPSEHSSGESVRQGGITKAGNKHLRRVLVESAWHYLGCSPHSKDLAKGQVPDPAARRHAAKGVRRLVERRRAMLERGVHKNKANVATARELACWCWAVGRMVENG

SEQ ID NO: 80256 - protein, 347 aa, unidentified
MSEISMIGFDTAKNVFQVCGLDVSGSVVKNIRLKRRQVLEFFEKLPTCTVALEACGASYHWARQIAQQGHIVKLVPPPFLKRFLNSHKNDARDAHALALAARDRLLRPVPMKSETEQADLMLFKVRSLLVRQYTQASNSLRGQLAEFGLTANTGTKGLQGLIEKIETGSVILPDMAVAALAVLIRHWRNLSIEIARLTASLIQQIKGNERIQRLMTVPGVGPIIACVCAAKLGDASRFACARDFAAWLGLTPKQHSTAQKRRLGSITKAGDEDLRSLLVLGAATVLIRAKRKPDGADPWAKAILKRRPFKVAAVALAARNARTLWAILRDGSVYEPRRSKTLTSHHA

SEQ ID NO: 80257 - protein, 341 aa, unidentified
MQYFGFDIHKRYTFFTQMDATGQVLRQGKLPNTRQALGDFFAGVGEPAQVVLEATMNWYHLYDLLETLQIPVVLAHPMRTRAIAEAKVKTDKVDSTTLAHLLRSDLVPRAYIPPRAIRDLRELLRYRAALVRLQTGVKNRVHAILLKHGYESPVTDVFGVKGRRWLTTLPLRPVYRHALGGLLEVLDVVQRQIAEAARTIDAEAARTPAAQRLCTLPGIGPSSALLVLAEIGDVTRFPDPKHLVSYAGLAPRVHASGGRVFIGHISRQGSSWLRWILIEAAQHAARRPGRYQELFRRIAARKGRHIARVAVARALLTTIYWMLHHDERRQCSGLPDIPMVS

SEQ ID NO: 80258 - protein, 346 aa, unidentified
MNITTMGIDLAKEVFQLHGVNQHGKMVLRKQLKRAQVPLFFANLPPCLIGMEACGSAHFWARQLMELGHTVKLMAPQFVKPYVKTNKNDASDAEAICEAVSRPSMRFVPLKNAEQQALLALHRARAGFVQARTAQGNQIRGLLAEFGFALPKGQWRIEEAVQPILEDGENGLPGMSRELFARLLDHLRHLDAQAREIERQIKAWHKNDANSQRLEAIPGIGPISASALVASIGDIHAFRNGRQLSAWLGLVPRQHSTGGTQVLLGISKRGDAYLRTLLIHGARSVLTAQKRWARGQGSWSSALARRRHPNVAAVALANKNARVVWALLARGQEYQPNHRTSMRPAA

SEQ ID NO: 80259 - protein, 340 aa, unidentified
MKKTMKFYLGMDVSKAWVDIAVLCVSNGAKQPVETGHFDNTAAGMKVMGQWLKKLKVSFDANSLLVIENTGVYHRLVWEYCSSQGLPIHIGNATHIKWSFGIARGKNDKIDSQRLCSYAFKNTDELKATPALNPVFLTLKDMMTARSRLLAQKNSMKVYLGELRRTNSKEVQLIMEQAHQAALEGIKASLKIVEKQIHQMIQEDAAILSNYKLLMSVPGIGHLTAVYIICCTNNFICKITGKQLASYAGVAPFGNSSGSSIKGRDKVHKMANKKLKKLFHMGAISAITHYPEFKDYYERKVKEGKHAQSVINAIRSKIAIRAVAVINNQASYVDNYKKAA

SEQ ID NO: 80260 - protein, 315 aa, unidentified
MSHTLYLGIDVAKDSFDVASDPAGLTLSLANDAAGRRRLVDALRDQPVALIVLEATGGYERALAADLLAAGHQVVVANPRQVRDFARGLGQLAKTDRLDARILARFAALVRPAPRQQAPEQVAQLAELVTRRRQLSDLLTQESNRLPHARHPQVQQSLRKSLRALARQIDDLDKLIRQNIDSDDGLRRKDEIVQSVKGVGPGTSAMLLGQLPELGRLNRHQIAALAGLAPWDFQSGKWAGQSKIWGGRMPVRNMLYMAALSAVRFNPVIREFYERLRAHGKEFKVALTACMRKMLVILNTLVRNDCLWSPLPKKA

SEQ ID NO: 80261 - protein, 399 aa, unidentified
MRTIIGLDVSKASAKLSVAVDGKTTYDGDITLDAVGFQSLKSIVQSYGGAEVVFEATGVYSRRLEKYLIDNSILYHILNPLLAKKRLDDGSRMRKNDVRDVRGLAITEFTKEPVPYVPRFSDPLYRELSDMSCYYDQQTEDIKREKNRVHKLIQLSFPNFTDEIDVDNISSLEVLRLFPHPDMIKGHTVTEITDIILGLELRGIGQGRARTLAERLWRAHGVSYPAIESSSFVVKQLRQQVTNIIEMTAEREVVISNMITLAKKLSEFDILLSIPSIAENTAVRLIGELGDIRRFEKRSQLNSFIGLDLTEIQSGDYVAQRHITKHGNPHARKLLYWTVVNMISSTAQPNHIRDRYEKKRATATRKKPLLVSSMDRLIKTIHYLINTNQFYSYGLARSL

SEQ ID NO: 80262 - protein, 427 aa, unidentified
MQFNTKINTIKAENKLAVAFDVGQQKLNCYSQWGDEIIHFFEDEFINRIHVIEAKLGSFYDYAVKNGFNGLHIVCEPTGGYEQKLMQTALRLGHKVSYVNGESVNKFQVVENNENDKSDPKDPRVIFKLYLNGKLVKYRQLDQEYAQLRALGRFYEQDSKCRTDVKNLIHDTLKVLFPDLSFANAFLFQTSGRALLKQFGANPYKIIKAGKTTFRRRMKKDSPRIRTKTLDRLWQDALCSVRMNMDDSIIDIYQQRIKKLWTDYLTLESNLNHIKQKMEQLYDQLLIGGEQVPVPVKSFVSKLNLARIVAQTGPFSDLASARQIKRFGGLHLKVRQSGKYKGKVKLSKKGRIDLRTIMAQSIFHLIKKQGLFGPFFHAKKENGMPGTKAMTVVMRKMVDILFALSKPAVVFDPNRLFTCENQHQNAA

SEQ ID NO: 80263 - protein, 394 aa, unidentified
MILVGIDIGKNKHTFSIIDKNSGEILLSPSDFSNNLKGFLFLIPKLSSYTKSKLLIGMEDTGHYHFALLKYLLDRRYTVALINPTTTDLTRKLQGGITKNDPLDSLTICDVISSNHRNKPYRVTTLNRFDLYEQKQLTRHHHNLKEELNTYKNRLQKCIDIVFPEFNSLFHSKYGIVYMNILKAFSSAKAIANADIRSIRKCFEFKGQGKRISLSAEQLKLTAKSSIGIPSVAEEIQIRHLVSQIELLEKQLSEIDKRIEEFSLKNNSPILTIPGISHFSGTSIISELGDICNYTKASQIIKFAGVAPYHYESSQFTAHHTAITKKGSKYLRKTLYQIILPVISNNEVFYAYYTKKLNEGKGHRCAQGHCIRKLLRVIYHLLSTRQPFNPKLLV

SEQ ID NO: 80264 - protein, 403 aa, unidentified
MISIGIDVSKLKSTFCILNEYGEVLQTAREISHTETDLNELIRQVKSFGGKDDVRVIMEATGAYSKPVLYSLIEEGIFVAEINPLAMKKYRSNINFRGVKNDPIDALAIASYGIDKWHRLKEYQKADKEYAAMKALSRQYLSYMKPHVSLTQNLDHLIDQVMPGIKDEFDGYDPATGKDRLTDFLEEFVHYDCIRSLGPKRFDERFKRWAKKKGYRPRQGKSGKIYSLAKEGIPTLAYDPISRLLVKQAAQALRSMNHVLNEILSQLRSLAKQRPEYPIIRAMSGVGDVLAPLLIAEVGDPRRYYSGSALIACVGIDVPPYESGQFKASERGITRKGSKQLRKLGYLMVKNLRKIKPVKDTAVYDYYLKKKSESKKDKQAIVAAMNKFFRIYYARAMEAYKTE

SEQ ID NO: 80265 - protein, 440 aa, unidentified
MAIRKREDEVFPNAAGIDVGASSHWVAIPAHVSEESVREFGAMTDDLSALADWLLACGVDTVALESTGVYWIPVYEVLEQRGLKVWLVDARQMKYVPGRKSDVQDCQWLQKLMSLGFLRAAWRPDGEVCVVRAVARQREVLLTEQASWVQRMQKTLVQMNIQLTEVLSDVMGMTGQAIIRDIVAGERDPKALARHRHSRIKASAEEITKALTGNWREEHLFVLAQALAMYDDIARHMAECDVKLQSLLVELGQRKIDLGKVPRAGSKLRQEFDARQTLANWAGVDLTRINGLGLTAVMKILSEIGPDLSRFANVKHFCSWLGLCPGTKISGGKVLSAKTKRSANRVRQALKMAAMSLSHSGSALGAFYRRLCGRMDKPRANTATAHKLARMVYFMLTRGEGFVDQGQQRYEEQQRQRSVAALKRRAAALGFQINPTSAAA

SEQ ID NO: 80266 - protein, 352 aa, unidentified
MVHAGLDLSRKRLDVQLLSEDGTRLRHTGVPPDRGGLDTLVSWVQEWYGQPVRGVIESMTGARFIHDQLEQLGWQVAIADAQKVKGLAPLACKTDKIDAWVLAELSRRDLVPAVWLPGPAVQAERERARWRLFLVRHRTSLKNRIHQTLITFGYQTPMSDLFGVTGRQLLARLELPEPWLSDVTASLQLIDDLTRQVHDCERALRQLGADHAYVPLLRTVPGMGWVLAYTIAAEIGDITRFASPTKLCGYTGLQPIVRQSGSRDFRGPLAKNGPRYLRWALIEAAHTAARHPVYSSRYARTKKRLGKQRGSKIAAVELARTLTEAIWYMLTRHQPFAPAGATFCLAAKTALA

SEQ ID NO: 80267 - protein, 411 aa, unidentified
MDVVNARCAGLDVHKATVVAGVRVPGPQPSARRGETKTFATTTRGLSDLTNWLLTHGVTAVAMESTGVYWRPVYEALEGSVQLVVVNARHVKMVPGRKTDVKDSEWLAQLLECGLLRGSFVPPRAVRDLRDLTRLRKALIRERGHHVNRIAKTLELAHLKLSCVVTDLMGKTGRAILHALSAGIDDPERLAECAQGSLRKKQAALREALVGRLTPHYAFLLQQHLSLIDGLDAHIATLDTRIEAAMAPFTEAAALVQTMPGVAARAAQAILAETGVDMDLFPTPAHFASWARLCPGNHESAGKRQSTTTGKGATWLRATLQEAAWAAVRSKKSYYRALYHRLKARRGAKKAIVAVQHAMIVALWHMLKHRVAHHDLGADYFDRRHTARIRRHHVRRLEQLGYDVVLVEKAA

SEQ ID NO: 80268 - protein, 334 aa, unidentified
MNKGSDGMNTIVGIDVSKTRLDCAYHTDLAANKVKTKVWSNDPAGIGHLQSWAVSKLGVGIDQITFIMEATGVYHERLAYALHEAGAQVVVVNPAQVRDYAKSLAIRSKNDRKDSVVLARFGATQPWRAWQPEPPAVRELKALLARLSALEKDLQRERNRREKAQVSAASTQVQDSIQWVIEALEQERQRLEQLIDDHINRHPGLKQDTELLESIPGVGPVLSRHMLAVFHSRAFRNARQMAAYLGLVPLEHTSGTSVRGRPRLSKTGSANIRAKLYLPAVVALRHNPHAKAFYERLLARGKSKMAAIGAVMRKLVHICFGVLKHQQPYAPSVS

SEQ ID NO: 80269 - protein, 385 aa, unidentified
MANQNDLSRSLVAFEQDNTIIAVIEMSLNSWLVAGIVPGIERHPLKKLSCDEQMLLQLLYRWRDEAVKAGRMIARMVVAFEAGRDGFWLARWLRARGIEAYVIHPTSVAVSREHRRAKTDRLDTELLKRAFLGWLRGEPDHCSMAAIPSLQEEDAKRPTRERENLVGERTRIVNRMKACLVRFGIRNFNPTLRRATERLNELCTPEGVSLPPNTLAELRRDMARLRFVMDQINEIEAARLQRLERAPAEGPHAMVRLLARVIGVGLETADMLVHEILSRKLRDRRAVARYAGLTGAPDESGSKRREKGLAKAGNARVRRGMIQLAWRFLLFQKNSALSQWYRTRTESAGKKRKTMIVALARKLLIALWRLVTTGEVPAGVVLRAG

SEQ ID NO: 80270 - protein, 396 aa, unidentified
MLYLAIDQHKNHLTINIRNEQGDVIQKGQVSTNHADIDEFFTTFAKKARKCRGYMAIVEVCGFNDWLLEKLKKTRCSEIVVIQPDHSAVNKTDKRDADALGALLWNNRKRLQGGQRPNGIRRIFPADPADAQVRQLANFRQHLVTQRTMVINKIKGIINKHNMAQDAPTELYHTKKFREWIKKVQLPVVDRLEIDTNIQSWELYDKQIDKVESELVKRSEESKEKKTDVYRLKSIPGISAMGAIILLSRIGKIKRFKNPDSLANYFGLTPGCHNTAGKHRVGGITKRGNAIARQVLNFSVIHITRKDAAMKEWPKKIKKRRGAKTARVAVMRRLATIIWHMLRWGKPYQFRYDPPVVAPKKDDLRSSKEVFGGIGNRNHSRKKEGTPLKCRGKTKA

SEQ ID NO: 80271 - protein, 482 aa, unidentified
MSIQRGKEFFAFKKNAMNKEKPKKQKTKKVLEMVVVNPYSAGIDISDKEHVVAVAEGLSDKRVRAFGSMTSDLEELASWLEACEIETVAMESTGVYWQSLFQLLVSRGFEVYLVNAANIKNVTGRKDDENDAMWIQKLHSCGLLRSSYLPEEQQDALRTLTRYRRTLTEDCSRFVNRMQKALELMNIKFHTVINDIMGKSGTAVIEAIIEGERDARNFLPFIDPRIKAIPETIVKSLEGNWRSDHLFTLKESYTMYKIYRERITACDMEIEKHLQRWEASCNEGEISAKNDKAKEEKEVKQTKKRKPKNYPPFDGRAYLKKIHRVDVLAIFGLSEIGGLELLAETGTDLSKWKNEKHFVSWLNLCPNNKISGGKLISSKLFNKHPNPASQAFRHAANTIQRSDNWLGEFFRKKKKKGGNKYAIVATANKIASIYYKLVRFKQEFTPVDITDYQAKLKQATINQLERKLSRLKAGQLSEDKVV

SEQ ID NO: 80272 - protein, 309 aa, unidentified
MSEKNFIGIDVSKDSLDVAIAHSEEFKNFANTEEGQRDLKDFISSRRPALIVLEATGGFERGVLRELASARLPVVPVNPRQVRDFAKAMGILAKTDKIDARVIARFAEAVKPEARPLRTEEEDRLDSLNARRFQIVEMLTAERNRLSHATKWTKKGIQGHIRMLERLLEEINGEMDDLIKNSPIWRQKDKILQSIPGIGKVMARTVLADVPEIGTMNRKQISALVGVAPLNRDSGKYKGRRSIWGGRSKVRTVLYMCAVTAIRCNSKIKVFYKRLREAGKCFKVAITACMRKLLVIINSMIKTETCWNS

SEQ ID NO: 80273 - protein, 428 aa, unidentified
MEQVDRIRLEQFRQLKKEIRGSERHLIVGIDVSKDKHHAFFGTATGKTLFKRLVFENSVEGVEKLLNQVERVRLEEGFREVVFGLEPTGNYHKPLGEFLIRKLAHVVLVSGVAAKENRKSLDGRWDSNDGRDAANIADLVSQGKFLFYEYPDPRLRELRSLLVLKRRLKREEHGYRVRIRNSLVAKYFPELDRYFDQSEKYALAIVRWCLDPRSLSAYRFDEFVQMIASGKRGGQQHNRLRMVLEMARGSIGCEMGPAVKFEAELMVEGLRQIRLRIGDVEKQIQDLCMEFPEYEYLLSIPGFGPDVSSKVLGAVGDPFRFENEKQVLKLAGWDLNAERSGKSSDSARPVISKKGKADLRYALYQAAMIASIKDPHFIVYYTNRLRGREREPGIKTKRRVKLAAKLLVIAWTLMKKKEPFNPDYLKLE

SEQ ID NO: 80274 - protein, 471 aa, unidentified
MPHHCHQPPAGYFWQGNADNARLRVICRFGISHGVFLTLTKKGGDETMKKTDYLSTLFVGIDIGSKINVVSALNFSQEFLIRMVPVKNAKGGAELIEQLICDALGKDPELKRIIVALESTGYYGFHTANYLSTSEKLLPFGVKVYCLNPKSVKNYKESYVDLPKNDGIDSFVIADFARCGRITIKPWKGAQYLALQRLTRHRLHITECIAREKVYMLNNIFLKFSEFAFLQKDEHPFSNKYGATAEAVLTEFTTTEEIVNSSVEDLVDMITARSRGRIANPVNTAELLQKAARDSYRLDKCMYEPLTTSIACSFNCIRAFEKELKALDVAIGEAVKGLNPTEYQILLSVPGIGKVYGAGILAEIGSIKYYKNHNSLAKYSGIYWNQNQSGDFDGEDTSMSKAGNRYLRYYLIEAAGSVIQHCPEYAVYYEKKYAEVLRHQHKRALALTSRKLIRMLFGLLDKSQLYSPGKE

SEQ ID NO: 80275 - protein, 476 aa, unidentified
MGKGSGTTRGDRRRNARRERLRELLPRDGAVIGIDLGEDKQAVAVIDHDVRVLAGKTVRVKAFRLGDALAWAVGQARAKGFAAVAVACEPTGPRWLQVQRLCAERGLPLVCVQPLVSHLARQQQDYTTHKTDEADCVMIARLAIELHCYIPEELDEAWAQLRHLGRRRAQLITAATASVQRVRDFLSVAWPVAPEACAHPFESVTWLAAMQVVTSRCGGQPEKLAAVGPAKFTALVRQAVAGQGGQRPAGPVGRAVFAALASTEGVVVSHRRGLLRRCADELGDLRRTRAQLRAVEADMAAVLGELGLSRLADIPGLTAVGAAAILAETGDPRRYDSSSSLVKHAGLSPSGNASGAFEGQAHISRRGRPGLRLTVWRAIWPLLIHNPVMAAKYAAMITAADAAAAQAVPAPPGTGSPQASAAAAARARRAKARVACAASLLRWIYSMVVHGTGWDPDVASGAASCQHAPRYQAEAA

SEQ ID NO: 80276 - protein, 349 aa, unidentified
MNKITIIGIDIAKNVFQLHAVGSDGAVVLRRQLRRGQVLGFFAKLDPCLIGLEACATSHYWAREFQELGHDVRLIPPIYVKPYVKRQKNDAADAEAICEAVQRPTMRFVAVKSAEQQGVLMLHRARELLVGQRTALINALRGHFAEFGIVVARGPQHVGALVQRVMEEQDASLPHSMRTAFASVVAALLNLGGEIGKLDKAILASHRRDQTSVNLATIPGIGPLIASCLSASVPDARRFACGREFAAYLGLVPRQNSTGGKPRLGRISKMGNRHLRTLLVVGAHAALYRMKSGKTQSRLADWARVLLTKKPFKLVAVALANKMARTAWAIMAKGTSYNPGFERPLVAAA

SEQ ID NO: 80277 - protein, 345 aa, unidentified
MKQNIADKGIKVLGIDIGKNTFHLHGINQRGKVVYRRKLSRKKLMENMVQIPPCTVAMEACGGAHHLMRRLKEFGHDVRLIAPQFVKPFVKSNKNDSLDAEAISEAALRPNMRFVPPKSVAQQDLQLIHRFRETAMKNRTQLINQARGALIEFGIIIPKGAKNVRLYLPEILEDADNELSFEMREELDHLRGEIVHVDDRIARYDAKIKAACQSHEVCRLLLTIPGVGPIVATAMAAAVGDVSIFRSGREMSAWLGLVPRQHSTGGKAWLLGISKRGNTYLRTVLIHGARAALRAAKKKTDRRSCWATDLAARRGNNRAAVALANKNVRIAWALLSKNEEYKAAA

SEQ ID NO: 80278 - protein, 367 aa, unidentified
MKKLSTAAGKESRDFRQQKLTIGLDLGDRSSWYCVLDEAGNLAMEQRVSTTPKALREVLGGMPRSRIALETGMHSPWVSRLLSELGHEVIVAHARNVRLIGESRKKDDRLDAQALARLARIDPQLLCPVKHRSARAQADLTVIRARAGLVRARTALVNTARGLAKSYGERLRGCNVRNMNPEKAEGLSPELQRALEPLLAALESLSEQIREYNERIESLAGESYPQVGLLKQVKGVGTLIALTFLLTLEDAQRFRKSRDVGCYLGLQPGRRNSGQSEPQMHISKEGDPYLRTLLVQGAQHILGPFGTDSDLRRWGLRLAERGGRNGKKRAIVATARKLAVLLHHLWVSGEVYEPLRNSHECVVAAAA

SEQ ID NO: 80279 - protein, 350 aa, unidentified
MGEISIIGLDLAKQVFQVHGADKTGRCLLRKQLKRREVLRFFAGLSPCLVAMEACGSAHYWAREIARLGHDARLLPPAYVKPYVKRGKTDRIDAEAICEAASRPTMRFVPVKTIEQQSLATLHRCRDLLVKNRTMLVNALRAHLAEFGFVAAKGIGKLPDLIEIVSEAPAEALPEMARAPLSGFIDAIALINRQLDGLEKRLRAWHKGNAQSKRLETVPGVGLIGATALCALVPDPKLFRNGRHFAAWIGLTPRLDGTGGKVRLGRISKAGDGTLRRLFVLGATALLRSLANKTTPLALWVQGLLARRSGRAVAVALANKLARIAWAIMASGKAYKPLSAAQLPMPAGRA

SEQ ID NO: 80280 - protein, 477 aa, unidentified
MVYAGFSLRGMEAVTQWRAKPETQSGPDIASNRKLSPLAFRRESTQGRVFNFSMSSGAERKESIMNTMETIIPCCAGLDVHSESVEACVRRREANDRLHQETRPWKTMTHDLQMMADWMAAQGVTHVAMESTGVYWKPIYNILESRFTVLLVNARHLKQVPGRKSDINDCQWIAQLLQHGLLRGSFIPPRPQRELRDLTRHRTQLVEEKGRTINRIHKVLEDANIKLGTIASDILGVSGRAMLQALIDGEEDPVKLAHFAQGQLRGKIPELQKALEGHLTDHHRFLLRLLWKQLGEEEELIAKLESRIKEQTVPFAQEIEHLDGVPGVDRRVAEVVLAEVGADVEPFPTDQSLSKWAGMCPGNEQSAGKRKKSGIPPGNRWLKRTLVQAAWAASHTKHSYLAAQYRRLVGRRGKKRALVAVGHSLLVIFYHMLKDKTTYTELGADFFDRLEPERLTKYYVKRLEDLGHKVKLESIAA

SEQ ID NO: 80281 - protein, 438 aa, unidentified
MRVLYEHVAGIDVHKDMIKVAIRSPGEKRWTRTTEILEYRTFYGVLQQMARDLRARGVTHVVMEASGIYTEPVYYALCEQDFTEVAVINPAHARALKGHKTDAKDCARVAELFECGLLRGSYIPPAELKEVRDLTRYRMKTVQARTSEIQRLGKALESAGIKLGSVASEITGVSATAMIESLIDGERRGAVLADLAIGRLRTAGKLADLSMALTGRFTTHHALLCRLHRDRIAIFGDAIAGLDAQIAGKAAPWQREADLLKSVPGFGDVVAQAWLAEIGPAPHLWFSSREKLASWVSLCPGNNISARKRKYGRTGDAGTYIKPMLVQAAWNAIRIRGRLQARYSRLVRRFGGDKNPGAKKKAITAIAHTLLKIAYQVLRTGTPYTDLGADFYTRRESAAQQQAYLERRLQKLHPGCTITITISPPPGGPAEAALPPRR

SEQ ID NO: 80282 - protein, 377 aa, unidentified
MLLDHPSDGQTAIRTQFGAIFVSLELSRSTWLVTSLSPGNSEKMSKYSVKAGALPELLKLFSELKQKALARSGESYRIVTIQEPGLDGFWLHRALQQEGVESHVVDPASIATPRRRRRAKTDRLDGETLLRSLLAYKRGEPRVCAMVVAPSPEEEDRRRLCRERRTLIAERIVHVNRIKGLLFAQGIFDYVPMRRNRRAELDVLRTGDGRVLPAHLRVQISRELDRLELLLEQIAAVEREQDALLAASRPAGGTDRSDPVAMLLELKSMGPNFAAVLWTEAFWRQFANRRQIASYAGLAATPWRSGGIEREQGVSKAGNPRLRTMMIQLAWYPPPASIGADPMVQRQQPPRPQAHNRGAGAQAARGLVEVRDRRRRD

SEQ ID NO: 80283 - protein, 326 aa, unidentified
MHTVDMGTGEIANVQIKRAKVLEHLANRKPCLIAIEACGSGHHWARELEVLGHIVRLLHAKLVRPFVSGNKTDATDARAIWLAVQQPGVKFVGVKTVAQQATLTLHRQRESLMKMRIMQTNALRGLLYEFGATFAKSKKALFGEIESTFEGLADTLPQVVVDSLREQVLRIKTIEADMLLIEKRLKLQLKQDPQMQRISKIPGVGLLTATAAIATMGDATAFKSGREFCAWLGLVPKQTGTGGKVTLQGISRRGDTYLRTLLVHGARSVLSHAKTPSSWLQGLQNRRPANVVCVAQAAKVARTIWAVTAKGQEYQSNYKSVRPAAA

SEQ ID NO: 80284 - protein, 342 aa, unidentified
MSDVSIIGIDLAKRVFQVHGAAADGSVVFKRKLSRDRLLPFLAAQPRCVVAMEACATAHDWGREIEKLGHMVRLIPPIYVKPFVKRQKNDAADAEAIVEAASRPTMRFVAVKSEAQQARAMLFRTRDLLVRQRTQLINAVRGHLAEHGVVAAQGPAHLKRLADAIADETSPLPEMVRSLGLLFLEQIEVLDTKIGDLDKKLREVAGQASTTRRLQTMPGVGPITAVAVETFAPAMQTFRSGRDFAAWLGLVPRQCSTGGKPRLGKTSKMGQRDIRRLLIIGAMSVLKASARSAPPVNSWVSRMLAKKPRMLVAMALANKMARSIWAMMTKQEDYRGPVAVTA

SEQ ID NO: 80285 - protein, 347 aa, unidentified
MRFYTQQHGYYCGIDLHARTMFVCIISQDGTVLVEKNIRARPGPFLKLIAPYRDDLVVAVECIFTWYWLADLCHEEGISFVLGHALYMKAIHGGKAKNDRIDAGKIAALLRGGMIPRAYVYPSPMRSTRDLLRRRLHLVRHRGRLLAHIQNTNHQCNHDDFRKKLTYKANREGVAEQFDDPSMRKSVEVDLALIGHYDGIIRDLELFIVRMAKQHDTDMFRRLRSITGVGKILALTILYEVHDVARFETVQQFASYSRLVKCSRESAGKRMGTGGAKIGNVHLKWAFSEAAVLYLRKNPKGQKYLARLTGKHGKGKALSILAHKLGRATYFVMTRSRSFDEKKFLAA

SEQ ID NO: 80286 - protein, 332 aa, unidentified
MKKVQFFVGIDVSKATLDVFIHGLNLYFVVENSLQGFVCLLEKVMTGTKCKKEELFFCFENTGKYSRMLSVFLQSENILFTMESALQIKKSLGITRGKNDRVDAKRIAHYAYEKREILAPTILPGAKIDQIRSLISLREKLLKHRTAYKNGISDLHDCYEDGESELIKEVQLRLISNLNDEIIKVEQKIESIIESEESISTNYKLILSIRGVGKILGFYLIGYTANFTSFANARAFACFAGIAPFSYSSGIMKGTPRVHPFANKMLKALLNLAAMSAIKYNGEYLQYFNKRVNELGKNKMSTLNIIRNKIVYRVFAVVQRQTPYVDLLKFAA

SEQ ID NO: 80287 - protein, 462 aa, unidentified
MAGHSKRRPHKPATVSPTALPAVRPRVAGLDVGSSQHWVCGPARDDDPPYVRSFGTTTDQLNALADWLLTQHVESVAMESTSVYWIPIYEILESRGIEVVLANARQLHHVPGRKTDVSDCQWLQALHSCGRLRGSFRPSEAITRLRALQRQLGNLVAERTRCVQWMQKALDQMNVQVHRAVSDLTGATGLTIVRAIVAGERDPARLATYRDRRCRHSADEIARYLTGTWRDEHLFNLASALRLFDALDAEIAAYDARLLQELEALHPPDRHEAPVPPHPNPAKEKAIKARGEQPARATLWRFAGVDLTRVDGIGAGAARVILTEVGPQLTAFPSEDHFVSWLRLCPRTPISGGKPLKKRRNGLGANRIAGVLRMAATSLHRSKSALGASFRRIARHKGGAVAVFATARQLARLIYRMLRYGHDCVDIGEQAYDRRFQVRRLAALTDTAKTLGYALVPNVATG

SEQ ID NO: 80288 - protein, 338 aa, unidentified
MDVSVKETSVCIVDDTGKIVREVKVASEPAALLSVLKNVAYCFKRIGLEAGPLSQWLFSALADAGLPVICVETRHMRAVLKAQINKTDRNDARGMAQMMRVGLYRPVHVKTLRSQKLRMLLTHRQLLLSKAIAIENDLRGTLRNFGLKVGMVGKVKFEARIRVLVENLPDLAVLVEPMLIVRRVLREQIVILHRRLLAIVRDDEVCRRLMTTPGVGPVVSLTYRATVDVPARFRKSKSVGAVFGLTCAKYQSGEVDWDGRISRCGDEMMRTMLYEAAQAMMRSKKWSWLKAWAMQIARRRGMKKAIVALARRLAVIMHRIWVDGTEFRWTREQAAAAA

SEQ ID NO: 80289 - protein, 323 aa, unidentified
MTVYLGIDIASKKFDVAELCDGNYRCKAFENTSAGFLALYKWLGQSTMPDIHACLEATGDYGTSLATFLYENKIKVSVVNPARIKGFGASELSRTKTDKADSKLIARFCKAAAPDGWKPTPAPVRKLQALVRRISALNGMLRMECNRRENADANIQASLDRIISLLKTEIEVVRQEIKDHVKSDDELKKQDALIQSVPDIGAVSSNLILSFMSGKGFRKAKEVTAYLGLNPRHHQSGSSVRGKTRMSKMGDARLRSALYMPALVALRYNPDIKAFGQRLLLAGKPRMLVVGAVMRKLIHIVFGVLKSGTAYSSRIAVHSVVTS

SEQ ID NO: 80290 - protein, 359 aa, unidentified
MDEYIAFDSHKHYTLAEREEVETGRTKQTRIEHRRGALRGYLDDAAPGTPVAVEATGNWYWIVEEIEQAGCVPRLVHPRKAKMMMGMINKTDKLDVHGLNRLQRTGTLPTVWIPPGRLRDLRELTRGRMVLVAMRTRVKNRLTATLAKYGLRVEGVSDAYGRRGREQWPRLLALLPPETRWGAEQFWELLDCLEERIAAYEDRIEDLVQETPGMRLLRSLPGVGFILAATIALEVGRIERFPTDEHLASYAGTTPRVHASGGKVRYGPLRPDVNRTLKWAFAEAANSVAVNHIRCPERSVSRLYRRLRRRKGHAKAIGAVARRLAEATWHVWSREEPYRDRIQGRGKRDTVMSPSRLAE

SEQ ID NO: 80291 - protein, 379 aa, unidentified
MRIIGLDLGGKKTCFCEVRDGKVVGRVTVRSIEQLVDVLGPNTPKARVLYEACREGWYVHDKLQSWGHEPWMLDTTRAKQVGIGAHGKKTDRIDAETLARALEQNRAPRAHVLSPARRRLRDQVNIRRALVQMRSQLATTIRGIVREQGVKLASCGPDHLIEKLRETQMEPWLRSLLDPLMRTLATTNEQLAQAEGVLEQLCAEEPAIPVLATIKGVSLIVAASFVSVIDEAGRFKNAHQVEAYLGLVPLEDSSGGKRKLGSITKRGNSYLRTLLVQAAWTIMRTSSPDDPLRVWAESVAARRGKRIAVVALSRRLAGIMWAMWRDGTVYEPGALGKAQARGLRVQAQNTQLRANALSAAARKLARRRAPHLTEVSALG

SEQ ID NO: 80292 - protein, 346 aa, unidentified
MNHIGMDGHITTLEFAVVNEAGRLVKADRVPTSVNGFMAFVRTVPRPRIIYMEEGTLAAWALENCVRFGEKLVITDAKRNHWIGSSGQKDDPIDALKLAQLGRGGYIKEIHHPVGQRRRFRELMIAYHDAVRSTTRIKNKIKARFRQNGIQCTGITVYSETYREEWKAKLPKEMTLLLILDNLWRQLQQSEQTEEELVAAARAQAKHYPEIKHFQGLPGIGFIHAATISAMLETPYRFADKKKVWMYAGLGIMRRSSGGKLYTEKLTTDYNRLLKYTIKQAAEVAIQTKDNPFRRKYLDMTLLRGIAPHRAKLTIARDMLATMWAMWRKGEKYSSEIREHAAYKQD

SEQ ID NO: 80293 - protein, 383 aa, unidentified
MKQIVSVGIDVSKGKSTVCAMIHPNTIIKESFEVLHTVEEMSMLADYIGSLDGEIRIVMESTGHYHLPVAQFLYQKGFFVCVENAYIIRQFSRIMLHGAKTDPLDAKKLAKYGLAYWSELKPYKFHPSCYTELSLLSKQYQTYIKLLIAAKQNVIHLMDEMLPGFKEALDTASSVQFSKVKYVDFAKEFYHVDMIKSMGKEIFRENYKQWCKEKGYRFQSEKADELFHLAEDGIPTLPTEFPSTRLCMEVATEQVSQLGYALEQILSQMQNLAKTLPEYQTIRQMGGMGEKLCVRFIADIGDVRRFHNGKALVAYAGIDAPPYQSGQYTGTKRRISKRGNSALRKTGYEVMKSLKSHPPKTDTRVYDFMIKKRMKEKVRNKPK

SEQ ID NO: 80294 - protein, 321 aa, unidentified
MQVHEVFVGVDVAKATLVCSIHGARGQRELSNDDESIDAWLATLPTRAAIAVESTGKYHQLVARLAHSSGRCVYVLNARDVFFYAKGLGARAKTDRKDAQLIAGYLAQHHAELKPWAPPMPLQGRVQVLLQCRAGVATKRSSLRQVLKDVTGLDAAVNDLEERFDVLLDEIDSQITIELDRDKDLSAKRELLRSITGVGPQASAMFTSLLSRVSFANVNALIAFTGLDPRPNDSGTKTGKRRITKRGNPELRRQLYLCAFAASHSKALGPLYRSIKAKGFKPTEALIILARKLLRVAWAVWKSGRPFDPNLLSSVETCAKT

SEQ ID NO: 80295 - protein, 357 aa, unidentified
MKYIGCDFHPSFQVIAMLDKETGELVERRLLHTEEARAFYEGLKGPVVVGIEASGNTHWFESLLARCQHELWIGDAAAIARQEGRKQKHDRRAAALILKLMVENRFPQIWVPTVAERDLRQLLIHRQHLVRMRTRVKNQLQHIALNQGWQKKRKLWSKTGLQLLSSLKLEPWTGQRRDTLLEMLAELEAKIGPLDQAVEKEAQAGAAARRLATHPGVGPVISLATVLTMGDVQRFADSRSWVSYLGLNPSEQSSGQRRRLGSISKQGNPFLRYLLVEGASSAARGDKSLARMYARLKAKKHHGVAKVAVARKLAVRLYWMARTEKSYPEVVRTQGSQSHPVAVAMADLLNRPPASHP

SEQ ID NO: 80296 - protein, 407 aa, unidentified
MELSALYKCVIGLDVHQSQITACALIQQPNGGVRIEQRQFGGFMRDRRELAQWAASLNPDEVVMESTGIYWKSPYAALEAVGIRAKVVNARHVKHVPGRKTDVGDAHWLAMLARAGLLRASFVPPAALRELRLIARQRQKLVGQLASEKNRLHKVLTDSGIRLGVVVSDLHGQSARAMVKAIIAGQAPQQVLNLASRRLKASREEIFDALQGDLTASHRFVLDELMQHIEEIEARIDRFDARLLAGLESERGTLALLQTIPGVDLIGAAMLLVEIGSDMDAFGSADRLASWVGVCPGNNESAGKRKSGHTRKGNPYVRRLLCEFAHAASRTTSVFKSKFQALVVRRGYKRAIIAIGHKILRTLFFMLKRREHYRDCATDYEALSVQRNAPRWIKALTKFGFITPASA

SEQ ID NO: 80297 - protein, 409 aa, unidentified
MRLFVGLDVSSFDMKVCILNGEGEKLDSFSVNNDLPGATALKERLLQRIANKEVETFKIGLESTSVYSFHPSMFLHYDKDLQRFGAKVFLMNPKQIANFKKSYSDMDKTDEIDAFIIADYLRFGRNQMSIVKESQYVALQQLTRSRYQLVRMLTKEKQHFLQHLSYKCNTFSQEVNSSTFGNAMMELFLEKFSLEELADMPLEELAEFLQTKGKNRFGDPKCVASTIQKAVRSSYRLDKVVEDSIDVLLGTSIAVIRTYQQQIKELEKSIKRIMDGLSQTLESIPGIGPVFAAGIIAEIGQIERFDDETKIAKYAGLYWRTHQSGRFIAENTSLSRNGNHYLRYYLVEAANSVRRHVSDYQEYYVKKYNEVPKHQHKRALVLTARKLVRLVDALLRSHQLFTPERCVKV

SEQ ID NO: 80298 - protein, 343 aa, unidentified
MQTITTIGLDIAKSVFQVHGIDAEGKVILRRQLKRRYVLAFFEKLPPCLVGIEACASSHHWSRELQALGHTVRLMPPAYVKPYVKRQKNDMADAEAICEAVTRANMRFVPTKTPEQQSVLMLHRTRHLFIRQQTSVINAIRAHLAEFGIVAPVGRRGVEELLNVVANPNDKRVPEIARACLLAFGVQLRRLKEQILEFDRMIIAWHRSSETSRRLDDCPGIGPALATALVATVADPKAFRSGRNFSAWIGIVPKQHSSGGKDRLGRISKQGDRYLRSLFVAGALAVIRYAKIHGTKHRPWLAALLARRRTKVAAIALANKIARMAWAMMAKGERYKEPIALAA

SEQ ID NO: 80299 - protein, 340 aa, unidentified
MTPIRIGLDIAKSVFQVHGVDDKGTVVIRKRLRRPDILRFFASLPPCLIGIEACSASHHWARELIRLGHDVRLMPARYVKPYVQRGKSDALDAEAICEAVSRPTMRFATIKTTEQQAVLTLHRARELLVKQQTMLANLIRGCLGEFGIVAPLGIRRVSELIAVINDDADTRILPEARIAMRAVADQLCDLRTRIKQIEQAIRAWHRSNEASRRLATIPGVGSITASAIVATVANATEFKSARHFAAFLGLTPKQCSTGGRQRLGRISKQGDVYIRRLLILGGTSLVRYARGAGGSIWAKQLLARRPTRVVTVALANKAARIIWALLTRGEVYRAPQPQAA

SEQ ID NO: 80300 - protein, 340 aa, unidentified
MDATTYGLDVAKRVFQMYWVEVETGEIVNRRFGRDELIRFLAQRPPGRIALEACGSAHWWARKIKALGHEAVLLHAKFIRPFVQTNKTDAADARSTWTAVQQPGMRTVAAKTEDQQAMLSLHRMRALLVKFRTMQVNQLRGLLYEFGVTFRAGRAAGLAEIQARTAELEGALPGTMMCCLQDQLRRIDELQRDIDLLEKRIGVWQKQDAACHAITAVPGIGRLTATALVATMGDAKSFRSGREFAAYLGLVPRQSGTGGKVRLGPMSKRGDPYLRTLLIHGARSVMYNAKVPTPWQTDIQARRPSNVAAVALASKIARTAWAILARGQEYQRNYVSVRPA

SEQ ID NO: 80301 - protein, 344 aa, unidentified
MEHYAGLDVSLRLTAICVLDERGRVVLEGKVHSEPPQSQIFLQPYAPTLKLAGLEAGLLAPYLYSGLLERGLPAVCIETRRMKAFCQSLVGQTDRKDAHLIALAIKAGLYRAVHVKTNESQRLRFLLTARELLMAPSAPARKKPCVVRSRPLAYAWAISPNASSRPRQGIGTGPRSAGRSGASNAGRAQSHAGTTHPARPYGAARCPPRSGVPQTDDRLRCRHHRGAGLSHHIDLPQRFRQSVTVAPHLGLTPRKYQSGETDRSGRISKYGDAMMRHLLYESATLVLGRLKRSTPLKEWGLNIAARRGIKRAPVAVARKLAVILHRMWIDGTNFQWDVASTQAA

SEQ ID NO: 80302 - protein, 401 aa, unidentified
MWYAGLDWADSHHDVVVIDDGGRQVASRRVAHSAQGLAELTAFLRQIAPLDQIACIVETNQGLLISTLLEAGCTLYPVNPKTIDRRRNASGAKTDLIDAYLLAKTGRSDLRDLRKLTPDSAIIQELKALTRDQDSLVQSQTRLVNQLTACLKAYYPVALQLFSKLQQRSTLIFLQTYPTLEAARQASVEEITSVLKEVGHPKPSKVAPKICETLHQPQLHAHAMTTRTKSRLMLALAAQLLPLIEQIASYDKQITALFLTHADHEIFSSLPGAGKRLAPRLLAEWGDDRTRYTASTSVQALAGTAPVAFQSGNYAKAHKRYACLKPLRNVLHQLAWQSTKQEAWALTYYKRKRAEGKSHSMAVRSLANVWVRIIYAMWFEHKSYKTATFEAAQHHHAKRAA

SEQ ID NO: 80303 - protein, 330 aa, unidentified
MKNFEEVVGIDVSKKTIDASCHLAQQHRVFSNDIKGYQSMLNWVTKQTKGVSVFYCFENTGNYSLKLASYLSYKGIAYVEESPIKIKRSSGLVREKTDKIDSEIIARYAWIHREELVSSELKSVVYQELGRLIGLRDQLVRNRAGLLGTLKEIEQLLSSPSTDTSCIVLRRSIENLSKQIKSIESRMDSLLKEDESLSSNYKLLLSIRGIGFVVACQLLYHTENFKRFSSWRKFSSYCGLAPYEYSSGTSIHRRKKCHYLGDRKMKSLLSMASISAIQHDPELRLYYKRKVKEGKPKMIALNNVRNKLLARVFSVVKRGTPYVALNQYAA

SEQ ID NO: 80304 - protein, 415 aa, unidentified
MKNYTELTHFAGLDWAKDHHDANIMDRQGQVVARFRFAHTGPGWQQWREQIRIYPALGVAIETSQGAAVEQLLASGVTVYPVHPKAAKAYRQRQAPSGTKDDELDAWSLGDALRLDGAQWRALSPQDALVEELRLLCRDEAELIGQRTALVNQLQAALHEYYPAALEAFEDWTAPSAWAFVETFPTPQRLVQATGHRRRVFLHTHKLWRPGTAERRLAIFARADQFCGGEAVTRAKSRLAVALCRSLAALQLQLDDYRAAIEKLFAEHPDHDVFGSLPGVGVTLGPRLLSGVGADREQYPDVQGLQCVAGTAPVSFNSGQIQRAKIRWHCDRFLRHTVHLWAGCSLKSCTWAAAYYAAKRKDGMSHACALRCLAQRWLKILWKMWQTHTPYDPELHARNQQRHGSWVLQLNPKTT

SEQ ID NO: 80305 - protein, 189 aa, unidentified
MDIGLDVHKKMSYYSMVDRQGTEVKKGRFATTREGLNEFASTLPEGAKVAIEASTSGIFVYEYLDGKRIEVHLAHPVYVKPFAKKHVKTDKVDARVLTQLLRMDYLPESYVPGEDMRDLRTIVRHRASLVRLRTSIKNALLALSEIGEIARFRKPKSFVSYAGLAPKVEQSGDYTRYGHINKHSNGFLR

SEQ ID NO: 80306 - protein, 410 aa, unidentified
MELQTQCACGLDVHQATIVACLLIVLDNGKVKKQIRSFGATTRELIALREWLQSEGCTHVAMESTGVYWKPVYAILEGPFDLTVANAYHVKNVPGRKTDVKDAEWLADLLLHGLLKKSFVPPQPIRELRDLTRYRRKLVETGAEERNRLLKVLETANIKLASVASDVFGVSGMRMLDALVENKATSAEMAQLAKGRLREKISELQPALEGRLEEHHRYLLKLQLARLRAVANDLEELNKRIDEKLQPYRPQLELLMEIPGVDWTVAAVIIAELGVDMKVFGSPSRVSQWTGVCPGNNESAGKRKSARTTKGNCHLKTALIESAHSAARAKGTYLRDKFYRVKSRRGAKRAAVTVAHKILVAVYHMLDKQVSYNDLGDLYLDKLNKQHLTRNLVHRLERLGYEVRLQPVAA

SEQ ID NO: 80307 - protein, 367 aa, unidentified
MKKISTGTTKKVEKVASQKLTIGLDLGDRWSWYCVLDEAGEVVLEQKVATTPKAMKEVFGGMPRSRLALETGTHSPWVSRVLSELGHEVIVAHARNVRLIGESRKKDDRLDARMLARLVRIDPKLLAPVKHRSAQAQADLMAIRARAGLVRARTSLINTARGVTKSYGERLRGCNPRNMNPVKAQELSPELQAALEPLLGAIESLSERIGEYSERIEEIAKNSYPEVARLTQVKGVGTLIALTYVLTLEDAHRFSKSRDAGCYVGLQPGRRNSGQSEPQLHISKEGDAYLRTLLVQGTHHILGPFGADSDLRRWGLKLAERGGKNGKKRAVIAVARKLAVLLHRLWVSGEAYEPLRNQRQVALPAAA

SEQ ID NO: 80308 - protein, 371 aa, unidentified
MNIIHYIGMDVHKENYTLCCYNIEKDELQYKQTVAPDYKMILKYLEQIRTRSTEKVDFVCGYEAGSLGYTLYHQLTERGVKCVILAPTTMGITNTNRIKNDKRDAGNIARCLAFRTYSEVYVPTAEDNEVKEYIRMRDDHKKALKIIKQQILSFVLRHGYRFTEGKNYWTQKHIAWLKSLKFGGTLQESMDEYFITFEYLTNKVERLDKRIEELAGGERYEKNVKKLSCLIGVKTHTALSAIVEVGDFNRFAKPEHLSAFLGLVPSENSSGGKQRHGSITKAGNSHVRRLLVEAAQGYTRGVIGHKSADLKRRQNGNEPQVIAYADKANERLRRKFYRMTLKNGINRNIAATAIARELACFMWGLMTDNVA

SEQ ID NO: 80309 - protein, 320 aa, unidentified
MRNAVGLDISKLTFDAFAMVGNAEYSAKFDNNSKGLNQFSDWLKSLGCENLHICMEATGNYYEDVADYFAEYYSVYVVNPLKISKYAESRFKRTKTDKQDAKLIAEYCQSAKESELVKRQKPTDEQYRLSRMTVAYTQIKSECAAMKNRHHAAKDEEAAKAYAEIIKAMNEQLEVLKARIKEQTEKSNCKEGVKRLETIPAIGRMTAAVLFHHLTLSKFETSNKFAAFAGLSPQQKESGTSVRGKGKLTKFGNRKLRTALFMPAMVAYRIRAFPDFIARLESKKKPKKVIIAALMRKLAVIAYHVHKKGEYYDPSRYKSA

SEQ ID NO: 80310 - protein, 361 aa, unidentified
MSSMPQPIHHDQDDTAEVILGVDTHKDLHAAAVINPVGVLLSSETFPATAAGYRALLAWASRFGTVRRAGVECTGSYGAALARHLRAAGVKVIEVNQPDKATRRRRGKTDTIDAESAARAVLSGRASSSAKAGDGPVEMLRMFKLAKASALKARTQTINQLKAVLVAADPALREALSGLSNTLLIRRCTQLELDTPCDTTSAAAYTLRLLARRILTLTSEIRDLEHQITAAITNHTPTLLTRRGIGPDNAAALLIAAGDNPDRLRSEASFAALCGVSPLEASSGRTSRRRLNRGGDRQANAALYRIALSRLRWDTPTRDYLNRRITEGKTRREAIRCLKRYIAREIYQIITTPPEAEPSAA

SEQ ID NO: 80311 - protein, 356 aa, unidentified
MINSTKYIGMDVHKESISIAVRNAAGKIVMETVIETKSSMILEFVEGLHGDVHVTFEEGTWSAWLYDLLKPRVTRLVVCDPRRNALLQEGNQNDRVDARNLAELLQNNQLRSVYHGDHGLRALKELVRSYLTVTKDLSRVMTRVKAIYRGWAIPCSGKQVYSSRLRAEWLGKIQEPGVRRRAEFYYQQLDALRALRQEVRRDLLAESKKHKIWKQLCQIPSLGPIRAAMLLGILQTAHRFRTKRQLWTYSGLGIEVHSSADHHAVKGQLERKKKHIEIRGLNKNCNHDLKNLFKGAAVVASTKPGPFEKFYAALLAKGMRPEMARLTLARKIATIVLIVWKRGVCFDANHLKPQTA

SEQ ID NO: 80312 - protein, 380 aa, unidentified
MVHHREAFVAFDTAKLRNAVAVAVSGRKGEIRYVGEIDNTEAATRRLVAQLESKYSRLTFCYEAGPTGYGLYRLIKSLGHDCIVAAPSLIPSKPGDRVKTNRRDAVNLARLLRAGELTAVWVPDTRHEAMRDLVRARDAAAKDYKSKRQNVSSLLLRLGLHYPGKKTWGRSHMNWLTSLKLEHREQRIAFEEMLLAVRQAQERIGRLEQAMREAVEDWTLAPAVEALQAMRGIDLIGAITFLAELGDLSRFDNPRQVMAYLGLTPSERSTGESIRRGGITKAGNTRVRRLLTEAAWSYRFPPRVSKDMQARIGAAPRIAREIAWKAQTRLCARFRTLIRQGKRPTIVVIAIARELSAFLWAINREIAMSLAAPMQQSSPA

SEQ ID NO: 80313 - protein, 355 aa, unidentified
MSRDIKYIGMDVHKEATVIAVVNANGDLVMESIVETKAGSLLQFIHGLRGELHVTWEEGTWAAWLYDLLKPQVQVLVCDPRRNALLKEGNKSDKVDARKLADLLRTGMLRPVYHGENGLRTLRELGRSYQTISQDLNRVMNRLKALYRGWGIACAGTQVYAPRYREEWLQKIEHAGVRRRAELLYQQLDGLQALRRTLRPELLAESRKHKATKLLRQIPCIGPIRAARLLALMQTPHRFRSKRQLWTYCGLGIETRDSAQYRFVRGQLQRAKKPQQIRGLNRNHNPEMKEIFKGAATRASCGVGPLRDFYVALLDKGMKAEMARLTLARKIAAIALTLWKKEERFDAEQLKTQAA

SEQ ID NO: 80314 - protein, 420 aa, unidentified
MKVVYQTCCGVDVHKSFLVATIIKTTSRVQPSYHKKRFSTFNNSILEFKKWLLDNSCRDVCMESTGKYWIPVFNLLEDELNVTIANPKWVKAVKGNKDDTKDSKWIGDLFRLGLVPGSYIPCKPIRILREFTRYRYKLTSCRSSEKNRFQNALTVCNVALDSVVSDIFGKSATSVIDYLLKQSDNSINHEEISSRLLRSLKKKSESVIESIEGYQMTDAQKYRMRLVHAHMDYITSTISDIDSMIDSLVEPYENAVQLLCTIPGIDRNSAITIISEIGTDMTQFSNSKRLCCWAGLTPGNNESAGKKKSVRITRAGVYLKPALVQVAHAAVKSNKSPYYKAKYERIMKRRGKKRAIIAVARMILTAIYHMLSTGETWNPTDLYKIDMPEPLKNKQKEKAVKQAMKLLIAEGLIKKSQFAS

SEQ ID NO: 80315 - protein, 338 aa, unidentified
MKAGDLAGLFDRFAELQRKALARTGKIYPLVVIEEAGLDGFWIHRALEKEGIESHVVDAASIATSRRRRRAKTDRIDGEALLRTLMAFKRGEPRVCAMAKPPSVEDEDRRRLGRERKTLLGERVQHVNRIKGLLFAQGVGEYEPLRRDRRRRLDELRTGFGAPLPVHVKAQIARELDRLELLLDQIKTVEAARDAWLAEGSEEGGVAARLADLRGIGQEFAATLWLEAFFRRFDNRRQVAAYAGLAPTPWRSGKIDREQGTSKAGNARLRTTLIQLAWLWRLHQPRSALTLWFEERVRATGGRTKKTMIVALARKLLVALWKYVTAGVVPEGAAMKAA

SEQ ID NO: 80316 - protein, 356 aa, unidentified
MTHRGIDRLTYDDLLKSAERMSPTLFCMEPCPEVHYLAEKLQGYGHHTKVIDGAAVKEYIKTHFGGQKTDLNDAQAIAFLSLDTNLPEITPKNTSNSVLSSIQAVREQFRKEYIQSFVSLKGICQRWGLPISKGVMNKNKVEELVSESKKIPQEVKDWLLELLQSCRELQKRLNKISKYLKEYADNDEICQKIMSVPGIGPITATRLKATIGDIQRFEKPKSIVAYYGLVPKSKATGHNEKKGGITRRGDRVARSLLIEGAGVVLNLAAKGFLRSKPLNKWIEKKRKLKMPWGKLCCALAAKMLRIVRAILIQGTSFNAKIAGVARCSLPKESRNNVMGNNKLSEIPSPNGSVYIH

SEQ ID NO: 80317 - protein, 484 aa, unidentified
MAKRKMSTFERLQRGKWSREQRKELAQKLEAADLTIVHPDAAGIDVGNESHFVAVPAGRDPQPVQEFGSWTADLQRMAAWLKACGIRTVAMQSTGVYWIAVQEVLEQAGLKVFLVNARGTKNLPGRKSDVQECQWLMKLHTYGLLANSFRPPEEIRAVRTIWRQRDRLVQDAGRAIQQIQKALTTMNIRLANAISDVSGVTGLAIIRAILKGERDPRELAKLRHPCIQASEEEVVRSLEGHWRDDVLFELKQVVEGYDFYQRQMGACDEELQKYLAVLPDRRKESAAVGADPGPTRTKQRRRSKAERKGKTRRKNQPGFDLQAELHRTFGVDLTRIDGIDIMTGQVILSEVGPDLSDFPDEDHFASWLELAPRRNITGGKVISQKSRESRNRVANALRLAAESLSRSDSYLGARYRRLRGRKEGKKAVKAMARHLACLVYRLLTKGQDYVDRGAAYFEKKRTEREMIGLQRKAAEYGMRLVPVA

SEQ ID NO: 80318 - protein, 371 aa, unidentified
MEHTRFVGLDIHKERISIAVAESGRSGAVEYLGEISNDPDAIGKLCDRLRRLGKTLAFCYEAGPCGYGVYRQLTDIGHRCDVVAPSLIPTKPGDRVKTNRRDATMLARLHRAGELTPVWVPDADHEAMRDLIRLRSVVRQIVTRARQHLQGFLLRHGRKHGRGTAWRMAYRRWLSTLAFEHPAQQVAFQDYVDAVMDAERRLQRVEEQISGLLPEWNLRPVVDALQVMRGIASINAVVLVAEVGDFTRFSNPRQLMAYFGLVPGERSSAETIRRGGITKTGNAHARRALVEGAWAYRMKARIGRHKVDRIEALPKVVRDIGWKAQVRLCTRYRRLSARGKTANVVNVAIAREMVGFIWSIACTVQSAPKTA

SEQ ID NO: 80319 - protein, 401 aa, unidentified
MNAVGIDVSKGKSMVCVMRPFGEVVLEPFEVLHTAQNLNDLAGNLKDLDGETRVVLEATGNYHKPVAFVLHNAGLFVSVVNPVLIHDYDNNSLRRVKTDKKDAVKIANYTLDKWTRLRQYLPEDEARLALKNCYRQYQQAVAIRTMLKNNLISSLDLTFPDANNLFSSPAKNNGCEKWVDFIGEFWHSGCVSSLSADAFAKKYLKWCQKHRYNFTRSKSDEIYSCAVNATSLPKSPTSKLLIQQQVAQLKAVSKSVAAFQQEMPRLSQQLPEFDTVMEMYGVGPSLGPQLMAEIGDVRRFSSKKSLIAFAGIEPQPNDSGKIVGNDKGISKVGSAVLRRTLFLIMTVILQTQPQDEPVFQFMNKKRSEGKPYKVYMMASANKFLRIYYARVKAVMGSECSQ

SEQ ID NO: 80320 - protein, 343 aa, unidentified
MEYYVGLDVSLKQTSICVVDQSGSVVREGVVDSDPEAISVYVRSKAPGAVRIGLETGPTSTWLWTELKRLGLPVICIDARHAKAVLKMQINKSDRNDAIGIARIMQTGWFKEVHVKDIDSHTVRALLASRALLVKIKRDLENHVRGLLKNLGLVIGRAKFNVFAVRAEELIEGRPELIAAIRPLLEARTAVEQQVSELDRKVMKLARHDAQVRRFMTVPGVGPITGLAFKATIDDPARFARSRSVGAYVGLTCRRHASGEVDWSGRISKCGDAMLRSYLFEAAGVLLTRVPKWSAVKAWGVKLVKRNGLRKAKVAVARKLAVILHRMWIDGTEFNWSKKEIAA

SEQ ID NO: 80321 - protein, 348 aa, unidentified
MKYYIGLDAHCKTSTFAVVDEQGQCVLRETVNTSEKHLIQVINKINGERYLTFEESTISQWLYLQLRETVDDLLVCNPVYVAKKQGAKTDFRDALHLAQELRTGHLQAVYHDSSHWIQLRVSVSGYLDIVEEIVRFKNRLKSVFRAEAIGTDENSFYKSKDRVQELKNPSAKFVAENLFNQIEYLEREKLKFRKLFEQNRKKYRPIRNLMTIPGISLIRANIICSLVCQPERFKDKHRFWGYCMLVRHIQQSGGRIYGNKRFFGRKELRNVFIGAAESAMRTETSLRDHYDAVRAKGGKHKEAKLSLARRIAAVSLCLLKNNDKYNDNYEEYLNERKRLRKLFYEQAI

SEQ ID NO: 80322 - protein, 359 aa, unidentified
MENKVKKRMDFTGHNIYIGLDTHLKSWTATVRVEDTFYKTFSQDPESKVLFNYLKKNFPGANYFSAYEASFSGFSAHRELNELGIKNIVVNPADIPTTDKERKQKDDPRDSRKIAEQLAASKLVGIYIPGIESEGDRSMLRFRRTLTKEIARNKNRVKSFLYYHGKTIPEQFANKKYWSKRFTKWLQELELPSESARVTLTEIIELVEFLRKKQYEILKKIKELSQTKNYKRNTELLISIPGIGLITAMSFLTEIEDVTRFSNLDKFCSFVGLIPTTNSSGEHEAVGNITKRQNKILRSLIVESSWVAIKNDPALMLAYQKLVKKMKPTKAIIRIAKKMLNRIRYVLREQKLYEYAVVK

SEQ ID NO: 80323 - protein, 352 aa, unidentified
MVLIGCDFHPSWQQVSWMNRETGEAGDQKLVHEPGAVEKFYQQFPAGTRIGMEATGNCQWFVEMVTGLGHKVLVGDAAKIRASDSRQQKHDKRDARLLVQLLAEDRFPQIWVPSREQKDLRQLLIHRYKLVRIRAQVKNGLQHLAMNQGVMKKQKLWSKAGEKVLRELPLAPWASRRREDLFKVREMLNGQIDLLDQAVVEAAEKNEKARLLMTQPGVGPITSMAFVLTMGDVKRFQRGKQVASYLGLIPREYSSGGHQRLGSISKQGNTFLRMLLVEAAQGAVRCDPIRDFGMSICIVATVNQKEWRRWQRRGSWRFDSTGCCARTRGIQKSFVSRAARGCPWSAQARPKD

SEQ ID NO: 80324 - protein, 357 aa, unidentified
MSIQTAVGWDIHRKFSQLSVVQRNDDGEIRIVKRMRLEHADRAAMRNELAKLPPATPVAMEGAFGWPWIADLLNELGLDPHLGHPPAIRVLAKNEAKADRMDADRFGRFWLRGIFPESYLSTPEVRQLRERLRYRMALVHLRTGIKSRIQAILHRQGVLHDYSDLFGKGGRAFLTTLALPVACRAALDGWLAQIDLLDSHLTDVEAWMHQHLEEDEITRLLKTIPGIGLILAHVIQAEVGQLTERFPSRRHLTSYSGLAPLADDSADRHGHRHIAAACNHTLRWAFIEAAHCVVKSKSCPANLRRLHHRLTHGGRANKNQAKVAVARELCELVYVIWKKGEPYREITSPVRSERAKR

SEQ ID NO: 80325 - protein, 372 aa, unidentified
MDERIKFFIGLDAHKESTSVAVCEATREPARFAGTIGPDVRVLLKLLAKAGDPAQVSVVYEAGPTGYGLYRELRQRGYRCEVVAPSLIPRRPGDRVKNDRRDCARLAELSRAGELKAIWVPDEAHEALRNLWRAREDAVNMRLKTRQQLKAFLLRQDRRYPGRTSWTKSHERWIAEQRFDHEADRIVLAEYQLAVDSAEQRVQRLTIALTEAVQGWRFEPVVAALRALRGIDTVSAIGLVCEIGDINRFASARQLMGYLGLVPSEHSSGNSVRRGSITKTGNAHARRLLTEAAWNYRFPARLSRDLRARSQALPEAVRAQAWKAQLRLCSRFARLSSRGVQVNKVCVAVARELSGFIWAIARQASPAVQTIH

SEQ ID NO: 80326 - protein, 315 aa, unidentified
MMATPSVFVGIDVSKGRLDVHVRPLGTGFSVSNAAAGYAELIARLRPLRTKRIVMEATGGYERALWLALTEAGLVAAVVNPRQVREFARASGRLAKTDRLDAAVIAHFAETFSPVGVRNPDPVADRLGEHVLYRRALKEEIVALANQLRRLETPALRGRAERRLESLRSEATEIDREMRAIVDGDPGKKALFACLTALKGVGPVLACTLIANMRELGSLSRHQAAALIGVAPVNRDSGTMRGHRAIAGGRRGVRNVLYVATLSAVRSNPAIKEFYGRLRTKGKPAKVALVACMRKIAIILNARIRDQLAAAAATS

SEQ ID NO: 80327 - protein, 350 aa, unidentified
MQGNGRWIGLDLSKKTYEMCYFDQQGKVGRSGGETTKDGRAKLYAKVKPEDIVAMEVNSLAFVMEKEMRTIGCAVVILDASQLSVIYASTKKTDKEDALKLARLVKIYEKEDLPTVDVPTDKEYYRRKLTKECKTLKDDRTQEINRLHALFLQCGITTMKRSNLQTDANRQKVLPQLFGYEVGQAKRVCERLTLLEVQIKELEQTITKECKADKDIERLKTIPGVGDKTALAFTAYVGDGKRFNNGDEVANYLGLVPRVDCSGSINRYGHITKKGNRIVRALLYQAAWSIVRSKHGGALKAKYFYMTEHGKGKKISITAIARKMAKLMYLIIKNKGKEYQEVPEPTSRAG

SEQ ID NO: 80328 - protein, 414 aa, unidentified
MEVVYPQCAGLDVHKKTVVAAIIVAQPNGELRKETRTFGTMTADLLTLSDWLMAQGVTHVAMESTGEYWKPVFNILEANFEVWLVNAQHIKAVPGRKTDVNDAEWIADLLRHGLLRASFIPPLGQRELRELTRHRSNFVRERANLINRVHKVLESANIKLASVATDVMGVSGRAMLAAIVEGQATPSEMAELSKGRMRDKRDQLAKALEGRVKPHHRFVLTELLCQIDSLDESIARFDQQIKDYCAPFEEAVTLLDTIPGVARQTAEVIVSEIGTDMSRFPSAAHLAAWAGVAPGNNESAGKRRSGRTRKGNRPLCAALNQAANAASHTKATYLSAQYHRLAGRRGKKKAIVAVEHSILVMAYHIIKRQEPYRELGGNYFDNRRPEATAKHLVKRLEQLGYEVTIQQPSPDVIV

SEQ ID NO: 80329 - protein, 348 aa, unidentified
MLADQVDYVVGVDTHRDEHVLAVVVASTGAVVAQRSVATTPRGYGQAYRFAAEHADGRRVWAVEGAGHYGAGLARYLSGCGERVLEAGRSPRNQRRLHGKDDGLDAIRAARATLTGEELALPKAGQRQEALRLLLLARRGAVDVRRHALVQLRSVIVTCPDQLRQELRGLSQTRLVDRCRLLRRSSSRTPDELAATLVLRTLARRIQAATEEAAELQAEILAHVRALAPGLLDEPGVGPIVAAQLIVSWSHKGRVRSEAAFARLAGVAPIPASSGQTTRHRLSRGGDRQLNRALHTVILHRRLHDPATRAYIARRVAEGKTRRDATRLLKRYLARHLYRVLNQEPIMT

SEQ ID NO: 80330 - protein, 405 aa, unidentified
MNAVGIDVSKGKSTVTIRRPGDVVLMPPRDIPHTKSAINELIKQIQSLDGETKACMEHTGRYYEPLAAWLSDAGIFVSAVNPVLIRDFADDSLRSPKTDKADSKKIARYTLDRWAKLKQYGSMDKTRNQLKTMNRQFGFYMDQKTAMKNNLIALLDQTYPGANDFFDSRARSDGSQKWVDFVYTYWHVDCVRGKSLQAFTEHYQNWCKRKNYNFSAEKAAKIYQISSDLIAVFPKNDITKMLIWQAVALLNTASKTVESLRSKMNELASTLPEYPVVMDMNGVGATLGPQLIAEIGDVSRFTHREALTAFAGVDPGKNDSGKHIQNSVRTSKKGSPYLRKTLFQIMDSLIKRSPVDDPVYAFMDKKRSEGKPYYVYMTAGANKFLRIYYGRVREYLSNLSNNETI

SEQ ID NO: 80331 - protein, 357 aa, unidentified
MSHQGVLQSFSVPYRAEHLLNYVSKHFAGKKVAFAYEAGPTGWGLYDRLTAQGHPCVVAAPSMIPKVPGQRVKTNRLDSQMLSEHLRGGQLKSIHVPTEPYRQLRHLTQLRDTFVKDVVAMKLRIKGLLLFEGLEFPPAPAGSQWSYLVRGKLKQLPCSGSVRFKLDRLMESLESSEKQALETIREIRRFCQQDAELSQAIKHLKSISGIGEIVASHLLARTGDPDQITNVRQLGGFIGLAPREHSTGDRIARGGIMRTGDGRLRSKLIQAAWSAIRHDPELREFYRSVYQRHPRDRAARKAIVAVARKLTTRIYAVLKQKRPYVVREKVNSAPLTQEETSPQGTTRRLKEPGEIIS

SEQ ID NO: 80332 - protein, 352 aa, unidentified
MRRPRHQVRTEEELFIGIDLHKHRWHVTIRTFDVELFSGSIPGNWEGLHRILARYAGHQLQAVYEAGYFGFRLHDRLVAHGIPCIVTPPSLVPQEYGNRVKTDRRDSSKLAHLLAKGLLKRVWVPSEEELYHRQVIRRRRQLVRDRVRIQSRIKAELRFYGIHLEEPRGRWTEIYFETVRSVRFGNRWMQESFNRLLEQYEFLSAQISKQTQLLRELSETAMYRDRMAILQTLPGIGVISAMELLLELQDVSRFRRAEQLAAYVGLTPSQYSSADKVRMGRITGIGKNTLRSLLVEASWTLIRKDPAMRDKYDRIKIRSGGKRAVVAIARTLLLRMRRMLLDKQAYALQRAA

SEQ ID NO: 80333 - protein, 344 aa, unidentified
MEHFAGLDVSVKETSVCIVDEAGRITREVKVASTPEALMQVLRAPAYHLKRVGLEAGPLSQWLFGALAEANVPVICVETRHMRAVLKAQINKTDRNDARGIAQMMRAGLYRPVHVKTLRSQKLRMLLTHRKLLQSKAIAIENDLRATLRNFGLKVGVVGTAKFDARIKELVGDDPDLVLMVEPMLIVRRALREQLAILHRHLLALARDDGVCRRLMTVPGVGPVVALTFRATVDVPARFQNSRAVGAVFGLTPCKHQSGESDYTGGISKCGDEMMRMMLYEAAQILLIRATKWSWLKSWAMQIAKRRGVKKAIVALARRLAVIMHRIWIDGTEFCWIRQQAVAA

SEQ ID NO: 80334 - protein, 343 aa, unidentified
MKIMRVGVDLAKNVFHVHGVDRSEKPVWERRLSREKWLGAVLEKVEPGCEVGMEACAGAHHWARELQSRGYVVKLMAPQFVKPYVKSNKNDMNDAQAVCEAMSRPSMRFVPVKSVVQQDIQAIHRIRTELVSQRTAKGNQIRGLVAEYGLVAPQQLTRLRRAIPLWLEDAENGLSMRLRRLLDGLRGDLVVLDQRIGELDAEIEAIAKSDPVAKRLQQLRGVGPLTATALVATVGNGEQFTKGRHLAVSLGLTPKQHSTGGKERLLGISKRGDPYLRKLLVHGGRAALYAARNKDDPLSQWAKNIAARSRPNVAAVAWANKTARIAWVMIRHGCDYQPERATN

SEQ ID NO: 80335 - protein, 323 aa, unidentified
MNKDRIYFGIDISKDVFDVMDSSGNYFQFENDFKGFNNFVKLLSEKSHCVMEATGYYHYKLAYYLIENNIKVSVENPLSIKRFIQMRLSKIKTDKSDAKMICLYAQSVDLKLWEGQSKSQIECLQITRLLSLYFKQTTALKNKIHGEDVLGNPSLFVVRSLKRSLKHKQKEIKSLEERLAEIVKQDHQELLTRLESIPGLGRKTSLMLIVLTDGFERFKSASELCSYSGLTPIIRQSGTSVKGRPRISKMGNKKLRNLLFMCSFTACKNNKACKALYDRIVAKGKSKKLALIAVCNKLLKQAFAIAKSGLIYDETYRSTLVKN

SEQ ID NO: 80336 - protein, 340 aa, unidentified
MNTITTIGLDLAKRVFQVHGLDQDGQPVLRKQLRRGQVLKFFATVSPCLVGMEACGSAHHWARELQAQGHDVRLIPPQYVRPFLKTNKHDAADAEAIAEALVRPSMRFVPIKSTAQQAVLMLHRSRELLVKQRTMFINAIRGHCSELGMVASQGASRVKDLITIIEDPEDPRLPAVAREALSVLIAQLAVVKEAIRTLESKLQAWHRSQQASQRLTTIPGVGVITATALVATIGDGTQFKSGRHLSAWLGLVPRQHSSGGKSRLGRISKRGDGYLRRLLVHGSRAVLRWQRGAPKKPSPWIGELLARRPTNVVLVAMANKTARTVWAMLSKQQDFNPVLP

SEQ ID NO: 80337 - protein, 352 aa, unidentified
MKTETTALVPKLYIGIDVHKKSWTFHYQTDLFDGKTITQPANPHTLVEWVQKHYPSHEVTCAYEAGFSGYSAARLFQKQNWNVLVLNAADIPKPQKQNVVKTDKIDCRNICKQLKNDALSSITIPEEQRESFRSLFRERNNFVEGLRHVKLQIKSHLMYYGIVIPEEFDNPNWSKNFIEWIKIQSMPYETGTEKINFLLKRFNFMHYELLNISNQLRAYARKHYKNDYYLLMSVPGIGGIVAVSILAELGDLRKYNRFDDLASSVGFVPGMYSSGDTTIVSGITPRAKGLLRSYIIEASWQAVRFDPVLQEYYRSHYGKKPNKIIVKVARKLLSRIHAVIKTETPYQIGVIK

SEQ ID NO: 80338 - protein, 343 aa, unidentified
MPIVGGLDIHRKQITFDYLDTATGEVRRGQIAPADREHLAAWLAGRFTGQDAHFAVEGCTGWRYVVEELAAAGVTAHVAEPADTAALRGRKRHAKTDKTDSRHLRQLLADGRLPECWIPPSHILECRALLETYHDLRVEHTAWTQRIHAALFHQGAPQLGGRLRTGEGLAALQAIAAQLSPTGQLQIAVALDKLAALDRHLDVLRRRLLEAARQLAGAKELHARLYGVGPVTALALVCWLGGEGRFSSARKAVRFAGLDITVWSSDRKGPPGRLSRQGPEVLRWCVYEAGKTHARGSAPDHGYYASVKDRIDGKRAALSEARKIIRQAVHILAELGDGALAPA

SEQ ID NO: 80339 - protein, 404 aa, unidentified
MDTILERCAGIDVGKKIAVGCLITDQGRKAPTVQIRTYGTAVTQLDQLRDWLKQAGCTHVVMESTGSYWKPIFNVLEATMTVVLANPAHLKNVPGRKTDVKDCQWLAELLRHGLIRGSFIPPRPIRELRDLTRRRRRLIATGTSERNRIQKVLEDANVKLGCVLSDLFGVSGQDMLEALLEGNPTAEQVAQFARGTLKRKIPEIIASLEGHRLSDHHRFLIRQCLAHMDFLESQICDLDAEILRKLQPYQQQFELLQTIPGIKADAAASILAEIGSDMSQFPTAAHLASWAGVCPGNNESAGKQRSGKARKGNAWLRGTLSQSAWAAANTKNCSYKSRYRRLAARRGKKRAVVALVHALLRTSYYVLRRASPYQELGSDYLDERRREALIRYHTKRLHELSVSA

SEQ ID NO: 80340 - protein, 476 aa, unidentified
MNAKTTSKKNQVVSKNIFEREELVKKAEEISKDLRASSWKDLETHGKFAKNDKISFISDDMLVAGCDIGSETHYLRAIDTRGRELSPKAFSFHNNAEGFASVKAWLLELAARHGKTQIVVGLEPTGHYWFCLAAWLVSNGISVVQVNPYAVKQTKELEDNSQRKDDLKDPKLIANLVKDGNYGMPYLPEGNYADIRRYALFRDQLMEDRTRAVNRLHRELTIHFPEYKDAFGKVDGAFTMALLQVAPFPADLKAIGADGIRDLWHAAKLRGRGYSRAEEIIRYAEQSVGLQDGVDASREAVIHFAGQVAMLDEKLAEIGEKLHAKCMELPHAENLLEIPGIGGTILSGIISEMGDLSRFDTAKEIQKMSGMSLVACSSGKHQGETKISHRGRKRLRYWLFQAAKSVTSHASEFKEIHAYYTTRERNPLKKMQSLVVIACKLLRVIFAIFKNGTHYDPKKMLRDIRRQTGTGMPAAA

SEQ ID NO: 80341 - protein, 453 aa, unidentified
MRTKKTKNSQTGKFSGLKIINRDVAGIDVGATLMQVCVPSDRAENNNRAFGTCTKDLREISAWLRQCRVSKVIMESTGIYWVQLFRMLQQDGFEVYLVNAADAKNLSGRKTDVDDAEWLMVLLAYGMFKPCYQSDADSRRLRTYTRLREQYVGMSSTSVQRMQKALELMNVKLTEVLSNIVGKSGIRMIEDILAGERDPDTLASYADPRCKATKEEIMASVEGTWDDDHMFALSMAYDDYKTAQSKISQCDAKIEETAAAMTVPLDIPGERRVKSGKRAYKKNAMAVNVEEYCYRAFGVNIMAIPSVSHSAALTILAELGPDFVNKFPTANKFAKWCNLAPNDKITGGKIVSSKMLRRKNKVGQALRQCAMTLSRTKDALGAYYRRVKSRTGGIQANVATAHRLAVIIYNMIKNKTEYDESKVSKPSLTMLEKRRTRLLTSLRKLDESIASIC

SEQ ID NO: 80342 - protein, 339 aa, unidentified
MALYVGMDLHSRNTLVGVINSRFQRVFEKRVANDLSLIVDTVEPFRSELQGIVIESTYNWYWLVDGLMDAGYKVHLATPSANKQYEGLKHTDDRHDAFWLAHLLALGILHEGYIYPKEDRPVRDLLRKRSFLVKHRTAHILSLQSMLEREQGYKVKSNEIKRLKAEDIARIFREEHLLLSAQANRSSIEFLGQQIKMIEKAVRKRVKLRKSFEYLLTVPGIGEILAVTIMLEVGDIARFARVGNFSSYARCVSSQKLSDGKKKGQGNRKNGNRYLAWAFVEASHHARRYNERLRSYYQRKCAKRNQAVATKAVCNKLARACYYIIRDQVPFREEALFCS

SEQ ID NO: 80343 - protein, 426 aa, unidentified
MFASSVDEDQIIARVAALDIGKAELVCCVRVPASGGSKRRVQEVTTHTTMTRSLSELANRLLDLGVDRVVMEATSDYWKPVFYLLEAHGLDPWLVNARDVKHLPGRPKTDVLDAVWLCKVAERQMLRPSFVPPRPIRVLRDLTRYRIDLVAARTAEKNRVEKLLEGACVKLSVVASDIFGVSGRAMMAALIAGERDPKVLADLAKARMRAKIKILEEAFAGLPAGGFGEHHRFLLQRMLGRIDAIDADIGLLDAQIEAHLAPFDQAVQQLDEMPGIGPVAAAIIIAEIGVDMSRFPTAGHLCSWAKFSPGITSSAGKSKGSGSTGHGNRYLARVLGEAAVMAGRSDTFLGDRYRRIARRRGKKKAIVAVGRSMLVIIWHLLSEPQTHFHDLGADHYARTVNTETRKRNHVRQLEALGYRVTLESAA

SEQ ID NO: 80344 - protein, 349 aa, unidentified
MKYYIGLDAHKSTCTAVVVRENGDQVLRETFPTTEGNLVGFLHKIDGEKHLTFEEGNLAQWLQLLLRPEVDHLLVCNPVYVAKKQGAKTDFRDALHLAQELRTNHLKPVYHDNSKWMELRTLVNSYSDLIEGIVATKLRLKALFHSFGLSTDEGNFYENREQIKELPNEVAKFVAESFFTQMEALEKQKAEYAEYFRKNRQRHRPVRNLCSIPGISDVRANMIVAIVCSPQRFKTKHQFWGYSMLVRHIQMSGGKIYGNRRVHGRKELRDVFIGAAENALRGESALRGYYDEQRAKGLAHREAKLALARKIAGLSLALLKNNDTFKNDFEHQQMEKVAIRKTLNLEATI

SEQ ID NO: 80345 - protein, 341 aa, unidentified
MKLYGGIDLHSNNCVINIIDEDAKVIFKKRVKNDIELIKTIFKPYSDDLTGLVVESTYNWYWLVDGLMEAGFQLHLANTAAIQQYSGLKYGDDDSDANWLANMLRLGILPEGYIYPKKERMIRDLLRKRNQLVQQKTKNLVSIQGLFDRHINGRIKSEFIKKLTEEQLNLYFTDPNVRMAIESNLVVLRCLIAQIKAIEKSLSQQVKLRDEFINLTSIDGIGLTLGLTIMLETGDISRFDKVGQYTSYCRCVNGARYSNGKKKSKTNTKNGNRYLSWAFIEAANFAIRYNETVKKYYQRKLAKTHIMIAKGAVAHKLARACFYVLRDGVKFDVNKAFGVSK

SEQ ID NO: 80346 - protein, 413 aa, unidentified
MKPISTSFAAKIGLDWADIKHDICLKPKTSEKLEYSVINHTPESIDEWALSLQKRFKNCPIAICLELKAGPVVYALMKYEFITLFPIPPNALAKYRKAFTQSGAKDDPTDAFLQLDYLLKHPESLRPLLPEDLETRILQRLVEDRRDFVEKKVRLTNWITASLKSYYPQVLQWFGDIDTQLFCDFILQWSTLEQAQHASAATLRQFFKARRCVQDSVIEKRIKAIEKSMPLTTDEGVIIPFERLTTSLVRQLSQLLATIQEYDTDIAQRFEQHSERELFESLPGAGAALAPRLLAAFGTNRERYASADELARYSGIAPVLERSGQKVWVHWRYSCPKFLRQTFVEWANQSKKYSYWAKEFYEGKRAAGKSHQATLRMLAFKWIRILFRCWQNRTPYDEATYLFALKKRKAMKV

SEQ ID NO: 80347 - protein, 359 aa, unidentified
MNATTVAVDLAKSVFEVAIADQNWKVIDRARLSRPQFERWFHNRAVGLVVMEACGSAHFWARQLQGLGIEVKLLPPKYVRAYVKRNKTDAADAAALLEAARCADIVPVRVKSVEQQALQSLHRVRSAWMATRTSRINGLRGFCREFGITIAVGSRLGVEQISRVLVDSSTAVPAMLRDTLKLLIDEIRLLEARIAQLERELTAAAKASAACERLLSVPGVGLLTATAMVAATGGSVSHFKDARHFSSWFGLTPKEHSSGSTRHLGRISKRGDRYLRMLLTHGARSVLRAATVAQRCGRPLDPLRQWGLNVQSRSNHNKATCALANKLARICFATLRDQEPYEKTNMLKKVERQAYPMPA

SEQ ID NO: 80348 - protein, 316 aa, unidentified
MLYVGIDIAKNKHDVTALNVPGKTVLKPLTFSNNKAGFELLDLSLRQLNQDCLIALEDTGHYAFNLLNFLHEQGYKVYTYTPLLIKEFAKSLSLRKTKTNKKDAHGIALKLLSDPNREQFQHDNRQVELKILARHIHRLKKKQSDWKVQYTRCLDIIFPELDKIVGKHSEYTYQLLTCYPNPQKRLEAGFDKLIEIKRLTASKIQDILSVAPRSIGTTSPAREFEIIENIKHYKRLIDKAETCVNDLMAEFNSIITTVTGIGNRLGAVILAEIQNIHAFDNPAQLQAFAGLDSSIYQSGQIDLAGRMVKRGSPHLR

SEQ ID NO: 80349 - protein, 338 aa, unidentified
MKKRYFLGNDIAKETFDFCLLNAKKICLWRGRLSNNAAGFKALLEGLKARGIKLKAIHFALEATGVYGRALIGALHRAGLAVSVLNPAQVKFFATSYNRRTKNDRVDAELIALYCLERQPMATRPLRPVEEQLKVLVHECETRVNEQTRERNRRHKDHYQSAGLPPILHLQRRQRLEQLQSQIGQLDRAIDALLGSDPQLSQHAKLLCTIPGIARRTAAKLLAELAGKEFSSARQLAAYAGLTPEERRSGQNLYGKTRLSKIGNAFLRKALFMPASVTRRWCMPIAKWANSLEARHLEPLQIRGAVMRKLLHLVFGVLRHQQPFNPVRTSRPTLTHVA

SEQ ID NO: 80350 - protein, 360 aa, unidentified
MEGNQERSDRRIVGGVDTHKDLHVAAVVDEVDRVLASQCFATTRHGYKQMLAWMRTFGSLQRVGIEATGSYGAGLLRYMQKAGVEVLEVTTPDKHDRRKRGKNDDLDAQNAAHAAFAGKRTVTPKSRDGMIESLRVLKACRKTAVAARRVALQMIQNTIVCAPDELRETLRKMTRMQLIRTRAAWRPDLTDYRNVASAYRITLKSLGRRYLELHDEIADLDTMIVAIVDELAPALVARNSIGHETAAQLLLTAGDNVQRLRSEASFAALCGVSPVPASSGKTTRHRLSRGGDRAANSALHIIAIGRLRTDPRTQAYVAKRITEGHSKLEAIRCLKRYIAREVFSLIKQRSQESHPAPTAA

SEQ ID NO: 80351 - protein, 462 aa, unidentified
MTPRRRKDGRIVPAPQPLPVTNPHAAGIDVHAARHYVAVPPAAVPADVTAGRPPHVRTFGACTADLEALADWLKACGVTTVAMESTGVYWIPLFELLERRGFAVYLVDPRQTRHAPGRPKSDVLDCQWIQRLHSYGLLTASFRPDDQVVVLRGYLRQRQMLIGYAGQHVQHLQKALEEMNVKLTEVVSDVVGVTGLAIIKAILRGQRDPRQLAQLRHERCRRTEAELARALQGTWRQEHLFALRQALALYECYHARLAECDAQIEACLGAFADQRGGRALPPKPRRRGRKANDVRFDVRGALFRLAGVDLTVIEGIDAATALVLVGELGTDLSKFPTVKRFVSWLGLCPQHQGSAGKIKSRRVRRGSNRAARALRVAAQGCHRAHNALGAFYRRIAARAGGGKAVVATARKIAERVYRLLRYGEAYVRQEQGACEEAYRLRQVKGLARKAQELGYRLEPATP

SEQ ID NO: 80352 - protein, 341 aa, unidentified
MKYVGVDLHKQSITLCVMVKDGDTRKVEQRRTLKCSETESIRKFFEQLSAFRVVVEATSHYEWFLLLVEDLADRCVLAHPKKLRVIAESKHKSDKIDARILAEFLLLDMIPEAHRPTPRVRQHRVLVRHRQAIQSQITSVKTKLRHKAAFYNSDIAKLFTVRGMEHLAKIAMSHADRFECEALREQLLFLAKQLKAAEEELASFARTGPVAEQESRAVLATMPTVGPVTVDVVLSETAGVRRFRNSKKIVAFAGLDPGFRESAGKGKQLHIAKDGSGLLRWALIETAWRLVRRSARWRRLFMKLQGSTGHKKKAIVGVARRVLCVMYAMLRDGKAYRLEAV

SEQ ID NO: 80353 - protein, 356 aa, unidentified
MTPQSTKLDFAGQHLFVGIDVSKNSWKVCILTQTVEHKTFTQPPRPEVLVAYLRRQFPGATYHCAYEAGYCGYWIHEGLTALGVDCMVVNPADVPSIHKERTFKTDRIDARKLARALRNGELMPIYVPDRRALEDRSLVRTRYSLVRKQTRCKNQIKGLLGFYGVPLPQEPSTENWSKRFVVWLEQLTMQSPSGTQALTALIQELKYLRAMVADTTKQIRTLAHEAPYCSYTMHLITIPGVSSLAAMIFLTELVTLSRFRTLDQLSSYVGLVPGEYSSGEREITTGISQRRNPFLRGLIIECAWVAVRKDPALLVAFTKLCTRMPKHQAIIRIAHKLLNRIRFVLKHQTSYVPAVV

SEQ ID NO: 80354 - protein, 392 aa, unidentified
MGIASAGATFTVRWATARNTPRARPLTLAQTPDGFAALQSQLQTTSVPPQATLVVMEATGSYWVALAVALHQAGYAVSVVNPAQAHNYATSLPRRSKTDALAAALLTQFAAERQPARWTPPPAVYHELRQRLVARDVLMAMRQQARNHRHALRQWPVVVASVQSHLDDRITELDDRIGTREGELAQVLANGAWAESARLLETIPGIGMRTAAWLLVLTINVSLWRSAAAAGAYAGLVPLDYRSGTRVHGRAAIGHGGNARLRHAAYLATLSAARHNPSIRVCYQRLRDAGKPMKVARCAAARKLLGIAWAVVTKQRACTPVMSAEPRTEPTEELGAPAVRTAPATPPGQGRAGATNESVREAPPPDGPACARLGLDRRGRLARPAPARPQAE

SEQ ID NO: 80355 - protein, 395 aa, unidentified
MKNIYIGIDVSKEQSSAQGLDEKGGKVFYIEFSMNARGFAELQKTIDKNCKKQTKLMAAMESTACYHITLFSYLTSKGITSFIITPLLISNFVKLSLRKTKTDKKDALAIARFLLLHKDSLEQQRLTSDMLDMRDLARQRESLVDQTRAVKMDMKRLLNITFPELEKVCGLYTKSMLRFLTHYPSAHAVKNAESSAIADVLIPGSWGHNTLEDVKRIKDTSETSIGINSFTKEIIIKQKASLLIQLNEHLDEITSLLIDHCQSLMREDMEILNSIKGMGDKITTNFLVEIGGDISNYANHKKLIAMAGIDPAIYQSGMHEGRGKISKRGNKHLRRVIWLMASSVIQCNEFFKTYYLKRREDGLPYKKAVMATAHKLIRIIFAMLTNRTLFNVKAN

SEQ ID NO: 80356 - protein, 460 aa, unidentified
MRILGIDLAVVAKHRAILADERGRFIGRLVKFRTCQADLERVYALARRGMTPDEPLAVVLEATDIVWYPVAIFFQQRGATVYLVNPRMAADLARFYQRYAKSDRLSAQTLARLPVVNPDSLYPWVRSGPDYLALQRSCKEVERLTTQASAIQNRLRSTDHLGWPDLHRRVFANPFSRAARWFRDHFYDPRCVVEAGVSGLRRAWRAAEVYDGDEDWIEPLLTLAQEVLSLYGEQGSYLDYRALAEEVQREQRRLAELEADAHFVRLQVMRPRYRQLHPSRNLETIKGVGQDGAAVHVAFVGDPSRFASNRAFRGWSGMVPYSDQSGEREGKGLRITQAGPDPVKKYAFLEAESARQWDPQIAAIYHDQMVNKGNHHTQAVCACATHLLDRIRVILTQDRPYELRDVDGTPVTTQQARAIIAERYTVPEEVRRRNTRRARRERAERRAERKEKKKRRSRSR

SEQ ID NO: 80357 - protein, 349 aa, unidentified
MASLPAVVRQVTVGVDSHKDVHVAAAVDQVGRVLGTTWVPTTTQGSAQLLRWATRLGQVQRFGIEGTGSFGAGLSRWLQQQGYQVVEVNRPNRQTRRRRGKSDPVDAEAAARAVLAGEATTTPKAANGTVEMLRVLRVARRSAIKARGQAANQLHSLLVTAPDPLRHQLGGLPLARLVQVAAAVRPGPLTDPQAATKFTLRELARRYQFLTAELERLDAQLAALAPKAAPRLLARRGVGAQVAGALLVVAGDNPGRLRSEAAFSMLCGSSPLEASSGKTVRHRLNRGGDREANNALWTIAMTRLSCDERTQRYLARRTAEGKSKREIIRCLKRYIAREIYRDITATVGS

SEQ ID NO: 80358 - protein, 359 aa, unidentified
MQRQVKQLDFSGQNIYVGLDTHKKQITVTILGEHCSHSTFSQPPEAKVLARYLRKNFPGANYFAAYEAGFSGYWLQESLQAEGVNCIVTNSADVPTKDKERKQKRDPVDSRKIARSLRNGDLDAIYVPSKKAQYDRSLLRSRDRLVSNLTRCKNRIKSIFNFYGISYPAQFSQLGTHWSKRFMQWLKQLDLGDQSVNASIGAFIEEAEYLRALLLKITREVRSLSRTARYANKVKLLCSVPGIGNLTAMILLTELDEIDRFKKLDAMCCYVGLIPTVASSDEKVRVGDITPRRNKILRKALVESSWVAIRKDPALMMKYNELCGRMKGNKAIIRIAKKLLNRIRYVLIHEQEYELAVVA

SEQ ID NO: 80359 - protein, 350 aa, unidentified
MVAELVDYVVGVDTHRDEHTLALVEAATGAAVVAQQTVARNGRGYAQALRFAQQRMDAARVWAVEGAGHYGAGLARYLSERGETVLEVGRSARGERRQRGKDDELDAVRAARTALRSEPLPRPRSGERREALRLLLVARRSAVDVRREALVQLRSVIVTAPERLREELRGLPVQRLLDRCSRLRRSTTSTPNQVAARLVLRTLARRIEAATVEADELEREILVHVRALAPELLDEPGVGPIVAAQLIAAWSHRGRVRSEAAFARLAGVAPLPASSGQTRRHRLSRGGDRQLNRALHTIVLHRRQHDPATKDYIAKRIAEGKSRRDATRLLKRYLARHLYRLLQHQEPLLA

SEQ ID NO: 80360 - protein, 342 aa, unidentified
MKDTMIGVDLAKRVFQLHGASLAGHLKFRKKVTRVQFRHFMAKHEPAVVVMEACGSASYWAREMVKLGHEVRLIAPQYVRPFVKRQKNDAADAEAIVAAAQRPEMRFVEPKSEDQQACAVLFRARERLLHQRTELVNALRSVLYEYGHVFPKGIAHLRRIEAVLTDPASDLPALVRDECQDLLEQISEQTARIEAKTAKTRGLAGTNDTARRLQTMPGVGPQTALAISGFAPPMASFKRGRDFAAWLGLVPRQYSSGGKERLGRISKAGQTDIRYLLIIGAMSRLTVLARKSIQEGSWLARMLHRKPLMLVAIALANKMARAIWAMMTKKEDYRDPARAVST

SEQ ID NO: 80361 - protein, 424 aa, unidentified
MREEGLSMAEEIEWFVGIDWASQSHQVCLVDARGECLGERAVAHGGLGIEELCDWLIARTGATPEVIGVAIEMTQGPVVEALLERGFCVYGINPKQLDRFRDRFTVAGAKDDRRDAHVLGDSLRTDRHAFRRLSNDEPVIVKLREWSRMADDLQQERARLASRMREQLWRYYPQMLELADDLAADWFLDLWNQAPTPAKAARLRQTTIERFVKAHRLRRWQAPEVLRILKQKPLSVAPGVVEAASDHIRTLTVRIRLVNQQLKAAHRKLDELCAQLVPSEEDEPGQQCEQRDVVILRSMPGLGRTILAVLLAEVWQPLRRRDYHALRSLSGVAPVTRRSGKTCVVVRRYACNKRLANALYHWARLATQHDALSRRRYAALRQRGHSHGRALRTVADRLLSVACTLLEQQTLFDPTYEVREAAGA

SEQ ID NO: 80362 - protein, 409 aa, unidentified
MRYYVGVDWADQTHAVWVVDERGTKITARTVPHTAAGFSEWGRELDEWRAQGIEQWAAIERPDGRVVDFLLDHGVVVYPVNPKALDRARDRFRQSGAKSDPFDARVLADFLRTDHPHLQVLQPSSDVAQELKLLTEDCQRHIRQQTRLVNQLTTTLKAYYPRALEVAELTTALAREFLHAYPTPEALTALTERQWQRWARGRRLSEARIGALWNVLQQPQLPVPAHVVRAKARLMQSLVEQLTPVVTAVAEYRKAIDDFFACMPAAQWARTLPIGKRGITAPTLWARLGDAPGRWESFRHLQAQAGTVPVTKRSGKQRSVHFRFACDKSLRHVVDQVAFLSLLSSDWARAYYDQQRARGHAHHQALRALGAKWLKIIFVMWHRQVPYDEQYHLATMARQQLRQRQPQIA

SEQ ID NO: 80363 - protein, 419 aa, unidentified
MVQEDDNSLVSVVHPICCGLDVHKETLAACLLITGADGRIQSEIKEFATFTDDLLRLREWLAVNDCPVVAMESTGVYWRPVHNVLEGQVTVILVNARHIKNVPGRKTDVADSQWLAGLLRLGLLKGSFLPPQEVRQWRELARLRKHYQESIGDFKRQVHKLLESANIKLAAVLTDIFGATGRLILERLAHQDGIPDLSDLERGPGRPLRHETQELRRAVGGFFTAHHRFQLCLLLRSIRQLEGQLGEVLLRLEEQLTSHQELRQRLQVAPGISQVASAGILAEVGPSLADFRSSDALSSWCGLCPGNNQSAGKRKSGRSPVRSHPLKTLMVQVAWAAVKKKGSYYKDKFHRLRYRLGPKKAIVAIAHRLLKAVYHIIKDGAAFRDLGEEYLQRRHHAGRLNYLKKQAQLLGYQLIPATV

SEQ ID NO: 80364 - protein, 375 aa, unidentified
MKEKVRFLGLDVHAETIAVAIAEPDGEVRSLGTIVNRADSIRKMIKKLGSVEQLKACYEAGPTGYVLYWQLAEMGVACEVIAPTLVPMKAGDRVKTDRRDAERLVRSYRSGDLTAVWVPDEGSESLRDLVRAREAAKQDQLRARHRLGKFLLRIGQRPAAEMKAWSAPYMAWVRQIHFTQVAREATLLDYLHEADHMGERVKRLEQSITEAVKLAAPAVQEAVKCLQALRGIAEISAVTIVAELGNITRFDTARQLMGYSGAVPTENSSGQRIRRGNITKTGNAHLRRIVVEAAWSYRYRPATGPRLRKRQEGVPEPIKEIAWKAQVRLHKRSMALAAAGKDQRKIITAVGRELLGFIWAIGIKAETAVMQKMAA

SEQ ID NO: 80365 - protein, 450 aa, unidentified
MMREVQEIEDEEHEQILERVCAIDVAKAPGKVCTRVPHPSRPGARRTRVQDVDATTNAILELGGHLAGEGIEKVTLESTPDYWRIWFYLLEASGLDVQLVNARDIKNAPGRPKTDKLDSVWQAKLTERGMLRPSFVPPAEIRRLRDYTRLRTGLTRERTRYWQRLEKLPGDSLIKVSTVASSLDTLPVRDMLEALIAGERDPKVLAGLARGKMKAKHAALIEALTGRFDDHHAELARMLLDQVDALNAQIGKLTTRIGELIAAIPSAQGVGADGTTGPAAGTSPGAPVLPAAARLDEVTGIGLDGAQAIIAEIGLDMSRFPAAAHLVSWAKLSPRTIQSGTSSRSGRTGKGNPYLKGILGEAAAAAARTGTFPGERYRRIVKRRGKLKALVAVARSILVIIWNLLASPAARHHDLGSGYHASRTDTGKKVRNHIRQLEAPGYTVALTQAA

SEQ ID NO: 80366 - protein, 310 aa, unidentified
MILALRCVGIDVSKHHLDIFDEAVGAAERIANAPHAIIELVARWRCDAFVVFEATGVYDRELREALRQADVRFSRINPARARDFARAGGQIAKTDPIDARMLAAFARAMQPATEQVSTTARSALARLAKRRDQLVLMRAQEKNRRSEVDDRIMAQRISRLIEVLDCEISAIETEISEFIKAERGLAEEARLMRSLPGVGPVACMQLIAQMPELGHTGPKQVAALAGLAPFNVDSGAYRGKRKISGGRKRVRDALYMAALNAIRRDGPFRAFYQRLRTAGKPAKLALIAVARKLLTILNAMIRDRQPYLPT

SEQ ID NO: 80367 - protein, 334 aa, unidentified
MENIALIGIDLGKNSFHIHCQDRRGKAVYRKKFTRQKLIEFLETCPATTIAMEACGGSHFMARKLEELGHSPKLISPQFVRPFVKSNKNDFVDAEAICEAASRPSMRFVQPRTESQQAMRALHRVRESLVQDKVKTTNQMHAFLLEFGISVPRGAAVISRLSTILEDNSLPLYLSQLLLKLQQHYHYLVEQIKDLESQLKRKLDEDEVGQRLLSIPCVGTLTASTISTEIGDGKQYASSRDFAAATGLVPRQYSTGGRTTLLGISKRGNKKIRTLLVQCARIFIQKLEHQSGKSADWVRDLLCRKSNFVVTCALANKLARIAWALTARQQTYVA

SEQ ID NO: 80368 - protein, 341 aa, unidentified
MGEVSTIGLDLAKTVFQAHGADASGGVIFRKKLRRDKLLEFFAGQPRCLVAMEACASAHYWAREIGALGHETRLIPPAYVKPFVKRQKNDMADAEAICEAAQRPTMRFVAPKSAEAQGAAVVFRTRDLLVRQRTQLINALRGHLAEFGFIVRQGPGHVGKLVDLVFDPSSELPAEARPVLAVLAESLQAIQARIAVLDRDIAARAKADPVVRRLMTIPGVGPIIATALVTLAPAPSTFRRGRDFAAWLGLTPKQHSSGGKERLGRTSKMGERSLRRLLIIGASSAAKNAGREGSRASPWLVGMLARKPRMLVTVALANKMARIVWALMAHGGTYKAPAAAV

SEQ ID NO: 80369 - protein, 378 aa, unidentified
MKNVRFIGLDVHAETIAVAVAEPGGEVRSLGTIPNRPEPIGRLICKLGKPEQLRVCYEAGPTGYVLYWQLSELGVKCEVIAPTLVPVKAGDRVKTDRRDAEKLARCYRAGDLTPVWIPDAAHEALRDLVRARLAAKRDQLRARNRLGKFLLRHGRRAPLGSTAWSTRHLAWVKQQSFEQDARQATLVDYLHEVEHAAERIVRLERSIDMAIETLPAKMRAVIEALQSLRGIAKVSAVSIMAELGEVSRFEHPRQLMGYSGIVSREHSSGERTRRGGISKAGSAHLRRIVIEAAWAYRHRPGLGTTLLARQRDLPEEIKAMAWKAQHRLHARYAKLLAKGKAKQQVITAVGRELLGFIWAIGIAAERSQAPRRALERAA

SEQ ID NO: 80370 - protein, 345 aa, unidentified
MKKVVKQVAGIDVAQKELVITLGRMHDDFSIDLYAYSVFKNSDSGIKALLKWVLKYTLEEVSIHFVMEATGIYHEKFAYFLDENGYSLSIVLPNKISNYTRTLEQKTITDKSCSQAIAQFGLERKLDPWIKPNVVYKSLQQLTRERDQIVKERSSIKNQIHAEKTQAHPHPKSLSRMEYRIAFLNQQEREIKADIEELLRANPSINEIVERITTIPGVGRLTAVITLAETNGFELIRNKSQLTSYAGLDVKEKQSGTSIKGKPRISKRGNRNLRRAMHLPALTIVKWDENYKNNYARLVAKHGVKMKALVAMQRKVLELIFILFKNETTYVKDYVIKNSVKTQMV

SEQ ID NO: 80371 - protein, 351 aa, unidentified
MYYIGVDYHKKYSYIVVKDEQGRREQKGMVDNTRQEFQKFLELYQPGKAVLEATRNWELVYDWLEEILDDVVLAHPLKVRAIAEARIKTDKISADILADLLRSNLLPEAYVPSKETREAKSILRQRMFFVRVQTMVKNRIHTISDRHPEVLSDAPDVSDLFGASGIEWLKQAVFPGEDNRLLVSELELLEVLKHKISQSNGIVRELGRGDNKVKLLRSIPGLGPFFSVLVAKEIDDIGRFSSPKKLCAYAGLVPSTYASGGKVFHGRITNQGNKWLRWALIEAVSPAVRSDPDLHAYYERIMIKKGRNAAKVASARRLLTIVYRVLTQGRLYERRTCKRIDLTRLPSCVPS

SEQ ID NO: 80372 - protein, 428 aa, unidentified
MEQVDGIRLEQFRQLRKEIQKSEEYLIVGIDVSKDKHHAFFRTARGRTLFKRLVFENSYEGFERLLNQVEVLRLENGLGEVVFGMEPTGNYHKPLGEFLIRRLAQVVLVSNVAAKENRKTLDGRWDKHDGKDAANVADLVSQGKFLFYEYPEVRIKELRVLLALKRKLKRQEHGYRVRIRNHLVAKYFPELDRYFDQSEKYSLAIVRWCLDPRSLSGYEFDEFVRMVAPQMRGGQQGNRLRTILQMARNSIGCEMGPGAEYEARVMVEGLRQIRIVIGDTDKQIQELCQQFSEYEYLLSIPGFGPDVSSKVLGAVGDPYRFQNGHQVLKMAGLDLNAERSGKKAESARPVISKKGKADLRYALYQAAFVASTKNRHFMVYYTNQLRGREREPGIKTKMRVKLSAKMLIIAWTLMKKKEPFNPDYLNLE

SEQ ID NO: 80373 - protein, 320 aa, unidentified
MSKDTFVGIDVSNPWLDVATRPATKQLRVSNDDAGISEIVSILSEQGPELVVVEATGGLESPLVAALSVGGLPVAVVNPRQVRDFAKATGKLAKTDALDAEVLAHFAEAVKPQVRELADEKAQHLSALLARRQQLIQMLTAEKNRLKRATKPVQCRLKAHIAYLDKELDEVDSELSDAIKESPLWREKENILRSVPGIGPVSSATLLSGLPELGRISNKQIAALVGVAPLNRDSGTYRGKRKVWGGRKRVRRTLYMAALVASRSNPVIRVFYERLLEAGKAKKVALTACMRKLLIILNAMIRKSTLWDEHRYVSQVQTSS

SEQ ID NO: 80374 - protein, 331 aa, unidentified
MKKNQIIIGIDVSKATLDCFIHSVNQHFIVENSPKGFAQLLKIILKSTKCKKENLFFCFENTGKYSKRLSVFLHLEKISFLMAPALEIKKSLGITRGKNDKVDSTRIANYAYEKREKLTPTILQGEKNDKIKSLLSLREKLIRHRTAYKNGISDLYDCYKEGEINMIRDTQLRLIDAVNEEVDKIEVEIETVIKSDDSMKRNFELILTVRAIGRIIGFYLIAYTENFTSFIDARSFACFSGIAPFASSSGTVIGKSRVHPYANKQLKSLLSMAALSAIQFKGEYSEYYKKRVEAGKNKMSTLNIIRNKIVFRVFAVVKRGSPYVDLYKFAA

SEQ ID NO: 80375 - protein, 414 aa, unidentified
MLKIVYRVCCGMDVHKSFVVACIASTTEYGVTTYKSKRFSTFTGDLRRCAAWLAENSCKDVCMESTGKYWIPIYNILEPTCNIVLAHPKYVKAIRGKKTDKRDAKWIADIFKHDLVAGSFIPPADIRQLRDLVRYRWKLTNFTTGEKNRAQNCLTVSNIKLDDVFSDVFGKTASAITTRILENPAEKITDVSGFRTKGMKATNEQVLAAVDGEMCEEQAEKLRIIRSHMDSLQLCKLDLESLILATAEKYLPQLGLVMTVPGIQSFTAIGIISEIGVDMSVFPTSKHLCSWAGLTPQNNESAGKKKTTRISRAGAYIKPLLVQCALNAVRAKKFPEVRNRYLALKKRRGHKKAIIAIARMLLTAIYNILKKNESYNPELYRQTDRPPAHREVSVEEAIFILQRQGYLVAAPPTP

SEQ ID NO: 80376 - protein, 460 aa, unidentified
MNEYFIGIDASKGYSDFVMLNAKKQTVIDNFQLDDTFDGHAQLYELLHSFNKDNPEATIYAAVESTGGYENNWFQSLVTFQASLPVKTAHLNPLGVSHNSKADLKRNITDKISAKNVAEYLIAHPEKVSYQHQDSLASLRKQWGFITMLTKQSTQLLNQLESLVYNANPEILTYCKDGSPQWVLKLLTSYPTALRLSRAKVKVLARIPYISLDRAKQLIATAKKSVASASDKVTEQLIVATVKQIVHLKKTIKLQSEVLANECQIPEVALLKTFTGIGDYSAIGLMLQIQSVNRFLTSKKLSSFFGIHPEYKKSGDGTYKYRMSKKGRKEGRRILFIVAMSAVQSNPLIRDVYQQAVERGMEKMSAMGLCMHKILRILYGMLKHNKAFDPQIDLKNRQKKPSQKRKIGQDKNRRYQDFDSKAPISRRQKTRRKERKQSQNVINVEYGISEASVPSTQLAN

SEQ ID NO: 80377 - protein, 395 aa, unidentified
MSYKIAGIDVHKKVLMVVVMDASTPESKPERRRFTTMPSDLRRLLLWLREQGVEEAVMESTAQYWRSVWLELEPYMRLQLAQAFSNRAPRGRKHDFKDAERLVRRLIADELILSFVPHGEQRTWRNLTRMKLQLTRDQVRLQSQMECLLEEMRIKLSVVVSDLLGASGLRILRALAQGETDPKKLALLGDDRLKCTEEQLIDALTGRPQPMHREMLALQLERLQLMDEQIAKLNGLIAQAMKPHQDAVIRLAEVPGLGVDSAQQVIAEVGVKASTFPSAAEFTSWVGTCPGKDESAEENHSSRSAKGNKYLRRVLNQAAHAAVKKNGSHFQTVFRRLLPRLGYQSAIWAIAHRLCRVVWKILHEGVRFIEQGTEPDPKAKKQRARMLARALRKLG

SEQ ID NO: 80378 - protein, 446 aa, unidentified
MGNGSGLSRGDRNRNARLARLRELVPLSNAILGIDLADDTQAAVVTDHDSRVLARRRVSARAWELGELLEWAAGRAAGAGFASVTVACEPTGHRWRVLDQLAAGRGLALVCVQPLLVYRAREGEDLTRDKSDPKDAVLIARLASELRCYEPERADAVWARLRHLGARRGQLTTGATAAVNQIRDLLDCAWPAVLAASPSPFRSVTWCASLAVVLDRCAGDLGRVRRLGLDRFTAAVRRELPRWGGKRPCLRIIRAVFAALADPAGVTAHRPGALERAHLALGDWRDLRARLADTEARMGAVLEELGLADLVTTIAGLTVTGAAAILAETGDPARFATPRALVKHAGLCPRDNASGTAQGKTSISGRGRPGLRLAAWRAVWAAMPNNPVMAARFTYLTTRQDNRLARQQARTACAAALLRWIHVVVTRHVAWDPAIAAGTAPAHRAG

SEQ ID NO: 80379 - protein, 368 aa, unidentified
MTHQSTGLDNSSVHARSVRAAAIDMVTGEVIERTLPPQPDLVVGFVDDLAVEHGPVLVTYEAGPTGYGLARALLAAGHNCQVAAPSKLLRPSGDRVKTDARDALLLARLVRNDDIVAVSIPTQAQESARDLVRAREDARMVLMSARHRLSKLLLRHGYVYDADAWTGRHDTWLRRIRREQLLPGGFGTLTAFDDAYDAVTHTLARRDRLDVAIAALAADSEFTAVSRRLGCLRGISTTTAVALAVEIGDWHRLTGASIGSYLGLVPSEHSSGGSRNQGGITKTGNSHARRLLIEAAWEHKAKYIPGKTMQERWALAPAAAAARGDAGNRRLHHRWAVMTAHKKRHTVANTAIARELAGWCWSLAVMEE

SEQ ID NO: 80380 - protein, 326 aa, unidentified
MSRMQGKALPERSADAPVYVGIDVCKAWLDVYLHPVAIRLRVENAAEGVRKLKRVLAGHRTGLVVMEATAKYHRRAHRMLDAAGYPVAVVNPLRARLFAEALGVLAKTDRIDARMLAVMGESLKLNATPPPAEALQELQELVHARQAASAERTALANRLGASQVAFLRAELKRRCESLERHIARLNAEIERRLQSDPALMRRYAILLSVPGIGKTTAVALLVGLSELGVCSSKAAALLAGLAPLARDSGDKNSDRHIRGGRANVRKALYMAAVTAARFNPDLAAFYARLRAIGKPAKLALTAVMRKLVVLANSLLREDRPWLPIRA

SEQ ID NO: 80381 - protein, 451 aa, unidentified
MAKRKERQERRSVVLEPNAAGIDIGAEEIYVAVPPDRDEESTRRFSSFTCELHALADWLGRCRIQTVAMESTGVYWIPLFQILEERGFKVYLVNAHYLKSVPGRKSDVSDCQWIQYLHSVGLLRASFRPPDAICAIRTLWRHRGSLLEMAAEHILHMQKALSQMNLQLHHVLSDITGTSGQAILDAILSGQRDSVALAQLCHSRVKSPRDKVAQALVGDYRPEHLFTLKQSLEGYRYYQKLILELDQETARLMQALPSATEDPMPPRTKATAYHRQGNDPQFDLRSELYRIAGVDLTDIPGVSAATAQVILTEIGTDVSRFRNASAFASWLGLCPEKRISGGKVLSCKTRQVKHRAATALRMGANSLCRAKGYFGEFFRRMRARLGTAQAITATAHKIARILYHVLSTKEPYAETVFHRCDEQAQRRAEMRLRKQASRLGFQLLPIPATAE

SEQ ID NO: 80382 - protein, 402 aa, unidentified
MNAVGIDVSKGKSVVAIMRPFGEIVSAPFEINHTTSDINSLVELINSVDGESRIVMEHTGRYYEVLAHQLSKANLFVSAINPKLIKDFDNDSLRKVKSDKADAVKIARYALDKWQNLKQYNVMDELRNQLKTMNRQFGFYMKHKIAMKNNLIGILDQTYPGVNTYFDSPARSDGNQKWVDFASTYWHVDCVRKMSLNAFIDHYQNWCKRKKYNFSQSKAEEIYGKAKELVPVLPKDAITKLIIKQAVVQLNSASTTVELLRTLMNETASKLPEYPVVMAMKGVGTSLGPQLMAEIGDVSRFTHKSAITAFAGVDPGVNESGTYEQKSVPISKRGSSVLRRTLFQVMDVLLKTHPLNDPVYQFLDKKRAQGKPYYVYMTAGANKFLRTYYGRVKEYLSSLPKS

SEQ ID NO: 80383 - protein, 403 aa, unidentified
MNNVAGIDVSKGKSMVSVLRPFGEVVAKPFSIGHTGSELKELADYLKSLDGETRVVMEHTGRYYEPVARFLHDEGVFVSAVNPKLIKDYGNNTLRKVKTDKADSRKIARYGIDNWAELRQHTPMDTIRMQLKTLNRQQSLYTKTKTMMKNNLIALLDQTYPGVNALFDSPVREDGSQKWVDFATAFWHVDCVRNMSLTAFAERYRKWCKRHGYNFSQSKAVEVHAGAQDLIAMLPRDALTKTMVRQAIDALNAISASMERLKAEMQALAAQLPEYPVVMAMHGVGDSLGPQLMAELGDVARFTHRNAITAFAGVDPGADQSGTHEAKSTRVSKSGAPELRRALFLVMDCLLKTQPQDDPVYRFMDKKRAEGKPYLVYMTAGANKFLRIYYGRVKEYLASLEEN

SEQ ID NO: 80384 - protein, 328 aa, unidentified
MNEYIGIDVGKEQVDICWLRDPNTGKKKTKKFKNKPEVFSDIRQWLIEQTQIDSSRIIILLEATGVYHEGLSYFLYDQGFKLIVSNPGKAKKFSQSIGLIHKTDKSDAMMLARYGFSQQHQLILWEPEPKEIRQLKAMMRRLSALEKDYQREKNRLEASEISDSSERVLKSLRDMIAVLACEVSALKHDIDDHIDSTLTLCKNRQLLLTIKGVGEVVAREMVYLFAAKSFVNAKQVAAYLGLIPRLNESGVFKGRTTLSKSGPSRVRAKLYLASVSASTHNHEIKAQRDRLLKAGKTKMQALCAAMRKLVQICFGVIKNQTEYQVQVR

SEQ ID NO: 80385 - protein, 376 aa, unidentified
MREKLRFLGMDVHAETIAVAIAEPDGEVRSLGTIANREDSIRKFIRKLGTPEQLRACYEAGPTGFVLYWQLTQLGVDCAVIAPTLVPKKPGDRVKTDRRDALKLARSHRSGDLTAVWVPDEDSEALRDLVRQREAAKQDQLRARHRLTKFLLRTGQRPPLGLKAWTERYMRWLAQVRYTQPAQEVTRLDCMNEVEHMSARVKRLEEAILEVVKLAPQPMQDVIRGLQALRGVAHISAVTIASELGNISSRFQSARKLMGYCGVFPSEDSSGNRVRRGGITKAGNAHLRRIVVESAWCYRHLPRVGEKLRKRHEGVPPAIIEIAWKAQNRLHKRYMKLSMAGKDQRKIMTAVARELLGFIWAIAIKAEASCRQPIAA

SEQ ID NO: 80386 - protein, 366 aa, unidentified
MTVIGIDAHKDWHTLVAVDEVGRRIKELTVEARAVGHRKILTWLEDFETVTVAVEDCRHLTRRLEADLLEAGHRVVRVHTRLMAGMRRSSRERGKSDPIDAEAVARVALREEGLPTAELPGTSRDIKLLSDHRRTLVARRTAMQSKARWFLHEIDPELEIPSRALRRYHLLDELVEYLATADGAVAEIARDLLVDIRELTVRINTLESRLSRLVRASHPSLVAVPGMGTLGAAMIIGETAGIAGFRSRDAYARFNGTAPIPVWSGNKVRVRLSRGGNRTINTALHMAALTQIRMGAEGATYYDKLIAAGKTRKEALRLLRRRLSDRVYAAQRADLAPVTQTPEGGAPLEGPSTIEHPASSMPLMAA

SEQ ID NO: 80387 - protein, 323 aa, unidentified
MEHKLATTPEALKQVFGSMPWCRIAMETGTHSPWVSRLLTALGHEVIVGHAQKVRLITKSRRKEDRLDARTLARLARIDPERLSPVKHRSAQAQLHLTEIRARAVLVSARTALVNAARGLVKSYGERLRKCGTQQFGRETMSGLSKGLREALEPLLREVESINERIQEYDRRIEKMAKETYPETALLKQVKGVGDLIATTYVLTVEDPHRFRKSRDAGCFVGLQPGRRNSGDSEPQMHISKEGDEYLRTLLVQGAHYILGPFGEDSDLRRWGRKLSARGGKNAKKRAVVAVARKLAVLLHRLWVSGEAYEPLHNSQKTMSAAA

SEQ ID NO: 80388 - protein, 350 aa, unidentified
MNPTQVSSKSQVAVVIGIDLAKDHCDVVGYGANNKICLTKCGCSYPKLMEMLSNMPSAVVLMEACKGSMFRARAIASLGHDARLVKGSDVKALRNVNQKNDIRDADYIARLYYVPGTTYVYIKNEHQQTLQFLQNEYKSLQDMRINVGNQIHAGLEEFGYPARKSSVFIKNRLVEYLDKHVEHIPEEAIAALKRQRDLWLMLLEKEEDAQRRMEKIANTDADAKRIMTVPSVGPQTAVRLLAHIGGNIARFKNSRQFAASIGLVPKQNSTGGNTTLNGITKRGPKRLRANLVQCAGVALQNAEHLGGNLGEWIRKMKESGKKYGVITCAIAAKLARIIYRLMKDKVVYVP

SEQ ID NO: 80389 - protein, 315 aa, unidentified
MPLTIAAGIDAGHRFLDVGFAPSGKTFRVPNLAEGIASIIERLTRERVRRVVLEAIGPYAQRLVQALAVAGFEVGVVNPRRIKAFRDAEGRRAKTDRLDARLIARFALTMSDAVRPLPSAEQLARKALSMRRRQLTEMIAMEKTRLKQAIEPILLDSHRAAIADLSAECQRIESELARRLADDPELMRAFNILKSIPGIGDRIATVLVTDLPEIGQRDRKAIASLAGLAPHISQSGNAPPRAAIAGGRPCVRTALYMAALVAARHHPQMKIAYQALRNQGKPAKVALIAIARKLLVTANALVKANKKYDENSQPA

SEQ ID NO: 80390 - protein, 415 aa, unidentified
MIPAVIERCAGIDVGKKFVVVCLMTGKANEAPATDTRKFGTVRIELERLREWLKAEHCTHVVMESTGCYWKPVLNVLEDDPEYKLQVILANAKEVRPRKGHKTDRDDACHLAHLLRHGSIRPSFIPPRAIRELRDLTRRRKQMIGIAADERNRVQKVLEDANVKIGDVLSDVFGLSGQMMLEALVEGKASPAEIADLAQKQARKKIAQLTTALEGHQMRDTHRSLIRHAMRHMAFLADEVESLDGEIQRLIWDAGLDRAHQLVQTLPGIQRTAAATILAEGGPDMSQFPTEAKFSAWSGLAPGNNESAGKRKRSPSLQGNPHIKCAFVESAWSASRTKDSEFNRYYQRLCPRLGHKRALVAVAHLLAIRVYEVLSTHQPYERQPELAPKNIGRLIRHHTRRLNCLHRWLENSEQV

SEQ ID NO: 80391 - protein, 406 aa, unidentified
MPVYIGIDWSQTKHDICILNEAGAPLARVVVAHSPEGFQKLDAQRQPLGLAASECLVGIETAHNLLIDFLWGHGYQQVFVIPPNVVNSTRGRYRQSGARNDQSDAFVLADVLRTDRARLQPWKPDHVLTRQIRSRVSLLNHLTHQSVQLSNRLRAVLWRYYPAALNVFGTLDAQITLEFVRLYSTPQHAAALTLAEFKAFAQRHRYPRPKQLPARFACLQEPQPEADRDTVCVFQGEAVQLATLLLGLVQTKTTILKELRHLFEQHPDAPIFGSLPGAGELLAPALLAKFGDDRARFPSPASVQGLAGTCPVTAASGKKRVIKFRKACDREFRVIAQQWAMASLADSTWANAYWQHVRPHCDSNSHAYRCLANRWLAIVWKLWQTRKPYDEAYHLQQRAQHSQPRS

SEQ ID NO: 80392 - protein, 481 aa, unidentified
MAKRKKSTYERLLRCGPNRQQRKKLQRQFDDDSAELVVVHGNAAGVDVGNASHFVSVAPERDQTPVREFGSWTADLRDMVAWLKSCGITTVVMQSTGVYWIAIYDLLEQAGFDVYLVNARGTKNLPGRKSDVQECQWLRKLHTYGLLRKSFRPPAQIREVRTLWRLRSRVLEDSSRAVQHIQKALTTMNVQLANAISDVSGVTGMAIVRAILQGQRDPHELAKLRDPHIQASEEEIAHSLEGNWQRDVLFELQQVVDAYDFHRGQLNGIDTELQKYMTALPTREPVGEAAADVSQLSAKLRKKLKSNRKSKDNRPAFDLGAELARLMGVDLRLIDGIDVMTAQTIYSEVGADLSEWPTENHFASWLELAPRNNITGGKVIKKEKRPSNNRVTTALRNAAEALVRSDSYLGARYRHFTGRLVGLKGVKAMARYLACLVYRLLTKGPAWVDRGAAYYESKRRDRELVGLQRRAAAAGMKLVPV

SEQ ID NO: 80393 - protein, 479 aa, unidentified
MANEKKTESSKGPRLTWKQKKDLGRRIWSNSPGLEVVHRDAAGIDIGSREHYAAVGPDRDAQPVRNFGCFTVDLHRLAVWLKQCGVETVVMQSTGVYWIPVYDVLEQYGFDVWLVNARETRNLPGRKSDVQESQWLLKLHTYGLLKRSFRPAAEIRAMRSCWRERAEYVQQAGVCVQRMQKALTEMNVQLTMVLSDLSGLTGMKIIRAIVSGERDGKKLAEFRDPNVKASKEAIANSLEGTWLPEQLAIVGRQLADWDHVQQQMAACDKDLAALLKEMPVAKVKPVKAAATAAGKTGRRQRKKASKNQPNFDIAGELKRITGVDLTRIDGIQAMTVQTVISEAGLDMSKWPTEHHFVSWIGLAPRNEISGGKVLKKKTRKVVSRLATALRMAANSLRESQSYLGAQFRRLRSRLGPPKTITAMAAKLARLVYRMLKYGQEYVDKGTAQYEAKYRQQKLKMITRQAAEHGLALVPMANPA

SEQ ID NO: 80394 - protein, 393 aa, unidentified
MWRSRTRRGGDLAKARLPEGISGMARLHGLVGRFLPEDGDAAGVKIGIETDRGPWVAALVASGYQVYAINALQSARARQSQGVSGAKSDAGDAHVLADLVRTHSHQLPTVAGDSEHAGAVKVLTRMHQTLIWDRTRQVLRLRSSLREFFPAALEAYEDLAFPDVLELLTKAPEPNSAARLTRAQITAALTRAHRRDREAKTTAIMAALAAEHLTQPPLIAAAYGATVRALAALIGTSNEQITALQGQVEACFGQHPDAEIYLSQPGLGLVLGARVLAEFGDDPTRYDGARARKNYAGTSPITRASGKKKVVLARYVRNNRLADALHQQAFSALSGSPGARTYYDALRDRDISYNAALRQLGNRLVGILHGCIKTHTPYDEATAWNQHTQQAAA

SEQ ID NO: 80395 - protein, 404 aa, unidentified
MYNAVGIDVSKGKSTVAVLQPGGTVIRKPFDVSHTSQSLNELAAYLVSLDGDTRIVMECTGRYHEPILKALSEAGLFVSAVNPHLVKNFGNNSLRKVKSDPSDARKIARYTLDNWAELRQYSSMDNTRTQLKTLNSQFSFFMKQKVAAKANLIALLDNTYPGVNRLFDSPAREDGSEKWVDYAYSFWHVDCVRGIGLKAFTERYQAFCRRHHYNFQADKPEKLFNASKELVAVFPKEKTYKLLVQQSIQQLNLASGHVERLRREMNELAFTLPEYNTVMGIYGVGKTYGPQLIAEIGDVSRFTHREALTAFGGVDPGVDESGQHKSKSNRASKVGSARLRKTLFQIMRTLLQNAPEDDPVYRFLDKKRSQGKPYYVYMTAGANKFLRIYYGKVKECLRNLEQES

SEQ ID NO: 80396 - protein, 454 aa, unidentified
MDVVYQHCAGLDVHKKTIVACCLLSVPHGRLQREVRTFGTTTRDLLVLADWLITNGVTHVAMESTGEYWKPVYNLLEALVTVLVVNARHIKNVPGRKTDVKDAEWIADLLRHGLLRGSFIPPEPQRDLRDLTRQRTTLVQERAAVINRLQKVLEWANLKLAGVATDIVGVSARAMLEAIIAGEQDATTLADLAHGRMRSKRAQLERALEGRVREHHRFLIAQHLIHIDFLDEQIGVFDTEIAAQIRTATPGDDAPGPPEQSTPTDGTGAPAQPTPQVPDPPIAQGVPWDEAVELLDTLPGVGPRLAEILVAEIGTDMRRFPSPRHLASWAKVAPGNYESAGKRTSGKIGKGNRWLRSALVQAAHAAVRVKESYLAAVYRRLVSRRGVKKAIVAVAHKILRAVYIMLVRREPYRDLGASYLDSRRADRLIHGMQRRFEQLGYRVHLEPLTSTGIA

SEQ ID NO: 80397 - protein, 359 aa, unidentified
MLMLAEPNGKIEDRPLDAVVGGDTHRDTHTLFMLSVAGVVITQIVIGNNADGFARALAWIADNAPGPNVLVGLEGSRSYGVGLCRALQAAGLVVVEVEQPRKADRRGRGKSDPIDAHLAALAALRMPSDRKVLPRTDGDREALRILLAARNEMSPARTRQINQLRALLLTGDDADRELCRGAMTKAHLDAIARRRAPRGGETTEQAVRRGEARRLAVAIRTADIDLLENNKQLTALVKKFAPTLLDQKGVGPFTAAQAIVSFSHRGRCRNEAAFAALAGVSPLLASSGQHDRHRLNRGGDRQLNRALHTIMLTRWRACPRTAAYIERRRKEGKTDREIRRCLKRYIARELFRELTAATA

SEQ ID NO: 80398 - protein, 428 aa, unidentified
MDEVNRNRLEEFRQLRQEVRHSEEYLIVGIDIAKDRHYAFFGTATGKTLLKRIVFSNDHEGFRKLLDQAEALRVQHGLKKVVYGMEPTANYHKPLGEYLINLGRAVVLVSGVTVARNRESLDGRWDKHDGKDSANVADLVSQGKCLYYEHPSAELRGLRGLLSLKKRLKKQEHGYKVRIRNQLIAQYFPEMDRDYGRLGAEGLSIVRWCLPASQIAQLDIDPFIERVTSRRIRMEKRRRLEEVWEKAGESIGCEEVPGVNHEAKIMVEGLKQIRAMIKETEDQIKELCEQFSEYHYILTIPGFGPDVSAKVLGAVGDPDRFLNGKQVLKMGGLDLSADRSGKDSDKAIPEISKRGKADLRYALYQAALVASLQNRDVMVYYTNKIRGREREKGIHVKMRVKLAAKLLVIAWTLMKKKEPFNPAYLNAE

SEQ ID NO: 80399 - protein, 414 aa, unidentified
MIMNPVIGLDVSKGESQVQAFLDKGKPYRKSFSIKHNTDGLGSLLEFLHEVESSAGGHQPTVVLESTGHYHFPVIQFLEEQCFVYIVVNPLISHRAKSSSLRKVKTDTIDSFHLCELFYKEELEPYKKRGIQLLNLRNLTRQQESIAEVSAQTKIQLHTLLDQVFPEYRGVFGSLYSKVSLLTLLEFPTSEVVLSVSEREITEKIASLCMSRSDAWANEKAKKLREAALRNPFQSNLYQSNIFNLELLVKIVHQYQEHLSKIAGEIDALAKEIEEYHILQSIPGIGEKIAATIISEIGEIDRFNDAKKLVAFAGVDPSVFSSGKFTASVNRITKRGSSRLRHALYMAVQSGIRDARKKKTTDKIIARNKRLREFYDKKREEGKPFKVAVIACINKLLHWIFALLKSRTIFQDTV

SEQ ID NO: 80400 - protein, 347 aa, unidentified
MRSYNRQHRHYCGIDLHVKTMYVCMLDTTGQVLVHRNVPSTPEALLAVVAPYRDDLVVAAECMFTWYWLADVCAAEGIPFVLGHALAMKAIHGGKAKNDKLDSFKIASLLRGGLLPQAYVYPAAMRATRDLIRRRLHLVRKRGQLLAHIQNTRAQYNLPAFGRRLAYPANRDGVREHFADPSVRKSIDVDLTLVAQYDTLITDLELTIVREAKRHDADAFHRLRSVPGIGKVLALTILYEIHDITRFDRVQEFASYARLVKCQKQSAGKTLGTSGAKMGNVHLKWAFSEAAVLFLRHTKNGKKLLAVIEKRHGKGKALSILAHKIGRAVFYMLSRGTVFSAEKFRAA

SEQ ID NO: 80401 - protein, 338 aa, unidentified
MLHVGLDLHKKYSTVVVMDDDGNIQLEDTLYHDDRPRLIEFFSKLAGKAVVTVEASRDWYWLYELLEELGVTVKLANARKVRLIAEAWLKNDKVDPKSLAQLERTGFLPEAYISPRPIRDNREYLRYRLTLVRLRTGLKNKVHALLDKLGIKHPFADLFCPAGRRFLSQLTLRPAYQEELTNYLALIEDIERRIVAATKEIKQQLKPDPRAELLMTIPGIGHLTAYLLLNEIGDIKRFPAPGKLCAYGGIVPIVRQSADHRWQGHITKEGNRYIRWALTESACLAPSKDYVLGSFYRRLKARRGNLKARVAVARKLLVAVWYVLTYGEPYKTTAFPTI

SEQ ID NO: 80402 - protein, 419 aa, unidentified
MSFKILKNNCCGLDVHKTWIYACIGITDSLKRTEYKEARFSSFTKGLQELCDWLSRYNCTDVCMESTGKYWIPVFNVLEKNNIWVTLSHPKYTKPQKGNKTDRKDARWICDLYMCGMVKPSFIPPSDIRELRDLVRYRFKLTCMITGEKNRAHNCLTVSNLKLDDVFSDIFGKSSRSITEQILQHPGETFDVTPFVDGRCKTPIEEIQAAVDGAISEEQAVKLRQCLNHIDELETHKTEIEREIFRLSEKYERVLNLIRTIPGFDKNPMTAIQVLSEIGGDMSVFPTAKNLVSWAGCCPRNDQSNRKIKSTRISRAGSYFKPVLVQIANALIKSKKHSEFTTRYRRIKARRGHKKAIIAICRMILTAIWHILTDLKTYTPEGFLESRPVNESKILTTSQALNLMKQRGYIIKDDVVPVT

SEQ ID NO: 80403 - protein, 293 aa, unidentified
MEKDSTLYVGLDVHKESISVAYAVDAGAVESLGKIGTTKAEIDRLCKRLQSKAPHVRVVYEAGPCGYGLYRQLVERDFECMVCAPSLIPRKPGDRVKTDRRDAMKLVRALRADDLSAVHVPTVEDEAFRDLARAWASVREELRQAKQRLKSFLLAHGVRYTGRADWSEAHKRWISCYSFGNAWQQLAFEEHRRTIDDRLAQCDRLEAALREAVVDWRFYPVIQALQAMRGVQFLTAVGIVSELGDLSRFMHPRQLMAWFGVTPSEHSSGGKRRQGAITKTGNSYARKLLVEAA

SEQ ID NO: 80404 - protein, 340 aa, unidentified
MRMQKVARSFDIGKSAIGYDHYIAIDWSVKSMAIARMSRRDDHPGVFERPADLKELKEYLTSLKGRTIITLEESGPAHWLYLELLEYVEKVLICDPFHNKLLNDGPKTDKIDAGKLCELLRAGLLKEVYHSDNALYELRTLVSAYQDVVRAGVRALNQRKALMLGHRDKGKSAPFIGGILQENIDLYRRSKQQYERRLADVARRNKQVRFQKEIDGIGTIGAVKIVACVVDARRFPHAGKYLCYCGLVKHEKLSGGRSYGRRRPRYSRTLKSVYKTAALVVLRGENPIREYYDHLLAQGVAEHNARHAVARHIARISYGMLKNGTRYEPYRWKGEAKKVI

SEQ ID NO: 80405 - protein, 394 aa, unidentified
MILVGIDIGKNQHTFSIIDKNTGEILSNPSIFNNNQEGFLFLIKKLNSYSKSDLLIGMEDTGHYHFALLKYLLDIRYTIALINPTTTDLTRKLQGGITKNDPLDSLTICDVISSNQRKKPYRITKVNRFDLYEQKHLTRHHHKLKEELNAYKNRLQKCIDIVFPEFNSLFRSKYGIVYMNILKTFASAEKIANSDIRTIRKCFEYNGRGKRITLSAEQLKAVAKTSIGIPSVAEEIQIRHLVCQIEMIEEQLSEIDKKIEEFSLQNNSPILSIPGISHFSGTSILAELGDICNYTKASQIIKFAGVAPYHYESSQFTAQHTAITKKGSKYLRKTLYQIILPVINHNKVFTAYYNKKITEGKGHRCAQGHCIRKLLRIIYRLLSTGETFDPALLI

SEQ ID NO: 80406 - protein, 423 aa, unidentified
MNRSTLCIGADVHLDEIVLCAVDKAEGHEVTDRFRVTNNLPGAQAAATTIAQLATRLGYTRIEIAWEATGMLWIPFHRYLSRCPQLQSCELELVCLNPQLVTKFKDGLVLRRPKNDPLDASAVAARLRFGELPLSYVPGDFWQGLRRLTRHRFHLSRSLAREKMRFQAYAFLKCSDWKRVEPFADLFGATSVTLLTEFTVAELTEMTHDQLLDLICRRGRKHFADPTATARNVRQALHSSYPIDPHMDELVTAALAAAWDHIRFIQRLMKRLDQHIARAIEPLPNPLITVKGLGPVITAGLLAEIVDVTRFAEHKHLAQYAGITWEKRSTGNFVSQNTRLTKVGSKYLRYYFILGANTLRQFNLEYKAFYWRKHGEVSKYQHKRALVLTARKLVRLVHALLTKNVPYVRPQSLAVVQEDGALQ

SEQ ID NO: 80407 - protein, 360 aa, unidentified
MTGTMTWAAMDVHARSIYTASLDVMSGELRRQRFDTGAAEPVVQWLVGLPGPVRCCYEAGPTGFGLYRAAVAAGIDCQVIAPSKTPRASGDRHKSDRRDTDLLLRQLMAGALTAVTVPSVTFEAARDLARAREQVRVDLMRCRHRLSKLLLRHGRVWDRSAWTKAHRQWLSAQTFTQPNTELAFIDNLAACDGLSARREALDERLSHIVTDPEFWPTVRRLRAFRGIDTLSALIITLEVADFTRFSRAPQLGSWLGLVPSREQSGESDVYGSITKTGSKYARRILVEAAWHYARQPRVGRTLYERQEGLPDHVVQIALRAQRRLYRVHKRMRERNKAGNVITVACARELACFLWAAATAP

SEQ ID NO: 80408 - protein, 366 aa, unidentified
MRESITPIGTPVGVDVHKRRCQVVQLSHGEIKVRKSIANTREEWLEMLTELPPDAEIGLEVSTAGYFAMSVLEAAGWRERAHWVHTAGIDSNRRQKNDRLDAERLARKLAAHHLDPLPEAWFPPPEIRALRLRARQRCWLAQLRTKAKNHLQSLLGMQGLQAPGTDPFGAAGEKWLAQQTLPMPLGESIPQIQRLLQFLEEEIEISEKYLRAVDGQFPELALLRTIPGIGPILSPVIWSEIGAIERFRSAKALANGTGLVSSFYDSGEVKVSGPIPRQGSRWLRWALVTAANVAIQYPNPFARRYHRLRRSKKPNVAKAAIAHSLARCVYGVLKHGCPYREDRWGRKVGALEQEARGSQRSTKTVP

SEQ ID NO: 80409 - protein, 430 aa, unidentified
MKQYELLHSLFVGIDVSMKENVVHAMPFSPEDHPGHAHLRFSAPNTPAGSVGIVEKVSDFLKFYPDVIQVVIALEATSVYSFHLATFLSVAHFNGHIPAIVYSVNPKEIHAYKKTFTDVGKDDYVDAMVIADYARSNKIRSRPWKGPELLGLRVLTRLRFRIAKLMGIVKNSTGNSIYLECSGLMTGENPFCNVWTTTCQELLTTFQGPDEILSLSDEELLNFITEKGHGRFSHPLDVVEKVKKAARNSYRLDKRVYEPLTSGLSVSFFIIHSLEAAIKKLDKSIETMAKSFSSDSYQILLSIDGVGPVIAGGLLAEIGDVKRFKTDDALAKYIGLTWRGKQSGQSESPVKHLSKAGDVYLRYYVLLATGQIINYSAKYREAYERIRSRKTLFPYRAALNLVARKIVRLIFTLLDKHQLYSDNKVMVTLE

SEQ ID NO: 80410 - protein, 324 aa, unidentified
MVAPALGIDVSKDRLDIEIAFCGKPRSKYFGNSPEGWGELMAWLKEQNIKQVHACLEATGRYSLGVALALCDAGHIVSIVNPAQIRDFARTKLGRNKTDGLDAGYVREYAAIFKPQPWTPPSPAMRRLGELQTLRAGIISGLTEWKNRCGSGLANDTVLALARATIAHFADQLATVDKTIAQTIDHDRDLSSKRDLLLTISGVGEVLAGLVLAELPGTDILRSSAQAVAYVGLNPRSHRSGSSIDRPTRISKIGNATLRSALYMPALSAMRHNPVVAALANRLKAQGRLKGKQIAVAAMRKLLVLCFGVLKSGRPFDPALTTPN

SEQ ID NO: 80411 - protein, 355 aa, unidentified
MNQEKYIGMDVHAATISAAVINAQGKVLTQCVMETKASTILEFIQAQRGTLAVTFEEGTMAAWLHDLLKPHVSRLVVCDPRKNALMRDGNQNDRADARNLAELLRTNQVHAVYHGKQGIRALRELGRSYVTLTQDSTRVMNRIKSVYRSWAIACAGTSVYSRRHRAEWLAKLVEPGVRIRAEHLYQQLDSLEPVRQAARRELLREGRQHAAVKLLRQIPAIGPIRSALLVAILQTPHRFRTKRQLWAYSGFAVQTYDSGEFRFERGKLKRNRERITVRGLNRNHNHDLKNLLKGAAISAIERPGPLQDFYAALVGKGMRPSMARLTLARKIAAIILITWKKGVSFDPKQLQRQTA

SEQ ID NO: 80412 - protein, 379 aa, unidentified
MTATSHDPRCYVALELSQAKWLVGAFLPGRAKIILHTVRGGDAASLVEVLDRVSARASNEAGTQVPLSVCYEIGYDGFWLARYLIDRGIDMHVLDSSSFRVSRRGRRAKTDRIDVEAMAVTLRAFMAGDKGACREVAIPEPEVEDAKRMSRERTQLARERTRHVNRIRGLLTLHGIRRVKGIWGGEWRSALKGLVTADGRRLGPFLCAEVAREFERLHLLLGHMKQLEAERRAATATATAFPSAPKVKLLVTLAGVGEIGATVLVTEVFHRSFKNRRHLASYLGLTPSPYASGESSREQGISKAGNKPARTLLVELAWCWLRYQPGSGLAEWYRRTYGEHSSRVRKVGIVALARKLAIALWRFVEHGVVPAGAVMSPER

SEQ ID NO: 80413 - protein, 370 aa, unidentified
MAQSTLFVGMDVHQDSVMVAVLPEGARECEESRQLPHDLARVRRLFARLSKRGAVRACYEASGCGYVLQRALTKWGVACDVIAPSLIPVRSGDRRKTDKRDAAKLARLYRAGELTAIRIPDEAEEQVRSLVRCRETFTREILKSRHYVLKLLLARGHAYRGGGNWTQKHWDWLRQVKLEGADRITLQTYLELLEYKLIQRDSLDSQIEKIAFSEAYREPVGRLRCLRGVDTLTAMTLVCEIGDVRRFASPRQLMGYLGLTVSEASSGGIERRGGITKTGNARARRVLVEASWHYRYPPRSSRGLRKRQEDQPSAVVAHAWRAQKRLHKKFEALVYRMAPSKAVVAVARELVGFVWALLRDDPEVLAPRVR

SEQ ID NO: 80414 - protein, 404 aa, unidentified
MYSVGIDASKGKSTVCILKETGECILTPRDFNHTKDDLEVLDQTIQKLTGKNDVRIVMEATGIYHWPLLLFLKRKGYFVSVINPLRMKLFAKSYNFRGVKTDKYDSTIIAAYGCEKWFSLKDWDFNDDTRDELKRLARSYVSYQKPKISVKQSLDLELEKCMPGIKNLFSDDQKLYDFILLFHHYDNLTALSKKKFLDKFNRWAKKKGYQFHSSNPTKIYELASSGIPTVPFDDSCVLIIENLVNTLITIDKGLNDILTRMHQLASSLPEYDVVLNMSGVGYTLAPLIIAEIGDVRLYRSKKSLVCAAGIDVPPYESGQFKASHRVITKKGNSNIRRHLYLVMNSLYVTKPKKDSAVYEFMIRKKAEGKLHKQVIVAGMRKFLHIYYARVKERYQDIGLWQILS

SEQ ID NO: 80415 - protein, 344 aa, unidentified
MVVLGTDAHKRSHTVVAADEAGVELGSTTVAATPEGHLKLVKWAARWPERRWAIEDCRALSRRLEADLLKLGELVVRVPPKLMAGVRRSARTRGKSDPIDALAVARAALREPDLPTAVLDGPSRELRLLVDYRESLVKDRTAAQNRLRWRLHELEAGYDPAPGSLNRYKTLDNIDELLAAHSSMVAELGRREAARIRELTREANQLEHDIGRRVVELVPSLLEIPGCGALTAAKLVGEAADISRFKNRDAYAMWAGTAPIPVWSANNQRFRLNRGGNRQTNAAIHRIAITQLRIHPDAQTFIARRLENGSTRREALRLLKRKLANVVYRTLLNDVQQPALADAA

SEQ ID NO: 80416 - protein, 400 aa, unidentified
MNAVGIDVSKGKSTVAVIQPFGVVIAEPFDVLHTDSGLKELVNFIKSLSGETKVVMEYTGTYYEPVANALHNAGIFVSVVNPLLIDDYDTNRVRKVKTDRIDALKIASFALDKWIKLLEYTPAETTRKTLQIMNHQCIKLNKMLVMQKNSLIALLDCCFPNANTLFTSPRRESDGHEKWVDFVLKFPHVDFVAKLPLSVFKIKYQSWCKKERYKYSESKAEQIHAYARTLVSTLPMTDAVRKMVSDSAKLLNSILEALGVLRSEMDALASQLPEYETVMNLFAVGKVTCSQLIAEIGDVTKLKSGKSLVALAGIDPPPNQSGKEDKKSRSISKRGSPALRKTLFLIMTIYLQRQPIDEPVYQFLDKKRTEGKPYKVYMIAAARKFLRIYYARVKEVMPME

SEQ ID NO: 80417 - protein, 345 aa, unidentified
MTEAYDGRQVVGMDLHRRRSVLVRMTEDGQKLETVRIENSPHALRAVMARAGKNPRVVIEATYGWYWAVDVLQEAGAEVHLAHPLGVKAFSYRRVKNDERDCADLADLLRLGRLPEAWIAPPPVRALREITRFRHKLVGQRTSCKDQVHAVLAKAGIPVTRTDIFGRGGGIWLDGLPLPQPYAGKVASLRALIAVLDGEIARLEEQAAAMLAGEPGYAAIRRLPGIGPVLGAVICAEIGDITRFRNPGQLASWAGLTPRHYESDTRVIRGRVSKQGSRMLRWALVEAIQRAPAGTKPRQVKDAIIARRGADARGIAKTAAARIMLTQVFYGLRDGHIRRAISPAV

SEQ ID NO: 80418 - protein, 345 aa, unidentified
MNQIIRIGMDTSKHFFQLHGVDAAEQPVLRRKLRRKEVVAFFTKQAPTVIGMEACGASHYWARVLCELGHEVKLIAPQHVKPYIKRNKNDGRDAEGLCEAMSRPTMQFVPAKTAEQQAALMLVGMRERLVVRRTQLSNAIRGYAAEFGVIAAKGLDKIEPLLAEIAADEALPVLARELFAMHGREYAQLQAELKNLEARLMAWHRANADSRRLAQIPGIGPIGATALVMKAPDPRLFRSGRHFAAWIGLTPKDHSTAGKTRLGKITRAGDEMLRSVLVAGATAVIQQARRGRGRASPWLLALLARKSSSKLAAVALANKIARIAWKLLVTGESYDGARMPGALPA

SEQ ID NO: 80419 - protein, 317 aa, unidentified
MIHLGIDIAKLKFDVALLAQGKFKTKVFANDSAGISACLKWLGTHADGPVHTCLEATGSYGEALACALHDAGHTVSVINPARTKAYAQSLGLRQKTDAVDAKMLARFVQTQEPAVWTPPPAELRALQALLRRLDALVEMRTQEKNRLGVAEPTVSASIAQHLDYLQAQIDALKAQIENHIDQHPGLKQQQDLLDSIPGIGAATSAWLIGELNLTRFDSARQAAAFVGLTPRKDDSGTSVRGRPRLSKQGNSLLRKLLYFPALTAMTHNPLVRALCLRLKAKGKHNMAIIAAAMRKLIHIAFGVLKSGKPFDPTLADT

SEQ ID NO: 80420 - protein, 349 aa, unidentified
MLADQLDYVVGVDTHRDEHVLAVVAAPAGAVVAGKAVRANRRGYREALRFGERYAAGRRAWAIEGTGSYGAGLARYLAEQGETVLELSRTPRAERRLQGKDDALDAARTARAALASETLALPRAGQRREALRLLLVARRSAVDVRREALAQLRGVIVTAPDHIRQELRGLSAGKLLGRCSRLRRSSSADADELAARLVLRSLARRIEAATREADQLERELLGHVRALAPSLLDEPGVGPIVAAQLIVAWSHRGRLRSEACFARLAGVAPVPASSGQTRRQRLSRGGDRELNRALHTVVLHRRQHDPATRDYIARRVAEGKSRRDATRLLKRYLARHLYRLLQAQEPLMA

SEQ ID NO: 80421 - protein, 344 aa, unidentified
MNTIKVVGIDIAKSVFQVCVWMADGSVAWNRKISRQKLLHTMRQFPAQTLIAMEACSTSHFWGRTLISMGYDVKLIPTQHVKAFARHQKNDANDALAICETACRPGIHFVSVKTTEQQDIKALRSARQLIVEQRTALANQLRALLAEYGVIIPAGLQRLQQQLPEVLEDGDNTITFTLRRLLSLLREDMQMLTERIDVLDKELAELSSQQVAYHHLLTIPGVGPLIAAAVVSEVDATQFSSGRELSAWCGLVPRQHSSGGKQRLSSMTKNGNRNLRTLIIHGARAVMRCVQKRDDSLGRWVKAIELRRGFLKATVALANKLTRIIWRVLTDSVDFSMNRAFAGS

SEQ ID NO: 80422 - protein, 372 aa, unidentified
MNYNTVYVGMDVHKESFSLCAYTIEAEKASHYQRTEADYKKVLNYLEFLRTIYGDDANFICGYEAGCFGYTLYHQLTANNVKCIILAPTTMLEQRSKKRIKTDRRDAEIIAKCLAQHNYSPVHIPTAKDEETKEFLRMRDGHKLALKKVKQQILAFCLRHNYRYDGKSHWTAAHLKWLKALTPEALYKEILDEYLLTYQTLSDKIERLDKRIEELATQDEYKEAVKKLCCFIGVKTHTALSVLVEVGDFKRFASAQHFASYLGLVPGEDSSGDDQNRLGITKAGNRHVRLLLTEASQCYARGQVGFKSKELKSRQSGNTPAVIAYADKANERLRRRYYKMVLNKYKKHNVAKTAIARELACFMWGMMTDNIA

SEQ ID NO: 80423 - protein, 323 aa, unidentified
MLHAYVGIDVAKLTLWAHLSLEDGRYWSREFANTDEGIGQLIRWIAEHAPGAQARVCLEATGTLGRLCSRAFAKEGFDVRLMNPAQARDLASGLGILDKSDRVDARVLARCAELGLGREGAIPSKIKERLQDISRRIDSLTVQRAAEKTRLKNPSIAEEAKESLRRHIAFLTEEIEALEALWKNIAQSSEEIHERFCLLKTVAGIGDKTARVLTSELPEELSPRKAAGYAGLAPRERSSGTRLKGKERIRGGNPRVRKALFLAAGILIRLDIDARSLHDRLVDAGKDNRLALIAVANKLARWVAAVLTRKTPWIPTQHVLDNS

SEQ ID NO: 80424 - protein, 408 aa, unidentified
MDVGYACGSERTVAQSHRRKEPVVGKTIRYVGLDQHAASIAVAVAEGGREGEVRSLGTIANRPEAIRKLVAKLGAPETLRFCYEAGPCGYGLYWQLVQLGAQCEVIAPTLIPTKPGERVKTDRLDAEKLARCHRSGDLTAVWVPSSEHEALRDLVRAREAAKEDQLRARNRLGKFLLRQGRHRPDESVAWGTKHLAWLKTLKFEQRAQEMTFADYLSEVEHAKERVGRLENAIRDAIAQAPASIRAVITGLEALRGVKTLTAVTVVAEIGSFSRFAAAPQLMSFSGLVPSEHSTGGPGRARRGGITKTGNAHVRRVLVEAAWSYRHRPSREGDLAKRNKLASEEARTIAWKAQHRLHARFWKLSASGKPMAKVATAIARELLGFMWAIGAEAERAHQPQADKQRKAAA

SEQ ID NO: 80425 - protein, 347 aa, unidentified
MRFYTKQHKFYCGIDLHAKKMYLCILDETGEIKLHRNINTDPDVFLRAIQPFREDVVVAVECMFTWYWIADLCTKENIPFVLGHALYMKAIHGGKAKNDKIDSHKIAVLLRGGMIPQAYTYPQKMRATRDLLRRRNHLVRKRAELYTHIQNTRSQYNLPEPLGGISKPQNRRGIIERFEDISVQHMLAADLAVITAYDPIIEKMERDIIKMAKHHDPVVHALLNSVPGIGPILSLVILYEIENIKRFPSVQDFVSYCRLIKCAKESNGKKYGSSGKKIGNAHLKWAFSEAAVIFLKGNEQGKKYLDRLTAKHGKGKALSILAHKLGRAVYFMLKNKKPFDQDKFLGL

SEQ ID NO: 80426 - protein, 323 aa, unidentified
MNKYNETFGIDISKNVFDCYGSIQGHLQFKNDEFGFKKFHKILSSNSLVVMEATGYYHYRFAQFLYKKGVYVSVVNPLSIKRFIQMKLAKIKTDKSDAKSICNYGLTQEVPLYNALTEVQSECLQLFRLMDNYLKTRTAVKNKIHGEEVLGIPSKFVYRSLLSTRKYLDKQLKAIDVKLLSLVKKDQQKQLTLLQSIPGIGLKTALFLIVVTDGFKKFETASQLCSYAGITPTIRESGSSVRGRARISKVGNRKLRNLLFLCSFSAYKHNKGCKEMFERITNKGKSKKLALIAVSNKLLKQSFAIVKSGVPYDETHVSVLKVK

SEQ ID NO: 80427 - protein, 412 aa, unidentified
MIIGVDIAKQKHVARAIDDRGLDLAKRLMFHNSFEGFTNLLDWIESLSNKLNRTHVIIGMEPTGHYWLNLAYYLKDRGLQTVVVNPMKVKRSKELDDDSPTKNDTKDAKVIAQVVRDGRFHEPTLPEDVYAELREGMKLYDIIQEDLSSIKAQMHNLLDRYFPEFQQVFKSWTGKAAIQLLKQGYFPRDIIQSTEEELLNEINKAAKRAVGLKRVQELKQAAEQSVGLQVGLNMAKQELKYLVEQYELLTKRLQVHQEQLEVLIQHIPGAVEMTAIKGVSAMTVAGFFAEVGDFSNYSDPRQIIKLAGLNLTMNQSGLHKGRTSISKRGRRRLRSILFQVARPLSCHNEGFKQLHEYYRNRPNNPLTGKQSFVALSRKLIKIFFVLGTRECAFSESRMLADIPMLDNINQAA

SEQ ID NO: 80428 - protein, 404 aa, unidentified
MNAVGIDVSKGKSMIAIMRPLGEVVATPFEVGHTATELNELAKFILKISGETRVVMEYTGVYFEPIAKALHDAGLCVCVVHAQLIHNYGNNTIRKVKTDKADAIKIANYALDNWNKLKPYTPIDEARRQLKAYSRQYRKFNKLKTMLKNNFIALTDSTFPGVNELFSSPPRKSDGHEKWLDFAMKFWHAECVCSLSQKAFTERYRKWCHKAGYYFLESNAEDIYAAACGHIGLLPKDENTKQLVQQTIIQLTSICSSLSVIENKMTELAGLLPEYPIVMEFRGVGRILGPQIMAEVGDVLRFEKKESLVCFAGLEAPPYESGKFESHNRTISKKGSPHLRAALFQVMDCLIKTQPVNDPVFQFIDRKRSEGKHYYSYMCAGSAKFLRIYYARVKEYLTTLEQNT

SEQ ID NO: 80429 - protein, 448 aa, unidentified
MVEKELRSYTWRELEANGKFAKNDKLSFITDDMLIVGCDIGSETHYIRAIDVRGRELSRGAFEFSNTSEGFENAKAWVLALAAKHDKKQIVLGLEPTCHYWFALAAWMISNGISVVQVNPYAVKQSKEIEDNSQLKDDRKDPKLIANLVKDGNYGMPYLPEKVYVDMRRLSMFRDQFTEDRIRNINRLHRELKIYFPEYMDAFGKIDGAFTLEVLKVSAIPTDITALGAEGMKNIWHNAKLRGRGYSRANEIVNYAEKSVGLTDGTDAGREAVKWYAEQILRLDEQLAEIESALHEKCREIPYAENILAINGVGENILAGILAEMGDISRFDDVKEIQKLSGMGLVACSSGKHKGQTKISHRGRKRLRYWLFQAAKSAVSHADEFKQLHEYYTTRSNNPLKKMQSLVVIACKILRVIYTILKIGTTYDPQKLLKDIKHSAASQAPMAA

SEQ ID NO: 80430 - protein, 346 aa, unidentified
MSVYVGIDVHRKRSQVAVVTEDGQVQLNRNTVNGTEPILRLIGDLPPGTPVAFEAAYGWGWLVQLLEDYGFEPHLVHPLRCKAIASARLKNDKVDAAILAQLLRADLLPEAWIAPPAVRQLRALLRHRSGLVRLGTQLQNRIHAVAADFGYDRTGSYWTGPGRGWLAELDLPAISREIVTDCLAFLDALAPEIDRIDAELRQHAKADPRIKALTTLPGVGQFTALVMVAEIGDITRFGSARKLASWAGLTPTVRGSDRTVRHGHISKQGSAWLRWVMNQAAQTAKRSPEFAAAYAAIAQRRGKKIATIAISRKLLTRAYHLLAAQANQAASASGATGDTPADQGGR

SEQ ID NO: 80431 - protein, 344 aa, unidentified
MNQKSSFIGIDVAKTRLDVAVRPTDQQWQVTYTEKGIQELVEQITELHPTLVLLEASGGLELPMVAALAVANLPVVVVNPRQVRDFARATGKLAKTDALDAQVLAHFAEAIRPPPRSLPDTETQSLTALVARRNQVMSMLVAEKNRLRTSRPPVSERIQLHIDWLEQELDEIDRDLKEMLRNSPVWREKENLLRTVPGVGPQLAISILAYLPELGTLNRKRVAALVGVAPFNRDSGALRGKRAVWGGRSRIRAALYMAALVASRHNPVISAFYQRLLAAGKAKKVALTACMRKLLVILNAMLKHHSSWQSLNPQLLGPCSLLLRQLLSSQVCGIINACSTIHPM

SEQ ID NO: 80432 - protein, 292 aa, unidentified
MQDSTFIGLDVHKATISVAVAHGERGGEVRHWGTVPHRPDHVRKLVEKLAAGRGRLHFCYEAGPCGYGLYRQLVEMGNDCIVVAPSLIPVKAGDRVKTNHRDAVMLAKLHRADELTAVWGEGRPGLDPVDQVSPEHAAHEAMRDLVRARATAVRVVGKARQHLQGFLLRHGRIYPGKKGWTVAYRRWLTTVRFHHPAQQIVFQDYVDAVTDSEARVERLTGQIADLLPSWSLSPVVEAVQAMRGVAFIVAVTVVAEVGDFHRFDNPRQLMAYLGLTPSEHSSGNTVRRGVRG

SEQ ID NO: 80433 - protein, 403 aa, unidentified
MKNLLCQNLGVDVSKDALEVVLSTLDMERRVKVKASRKFTNTPTGFKQLQRWLEGKRAADVELRLLMEATGVYYEQLAWFLYHEGYQVSVVLPTKAKRYLQALGNKSKNDRIDARGLAQMGLEQLLELWQPLSKNIYRLRLLTRQLEDFSNQRTVCLNQLHALHHGALVVKQVERNLQKLVGTLDKSLQELEEAIGELLYQDPLLAERVEKMRSVKGVGLKTVAVLLAETNGFATFERQGQLVSYAGYDVVEHQSGQRSGRSRISKKGNAHIRRAMHLPAFTVVRYKEPVFTALYERLVKRGKTKMQAYVAVQRKLLILLWTLWRKNEAYDPRYGQQPAEPKNNIQIQEAGASLSGVSAADKDAITQETQPETAEKEIAPAQARATQDELPVPVGPGALFQVE

SEQ ID NO: 80434 - protein, 399 aa, unidentified
MAEGSALAQHKGFPTVFRASLVQTVAALRPPLCSGWVFECLGREDFQMPEVRFIGLDVHKKVIAFCEKEADGRIIEEGTLPATRVALHAWAKQRSVSWIGGIEATLFTGWIYDFLKPYACELKVGHPLMLRAICVGKKKSDKLDARKLADLLRCNLFPQAYMAPQTIRDLRRVLRFRNLMVRQAVRMKNKTAGLLMECGVEYTKRRLHGRTYFADLLGSLEDVPPSLPLLLNMSRATIETFDTAQKSLVNRLKTDPRLAHRVGLLMSVPGVGEVTALTWALEIGPIERFPSIAQAISYCGLCSGQRESAGKAQRTPLSKQRNRFLQSTLIEAAKLAPQWNPQLAVLRERILQSGNHNQASIAIARKLVAYLMAIDRSGMPFRFQSEQPQAKEDIMLSSA

SEQ ID NO: 80435 - protein, 325 aa, unidentified
MNLSVVLGVDIAKLKFDVCLVKENQKVKHKVFANTTHGFRQLVAWLNSHRVGSLHICLEATGSYGEALALHLFDEGYQVSVVNPAAVKAFAASRLTRTKTDKVDAELIARFCLAQQPEAWQPPLPQVRRLQALVRRLESLIEMRVAEENRLSSGVAVDAVRHSLEDHIAYLVEEIKQTEQMIREHIDNHPDLKVQSDLLDSIPGIGQTTAALLLAEIVNIKEYKSARQVAAYAGLVPRERRSGSSVRGRVQLSKIGNARLRKALYFPAMTALRCSSFFQQWASGMRERGKCKMSVIGAAMRKLIHLAFGVLKTGKPFDPNWAKTA

SEQ ID NO: 80436 - protein, 335 aa, unidentified
MKKYVIIAGIDVSKAKLDVRLVADPSAKIHPHLIVTNNEKGIKEIISVLKKQKVAISDVLFCFENTGIYSMPMAIYFSRNSFDYWEIPAIEIKKSKGLVRGKNDKADALDIAFYAVSHSHKLKLCAVAEDCIMKLQLLYSEREKLIKAIHALQSSTEVTDFLPKDVFKDVISINKKAITKLKLILKQIDNAMMLLVKSNLKINSCFNLAKSVPGVGTQSAIYLIIKTRCFTKFKNWRKLACYAGIAPFEYSSGSSIKGRTKLSHLADKRMKSLLNMAALSAKRTDKELGDYYGRKVKEGKNKMLVMNAIRCKILSRIFAVIERETPFVNTQKFAA

SEQ ID NO: 80437 - protein, 424 aa, unidentified
MKVTYQTCCGVYVHKSFLVATIVKTTSGVEPSHQKKRFSTFNNSILEFKHWLLDNDCHDVCMESTGKYWVPVFNLLEDEINVVIANPKWVKAVKGNKDDTKDSKWIGDLFRLGLVKGSYIPCKIVRILREYTRYRYKLVSCRSSEKNRYQNALTVCNVALDSVVSDIFGKSSTSIIDYLLEQSGTSINHEEIASKLLRSLKSKEDAVIESVEGYQMTDAQKYRMRLVRAHMDYITAEIKDVDKMIENMISSNPDFENAVQFLCTIPGVKRDSAVTIISEIGTDMSQFSSSKRLCCWAGLTPGSNESAGKKKSVRITRAGVYLKPALVQCAHAAVKSDKSPYYKKKYESLVKRRGKKRAIIAIARMILTAIYQMLSTGEQWNPSDLYKIDMPVALVEKQKAKAIKQAKKLLQREGILPPDEPLTS

SEQ ID NO: 80438 - protein, 362 aa, unidentified
MPQSRSLISPAPMTAIIIGVDTHKYVHVAVAIDRLGTRLASCSVSADRAGYAELVTWAQALGTIDAFGIEGTGSYGVGLASSVRRHALRVVEVSHCDRRKRRSHGKSDTLDAETAARSVLAGLATAIPKSADGAAEMVRQIKVARDTAVKARSTAIIVLKTLIVNAPGELREALEPLTDRKLIDRCSRLLPGAIDDTTASTKHALRALATRWLALAAEIDIHDAALDTITSVATPTLRDAFGIGADSAAEMMIIAGDNPTRIHSEAAFAKLCGACPIPASSGVTNRHRLFRGGHRQANAALYRIVTVRMRWHQPTMDYVSRRTAEGLSKKDIIRCLKRFVAREIYHALLSDHRARAAATAAA

SEQ ID NO: 80439 - protein, 351 aa, unidentified
MKVTTIGLDLAKDVFQICAADANGKILYNKQLRRHQMAEFFTKLPACLIGVEACGSAHYWARKLQAMGHEVKLMPPQYVKPYVKTHKNDAVDAAAICEAVTRPTMRFVAVKSEEQQALLALHRVRQGFVKDRTAHSNQIRGELAEFGLIVPVGLSALRKRVPTLLEDPLIPAAFGQLIQRLLDEVLHLDEQIKLLERDIVLWHRSSELSKRLAQIPGIGPLTASALLCSIGDISYFKKARQLPAWLGLVPRQHSSGGRTTLLGITKRGDCYLRTLLIHGARSAILAAQRKEQSPEQPSWLHKLLARVHPNIAAVALANKNARIAWALLAKHQDYKRGYDPSLSALPLAQVA

SEQ ID NO: 80440 - protein, 367 aa, unidentified
MKKISTRAAAQGRNISQQKLTIGLDLGDRNSWYCVVDEAGQIQLEQRVRTNAKALQEVFAAMPRSRIALEIGTHSPWISRLLSELGHEVIVANARKVRLIGESRKKDDRLDAQALARLARIDPELLYPVKHRSAQAQADLMLIRARAGLVRARTGLVNTARGLAKSYGERLRGCNVRNLNPEKAEGLSPELQTAMEPLLNAIEALSERIVEYNERIEALAQQSYPQVALLKQIKGVGTLIALTYMLTLEDPHRFGKSRDVGCYLGLQPGRRNSGQREPQMHISKEGDPYLRTLLVQGAQHILGPFGIDCDLRRWGLKLAERGGRNGKKRAIVATARKLAVLLHHLWVSGEVYEPLHNSRPTTVAAAA

SEQ ID NO: 80441 - protein, 477 aa, unidentified
MKKKNIFQNRSQQLLRLFEKAGNRLKMMCVPIDYAKKDHMVMFCNGYGDILRKPFSVKNTLEGVKYLIDQVMCSCRQRHIKKEYVFFGGEDVNSYAENFANALRTKGFLVANVNAHDAKKQRENLQASTDRIDLMGIAMMLLNLRAKCSPAQDGIYRNLRTLVRHRKKLVVMKTEVKNRVHTLVDRLFPGFLNDKNTGINPFSKSSLHLMEDRFSAQQIRRRQQHTLIKILKRCATPDAESIAAKLHSYAVQVITTPDEYVATLQLSLQHHIKHYRCLQENIDQLLSEIALLLAQTQGALLTSIKGVGIVLAAGVSSEIGNPFGQKPLNNLISYSGIIPRVKQTGGIEGHTHTGRVSKRSNYVVQSAFQMGLRGPEPLLQDYKRREAAGQHADFGIARRFLRMAMCLMRSSQVYMPPKLRSPKAQMQERAGYYLTMWPLLRDKWKKAHAHQAAFAKDQPLGQWRQVVQELYDIKLKL

SEQ ID NO: 80442 - protein, 468 aa, unidentified
MGQSRLRSRGTTSRTPKPPSLLKRINRHAAGIDCGSETHFVAVPAERDHEPVRSFKTFTADLQRLADWLEACKIKTVAMESTGVYWIPIFEILETRGFEVVLVNSRHIKNVPGRKTDVLDCQWIQELHSVGLLRGSFRPAAEIATLRAYLRHRDKLVQAAATHIHRMQKALAEMNLQLHNVISDITGLTGMRILRDIVAGIHDPAALAAHRDYRCRASEEKIAASLTGNYRAEHLFALRQNLEMFDAFQRQIQDCDGAIESLLHSLARKQGNAARALPPPRCTFRCCDNEPRFDVRDPLFRLSGVDLTQIDGIGPYTALQLIAEIGTDMHRWPTEKHFTSWLTLAPKNKISGARLISSRTQPSANKAAALLRMSAMVLGRTSTALGAYYRRIAYRIGKPKAITATARKLAILVYHTLKGELDYADPGASAYEELHRERTLRNVRNRAKSLGFGLVNLETGEALQGAVS

SEQ ID NO: 80443 - protein, 340 aa, unidentified
MFTNFVGIDVSKSKFDLALIKGQDKDNVIQGVFDNTRNGIKSMSKFLEKEHHVQLSETIFCMEFTGVYCYPLTDFFTKQECHVWIEMPVNIIRSLGLQRGKNDRVDAHRIALYAYKNRDDVKLWKPQREAILKLRDMLALRERLIVAQKSLQMPINEKISMGDKKGAELLRKGCQKSMSSLENEIGQIDKNLDDIIKDDPQLKELYQLATSVPGIGKLTALFMICFTNEFSMYSNPKQLACYCGVAPFEHSSGSSIRGRTRVSHMANKVLKRMLHMGAMSVISRDPELRDYYKRKVAQGKNKMLVINAVRNKIIHRLCAVIKRGYGYRSEIIFKERLVLS

SEQ ID NO: 80444 - protein, 412 aa, unidentified
MEVVYPCCCGLDVHKKSITACVLWAEAKGKSRKEKKRFGTFTHDLLQLGDWLEQCGVTHVAMESTGVYWKPVWNILAEQFEVLLVNAQHIKAVPGRKTDQKDSEWIADLLQHGLLRGSFVPPQPIRELRDLTRYRVSLVQEINRIANRIQKVLEDANIKLASVATDALGASGRAILEAMLAGEQDAARLAEMSKGLLRNKIPELKLALQGRMTEHHRFLLRQLFEHLRFTESKRSEIEQEIDRRMLPFADKVTRLCTIPGVDRVTAWGLLAEMGMNMNQFPSSGHLASWACLCPGSFESAGKRLSGKMRKGNVSLRRCLSQAAWAISMMKNNYLSALYRRIAARRGAKRAVMAVAHALLVIAYHMLKREEDYRELGADHFDRIDVNRIRRSLVRRLERLGHKVTLEPLAQTA

SEQ ID NO: 80445 - protein, 427 aa, unidentified
MSYRIAAIDVHKRMLAVVVTDVEGAGEYQFERRKFGATPGELRVLAQWLVELEVEEVVMESTAQYWRPVWGTLELFWRPARQQREGALQKSGTLHLCQAKSNHGPRGRKNDFLDAERMVKRLVAEELVLSFVPDEEQRLLRTVTRRKYQLTRAKIGFKNQLESLLEQGHIKLSSLVSDLLGVSARRMLKALAEGETDPGVLAAMADHQLRATPEQLRDALGASSHLSGAFRRLLKLSLEELQLIEAHIEQLGREAMKLLKGHEDVIQRVAEVPGFGPDCAVQMIAEVGLEAAKFLTAKKLSSWVGVCPGNEESAGESHSTRSPKGNRHMRRLLNQAAQSAVKVKGSIFEVTFHRLLPGLGYKQAIWAIAHRLCRLLWVILHKGIRYEERGPAVSAKSKRTRAARMIRELKKLGYRVEGGPLPAAARA

SEQ ID NO: 80446 - protein, 346 aa, unidentified
MSPVSKITDVTRVGMDIAKDVFQLHGVNAHGTVCFRKRLSRSGLLAFTQQLPTCEIAMESCSGSHYWGRELEKQGHRVKLLPAQHVKPFVHNGNKDDRIDAEAICEAAGRSAIKAVPIKSHDQLDLQAIHRHRQQLVKQATMLSNQIRGFLGEYGIVIPQGVKRLPERVPAVLGDTTNGLSGIMRDLLRELFDDFRTTRDRLAKTDAELARFCKSNEDCRRALAVPGAGVLTTTAVYAAIGNGRQFKNGRAAAAWVGLVPSHIGTGGKTRVRFLSRKGNRYLKVLLIRGGQAVMRHTSRRTDKRSKRLEDLRVRSTTNVAAVASAHRTMRVMWAVLSSGKEYREAA

SEQ ID NO: 80447 - protein, 343 aa, unidentified
MQTITTIGLDIAKSVFQVHGTDATGQVVIRRQLKRRFVLSFFEKLPPCLVGIEACASSHYWSRELQALGHTVRLMPPAYVKPYVKRQKNDATDAEAICEAVTRANMRFVPTKTPEQQSGLVLHRARHLFIRQQTAVINSIRAHLAEFGIVAPVGRQGVEELLNVVADPNDKRVPEIARACLSAIGAQLRRIKEQILEFDRLIRVWHRSNEMSMRLDEAPGIGPVLATAVVATVADPKSFRSGRNFSAWIGLVPKQHSSGGKDRFGHISKQGDRYLRGLFVAGALAVIRYAKIHGTKHRPWLTALLTRRPTKIAAIALANKIARMAWAMMVKGERYKEPAALAA

SEQ ID NO: 80448 - protein, 386 aa, unidentified
MGQKAFIPQAYDVFAGLDVDKKSISVTFSNHQQGFIRSLHMPYSGVNLVKHVRQHFTDQKVAFVYEAGPTGYGLYDGLEAQGYNCLVAAPSMIPRAPGQRVKTNRLDSRALSENLRGGQLKSIHVPSPIYRELRHLTQLRDTLVSEVAGMKQRIQSLLLFEGIAFPSAPAGSRWSLKVKAQLRKLECSKSVRFKLDQLLDNEEFSEKQVVKVTKEIRQLCQNDPELAQCIKYMMSVCGIGWIVASQLLARIGDWRELKNVRQLAGFLGVVPSENSTGEKTDRGSITRTGHGRLRSKLIQAAWSAIRQDGELREFYSSVCRRHPRQVGPRVAIVAVARKLSARIAAVLMEQRPYVVRQKVHSAPLTQEETSPQGTTRRLGEPGEENS

SEQ ID NO: 80449 - protein, 371 aa, unidentified
MEHTRFVGLDIHKERISISVAESGRSGAVEYLGEISNDPVAIGKLCDRLGRPGKTLAFCYEAGPCGYGAHRQLTSLGHRCDVVAPSLIPTKPGDRVKTNRRDATMLARLHRAGELTPVWVPDADHEAMRDLIRLRSVVRQIVTRARQHLQGFLLRHGRKHGRGTAWRMAYRRWLSTLAFEHPAQQIAFQDYVDAVMDAERRLKRVEEQISDLLPEWNLRPVVDALQAMRGIALINAIVLVAEVGDFTRFTNPRQLMAYFGLVPGEQSSGEMIRRGGITKTGNAHARRALVEGAWAYRMKARIGRHKVDRIEALPKIIRDIGWKAQVRLCTRYRRLRARGKTANVVNVAIAREMVGFIWSIACTVQSAPKTA

SEQ ID NO: 80450 - protein, 407 aa, unidentified
MDQRVYVGVDLAKDFHQVMAVGADHRVLAPTFRIDRGRRGVTEMLERLRFLVRSDGDLVFTIEATSDYWWELAWELADRGCRVYLAHPKKAHDLRKFYALHTKTDVTDAEALARMPLVDVGLQSLWRPSAATQSLQRLCRLRWKSRCRIADLKRRLSHTSDIVMPGLGRVMPIRYSKSARVFLRRYLAPEKARRLGRKRLGDVLGKAAWGKFSEQKLDRLWECVLNAPRLGLQPDDLLLEIGLQLDEIEALEKQIAHLDSRIAELYGEIDPQQCLLRQPGLGEFLAAAITAVIGDVRRFPSAKHLISYSGLAPRVKASGGQAKARQGITKHGNPYLRAWAYLAAENARQYDPELKAYYERLRNNGKHYLTAMCATATRLLEKVYAMLAEQAEESEKGESHAQSICTG

SEQ ID NO: 80451 - protein, 460 aa, unidentified
MRILGIDLAVVAKHRAILADERGRFIGRLVKFRTCQADLERVYALARRGMTPDEPLAVVLEATDIVWYPVAIFFQQRGATVYLVNPRMAADLARFYQRYAKSDRLSAQTLARLPVVNPDSLYPWVRSGPDYLALQRSCKEVERLTTQASAIQNRLRSTDHLGWPDLHRRVFANPFSRAARWFRDHFYDPRCVVEAGVSGLRQAWRAAEVYDGDEDWIEPLLTLAQEVLSLYGEQGSYLDYRALAEEVQREQRRLAKLEADAHFVRLQVMRPRYRQLHPSRNLETIKGVGQDGAAVHVAFVGDPSRFASNRAFRGWSGMVPYSDQSGEREGKGLRITQAGPDPVKKYAFLEAESARQWDPQIAAIYHDQMVNKGNHHTQAVCACATHLLDRIRVILTQDRPYELRDVDGTPVTTQQARAIIAERYTVPEEVRRRNTRRARRERAERRAERKEKKKRRSRSR

SEQ ID NO: 80452 - protein, 439 aa, unidentified
MPTPSLPVLDPTAAAIDVGSEQLHVSIAGGPPKVFSTTTGELHGLRDYLLAQGVRSVAMEATGIYWLCPYEVLEQAGLQVVVVNGKYVKNLPGRKTDLSDCQWQATLHAHGLLKPGFVPPEHIRRLQDYLRVRTDHIVMAGSHEQHMQKALERMNLKIHDVISDLTGVSGLKMVQAIIGGERNPVALLALCDPQIQKNKAGRLRAALEGTWKAEHLFALRQAYELWQSYQQKILECDQAIEGVLKELAGPEDPKNPAPPPIKRGGVNTPQIAGLHGLLLRLCEGKDPTQLPGIADYVLLQLLSEVGSDLQINWKTEKHFTAWLGLAPGSRNSGKRRGSQRRSRNRAGRLFCVVARSVGRSVDKALGGFYRRLKGRKGGLVANLALARKLAELFWRLMVHGARYVEQGLKKYEEKVAHTEQRLLQKLACKYNMVLQPKAA

SEQ ID NO: 80453 - protein, 355 aa, unidentified
MQSNKISFKGQNIYVGIDVHLKTWHVTTLTESGYKYSFAQHSDAKELFDRLNKKFPEAHYKSAYEAGFCGFSVHYALTELGFENIVVHAADIPTTGKEKAMKTDAVDSEKIAWSLKRDELRGIYIKDKCFMDDTNLMRLRQRFIMDLSRQKNRTKHLLYTQGVTYPERFHNSKTHWSRNFMKWLREEVELLSEEKMALTLLCDQVENTRMAILTVTREIRRLSTTDKYRENFSLLTSVPGFGLITSMSMLTEFDNNPTRFPNERKFVAMLGLIPTCHNSGEKKVSGEKTNRGNKQLGPLIVEASWVAIYRDYQLGAYYSSCCQSMKPHKAIIKVARKLACRAYAVLKTKTSYVLS

SEQ ID NO: 80454 - protein, 349 aa, unidentified
MKQQQKSSNITIGLDLGDRRHRFCVLAKSGEVMEEGSVGNDRVFLAELSGRYRGARVVMEAGCHSPWISRYLEQQGCEVLIANPRKLRAIYQHERKSDRRDAQMLARIGRLDPALLYPVRHGSAEAQQDLLRIKLRDSLVRARVALINSVRFTLKSLGYNVPKPSSERFHKVVMERLPQALCQMITPSVQALAELSTRINALELEIKALARVKYPQSAQLQQIPGVGPITALYFVLKIEEPNRFAHVRDIGAYAGLCPRRDQSGESDPQLRISKRGDAYLRRLLVSAAQYILGPFGPQSALRAYGLNLAADGTARAKKRATVAVARKLAVLLLSLWKSQQPYQPFPQRT

SEQ ID NO: 80455 - protein, 342 aa, unidentified
MNLPIRIGMDTSKSVFQLHGVDENEVVVVRRQFRRAEMIRYFERLPPVLVAIESCGSSHHWARLLQSFGHEVKLIPPQYVKAYVKRGKNDAADAEALCEAVTRPSMRFVPVKSRERQAACMLMTVRERLVSVKSQLSNAFRSYAAEFGIVGPAGRQNVTALIKRVLEDDSLPEMARDLFRLQAEEYAAVQARLAKIEAKLMKWHREDDVSRRIATIPGVGPIGSSMLSMKAPPPETFRSGRDFAAWLGLTPKDHSTGGRQRHGGITKAGDSVLRSTLIVGATALLRHIRKGRHKPTLWLASLLERKPPKLVAVALANKFARIAWRLMISGGVYNRPAAAMPI

SEQ ID NO: 80456 - protein, 354 aa, unidentified
MQQFVGIDWATRRARWCAVTPAGAVIDEGWAPADEDGLAGLVMRLGPEASACMEMMSGAAWVRERLQAAGWTVQIADARKAKAVGSLAAKTDKLDARVLAELARRDLVPQVHVPTFADRELKERLGRRMHMIRLRIAAINRAHGVLSQFGVRLAFDRLRAADAQELLAARGVPEVWRRSIAEAVAIVRVLDERLLPIELELRPLARADERVRLLVTIPGIGDLLALTIATEIGDISRFASARKLVGYSGLTPRVYQSGQKSRTGKLSRTGSTMLRWAAIEAAHQAWRPNNPWHRLYLDVKQRCGGKGNPAKAAVARKVLIASWHVLALKQPFTPSRPRGARTPAPANSSCVLAD

SEQ ID NO: 80457 - protein, 451 aa, unidentified
MNELIRIGVDLAKNVFQVHGVDRRERPAWCKRLPRERWLRAVAETAPPGCEIGMESCGGAHHWARQLQARGFRVKLIAPQFVKPYVKSNKNDANDAEAICEAMSRPCMRFVSVKSVEQQDIQSAHRIRAGLVEQRTAKANQIRGLVAEYGLVAPKELLSLRRAIPRWLEDADNGLSDRFRHLLDGLWRDIRALDDRVAELDADIGAIAQSDPDAVRLQQLRGVGPMIATALLAAVGDARQFANGRQLSASLGLTPRQHSSGGKERLLGISKRGDAYLRSLLVHGARAMLRTAKGKEDRLSRWICRLAERSHPNVACVALANKTARMAWAMLRNGTDYQPDPPPDTWEPQRLRTTCRWQTGRTGAGKPLNVLVRKHVIAIGSRRANSPSRPSIEAMQQSEAGYTCAVDSGAGCRMLAAEGESIYGHSLRWMELKPLVDEHRDAPRLAQHSAP

SEQ ID NO: 80458 - protein, 340 aa, unidentified
MSIVCGFDVHRAQITFDLLDLRSGEIRVGRIEPATREGVRTWLAGLEASRLQVALEATTGWRFVVDELERVGAHALLAEPAETRALRGPKRRAKTDRADARHLRELLAREAIPESWIPPEHLQELRTLVRLRHSLAAERRVWLQRVQAQIFHQGAPPVRGRLLGPGGAAASVALSPAGRELVECASRVCATLESELAELDGRLSMWARAHPACRALRTLYGVGPIIAVTLYAEIGDPRRLGSSRKLVRLAGLDVTVSESADKRSPGRLSRQGAPVLRWAAYEAALSASRASSPDRRDYQLLRERMGHGRATLTIARKILRRAHHVLVAVGDDLLAPLPNL

SEQ ID NO: 80459 - protein, 322 aa, unidentified
MAMLSFGGIDVSKDRLDVMILPEEQSFSVNNDATGWAELVEQLRGFSIAAIGIEASGGYERGVMRALLAAGMSVRQVNPFKLRQFAKASGVLAKSDRLDARMIASFVAIMPTRPAQRPAPAVERLAEMLTVRRQLSDERVAAENASRLLEDAMLQRLSRRRIARLTADIDMLDERLVEIVAADATLAQRYRLLTSMSGVGEVLACTLIALLPELGQMNRKQVAALVGVAPYAFESGKLKGKRCIWGGRAKIRRVLYMAAMSASNWNPALKAFHDRLEATGKKPKVVIVAVMRKMLTTLNAMVRDDVAWVDRLSGRHTMPTAR

SEQ ID NO: 80460 - protein, 391 aa, unidentified
MTYFIGIDIAKYKHDCFIMDEMGNTVCDSFSFANDSTGFNTLLYVLKSLDPNQEKRIGLEATGHYGSNLKIFLEENNFSFMEINPILINRFSKATTLRRTKTDKLDAELIAHYLLSVGYIPYPTKSYHISNLKSLCRSRECLIRERSLMLVKMTNILDLMFPEFKPFFNRSLKSSTALYLLENYGSPSRMARMNSDSYRKMASNLKRTISYARFVELKNLAKNTVGQEDPVLTYELNLYLDLFKELDSRISNLESFISKEYLALDSHIHSIPGIGLISAAGIYSEIGDFSRFSSANKVLAFAGLDPSTNQSGEESHCGHMVKHGSSYLRKYLMNCAEISLVHNSYLYDFYLKKRNEGKAHRVALSHVARKLTSIIYSLEKNDVDFDFNKMR

SEQ ID NO: 80461 - protein, 399 aa, unidentified
MLAVGIDISKSKSVAAILNQDGSMHTSPFEFHHTQPELDAFIKYILNSNQSATILMENTGHYHYPVLKAFREAGLPVCMVNAYQIKKFGDMDLRKAKTDKKDAVRIARYALEKSYSLVPYTSMEQKYEDLKFLARQYNQRMLTLKTNKVFLLNLLDETMPGITNILPLTTRTPETSLSVLFINRFKSYDRIKKMGKSRFLDAFEKITRKSRNRQTKTYGLAIYEAALRNITTRGENEYTLAAQDQCLELVCESQKAADSIILKMQTLAETLPEYAVLRSMAGVGDRLGPLILAEIGDIRRFHSGKALNAYAGNDAPPYQSGTFESHNRHISKRGNAALRKYCFEVMQTLKLTRPQDDPVYLFLLKKEQEGKPYNVAKMAGVNKFLRIYYARAMETLKQQ

SEQ ID NO: 80462 - protein, 411 aa, unidentified
MQVIHPICAGMDVHKQDVKVCLVWRDADDQRQQEIRTYATTTGALLQLSDWLAQSRCPIVAMESTGVYWKPIYNLLEDAFTVWLVNPSHLKYVEGRKTDPRDAAWLAELLEHGLLQPSFIPEQEIRDLREVTRYRRKLVQEKASQHNRIQKILEDANIKLASVVSDITGVSARAMLAALVAGDKTPAEMAELARARLRNKRTELTAALEGRFRSHHARLLGLMLEHLDELDQSIADCDTLVEELLRPFQPQVERLRTIPGIERRAAEELLAEVGVDMSAFPSHKHLCSWAGLCPGDHESGGKRKSGRMRHGNRYLRSILSQCAHAVGRSKKTYLGARYGRLAKRKGKPRAAMAIAHDILEAAYFILRDDVEFVELGPDFFDRLQRDYQIRYHTRRLRELGIEVALPQAVAA

SEQ ID NO: 80463 - protein, 312 aa, unidentified
MEPLSLGIDISSKRLDCYWSHLNKHQSFENTLSGIAQLLLKIGQEKPVWIVFEPTGGYEIDLAFHLAEKGIAFSMVQPHRLRSFARSCGKLAKTDKLDAKLMATYGIKMTPKSTILGTKAQKELSSFVTRRRQLVDLLSIERQRIDQGRDPLIQEDVKDHCEYLKHRIINLEKQIQDCIHQDINLEEVSQTLQTFRGVGPTSAAVLLADLPELGHIGPKEISSLVGVAPFNSESGNTARKSKIRGGRLSVRCILYMVALVAIRHNTVIKEYYNRLRSQQKPPKLAIVACMHKTLIILNAMTRDHFKNKTVPS

SEQ ID NO: 80464 - protein, 367 aa, unidentified
MTNKKWKLMQEQINKLDFRGQNIYVGIDVHKASWTVTIELKHITHKTFSQDPCAHTLGEYLRGNFPGGNYLSAYEAGFCGFSTHRLLEKEGISNIVVNPSDIPTTNKEKRQKEDKRDSRKIARSLKDGSLIGVHIPMEETEELRSLLKSRADLVEEISRYKNRIKSLLFQYGINIPENFIYGSMHFSNAYINWLKGIRFRTSIGDIALGSFVSTTVLLRQELLKLDREIRAVYRSPKYKTLVDLLISIPGIGGYTAIVFIAFIEDMTRFCTLDELCSYVGLIPSTNSSSDKEKVGKITMRSNKVLRGLIIESAWIAARRDPALMMAYQTMCGRMKPSKAIIRIAKKLLSRMRHVWINNEKYEYAVVA

SEQ ID NO: 80465 - protein, 406 aa, unidentified
MAKKKKRNRKKTVKHLHVLQPNSAGIDIGATEIYIAVPDERASKAVRRFDTFTDDLHDAAKWLKKCGIESIAMESTGVYWIPIFQILDIYGFEVILVNARHVKNVPGRKTDVIDCQWLQYLHSVGLLRGSFRPAQDICAVRSLLRHRDNLVKAAASHIQHLQKSLTQMNLQIHNVISDITGVTGLAIIDAILAGERDPKILAELRDPRIKADKQTIVKSLIGDFRSEHVFTLKQTLQSYRNYRQLIQGCDREIENHLKKFESRVDLDSLPPLPPGTPKRKPKGNEPDFDLREHMYRLLGTDLTQIDGISGLTAHVFFTEVGPDLSMFKNVKHFCSWLGLCPNNKISGGKIFHHTLDQGQIDLLTLFDFQPTHCGTASLTLEIILDECDPAMEHQKQLQQLHINWLE

SEQ ID NO: 80466 - protein, 381 aa, unidentified
MRFIGLDVHQKYAEGCEIGTDKKKRRFRIANTREAWEEFGQTLDPNTRIVLEATSNAFWIHDILSEYPGQVVVANPLKTRAIAEARVKTVALDAQILAQLLAADFIPESWVPSKDEYQLRVLLHHRIRLAKIRTMLKNKIHAALIRSGIQSPWSDLFGKGGRKFLEKVMLPTTEQIIVCSSLRMLDSVQKEMAALEADLHARAKENPSVHLLMGIPGISVLSALTILAEVGDISRFSSPKKLASYSGLVPSVHQSGKTYYTGNITKEGRSTLRWILVQCAQRAVQSPGKLRLFYLALKEKKGHKVAIVATARKLLHVIWAVLSRKEEYRDLRRDLLERKLKRMEKNANEYAMPELSEVVEALEMMSEEPIVTSEEWLGGVG

SEQ ID NO: 80467 - protein, 351 aa, unidentified
MEKVIKQCVGIDCAKEKLDVSFAVMNSSFDSSILSTTVFTNDRAGWKKMIKWAEQLETKDLQTHFVIEATGVYHEQVCLYLFLLHRQISVLLPNKVKKFAGTLKIKTVNDRVSAQTIAQMGLEKKLDSWQPPHEVFNLLRQLTRERHQLIEEKTQILCELHAEQSGAWPNKKSIQRMKQRINLILMQIVEIENEMKEQVNEHPWLKEKLAHVCSIPGIGFLTAVTVVAETNGFNLVRNKKQVVSYAGLDVIEKESGSSVRGKPRISRRGNKQIRRAMYFPALSAIRAKSKMRHLYDRLEAKHGIKMKAAVAVQRKLLELMFLLWKKNEFYIENYDIKKLEQPKKAALIEMA

SEQ ID NO: 80468 - protein, 343 aa, unidentified
MKYYSGIDLHTRDSLVCVIDQKERKLVNSKAPNDLPSIVSLLEKVPRRPAVAVEATLNWYWLVDGLKEAGYKVKLAHTMGLYMITGAKVKTDRRDAFSLARLLRLDAIPEAYIYPKDTRPIRDLLRRRTRMVRLRAEAYVAIKRKFQQYGLPYSDKAIQSADAEELLRWFKHPGIRAALDMELERIRLYSCELKTVEKYILGTVKNKPIFEHLQTIPGVGKILALTIYYEVGDIARFASARQFCSYARVVPGLAQSGDVIRRGRGSKQGNPHLKWAFNQAAAISVRHYGYVRSFRQKHLARRRSKARRLISLNIVGHKLAIAAFHVLRDEVPFNKELMFGKAS

SEQ ID NO: 80469 - protein, 370 aa, unidentified
MRTDFKTFVGLDVHKDSIAIAYADADFGQPPRFLGTTRYSVISLTKALAKLGQPAELSVCHEAGPCGYGLVRSLRERGYATDVIAPSRVARQPADRIKTDRRDALLLARLHRSGELTPIVVPDPKDEAIRDLVRTREDAMHDRQRARLRLRSFLLRQGHAYTGRRWGPAHQLFLSKIKFQDPAHHIAFTEYRLAVHFRTECVERLEAALRQEIQSWRSLPAIKALMTLRAIDFLSATTIVAELGDLRRFPHPRELMGYLGLVPSEYSSGPTQHRGALTKTGNTHVRRILIEAAWNYRFAARVGESLQPRLEGQPQHIVAIAWKAQVRLCARFRRLRARGVHHNKVTAAIARELCGFIWDIGRQVAVSSSG

SEQ ID NO: 80470 - protein, 294 aa, unidentified
MLIIGCDYHPSFQQIAFVDTDTGELQERRLEHREEAEKFYRELAVQGMKVRVGMEASGQARWFERLLAELNIELWIGDGTEIARKREGKQKTDRQDAQHILHLLLKDDFPQIWVPSWENRDLRQLLWHRHRMVQAGTRILNQLQAVALNEGVGCKKRLGREKGREQLESFRLAPWASRRRHDLLEWLDRLNPTIGALSQAIEKEVEKCPEAQRLRPHPGVGPLTALAFVLIIGKPDRFQCGKQIASYLGLVPLEDSSGNRRRLGHITKQGNSLLRFLLVEAALSNGTQPSGMAQ

SEQ ID NO: 80471 - protein, 412 aa, unidentified
MELLHRRCCGLDVHKETVVACLRLVSDGKVTTEVRTFQTTTADLLRLSEWLAANECTHVAMEATGVYWKPVWRILDDGEFALVLANAAHVKNVPGRKTDINDAMWLAELLAHGLIRASFVPDAQTQEMRNLLRTRKQLVREQSSHVLRVQKTLEDANIKLDSVLTDLMGKSGRAIIEALIAGETNPVKLAGLADRRVKASPEQFREALRGRVMKHHRFLLRLHLNQIDALDVAMATLDAQVEANLGPFRTAVELIRSIPGIKNLGAHVIVSEIGIDMSRFPSAAHLISWACICPRNDESAGKRRSNRVRKGGTWLKTTLVQCAWAAVKKKDSYLQAQFYRIKARRGPKKAIMAVVASILTTIYHMLKDGTMYKDLGRNHFDRRSSDQQKNRLVKRLAELGYAVEIKPLAATA

SEQ ID NO: 80472 - protein, 407 aa, unidentified
MQVLYPRCAGLDVHKDTIVACVRCVSAPEHHEVQSFSSTTTGLLALSDWLASHLCTHVAMEATGVYWKPVWHVLEDSFELVLGNAAHIRNVPGRKTDVNDAMWIADLLAHGLIRSSFVPPAAIQELRDLTRTRKQLAREIAQHCLRIQKVLEDANLKLGSVLSDVLGDSGRAMLKAIVSGEDDPVRLASLAQGHARRKTSELREALSGRVTAHHRAMLGLHLQVIDALERALADLDAAVGLALTPIRQHVQLLRTIPGVGDLTARVLVAEIGVDMTRFPNPAHLISWAGLCPRNDESAGKRRSTRVRKSGTWLKTALVTAAWAAVRTKNTYLHAQFLRIKARRGAKKAIVAVAASMLTAAWHMLRNGVEYKDLGSDYFNRHDMQGTVKRLLKRLTDLGYPVQPASPS

SEQ ID NO: 80473 - protein, 335 aa, unidentified
MNFEFFIGIDVSKSELDFAVMHGKDQLFHREIVNTPESISSFINELKKLKGFKLEKAVFCMEHTGIYTAHLLSCLHKKKASLCLEPATQIRNSLGNIRGKNDKIDAIRIAEYACKNHEYLTLWAPKRLVIQRLASLATTRARLIKAKNTLTVALAESKSFLPKEILKKDSSLCNPSIKAMESDLQRIDKAVDEIIASDQELTRLFALVTSVSGIGKVTATHIIITTNEFKDINDPKKYACYSGVAPFAKESGLFKGKASVSHMANKKVKTLLHMSALVAIQHNSDLKEYYRRKVDLDKKNKMSVLNAVRNKLILRIFACVRENKRYEKKYAKLVA

SEQ ID NO: 80474 - protein, 340 aa, unidentified
MGNVTTIGLDLAKSVFQVHGVDAGGVTVLRQRLTRGRMLKFFTKLPPCLIGIEACASSHYWARELIGLGHDVKLMPAQYVKPYVKRGKNDAADAEAICEAVTRPTMRFVGIKSPEQQSAMMLHRVRLILSRQRTQLSNALRAHLAEFGIVAPIGRNGIDQLLGVIADTTDDRVPAQARMCLEMLVAQLRIVKEQILENDRRIMASARETELGRRLMEIPGVGPLLASAIVATVPDPAIFRSGRNLAAWIGLVPRQNSSGGKERLGGITKAGHRYLRQMLIVGAMAVVRYAERNGAKRPWLVQLLARRKTKVAAVALANKNARTIWAMMTSGERYREPQVA

SEQ ID NO: 80475 - protein, 391 aa, unidentified
MVCVGIDVAKDKHDCCILDSEGTTLVDCFTIPNNMDGFKSLLQTIQDCSQKSDKIKVGLEATGHYSYNIRGFLLDNDLPVYVMNPLHTNLYRKSLSLRKTKTDRVDAKTIATMLLSDVDLKSYTDTAYHNEELKSLTRYRFDKVQERAKLKQSVSRLVTILFPELEQLVSSIHGTSIYALLSEYPGAKQISEAHLTRLANILVTTSRGHYRKDRATHIRDAARTSIGSVMPAKSLELKHTIKLIQELTSEINEIEDAIRKIMDELKPPILSIPGMGFHSAAMILAEVGDFSNFNSPDKVLAYAGCSPSTYQSGKLTNCYAHMEKRGSRYLRYALYTATKYVCYWNPVFTEYLTKKQAEGKHYNVALSHATKKLVRLIYALQKSGKAYLAIT

SEQ ID NO: 80476 - protein, 341 aa, unidentified
MKFVGADLHKKSITLSVVVMNGTKTSLVKNCKILCKDTSKLREVLQSLVPFKITVEATIGFDWFASLASEFAERVVIAHPGKMRVIAESTRKTDKIDARILADFLAHDMIPEAWRPTDRVRQHRSLVRRRRKLSSRVTSIRNTIRAILTRYNLDRKDLFTKEGRKAALKLNLLPAEIFIVEDLFEDLKAAEDRLKKVEIFLSHFASKAPQAEKEARAVLATFPQMGPITADTILAELGDWQRFRNAKSVIAFSGLDPGVRESDAKRKNLKLSKEGSPLLRWIMIQLAQRLKKRSPRWKNIYARLEANVGNKKATCALARRLLVVVYAMLRDMKAYQLVAAA

SEQ ID NO: 80477 - protein, 429 aa, unidentified
MSPVAQRAAPAILLGSTTRKEDPVSTTATARVKHRTASEVALFVSFELGEKEWKIAWATSLGERPRCRTLRARDTKGLLAEIEKARAALAARRVVTCYEAGRDGFWLHRFLHAHGIENRIVDSASIEVNRRARRQKTDRLDAEKLLSMLLREALGEKDLWSVVNVPGAADEDARSLQREYRTLVKERTRSANRILGLLASQGLAPERIDARLPEWLARVRLWDGSALPPGARQRIEREFERWQFTHAQLLAIEKERRDRTQDLAEPGLEKVRRLFALKGIGLGAAWTYGLEFFSWRQFRNGKQVGALAGLTPTPYQSGDSERELGISRAGNRWVRGLSIEIAWGWLRHQPRSALSRWYQQRFARGGTRARKVGIVALARKLLVVLWRYVEMGVLPEGAELKAGTKSKEEHFESDRGLVLPPDLPREIAC

SEQ ID NO: 80478 - protein, 339 aa, unidentified
MSKPSNLQQTPVFCGIDVSAATLSVAVIEPDQPLQQRQFPNRASGHKALIGWLGKCPARVRVSLEATGIYSLDLALALDAAPHIELAVLNPKMVNRFAQTLRRSKTDAADAQVLAEYSQRMPFLAWTPPSLNGLRLRAVGRHIAALVAQHAREQNRLHACQGSQVAPRCVVQDLKRSLASLERRIVKMRRAARELIRADAEIEQRFRLLTGMPGIAETSALAILGELVLLSPHLTARQWVAHSGLDPVHQESGTSVHRRSRISRAGNRHLRRALYMPALSAVRYDPHMKAFYEALQQRHKTKLQAIVAVARKMLHAIYGIFRSKTPYEGSKLFPQLQTA

SEQ ID NO: 80479 - protein, 344 aa, unidentified
MSEVSMIGLDISKHVFHAHGVDGRGRAMFRKRISRGKLLDFFATQPSCTVALEACGGAHHWARQLAQLGHQVRLIPPAYVKPFVKRQKNDAIDAEAICEAAQRPSMRCVAVKSEEQQAAGMVFRTRDLLVRQRTQLINAIRGHLTEYGWVAPKGPSHVAMLADLIDEEEMASSLPGAARMMFRVMLDLLSGLSRKIADLDKEIARRAREDEVSRRLMTVPGIGPISATAIVALAPPAESFAKGRDFAAWLGLTPLQRSTGGKQKLGAISKMGERTLRRLLIIGSSAVVKQASKRGAPRGSWLEQMLARKPRMLVTVALANKMARIVWALLVKQETYRAPVATRA

SEQ ID NO: 80480 - protein, 374 aa, unidentified
MKKELYLGLDVHKDCIITAVAQEGRKGEVRDTGVISNDLHALEKWVGRLRKAHGSDVVLRACYEAGPCGFGIARRLKQLGVECEVVAPSLTPKRAGERVKTDRRDARKLARLLRAGELSPVYIPESTDEAIRDLCRARTDAVDDRCRSRHRLKGFLLRHGYHYQGKSSWSAAHERYLRELVLPHPAMKVILEEYLQGIAAAGERIARCEEAMRALLEKWHLRPAVEALMAMKGFRTVAAMILVSELGEVHRFSHPRQVMAYLGLVPTENTSSDRRRQGHITKCGNAHARWLLVECAQHYATPPKVSKELSRRQEGQPREVRALSWKAQNRLHGRFARLSARRLQRNKALVAIARELCGFIWGLLRMQRCYQTPH

SEQ ID NO: 80481 - protein, 459 aa, unidentified
MSRKHKKAKRAGQGGAVPSLSCIEPNAAGIDVGATEIFVAVPQDRDPGPVRSFETFTEDLHRLKSWLQHCGITTVAMESTGVYWIPLFQILERAGLEVCLVNAQHVKHVPGRKSDVIDCQWLQYLHSVGLLRASFRPEERICAIRSLLRHRDSLVQMAAAHVQHMQKALSQMNLQLHHVLSDITGQSGLAILDAILAGERNPAVLAQLRHARVQASQEVITKSLVGDYQREHLFTLRQSLQAYRYYQSLITTCDQEIAEQLQNLDSRTPPDASPLPPEPYPHRPRKNEFRFDMRSELYRIYGTDLTAIPSINALTGYTVLAEVGTDWSKFRNGDAFASWTCLCPQNKKSGGKILSAHTRRSANRVNRALRLAAQTLERSTSYLGTYYRKMRARHGAPAAITAAAHKLARIIFHLVTTGQAYDESLFAAEEQRQRKRLENKLKRSAQQLGYQLIPLGQTA

SEQ ID NO: 80482 - protein, 356 aa, unidentified
MDKITAIAIDLAKNVFQVAGENARGEVVYEARLKSRAALHKYIAKLEPPLTVAIETGPGAQAWAREIQARGIEVKLLPAQHTAVHRSGNKNDRRDTHAILRALHDRSVHPVPVKTPEQLAMQALHRARRGWQRRTTAIGNQVRGLLLEHGVVMAQGDAALVRTVDRTLEDASLPLPDRLRELVAELMGEWRGHRERLAKLDAELASLSRTDPVARHLRETRGIGPIGSTALACKGLDPGRFANSRQFAASFGITPAQHSSGAKLRLGKMSRRGDTYLRSTLIEGAHAVIRTIRSDAADPYSRRIQRWVKRCGRKGAAIRLANHNLRVVWFLLKHPDTPFRSNPHEACLSDLEVAMH

SEQ ID NO: 80483 - protein, 413 aa, unidentified
MEVIYQRCAGLDVGKDEVVACTRVPAGAVGGGRRQEVRTYKTFSSSLAALADWLADQGVTQVVMEATGQYWKPIWYVLEERGVELLLVNARHVKILPGRKTDVGDAAWLCELLEHGLLRGSFVPPPAIRELRDLTRYRKRLVQAHTAEAQRIHKTLEDASIRLGSVASDVLGASGRAMLRALLAGERDPGVLAELARGRLRNKLPELREALAGRFDAHHALLVRLALEHVEQLERSITTLDQEVDRVIAPFAKARDRLDTITGVGKRAAECIIAEIGIDMQVFPTAAHLASWAALCPGNNVTGGKRRSGKTRKGNVWLGEILVECAWAAARSRDTYLAAQFWRLARRIGKKKAAVAVGHSILVIAWHLLDGDCDYAELGGDFFVRRDADRARQRAIAQLQALGYHVTLQPTAA

SEQ ID NO: 80484 - protein, 410 aa, unidentified
MHLYCGIDWATAHHDVAVVDADGRVVTRRRVGNDAAGFAQLLTLLAEAGDTPEHPIPVGIETDHGLWVAALRATGRVIYPINPLAASRYRARYAVSGAKSDATDAVLLANIVRTDVDAHRPLPADTELAQAIRVLARAQQDAVWARQQIGNQIRDLLNDFYPAAIVALAELPSGGLARADARTILAAAPTPAQAAKLTQQRLRRLLIKAGRRRDLDRDIERLREIFTDTYLHQPPQVENAMGIQLAALLRQFDAACAAADELAEAAIAHCEQHPDAAIITSFPGLGNLAGARVLAEIGDDRARFADARGLKAFAGSAPITRASGKKTIVLHRHIKNRRLAAVGPIWALASLRASPGARRHFDARRAAGDWNHQAQRHLFNKFLGQLHHCLQTGQLYNEHLAFPPPLPLAA

SEQ ID NO: 80485 - protein, 426 aa, unidentified
MVRAVGLDIHRDFCEVAIMEAAELRSVGRVDTSPAALELFAGSLGPDDWVAFEVSGNAAEIARIIEAHVARVVVVSPSDTGIRQARAKTDRLDARTLARLLAAGSLDAVWMADERTRVMRRRLARRAQLMAARSRCKNEIHAVLIRRLIARPQVSDLFGQAGRRWLGELELPVEERESVDAGMRQIEFLETELADVDRLIALDALGWAQAKRLISVPGVNVICAASFLAAVGDISRFNDPRKLVGYLGLDPKVRQSGPAPGTSGHISKQGSASARWALVEASWSAVRQPGPMRAFYQRVRARRGHQIAIVAAARKLACLFWFLLTREQDYAYAQPSLTKKKLRRLEIAAGAPKYQGRSNIWSTNNAMREAERALAEQAEHAYKNTVRDWQAAQAKKPTLEVGASATKGRASNKPTKGKAARQTTSP

SEQ ID NO: 80486 - protein, 343 aa, unidentified
MEYYVGLDVSLKQTSICVVNQAGSVVREGVVDSDPEAIAAFVRSNAPGAVRIGLETGPTSTWLWTELKRLGLPVICIDARHAKAVLKMQINKSDRNDAAGIARIMQTGWFKEVRVKDLDSHSVRALLASRALLVKIKRDLENQIRGLLKNLGLVIGRAKFNVFAARAEELIEDRPELVAAVRPLLEARKAIEQQVGDLDRKVLKLARHDVQVRRFMTAPGVGPITALCFKATIDDPTRFKRSRSVGAYVGLTTRRHASGEVDWSGRISKCGDAMLRMYLFEAAGVLLTRVTKWSVLKAWGTRLAKRNGLRKAKVAVARKLAVILHRMWIDGTEFNWSTKKAVA

SEQ ID NO: 80487 - protein, 369 aa, unidentified
MQDSMFIGLDVHKATISVAFAKGERGGEVRHWGTISHRPDHIRKLVEKLGADGCRQRFCYEAGPCGYGLHRQLVELGHDCIVVAPSLIPVKAGDRVKTDRRDAAMLAKLHRAGELTAVWVPDAAHEAMRDLVRARATAVRVTGKARQHLQGFLLRNGRIYPGRKGWTKAYRRWLTTVRFEHPAQQIVLQDYIDAVTDAEVRIERLTGQIADLLPSWTLAPVVEAVQAMRGVAFIVAVTVVAEVGDFSRFDNPRQLMAYLGLTPSEHSSGARVRRGGITKAGSGLARRALIEGAWSYRMQARVSRKLHDRIEGLPQIVRDIAWKGQLRMCQRYRRLMAAGKPKVVATTAIAREMVGFIWAIARIVKPSCA

SEQ ID NO: 80488 - protein, 359 aa, unidentified
MYFSGLDAHLRYVTVAVLDRLGGVALETTVPTREPDRLLAVLAPFRPLEVVVETCPFWPWLYDLLVPAGIGFHLAHAKALRAIATAPQKSDAVDARLLARMLLSGLIPEAYPRSADQRELLRLLRHRTALVRFRTRLAGRIHSQLHQQRLSLPREKLLRRATRAWLEATAWPRLTVEQRAIVTTHVELIDHLTPLIRALERRIAAAAAGDATAPLLATIPGIGPYRSLLLAAELVPISRFPRAEHLVSYAGLAPVTRSSGGHTHHGSIPPAANRWVRGALVSAIPSHVRYAPTSPVTVGYEQLKARLGWRVARVAAARKLARVVYVMLTRRTPWHGVPPAGDVRDEVQNSHVAPTTSFC

SEQ ID NO: 80489 - protein, 342 aa, unidentified
MTAIGIDTHKATLAACAIDDVGRPIAEATFGNDPRGHDTFIAWARAVAPEATIGIEGSSSFGAPLARSVQGAGLCVREVPPHLSRAERRRTRRPGKSDPGDALAIARVTARETNLPPIRLPDRSTELRLLLEAREDLVGEATRVRNRLHAHLLVLAPGYGGTVANLVAARHRTTVGRLLRGNHTLQAELARALLHRLTGLEREIEASTRRIGALVEGHPLLGLPGAGPITVARLIAEVGDVRRFRSADALAALAGVAPVPASSGQVQRMRLNRGGNRQLNRAFYVIALSQSRFHPPAKAYVARRMQADHKTWQEAIRALKRQLVRPVFRLLVEGADALRAAA

SEQ ID NO: 80490 - protein, 350 aa, unidentified
MHATTVAVDLAKMVFELAFADGDHRIVQRKRLSRAALGRELENRAPLHVVMEACGSAHYWARRWVRQGHAVRLLPPRDVRPYVRRNKTDRTDAAGLLEADRCAQIDPVPIKTVEQQGVQALHRVREQLKAQRTATINLLRGLLREFGIVIGLGAAQVRPAVLAAIEDGDNELPMALRHTLSEMLERLAGFTQSMSAIEQRLQAYAGTDPFCQRLQQAPGVGILTATAVRASTGTLDRFRSGRHFSAWLGLTPREHSSGNQRRLGCISRRGDGYLRMLLIHGARAALRAARLRQQRQQSLSRLQRWALSLQERVGHNKAAVALANKIARRLWAMDHHRTDFDADHVSVPAH

SEQ ID NO: 80491 - protein, 439 aa, unidentified
MERFELLNPHSAGIDIGSMLMVVSYTDREGMINLREFDSFTSSLYELAELLQKEGIEKVVMEATGPYWESLYNILEKHGMEMFLVNPSHYRNVSAQKTDINDAQWLHQLLAHGLIRNSHIAPELYRELRQYLHEREIYQNYKSDSLNRMQKTLTLMNIKFQHLISDVEGVAGMKLLRAISSGICDGQTLLARIDVTKLKASPEDLLSSLQGEYKQHYIHILSITLKSYDFFKEQMQVYESHIEHTLKELLACKGEAPTVIQQKTKKVRKNQYSFNLKDYLLGILGVDLTEVEGLDEIGLLTILAVTGTNMKKWPTAEHFVSWLNLSPRPKISGGKIIGYERRNNNNPATQAFRLAAHCLWQSKGPMGQQYRRLASTKGSKKAIKAIARKLAVIFYHMVLNKQAFDATRIQPDIEQQKARKIARLQKDAAKLGMIVQKAA

SEQ ID NO: 80492 - protein, 327 aa, unidentified
MQIIGIDVSKEKLDCLWLRNVDTGKVKTKVFQNTAKDHLQLIEWSLKHTGLAIDQVHFVMEATGIYHEALAYALYQAGARVSVVNPAQVRDYAKGIAARTKTDKKDSFVLARFGIAESPRLWHPEAEEIRVLKALLARYNALQKDIQRELNRREKAHISCVSREVLQSIDTVVAQLDDEAKRVDALISDHINQNPSLKNDRQLLESIPAVGPVISQYMMSVINSRDFRSAAQCAAYLGLNPVQHESGCSVRGRSHLSKAGSSIVRAKLYMAAVVAIRYNPDVKHLYERLLKRGKSTMSALCAAMRKLVHICFGVLKHQTPYQAQCVL

SEQ ID NO: 80493 - protein, 363 aa, unidentified
MDTNIQTGRDKLRVSFSGRQIFLGIDVHKKNWNISVFIDDIFFQNFHQEANSLLLLNYLSSHFPGARYLACYEAGFSGFSIQRELKSLGIDCIVVNPSDIPQTNKGILSKTDTSDSRRLGMALSRGLLTPIYIPDKLTESDRQLIRYRKKTLTDLQKKRKILKSAFHSMGIIIPKEYDKPYWTKKFIDWIRNLRPEEVSSQILISHVIDDVEFLRKRLLQINKDIRHLSSLERYKEVYSILISAPGIGIITAMTMLTEIGEIKRFNNFAKFNSFIGLCPSEFSSGENIRKGKMTPRANSALRPLLIEAAWIAIRTDPALALKFQELIKSRTKKRAIVVIARKLLSRIYHIWTNTRLYEKGLLR

SEQ ID NO: 80494 - protein, 358 aa, unidentified
MATHSLSNLQSFVAPYHAEPFWIGIDVHKRSYHLALLRADAKTFTLVTPAIPEKLVEQLRQLEIKIAGVAYEAGPTGFSLARALQTEKIPVIVAAPSKIPRSISAGAKTDRLDCLKLAQFVSKGLLRPIAVPTPQEEAERALCRRRHQLVDSIRRCKQRIKGFLLYHGVKETESLRRWHTDYPNQIAALPLEAEGRLTIESHLRELTFFENELRSVIEHLEEMNQHPRHRPVIKSLTSVPGVGKIVATTFHTEIFRPERFDRAEEVASYLGLAPNVRQSGERAARGHLAPVGQTRLRSLLIQAAWIWRAKDPYAQEVYHRLLSKTGIPQKAIAALARRLAIILWRLSIEQRAYRPLEA

SEQ ID NO: 80495 - protein, 410 aa, unidentified
MENCKVIVGIDVSSKDSTVCVLMDKVRQGKTFKISNDMVGFQQLYKRLRLYSVIPLIVFESTGVYSLSLQAFLEKKHIQYLKLNPLKAKKLMDNNLRHNKTDQVDAYRLALIQFNAPQKLLKPQSRAYHEMQNASRYYEELNKAMVVAKNQLHRNLQTTFPQIENLMCHPTGKIYWSVVALFPHAQAVLDSNKEHILGELETISGLSQKKAEYLTQRLISLARLTCAYDNKDSIVIRAIQRNIASLFSLDQEKKEALAYLYKLASKNQADTRILTIYQSIPGIAKTTALRLLAELGDLRRFDSPNQIDAFIGIDPGIYQSGELDSHLSITKHGNSIARKIMYLSIGQMESVKTTQPCHITDYYDRKKSSQSRGFKKIAIASVHKLIRTMYALVTKNQLYDYNVATRNQRL

SEQ ID NO: 80496 - protein, 418 aa, unidentified
MNGEGSTRGTRRYVALDIHKHYCVIAAVDREGRIVLPGVRVEHADLEGWLKKNLCPTDHVVIESTTNAWHVYDLLSPWVERVVVANPIKVKQIATARVKTDIRDTLILARLLAANLVPDVWVPPAHVREMRQLLSQRRQLVETHTQIVNRMHSVAHRHHLKHERGKRFNEKNTLWQKDKRLSKTEQFQLELEMENRAYTEKQIGRIGKEVAKMSHQKPWAESMTYIMQLPGFGVITAMTVLAAIGEIQRFGSAKHLASYSGLTGGVDQSGTHLVQKGITKEGRKELRWAMVEVAQRAVKSDPRWTRKFQEMEKRMHRNQAIVAIARQLLELVWYVLTRRQPYRHFSQERIAYKYLTWAWQMDDEARDGLTRQQFTRYYLMRLGIGHDLTRIALDPKHPRKISSEAELLTLRPDLTQLE

SEQ ID NO: 80497 - protein, 362 aa, unidentified
MFTERTSVGLDVHARSVAAAAIDGVTGELVQTKLTPSHEHIRSWLGDLPGPVAVAYEAGPTGFGLSRSLNASGIRCEVVAPSKLQRPRGDRVKTDARDAVHLARLLRLDEITPVVVPSVEQEAARDLVRAREDARGDLMRARHRLSKLLLRQGFVYSGGRAWTGAHDVWLRRTGAQLASAATRMTFESDYDAVLTVKARRDRLDGAIATMAADCEFTPLVRRLGCLRGVGTLTGFALAVEVGDWDRFTGKTIGSFIGLVPSEYSSGQTRVQGSITKTGNSHLRRLLVEAAWHHRPVYVVGKTMRDRWELAGPAARARGDEGNRRLHHRWNTMRARHKRHTIANVAIARELAGWCWSLAVLEE

SEQ ID NO: 80498 - protein, 359 aa, unidentified
MNATTVAVDLAKSVFEVAVADQNWKVIDRARLSRPQFERWFHNRAVGLVVMEACGSAHFWARQLQGLGIEVKLLPPKYVRAYVKRNKTDAADAAALLEAARCADIVPVRVKSVEQQALQSLHRVRSAWMATRTSRINGLRGFCREFGITIAVGSRLGIEQISRVLVDSSTAVPVMLRDTLKLLIDEIRLLEARIAQLERELTAAAKASAACERLLSVPGVGLLTATAMVAATGGSVGHFKDARHFSSWFGLTPKEHSSGSTRHLGRISKRGDRYLRMLLTHGARSVLRAATVALRCGRPLDPLRQWGLNVQSRSNHNKATCALANKLARICFATLRDQEPYEKTKMLKKLERQAYPMPA

SEQ ID NO: 80499 - protein, 411 aa, unidentified
MKMAGIDVHKKVLMVVVIETTSPEEKPERRRFTTLPGDLSRLSSWLRAQDVQEAVMESTAQYWRTVWLELEPHMLLHLAHAFSNRAPRGRKHDFKDAERLVRRLFADELILSFVPNGEQRIWRNLTRMKMQLTRDRIRLQSQMECLLEEMRIKLSSVVTDLLGASGLRILRALAAGETEAKRLVALGDNRLKCTEEQLLDALTGSSQPIHREMLALQLERLQLLDTQIAKLNNLIAQGMKPHQEAVMRLAEVPGLGVDSAQQIIAEVGAQAGTFSSAAELTSWVGTCPGKDESAEQNHSSRSAKGNKYLRRVLNQAAHAAVKKRGSYFQVVFRRLLPRLGYQSAIWAIAHRLCRVVWKILHEGARFIEKGSEPDAQTKKKRARMLVQALRRLGYDVAITATHLATQNAMQV

SEQ ID NO: 80500 - protein, 422 aa, unidentified
MNDTIKLAAFVGIDWADTEHTVALRMAGSSNVETSVLLQKPEALADWAVKLKERFGDRPVGICLEQSRGALIYALSQYPWLVLYPINPKSSARFRESLYPSRAKNDPNDAALLSEFLDKHQDRLRPWRAEDVETRKLRLLLENREKLVDDRTSLCNRLRAALKLYFPQALEWGGPLIKPMSWAFLLKWSTLPDLQKVSQKKFLNFFYAHHVRRGDQINGLYEQVQSAKALVTDSALVDTSVLLVRSICNQLQALQPHIDQHEAEIEALYAKHPENHLFSDLGGAGKVLGPRLVAAFGSDREKYKDAGEVQKMSGIAPVVESSGKSAWTHWRWAAPSFLRQTFHEFAAHSIPRCAWAKAFYELQRERGKSHHAAVRSLAFKWIRILFRCWKDNVPYDESRYVQQLIAHGSPLLKFLIQKPLEA

SEQ ID NO: 80501 - protein, 327 aa, unidentified
MNKNKHFYGIDISKDVFDVMDQSDKHSSFSNTMKGFKEFRKKLPPDSVVIMEATGVYHVQLADYLFLQDIFVSVVNPLVIKRFIQMKMRRVKTDKADAQMICKYGIQNELKAYEPVSLHMKEARIITENIDLLIKSRTMFKNRLHALSHKSAKTRLGIINPMKKSISELNKQIKRLEDELKQIIRLHYQDLYSRLQTIPGIGSSTAMFLIILTDGFEKFESAKQFICYTGLSPTEKTSGSSVRGSRSISKQGNPKIRNLLFMCSFNACKSNKACRDLYVRLVAKGKSKKLALIAVANKLIKQSFSIAKSGLVYDENFRSVKNELALF

SEQ ID NO: 80502 - protein, 424 aa, unidentified
MNLTQNDRLNQVTADTLVVGVDIGSQDHFARAFDWRGFEFSKRAFRFSNTSVGFLSFIRWLYELQSKTDTKKVIVGCEPTGCYWLTFQKFLKDHGVLLVTVNPYSVKKCKELDDNSPEKSDLKDPKTIAGLVKDGRFSTSYLPSGVYAEIREASVCRDMIMKQHVRLANQIQGWLQKYFPEYFECYKDWNSASGLMVLKNAPLPQDIIKLGAGGINQIWREAKVRAAGIKRATTLVEAAQNSVGLEGGEAARLEIWILVNDYISKAEQLDRLDAYLNEKIMEVPNVEKLLAIKGVGLSTVIGFIAEVGDIGRFTDPRQVQKLAGLEITKISSGKRKGQPGISKRGRRKLRRTMYESARSLINWNPAFLDVFLYYRNREHRPLGSMQAKIAVACKAIRVFFVIMQTGCDFDEERFRKDILRPEAA

SEQ ID NO: 80503 - protein, 318 aa, unidentified
MTIHTESQIQINVGVDVGKSKLDIVLHPLDLHFQISNDEQSILKVVHVLKKRNIERIVVEATGRHEHAFVFACDQANLPIVVVNPISIRRYAQAIGVLAKTDKIDASVIARFAATIQPDIKPIPDKQSRLIKDLLIRRSQLLEMQTMEKNRLQILPKALHRSIKTLLRSLQTQISTITKQIDEAVMQVKHWRTKTEILTSVPGVGKVLAYTLLSDLPELGKLNRKEIAALVGVAPMNRESGSWNGKRRIRGGRHRIRTVMFMAMLSSIQCNPVFKRFYEHLKAQGKLPKVAIIACMRKLIVVLNTMLKNETRWGENMA

SEQ ID NO: 80504 - protein, 358 aa, unidentified
MNHLGLDVHAKATVWALLDPEGKSLATGKTETTAPALTGLIKKLSALGPLRAGQEVGGQSYFVHDVLRATGTEVLSFNAHQLRQIAASRKKTDRRDAYWIAKSLQTERMPHPVYMPTGPVRELRMLLSLRDAVARNERSWWIRARALARAHGESVPKGVHTGEALHRALQARPEGIGAALSMALEACARQQKALGEELSRVEAELRRRARECPEVKLLASIPGVGTLTALRLHALIGEVKRFPNARALASYAGLVPSVRQSGETNTTGSITGEGSKAIRAALVQSAQSVIYRSTSAEAAPLRQIAARIRLNRSRNKIAIVATARHLLRIAFYVLRDQRPYDAALLRTQTQASEEDAVS

SEQ ID NO: 80505 - protein, 391 aa, unidentified
MIYVGIDVAKDKHDCFITNSDGEVLFKSFTIANNREGFETLFQRIQSVSDDLTKVKVGLEATGHYSYNLLGYLIDKGLPTYVINPLHTNLYRKSLSLRQTKTDKVDARTIASMLMSDVNLKSYSDTSYHNEELKSLTRYRFDKVKERAKLKTSVSRLVCILFPELEKLVPTLHMASVYALLSEFPSAKHVATAHLTRLTNLLSESSKGRYGKDTAITFRDSARASIGSNMPAKSLELKHTIKLIQELDSEIDEIENEIKIIMDEINSPILSIPGINYRMGAMIIAEIGDFNRFDSPDKILAYAGFSPSTYQSGQLDGAYAHMEKRGSRYLRYALYNATKYVCHWDPTFAAYLAKKRAEGKHYNVAISHAVKKLVRVIYHLEKTKQQYIKAA

SEQ ID NO: 80506 - protein, 327 aa, unidentified
MYVCVLDQEGNVLVSKDIPTAPEPFLQLIAPYREDLAVAAECMFTWYWLADLCARERLVFVLGHALYMRAIHGGKAKNDRIDAHKIAALLRGGMLPQAYVYPQAMRATRDLMRRRNYLMRQRAELLSHITNTNHQYNLPALGVRPARPAERSGVAEHFREPAVRKSIEADLSLIDHYDRELPRLERYIESLAQGHDPLALAIVRTIHGMGKVLGLSILYEIQDIARFARVQEFLSYCRLVKPTKASGGKILGHSGKKIGNAHLKWAFSEAAVGFLRANKPAQALRQRLMAKHGKGKSLAIIAAKLGRAVYFMLKRAEAFDAERFFAH

SEQ ID NO: 80507 - protein, 341 aa, unidentified
MPNSTDFQTIVGIDIAKSVFQVYSCDTKTGIISNEKIKRDRLLEHFTNVPACKIGMEACGSSQYWARKLTALGHTVKLMDPKLVKPFVSHNKSDRADAEGIYHALQQGTRCVPVKNDTERDIDTLLTLRARLVKLQTGDINHVRGLLAEYGQIMPRSTVRFLDEVGNCINSLEGDAAQAVIEELRLVVDGIRKRAERIKTISSNIAALAKKTKHAANLLTVPGVGIITMAYMCVLLSEPQVYSSGRQFAAFLGLVPMHTGSGGKTITTHIPMRCNQQLRALMIECAQAVARAKYKTPWVTAILAKKPKKVALVAIANRIARQCWAVASKGEAWKDLSVTTA

SEQ ID NO: 80508 - protein, 401 aa, unidentified
MVSDFRKGRYNLMKIYVGIDIAKLNHFAAAISSDGEILIEPFKFTNDADGFQLLVSKLESFDKNSLIIGLESTAHYGDNLVRYLVTELYQVCVLNPIKTCQMRKNNVRKTKTDKVDTYVIAKTLMMQDNLRFVSFFDLDMMDLKALGRFRQKTIKQRTRLKIQLTTYVDQVFPEIQYFFKSGLHQHAVYALLKEAPSPKEIASMHMTHLANLLKVNSHGHFTKEQAKELRVLAQKSVGANDSAISIQITQTIQQIELLDSQLQKIEAEITDIMKFNDSVIMTIPGIGYINGGMILGEIGDIHRFSNPNKLLAFAGLDPSVYQSGNFQAKTTRMSKRGSRVLRYALVNAAWNVVRNNATFKAYYDAKRAEGRSHYNALGHCSGKLVRVIWKMLTDNVEFNLK

SEQ ID NO: 80509 - protein, 367 aa, unidentified
MKNTIVHHEGVASLEVAVNKIKLSGSVIKIGLDVHARLYVAVAQYDQLLPKPARRLAPSEFVPWVKQLLRGGHTVHVVYEACGFGFNLYRELQRAGAHCYVIAPRKLDEQCTGVKTDPRDATALCQRLSRYVEGNTRELAVIRVPTEEEEQARHVSRQREQLVRHRQKLEAQGRSLLINHSLPAPAHWWKNQTWSRLSKLLPAWICLRLEAHRPALLALEQQIGMLSAELEAAAPADIPAGLGKLTTVVLTREICSWERFSNRRAISCYTGLCPGEYSSGSKRVFGSVTKRGNPRVRAALVECAWRMVRFQPNYPPVKKRLSILAKGARATGAQRKKAIVAVARHLAVDLWRVHTGRCSAQQLGLKC

SEQ ID NO: 80510 - protein, 414 aa, unidentified
MLYIGIDWAANSHTVTFIAPSGEVLESLAIENRLAGFLKLLEAIRKHLRKLEPAATSDAVSFAIEDQNQRLTDFMLAQGFQGYLIEPSRMKGYRLRYRSSGNKTDPDDAFVLADVLYRDHDQLPRIAPDSDVVRALKTLLRDRESFVHDQTRLTNRLTACLRQYYPEALDFFEDVAGKTVLDFIAAFPDFAAASRLSLREVKRFLVEHHCHREAQLERIMTVLGSSPTPVPTVVVRTKRQQALAIIQQLRMVQTTVAGYDVEIERLGKENDEVKRFRGMPGGGPIIGAGLTSLFGDDRTRFNSAMAVQSLVGTAPKTIQSGQFRTVCFRYGCNRFYRTLLQQMALCALRSSAWAKQYYRGKREEGKTHQHSLRCLANLLLKIAYAIWRDRTEYSEDRHLAQITRHHLRPTSCSV

SEQ ID NO: 80511 - protein, 354 aa, unidentified
MRIIGCDYHPGFQQIAFVDTNTGELQERRLQHREEAEKFYRDLAAQGIKVRVGMEASGHARWFERLLAELNFELWIGDAAEIRTKRVRKQKTDRQDAQLILKLMLKDDFPQIWVPSWENRDLRQLLWHRHRMVQARTRVMNQLQAVALNEGLRCKKRLWREAGREQLESFPLAPWASRRRRDLLEVLDRLNPTIAELSQAIEQEAEKCPAAQRLRTHPGVGSLTALAFVLIIGRAERFQCGKQIASYLGLVPSEESSGDRRRLGHISKQGNSLLRFLLVEAAQVTVRSLPEWRSKYFHLAMRRGRKIAKIAMARKLAIHLFWMMRKEWDYEQVKRFGPHAGQPEHRVGVQQNTE

SEQ ID NO: 80512 - protein, 411 aa, unidentified
MQVVYERCCGLDVHKRTIMACVLKWSASGWQKEIREFGAMTKDLLALSDWLVGEGCTHVAMESTGVYWKPVYNILEGQFKLLVVNAQHLKAVPGRKTDVRDAEWIAQLLAHGLVRGSFVPPASVRELRELTRYRTSLVHDRARTLNRLQKVLEAANIKLASVVSDIDGVSARLMLEGLVAGQRDTEQLAGLAKGRLKEKHAQLVEALCCRLQPHQSFLIAEHLAQIDYLEGAIERLSAEIEDRLRPFEQEIGWLDTIPGVNRRTAEVLWAETGGDMSRFATHRHLAAWAGMCPGNNESAGKRRSGRTRKGSPWLRHCLVEAAHGAAHTKNKYLSSQYHRLAARRGKKKALVAVGHTILVIAYHLLTRKQAYADLGANYFDERDRQAVTKRCLNRLQKLGYQVTLEKLEMAA

SEQ ID NO: 80513 - protein, 408 aa, unidentified
MRRVIGMDIHRTFGEVVIWEEGRLRNAGRVDMTRTALEGFGKGLRSTDEVVIEATGNCMAVSRVLSPFVARVVIANPLQVKAIAHAHVKTDKIDAGTLASLHAAGYLPEIWTPDAATERMRRLAARRFQIVRHRTRIKNEVHSILHAHLIPRCPHADLFSGVGRAWLLRQPLPQDERGAIERHIRELDRLADDLAALDKEIAADALDDDAIARLLTITGVNLTVAAGIVAAIGDINRFSSPQKLVSYFGLNPRIRQSGLGAAHHGRISKVGRSHARSMLVEAAWAAAKTPGPLHAFFVRIRAKRGHQVAAVALARKLTVLCWHLLTKQTDYRWARPALVANKRRTMELKAGKPQKKGNKPGAAHAYNVKALRDQEMDIARHAEQAYEQFVAQWETRPKVRGRSKPAGL

SEQ ID NO: 80514 - protein, 330 aa, unidentified
MYLGIDTHTRYSQVAVVDGDGNLQDEIRLPNDRLAELAEQYAGGEAAIEASGHYRPVYEMLDEHLDVTLVNPSKNRVIAEATVKTDRIDAKRLAHMLRADMLAESYVPSDEIRTLRDLVRTRKSLVEERTAEKNRVRAVLKRTDNVYDSELFGPTGREFLAELSLSDADRTIVEAHLSVIDEYDEQIDRLEEKIEQKVLESPAAQRLLSIPGVGQSTAALVVAEIGEIDRFDRDEELVSYAGLDPMVHQSGDTEVHGSISKEGSAPLRWALVQCAHVSVRYDDYLGNFYTRLKQRKNHQIAIVATARKMLVSIFYMLKRQEPYDPPEVSA

SEQ ID NO: 80515 - protein, 328 aa, unidentified
MTKHTTICAGIDTGKRKLDVAIEGRCEQLQVDNTPEGHELLLAWLRQHRVKRVGIEASGGYEQPVVIELRRKRFVVVVFQPTQVRAYAKFQLQRAKNDKIDAALIASCTAAVRKIHAAPDPRLLPFAERLTMIDQIGEDIARLKNRIESCRNAMIKRLWQEDIARLEKREKAEFTALVALIRKHRDLARRLELIHSVDGIGLPTAVAILVRLPEIGEITREQAVALAGLAPYDDDSGERVGVRHIEGGRKRLRRALYTAALAASFRWNRQLIELYQRLTAAGKEHKRALVACARKMLIFANTVVARGTPWCDEPPAVNASIAGASSVS

SEQ ID NO: 80516 - protein, 371 aa, unidentified
MEQSSKTLYVGLDVHKESIAVAYAPEDRGAEVVSLGPIGTRQCDIDKLIRRLESKAATLVFTYEAGPCGYGLYRYLTGKGLACQVVAPSLIPRKPGDRVKTDRRDAMTLARSMRSGDLSAIYVPGIEDEALRDLSRGRDDAMQDLKRSKRRLKSFLLRQDIRYEGRATWNAAHLRWLAEVVCPTPPQQIVFQEYLRAVSEQHERRQRLEHELHEAVKGWRLYPVVEAIQALRGVELTGAIILMTELGDITRFDNPRQLMSYLGLTPSEYSSGERRRQGGITKAGNSHARRALVEGAWAYRYPAKVSRHLQLRLEKLPAEVQAISWKAQVRLCKRYRQLTARGKHVNQVVVAIAREMAAFAWAIARLVPLAS

SEQ ID NO: 80517 - protein, 359 aa, unidentified
MDATTVAVDLAKNVFELVAADQHWKVVERARLTRTQFQRWFGNRDVSLVVMEACGSAHHWARVLQQQGIQVRLLPPRYVRAYAKRNKTDAADAAALLEAVRCADIVPVRIKSVEQQALQSLHRVRSAWVATRTARINTLRGLCREFGILISAGARLGVEQISRVLVDPHSNVPAMLRETLKLLVEEIRLLEVRIAQLERELSEAAKLSPACCTLLTVPGVGLLTATALVASTGGSVQHFKDARHFASWFGLTPKEHSSGSSRYLGRISKRGDRYLRTLLTHGARAVLRAASLAQRRGAGLDPLRRWGLLLQSRSNYNKATCGLANKLARICYASLRDQQPYQSLRLAKKLERQTFPMPA

SEQ ID NO: 80518 - protein, 351 aa, unidentified
MVIIGCDFHPGFQQIAVLDTGSGEVKDLRLAHKEEARRFYASLQGEEVLVGVEACGYTQWFEQMLEQMGHRYQVGDAAAIRASYVRRQKTDRRDAGHILRLLVEGRFPALWVPTASERDARQLIVHRHKRVQMRTRVKNQLHALALNQGLRLRWQLWSEKGLEQLRALPLLPYAASRRADLLEQLEAMNADIERLDRMVGKEAEARPAAVRLMSHPGVGPVTALAFVLTIGDVRRFEKSRQVASYLGLIPSERSSGGKQRLGHISKQGNSLLRFLLVEAGHTAVRGDAELKRCYRRLQHRHSTGVAKVAVARKLALRLYWMLRNQINYAQLHGPYAGKPVSFCGAKTRPAA

SEQ ID NO: 80519 - protein, 344 aa, unidentified
MTSNDYIGLDIHKKTISFCAKAQDGTILDQGTIVARRDTLVAWAKARPRPWIGAMEATLFTGWIYDLLKPLALELKVAHPAMLKAITAAKKKNDKVDARTIADLLRCNLLPECYMAPSAIRDLRRVLRYRNLVVRQATRMKNRSAGLLMETGTPYNKERLHGRAYFSELLGSLREVPRSVVELLQLSRGQLEFFATIQRRLLKGLGQNPDLSERVARLQTIPGVGEIMALSWALEVGEVKRLPSIAQAASYCGLTSAQHNSAGKEQRGPISKQRNKHLQTILIEAAKLAPRHNSQLAVVHERELQRGDRNQATLAVARKLVAYLMAVDKSGKPFAMRASGEEAA

SEQ ID NO: 80520 - protein, 453 aa, unidentified
MGTPGCRLFERESQTLDVHAGSAVGAPMEPFRREPDVEVMYERVAAIDVGKKIIAVAIRTPGERAGKRRQQVRKYNTYYRTLVEMVAWLIAEGVTHVSMEATGVYWRPVFHALCEAERPLEVLLVNARHVRNVPGRKSDALDAVWLAELTECGLLRGSFIPPAQIAAIRELTRYRKKLIEARTSELQRLAKVLEDGGIKIDSVASALTTLSARDMIEALINGERDPAVLADLARGVMRKKIPDLTLACAGRFGAQHALMCTLHLEHIDHLTGMIARLDTRIEEASLPFARQIELLATIPGISKRAAQVIISEIGVDMTRFPTAAHLASWAGLCPGNNESAGKHRSGKTRKGNTELCAVLTECAWAAGRTSTYVGAQFHRFHRRFGSKGGHKAAIATAHTLIVIIWHVLAHSTAYRDLGSDYFTRRIDNPQTRKRQLIRELEALGHKVTLEPTA

SEQ ID NO: 80521 - protein, 370 aa, unidentified
MAQSTPLFVGLDVHKDSIAVAHAAGGSPEPPVFVGAIGPRQADLDQLLRRLQGKTSALTFAYEAGPSGYGLYRYLTGKGLPCQVVAPSLIPKKPGDRVKTDRRDAVELARLLRSGDLTAVYVPSVEDEALRDLCRARDAARVTGKDAKLRLKAFLLRLGRHYVGRATWNDAHRRYLAKVVCPTPAQQIVFQESVRAVDEQVDRLQRFDAELLERAPAWRLYPVVQALQALRGVQFLVAITVVAELGDLTRFDSPRQLAAYVGLIPSEYSSGGSRRQGGITKAGNGRARRALIEAAWAYRHPAKVSAHIQQRIDHLPKALQALGWKAQVRLCKRFRRLVARGKHPNVAVTAVARELIAFMWAIAKEVPLAL

SEQ ID NO: 80522 - protein, 374 aa, unidentified
MNEVSKIHVGLDVHKDSISIGTAQPGREPGRLLTKISHHVPKLLKQLDKLGTPQQLHIVYEAGPTGFGLARSLQAKGYTCEVIAPSKTPRRPGDRVKTDTRDCIMLAEYSRSGSLHAVWIPDAADEAIRDLSRAREDAIEARHQARLQLKSFLLRHDVRYAGKTSWGKAHYRWLAEQSFGAGAAQTAFTEYCLTVQAADERVQRLTQALEEAVTQWRFADVVAALQALRGVATVTAIGLAAEIGDFGRFEHPRKLMGYLGLVPCEHSSGERISRGSITKTGNAHARRLLTEAAWQYRFPARISRAAQLRQEDLSEAVRAIGWKAQLRLSRRFAALNKRGLQVNKACIAVARELAGFVWAVGQRAMAETAAKTAH

SEQ ID NO: 80523 - protein, 352 aa, unidentified
MRKHNKETRATAEGETIGIDLGDRLSRYCILDEAGVVVEEGSFRNQAASIEKHFGGGCGARVALEVGTQSAWIAEALKKLGYEVIVANARQVKWITASDQKSDRSDAEKLARLARADVALLAPIEHRSPELQAEMAVIRARDAVVRARTLLVNAARGIAKGCGHRLPKTISESFPARALARLPEALRPALQGLLEEIGALSERITGYDAEIGRLARRHPEVERLTSVPGVGTLTGLTFVLTLGRAGRFAHSRDVGSYTGLCPRRQQSGGSDPQLGINKSGDKYLRKLLVQCAHHILGRYGKDSALRKWGLAKAEGSNNALKRAVVAVARKLAVLLHRLWISGDYFKPFPKMV

SEQ ID NO: 80524 - protein, 391 aa, unidentified
MAMYFVGIDISKYKHDCCIISAVDQKIVSKLTVKNDKAGFEQLLTVFNSLSNPDNIKIGFESTAHYALNLELFLENAHHSFMEINPLLIKEYKKSTSLRRTKTDSVDCESIARWLMTVEYKPHSKGFYHSYSLKSLTRLRDRLIRQRSFYLVKITNVLDHTFPEFKPFFHERLSKTALYLLENYGSAEKMVKMNSAAYEKLRSLSRGKFSPQQFIRLKELAANTVGVNNSIFDVELNSLLALYKSLIKEIDTLEKEINRLIEEVHPHYMSVPGIGPISAAVIYSEYGDISNFSTPAQMLAFAGIEPGINDSGTESHGGRMVKHGSSQLRYVLINCCLPLIRFDMTFAAYYAKKRGEGKPHRVAVTHVAKKLVRVIYALERQGVDFNALKLR

SEQ ID NO: 80525 - protein, 343 aa, unidentified
MDYFAGLDVSVKDTSVCIVDEAGKIIREVKVASEPDALLAVLNNLAYHFKRIGLEAGPLSQWLFSALAEADLPVICVETRHMRAVLKAQINKTDRNDARGIAQMMRVGLYRPVHVKTLRSQKLRMLLTHRKLLQAKAIAVENDLRATLRNFGLKVGIVGAVKFEARVKELVDNFPDLVALVEPLLVVRRVLREQMSILHRRVLAAVRNDEVCRRLMTVPGVGPVVALTYRATVDVPARFRKSKSVGAVFGLTPARDQSGESDRPGAISRCGDEMMRTTLYEAAQVMLLRSAKWSWLKAWAMKIARHRGMKKAIVALARRLAVIMHRIWIDGTEFRWTREAAAA

SEQ ID NO: 80526 - protein, 337 aa, unidentified
MELYSGLDLHSRNTYIGILDTDFKRVFKKRVPNNFDLIVETLEPFKDQLKGLVVESTYNWYWLVDGLMDAGYGCVHLANPSAIKQYEGLKHSDDQHDAFFLAQLLILGILPQGYIYPKKDRPVRDLARKRMFLVKHKTAHILSLQSLIARCCGQRISSNQIRKFTSADLKQLLREEYLVLSAQANLNIIAFLIQQIKALEKAIKKKVKLDKAFEQLMTVPGIGFILAMTIMLEVGDISRFAKVGNFASYCRCVSSQRLSDGKSKGSGNRKNGNRYLSWAFVEAAQLGRRYSQRFGRYYDRKAAQTNTIVATKALSNKLARICYYIMRDQVSFKEELF

SEQ ID NO: 80527 - protein, 370 aa, unidentified
MSQSRTLFIGMDVHKDTIAVAYVAQDHGAEVTSLGTIGTRQCDIDQLIRKMQSQATHLIFVYEAGPCGYWLSRYLRKKDDDCWVVAPSLIPKKAGDRVKTDRRDAMQLARLARSGDLTAVYVPQVQDEAMRDLTRARADAISDCKDAKFRLKAFLLRHDIRSTGRANWGPAHLRWLSEVVCPTPTPQIVFQEYVRAVQEHTERLQRLEQELHEHVQAWRLSPVVEALQALRGVQCTVAVTLVAEMGDLTRFDTPRELMKFLGLVPSEYSSGEQRRQGTITKAGNTHARRVLVEGAWAYRYPAKVSRHVQLRLETQSKIIQDISWKAQVRLCKRYRRLVARGKHANVVTVAIARELAGFMWAIAREVPITP

SEQ ID NO: 80528 - protein, 401 aa, unidentified
MKRLSGGIDVGSESHHITILDEEDNILYNQKVVHKLNEFAESIKLFKQIEKKERGKISFALEGKNGYSAPFDRILLDQGFTLYNVDNLKLKRFREAFAGEWRDDKRDALMLSKMLKLKDHIDSPREKVFIKIEKPSPVTESLKLLSRHQQTLIDEKVRITNRLSKKLLEVCPQILELGKVKNKKIIAILTKYPDFSKYKRITLCSLLKIRGIGKKGAFFLLKRLNHIEYMPGLTDIYKTIILSYAKRISELQKEIKDIDKSLDEIGEKDKEVKHLKTLPGVATKLASRLIGEIGDINRFPSEKQLAIYSGIACVDNNSGKVTKAKAVYKANKICKQALITMAGGSIRLSLQCKAYYLKKRAEGKSHNHTLRCLARQMIKVIHKMLTEDRDYIIKKELKKVA

SEQ ID NO: 80529 - protein, 351 aa, unidentified
MVTVGLDLHKRYITACALDESGTVLAEHRRLEPSLDALGRWLGGLPQPVQVAMEATLYWHWLERQLTARGFTVLVAHPYQVKLIWQARTKTDPIDARKLAELARVKLLPAIWIPDPATRALRQLLRGRVFLVRQRTVMRNRIHAYLTAENLRCPELDLYSKAGQAWLATADLPAVVRGQVGLVLANHALLTTQIQALDRHIKTTVRRDATARRLQTIPGIGPFGALLLQAEIGPISRFGSAQELAAYAGLVPSTRSSGEKTRHGQVGRGNPWLKWLLIEALQTLKLAPGPVGDHYRKLLRAKGKPKATVAAARKFCTYLYWMLKEEWSYTEWLRQHDRSEVRPMQPLGSAA

SEQ ID NO: 80530 - protein, 370 aa, unidentified
MEQITRAAVRGEAVRVGVDLAKRVIQVHAVDTAGRVLGSRALARDKFIAWCAQLPAGCIVAMETSSSSHHWARKLSALGLDARIIAAQLVSPYRRQGASGKNDANDAAAVCEAASRPQMLFVAVKSVEQQSMLCVHRLREGFKAERTACINRIRGLLAEFGLVFAQGPAALQVVLADVLEDASNEMNTLARLVLQRAHSQWRELDEHIAWCDERIAAHAKHNDAVKKAATLMGIGPVTASAVVATVGDFKQFRHGAQFGAWIGLTPRQDSSGGKSRLGGITKRGDVYLRSLLIQGAKSAVMTAHKRSDPISKWTAALRDRAGWQKAAVALAHKNARILWAVMTKGEAFDPRHVSVKPNVPTPTTPAAMAA

SEQ ID NO: 80531 - protein, 337 aa, unidentified
MKRYLGVDLHRTQFVVCTRWENGEQEIRQWRIGELPKFVEQLCTEDQMAVEAMGTTARFYDAVVGRVARVVVVNPHQFKVISESVKKTDRKDAQALALYLEKDLLPEVRMKPKQNRELMHLAETRDLLVKQRSALKGKINNLLAMQGIELKREALSSKIALARVLALPVSGMVQLELRVLVEQVRALSESIAELDERLEEEGQQLPGYENLTSIKGIGSLSATVLLTVIGKISDFADENKLASYLGLVPKIANSNESERSGGITKQGNKLARTALVQCGLVAKRYSPYLQGFYERIKQRRGGGKAKIALARKLVKIVYDTLKNQWVFEDFPSFTLAA

SEQ ID NO: 80532 - protein, 281 aa, unidentified
MTQNYIGVDVAKNWIDMFDAQTGEHRRIETSQANLQLFAREGKNCTIVFEASGGYERPLMDALSAANAPFIRVNPRQARDFARATGLLAKTDKVDAQMLARMGGALVLKPMSQPGAERDRLAALVARCDDLTTIIGAERNRHAQTSDAWVRRQTASLLRVLNRHLKRCEAEINAHIQKHDELAKDHSRLQSVPGIGPVLAAVLIASLPELGKLDRRKIAALAGLAPHACDSGLFKGKRRIWGGRANVRRALYLAAFIASRHDPMFRRHRAHLASSQGLFAE

SEQ ID NO: 80533 - protein, 414 aa, unidentified
MFAVGVDVSNGRSTVAVLGARRTVVAKPYEVPHTADGFAELAARLHALNGDVRIIMEHTGRYYESFAMSMYRAGFFVSAINPLAIKDYQEGISVRKVKTDKADALKIAQFGIDKWEILPHYTPMDTIRYDLKTLHRQFQLSSKTKTALNNNLIALLEQSYPGANRYFDSPVRPDGSQKWVDFVDTFWHVDCVAKVSLKAFVERYRNWCKRHGYNFSEAKAAEIHEEARQKFPLVPKSDTCRLLVREAVAQLNAVSRTVETYRAEMDRLASQLPEYQTVMAMTGVGKSMGPQLMAEIGDIRRFAHQKSLVGFAGTDPIKDDSGDKISDSKPSSKRGSPYLRKTLFVIMTILLQLQPPEDPVYQFLDKKRSEGKQYYVYMTAGMTKFLRIYYGKVRDCLKEKGLWEQPIVDEVNPC

SEQ ID NO: 80534 - protein, 394 aa, unidentified
MIFVGIDVASTKHDVFIMSYYGEILVKGFTIPNNLLGYKKLQHTILNVMESSVDSKVRIGLESTGLYHLNIMNFLTTEGFLVQEINPLLTSMTSKANSLRKTKTDQIDAKAICMFLFQNQTNFKPYTPKLYNTEALKSLARYRFSLVHDLSQMKVKLYTLVARTFPEYLGFFSSLYIKTSLNLLHKYSIPSNIVSARIDGLTNFLLKSSKGKIGKFKALKLKKLAADSIGDKSAFYAIQIRSVIDLIRNYQSQIALIEFEINLIIDTHFKFILSVPGLSYNMAAIIIGEIGDIHQFKSFDSVLAFAGMDPVVYQSGNYNLTNTRPSKRGSKYLRWALHQVSMVIVRRDDKFASYFHKKHHDDSKHYYVALGHVGKKLLRVLYSIIKYRQIYVSQ

SEQ ID NO: 80535 - protein, 319 aa, unidentified
MSEIVVRAGLDVSKDQLEAYVHPGGARLSVTNDRAGHCQLLAWLAEQGVAIVGAEASGGYERDILERVAESGLLALRLNPLRVRRYAEARGRLAKNDRVDAQTIALFMESCPDERAVIPADPTRDRLREHLIVRVQTLDAITALENQVEHLRDRGLRATLRARAEGLRRAVAKLDQRIAEQITAAPNLEALAACLRSVPGVGPVLTATLLALLPELGRLTRRQIAALAGVAPFDDDSGKRNGPRHIHAGRAALRKVLYMAALVAKRRNPAIRNFALRLAGKKPKVIIAACMRKLITILNAVARDQAMWHNNQLITSRNP

SEQ ID NO: 80536 - protein, 342 aa, unidentified
MDEYDGRQFVGIDLHRQRSVIVRQSESGEQLSAVRIVNDPVALQLQLEDAGADPEVVLEATYGWYWAVDVLQAHGARVHLAHPLGVKGFRYRRVKNDVRDAGDLADLLRMGRLPEAWIAPPQTRELRELVRYRAKLVALRSGLKAQTHAVLAKAGVLITAADVFGVTGRQRLAKVPLERAYAERIHSLLELIDTLDGHETRFAAMIAERLRTHRGYQAIQQLPGVGPVLAAVFVAEVGDVHRFKDPAHLCAWAGLTPTHRESDTVVRRGHISKQGSKLVRWAAVEAIQRQPDSTKIARDRKRIEDRRGRNIAKVAAARKLLTLVYYGLRDEHIRALAHRQAA

SEQ ID NO: 80537 - protein, 395 aa, unidentified
MNKIVHYVGLDVHKDSIAVAIAPQNSTEVRRYGIINGTLDAIDKLLKRLSQPNIELRLVYEAGPCGFVICRHLRSKGIHCDLVCPSLIPKKASDRVKTDRRDADQLARLYRAGELTPIRVPDQEDEAIRDLIRARTAAVFDQRRARNRLKGFLLRLGFRYTGKTSWNDAHKRYLSGLLMPRPAQQIVFQEYIHAIDDATERVARLTEAVEDALPGWKWEPVVRALMSLRGIQALSGMTVIAEAGDLSRFEDPRSLMHFFGLTPSEHSSGDKRVLGGITKCGNTHCRRVLTEAAWHYRLKPLVSEAMQKRQEHQSKEVRLIAWKAQQRLHKRFKQLVVRKKSVVAVTAIARELVGFVWAIACKVKPAQQPAAPQIIRTCRGKVYRLDPEKKMPKSK

SEQ ID NO: 80538 - protein, 351 aa, unidentified
MSRQSTPAAVATIGIDLGKNTFHLVGLDQRGNIVLRLKTSRNQLERRLMNVTRCLIGMEACSGSHHIGRQLEALGHDVRLIPAQYVKPFLKGHKNDYRDAEAIAEAVQRPTMHFVSIKTPDQMDLLALHRVRSRLVRQRTGVINQIRGFLIERGITVRQGPAPLRKALSDILSSSTPMLSPRLVRLITDLAEDWRRLDACIAMVSTEIAALAEQDAPCQRLMTVPGIGPIISSAVVAAIGNGTGFKQGRDFGAWLGLVPKQESTGDRTILGKISKRGNKYLRTLFVQAAHVVLARRPSAAMQGLWPWIEQASKRLHRNMLAIALANKLARIAWAVLARGRAYQPRIMPDAA

SEQ ID NO: 80539 - protein, 326 aa, unidentified
MQGKEASEQETKVQSNVGIDISKCWLDAHVVPDDDRLRVANTCAGIRQLKRWLSHYRIALVAIEATGKWHRHLHRSLVASAIPVAIVDPYRVRMFAKAQGILAKTDQLDARVLALFAAMMAPPVRPVAPQAMAELAELVVARASAVEAQAALKNQFGTAESRFLKHQLDRRIIRAGKDIAALDREILKRIKADASLARRYAILTSIPSFGFAVAATIIACLAEIGSATAKQIGMLAGLAPIADQSGDRNGVRVIWGGRPAVRRVLYLAALSASRFNADMKAFYKRLIDNGKPSKVALIAVARKLVVLANTLVSEDRTWQPCAPTQA

SEQ ID NO: 80540 - protein, 411 aa, unidentified
MRSIALDVHRDFCEVAIKEGGGEVRSAGRVKTSVEELELFARSLAPDDQVALEATGPANAIARVLEPHVGRVVIANTRRVRAIAEAKVKTDKVDATTLCELLDAGFLPAVWTPHEQVSALRGLLGRRDRLVRSRTRAKNAVHAALGRELKGHPPMTDLFGREGRRWLGRLELPAHERRIVASCLREVDFLSQEIAALESELARLALDSGPIKRLMTVPGVSLISAATFVAVVGEISRFETPKKLVGYVGLDPEVRQSGEAKARHGRISKQGSAQARHMLCEAAWIAVRTPGPLGAFYQRLRSRRGAQIALVATGRKLCVLFWHLLTREQDYAFGRPSLSRHKLRRLELIAGDPPRRGQRSGSKASKREQLHERELSEQVEAAYRRLVEDWQPKPKKTVRVRHRGRASSKAV

SEQ ID NO: 80541 - protein, 348 aa, unidentified
MSYRIAGIDVHKKMLAVVVSDVEIESEYQFERRMFGSNPEQLRSLAAWLLEQEVEEVVMESTAQYWKPVWEALERYWKPIREKREGARRKSGTLHLAQAQSNRGQRGRKRDFPDAERLVKRLVARELTLSFVPDPEQRLWRTVTRRKYQLTRDHTSLQNQLESLLEEAHIKLSSLVSNLLGVSARRMLKALAEGETNPAALAALADERLRATPEQLCDALGACADLKPVYRRLLKMMLEQVQFLEQQITKLDQEMASLLSQHQDAVQRLAEVPGLGVDSAQQIIAEVGPTAATFPSEKCLSSWVGACPGDEESAGVNYSHRSPQGNRHMRRILNQAANAAVKAKGSIF

SEQ ID NO: 80542 - protein, 452 aa, unidentified
MAKGKTKGKRAPAALAQINRRAAGVDIGAKFHVVAVPDELDPEPVRSFLSFTSDLNRLADWLLSLGITTVAMESTSVYWIPLFEILEIRGLDVVLVNARDAKNVPGRKTDVNDAQWIQQLHSYGLLRASFRPKAEIVALRAYMRHRERMLEYAASHVQHMQKALMQMNLQLHHVVSDITGVTGMTILRAIVAGERDPNVLATHRDARCKASADTISGALTGNYRPEHVFALRQAVELYDAYQDKVLDCDKEIERVVRALPEEKADAQELPPPRRRKAQKNEPRFQIQPVLHALLGVDLTQIHGLGPYSALRLVAECGTDMTRWPTAKHFTSWLTLAPGSKISGGKVLSARTRRSTNRAAGLLRIAAVSVGRTSTALGAFFRRLAARAGKAKAVTATARKIAVLFYNTLRHGAAYVDPGANYYEERYRRRTIENLRRRADALGFSLIEATATE

SEQ ID NO: 80543 - protein, 367 aa, unidentified
MKKVSTIAAKQSRNITQTQLTIGLDLGDRNSWYCVLDGAGQIQLEQRVRTHAKALREVFGAMPRSRVALEIGTHSPWISRLLSDLGHEVIVANARKVRLIGESRKKDDRLDAQTLARLARIDPELLYPVKHRSAQAQADLMMIRARAGLVRARTGLVNTARGLAKSYGERLRGCNVRNMDPEKAEALSPELQRALEPLLAAIEELSERIVEYNDRIEALAQASYPQVELLKQIKGVGTLIALTFLLTLEDPHRFRKSRDVGGYLGLQPGRRNSGESEPQMHISKEGDPYLRTLLVQGAQHILGPFGIDCDLRRWGSKLAQRGGRNAKKRAIIATARKLAVLLHHLWVSGEVYEPLHNSSGATVTVAA

SEQ ID NO: 80544 - protein, 411 aa, unidentified
MHNRQNYLYVGVELHKEHHTAVIINCWQEKLGEIQFENKPSAFSKFLLEVETYVSAGVSVVFGLKDVGGYGRALAKYLVDHEQVVKEVNPALSFLERKSHVTTQKSDSWDAECVARILVNKFNQLPDAKPKDLFWSIQQLVSRRNALVKAQSALKNQLHIQLNHHYPSYKKFFSELDGKTALAFWQQYPSPSCLEGANIKQLTAFLLDVSNNTCSVKKASEILKLVKEDGHTMKEYQETRDFLVRSIVRDIEFKKTEIKYIERELKQLVKLLAYQLETMPGIELVTASALIAEIGDVRRFPNANKLARFAGIAPVYFGSGGKGKTHKSKQGNRALHALFYNLAVQQVQVAKGSKKPRNPVFHAYYQKKLKEGKTKGQALVCIMRRLVNIVYGMMKYKIAYELPVVEEKEVV

SEQ ID NO: 80545 - protein, 358 aa, unidentified
MADKVTEAAVVGGVDTHKDLHVAAVVDQNNKVLGTQYFSTTRQGYRQMLAWMTSFGILKRIGVECTGTYGSGLLRYFQNAGLEVLEVTAPDRMERRKRGKSDTIDAECAAHAAFSGIRTVTPKTRDGMIESLRVLKTCRKTAISARKVALQIIHSNIISAPDELREQLRNMTRMQLIRTLGSWRPDASEYRNVTNVYRISLKSLARRYLELHDEIADLDVMIEAIVDELAPELIKRNAIGYESASQLLITAGDNPQRLKSESGFAALCGVSPVPVSSGKTNRYRLNRGGDRAANSALHIIAIGRLRTDDKTKEYVARRVAEGHTKMEAIRCLKRYISREVYTLLRNQNRQVNSIPITA

SEQ ID NO: 80546 - protein, 434 aa, unidentified
MGHRFRTDPDELDTLWARLPKDAERIEVVMEPTRNAWVALAAWFRRHGATVVMVPPEQSADLRDYYNKHTKTDRLDSKVLARLPLLHPEGLHREDSLGPGDELKRAVKIRSGLVHRRTACMARLDALLEILGPAWIAALGSDMTLTALRFLARYANPVQVKRLGKARLAAFFRRSSRQAWADERADAVIEAAATTLRLWGADGGELDFDALAADIAAEARLALTLTDEINGFDKRIGALYDKADPAGIVRSVPGAGRVCAPQILGRLGDPTRFANLAAVRSFAGLVPAADSSGQADGHRGPTKAGDCCLREALFIAADHARKVDPTLAVRYQRLMLAGKHHDSAVCTLAAVLLTRIAACLRAGTHYLLRDTDGRVITEAQGRAIVAERYTVPPEVRAARRKVTPHRHPRRNERNERAKTGVATRSKASPVPQPA

SEQ ID NO: 80547 - protein, 339 aa, unidentified
MKKVFIGIDFSKLKFDAAIYSVETKGIVATEVFNNEQSGYVDLLQWVKENTRFQKSEMLFCGEHTGYYSVNLSVFLSESGYDVWLVSGLELKLTQGIKRTKTDRVDACKIAEHAFRYQDKVALFQPVSKSLEEIRELLSYRERLVETRKVLTTSAKEMKRVKDNTSCDYIYQDSIEYIKKLNASVRDCEKRIEMLIKQDISLKITYKQVTSVVGIGLVNAALILVATANFTLFDNPRKFGCYCGVVPFEHSSGTSVRGKTRVSKMANKRIKTTLTLAARNSVRFDPELKEYYERKISEGKNSWLVLNNVKNKLIHRIFAVVRDGQMYEKQYIHPLKQAA

SEQ ID NO: 80548 - protein, 419 aa, unidentified
MTDPPLQSWLRFIAIDIHKHYLMIGAIDAAKQVVLPPRRVELARWPKWAHANLLSTDAVVIEATTNAWAIYDLLAPLVGRAVVVHPAKVKLIAAARVKTDKIDVLSLAHLLRADLLPEVWVPPQHVRDLRALLSHRRRLVSLQTTAKNRLQSVLHRLNLRPPDGDAFAHKQRAWWAELDLSPTERLRVNQDVATLAHVVAQIAAVDAELRCLSTSELWAEQVPYLVQLPGIALLSAMTILGAVGDITRFATAKKLVGYAGLGAGVHDSGKTHRDKAITKQGRRELRYVMIEAARAAVQSHPYWKDEFAQLERRIGDAKAIVAIARKLLMVVWHVLLAKSADRRADAEQVAFKLMVWSWKLSDEQRGGLSSRQFIRAQLMRLGLGEELTHITRGGTRRPLATIEEVLALRPELRGPPDTA

SEQ ID NO: 80549 - protein, 392 aa, unidentified
MVVSVGIDVSKDKHDCFIVSSEGEVLADAFIIPNTMDGFHYLLQRIRHCTAPQDKIKVGLEATGHYSYNLLGFLLDNGLTTYVLNPLRTNLYRKSLSLRKTKTDRVDARTIASMLLSDAGLKPYTDTAYHNEELKSLTRYRFDKVKERAKLKSSIARLVCILFPELEKLVPSLHIASVYALLEEFPGAKQVANTHLTRLKALLETASNGHYKRDMALEIRNAAKNSIGSQMPAKSLELQHTIRLIRELDREIDEIEEQIQSIMDELHSPITTIPGLGFRMAAMILAEVGDFTRFDSPDKLLAYAGMSPSTYQSGQLKNCHPHMEKRGSRYLRYALYNATKYVCHWDPAFADYLAKKRAEGKHYNIAISHAAKKLVRLIFAMEKSRQPYCSAA

SEQ ID NO: 80550 - protein, 339 aa, unidentified
MENVTTIGLDIAKSVFQVHGVNDGEAVLRQRLTRSRMLKFFAKLPPCLIGIEACASSHYWARELVALGHDVKLMPAQYVKPYVKRGKNDAADAEAICEAVTRPTMRFVGIKSPEQQSAMMLHRVRVILSRQRTQLSNALRAHLAEFGIVAPIGRNGIDQLIGVIADKTDVRVPPDARMCLEMLVAQLSIVKAQILENDRRIMASARETELGRRLMEIPGVGPLLASAFVAAVPDPAIFGSGRNLAAWIGLVPRQNSSGGKERLGSITKAGHHYLRQMLIVGAMAVVRYADRNGTKRPWLVQLLARRTAKVAAVALANRNARMIWAMMASGERYREPQIA

SEQ ID NO: 80551 - protein, 341 aa, unidentified
MQNTMDENLEPAVQLWVGLDVSKDTLDACLLRTNGKATHKQFPNDAGGFAKLLRWTQHAASEQIIHFCLEATGAYSHAVALFLAEAEQRVSVVNPACIRFFGLAQAQGNKTDKADAALIARFCRQETPEPWRVAAPEVQLLMALMRRLHAVQELLVQEKNRLGVPWQPTVVIESIENSIAYLEAEIKRLQGQIRTHINGNPTLKRDSKLLQSIPGIGELTAWDLLAELPDVSQFDSAQSVAAYAGLAPREHRSGSSVRKHTRLSKQGNTRLRKAMYFPAVTGITWNPLVKAHYERMLKAGKPRMVALAACMRKMLMIVYGVLKHQKPFDPAWQSQPLHNHS

SEQ ID NO: 80552 - protein, 353 aa, unidentified
MQCIAFDSHKHYTWALVQDETGKVLHEQRINHVRGALRGFLEELEPGSPVAVETIGNWYWITDEIEAAGMVPQLVNARRAKAMSGSINKTDKLDVRGINRLQRSGTLPTVWIPPRELRDARELPRTRMVLVRQRTKLKNRIHANLAKYGLEVSGATDLFGVRGRRILDQCLEELPLQTRYATQSLLVELDNLRGKVDEFEERMGVVFGAMQEIQLVRTLPGVGFILGVVILTEVGDVNRFPSSSHLASYAGMTPRIHASGGHVRHGRTRPDVNRYLKWAYAEAANVAMMHRRRHPQRHVSRLYERVKRQRGHPKAIGAVGRHLAEATYWMLRKQEPYRDPGTDRAEVESKREE

SEQ ID NO: 80553 - protein, 369 aa, unidentified
MNYSTTVVGLDVHKKTIVASVLPAGSEVVTERTTIENNPAALAKLVKKIGVRGSVEFVYEAGPCGYETHRQISGLGHPCFVIAPALTPVRPGDHVKTDSRDADKLARYHRAGELTVIRVPTCEEEAARDLPRAREDAMIDRLRSRHRLSRFLLRQGRIFQDAKRAWTTKHKEWLRTQKFEWPALTQTFEAGMRAVDDADARMESLDRQLEDLSLQDPYRTPVKFLRCLRGIDTLSALTLVVEAQDFKRFEGARAFMSYTGAVGREHSSGERTRRGSITKAGNAHIRRILIESAWSYRRGGLSAAVKKRREGCPPDVILIARKAEVRLHRKFARMVAQNKPPQVAVTAVARELAGFIWSIARHFPTAATA

SEQ ID NO: 80554 - protein, 385 aa, unidentified
MQKHHDDSKACLTAFVQDNTVIVVIEMSLASWVVAGLIPGVNREPLKKIAADPEELLRLLYRWRDQAIKAGKDITRIAVAYETGRDSFWLARWLRDRGIDAHVIHATSVAISREHRRAKTDRIDTAMLRRGFLGWLRGERGHCSMAVVPTIAEEDAKRPHRERESLLKERTSTINRMKAILAQFGVRNFKPSLRKAAEKIDAVRTPEGVPLPPNAAAALRRQIERFRLINEQIKTVEKTRMQRLRHNPAGKYNTMVFLLVRIIGLGVETAEQLVHEMLSRNLRDRKAVARYAGVTGSPDESGASRREKGLSRSGNGRVRKILIQLSWRMLQFQPDSLLVRWFKNRTANSQRSRKPMIVALARKLIIALWRYVNTGVVPDGFKLAK

SEQ ID NO: 80555 - protein, 365 aa, unidentified
MEKISTVKMKGKKILKGQLTIGLDLGDRSSCYCVLDENGEIIREQKIPTTPEGMQQAFGKMARSRIAMETGTHSPWVSRVLTELGHEVIVAHAQKVRLIVKSRRKDDRLDARTLARLARIDPELLSPVQHRSAQAQLHLAEIRARAGLVSARTALVNAARGLVKSYGERLRKCGTQQFGQETTSGLSAGLREALEPLMQEVESLNERIKEYDRRIEKMAKETYPETELLKQVKGVGDLIATAYVLTVEDPHRFRKSRDAGCFVGLQPGRRNSGESEPQMHITKEGDEYLRTLLVQGAHYILGPFGEDSDLRRWGLKLSARGGKNAKKRAVVAVARKLAVLLHRLWVSGEVYEPLRNSQKAMTVAA

SEQ ID NO: 80556 - protein, 425 aa, unidentified
MLGIGIDWSEEFHLVALGRPGEGVIEVTRVEHTPAAVDALVAEIAGLEPDPGEVRVVIETRHGLLVERLVDAGYVVVPVNPDLVARRRGPAKKKDDAEDARIACLIALDRHERLRPLIPHGEIAGELRAIARDDERAARDERRLGDRLRQDLISTFPAALRIGGQDLGAPTFLRLLERWPTANALEAATRVDLVAFARSCRHGWPERFADRVQASLGNEHFRPKDYLVRAKADTIRLAATQLLLIGRQRRSWERRMGELLLGAPRQGRDRKPKGDGLGKGFPGGGIYLSFPGLGDRLAARIAGEIGDHPEQFDTPNSLQCYAGKAPVTRRSGKSEVVVACRLAHNRYLGGAVQQWAFCSLRRSGWAREFYDSQRGRGKGHQAALRALGNRWLEILWHCLHRGVLYDEAVHVANRNRALGRTTQAA

SEQ ID NO: 80557 - protein, 414 aa, unidentified
MSVQDPTTTTREIVAGLDWAKDNHAVCVLDADGEPVERITVAHSKAGLARLNTTLDRHGVDAVGIERGDGPVIDALLATGRTVYVIPPSQVKALRRRYGSAGNKDDRFDAYVLADTVRTDRRRLTPLLLDGEATITLRKLCRARKDLVAHRVAVTNQLRAHLQTCLPAVVDLFRDLDSAVSLRFVTRFDTQDALDWLSPKRLAAWLSSIGYCGRTDPAVLHRRITAAPPGTRGEHGRALAGITHAYLGTLQAITTQIEALAQQISQALALHPDRQIFTSLPRSGTVRAARLLAEIGDARGRFPTPASLACLAGVAPSTRQSGKVRVVAFRWAVDKQLRDAVCDFAGDSRHANPWAAGLYARARAKGHDHPHAVRILARSWLDIIWKCWTTNTAYDPDRHRALQRLLHQDQPMAA

SEQ ID NO: 80558 - protein, 371 aa, unidentified
MEDKEIRYVGIDLAKRTFVARVEYPDDTKAEAEVFQGKTDKIGVEKLISQLRRTDRVGMECCAYAFHLAKELIRKVGCEVFVLNAGQLVIIYKSTKKTDLEDAAKIAWLLKRFPVEELPVVMLPTEQEEHRRAMVSELSFKKRLRNRLINRLHSLFTRVGITGLEKKDLRTQDARIEKVKLLNGYTLSEALRISDELKLLEDHIEILEHEIKNDLKTEPLVKNLLSVPGVGIVTAMAFLAHVGDGSRFVRGRQVSHFVGMTPRIDNSGETVRLGNITKRGCTAIRSIIVQSAWAAVHSRTPNKFQDKYLELAPRRGKGRAIVAVARRMLEIMWLVTVRQELYNQTAQLDLERKLLRLGLKERKKKIMEPAA

SEQ ID NO: 80559 - protein, 433 aa, unidentified
MNTPHLFDLVIGLDRSDTKADLHLINTRTGQRRSATIDTAPEALWEWLLELRQQHPQARVALCLEQPAVHLIAFLEAYEWICLYPINPISLQKFREAFVTSRAKDDAQDALYLAELLLTHHDKLKPWAPEDSQTRAVQQRVFHRRAVVDERTGLTNRLQALLKQYFPQALVLGGEDLWRPLATRFLLKWPSLQAVQKAKPATLKQFYYLNGSRSAKLLEQRLALVAKAVPVTDETARIESFALRVQLICRQLQLVQQTITHYDWQIAQAYAAHPDREIFASLPGAGPVLGPRLLASLGAQRERYACAADLQHYTGVAPVTKRSGGSCYIHRRYLCPKFHRQSFHEYAKESILWSRWAAAYYLQQRTKGAPHHTAVRALAFKWQRVIFRCWQDHTPYREETYEAALKKNGSRLAALFDRVELGKSPWKNPAKKS

SEQ ID NO: 80560 - protein, 318 aa, unidentified
MREVVGIDVAKATLAVVLVRDTGKRVHKQVGNTAAGHQALLQWLTRHTPAPAVVGLEATGGYHEAVAEVLDEAGHHVSVLPPLVVAAYGQSQLRRAKTDPTDAELIADFMRTQHPPRWRPAPREIRHRQALVRRLDALLEMQVQEQNRLAVGAQIVQPSILATLAHLADQIATVKQQIADHIDQFPSLRTARDLIVSIPGIGEATAAVLLGELLHVRRFTSARQLAAFSGLVPQVRQSGTSVRGRGRLSKLGSARLRKALYFPALTAIRHNPPLHRFAARLRAAGKPKMVVVAAVMRKLLHQIFGVLTSGRRFDPTAA

SEQ ID NO: 80561 - protein, 393 aa, unidentified
MYLVGIDIGKLKHSFCLLEKETGEILVEPVFFENNRDGFNVLLSSFKHLPQKDILIGMEDTGHYNLALLKFLLDRNYQVALINPVATNLTRKMQGGISKNDKLDTLTICDVLSSSQRVKSYRISKYSSFDLYEQKLLTREHHNLKEEENQLTNRLQKCIDVVFPEFNSLFKSKYGIVHMNILKEFGSADAIAHADIRTLRKCFDTGRGKHISLTAEELKEAARNSIGFPSSSEATQIKHLVARIELIKEQIAEIDKKIEEFSIQNNSPILSIPGISHFSGTSILAELGDIHNYSKPSQIIKFAGVAPLTYESSQFTAQHTAITKKGCKYLRKTLYQIITPVIQYNPVFRKFYLLKIAQGKGHRCAQGHCVRKLMRVIYHLLSTGTQFDPALLR

SEQ ID NO: 80562 - protein, 482 aa, unidentified
MKHKQHEKTKKAICGPTQGNWQQMNRKQRREMTRKIQSEDISLEVIHPDAAGIDIGNESHYVAVPPQRDSQPVQRFGCTTAELKQMAAWLKQCGIRTVAMQSTGVYWIAVYDILEEAGLEVYLVNARDTKNLPGRKSDVQESQWLMKLHTYGLLRNSFRPSQEIRTMRTYWRQRNDLVQSAGRHIQRMQKTLTQMNLQLANVLSDISGVTGQAIIKAILAGERDPDKLAEFRDPRVKARKGDIARSLEGNWQEDLLFVLQQEEDGYEFCQKQMTECDQRLEHYLQQRDDRSAGASLPEEKRKERRKKRKGNKPRFDLRTGLFRMTGTDLTRIDGIDVMTATTILSEVGWDMSKWETEDHFVSWLRLCPDNRTSGDKIIGKGRLPTNNRVSTALKMAASTLRTSQTYLGAQFRRLRSRLDTPVAIKAMAAKLARLVYRMLRYGMKYVDRGAEFYEAQHRQRQIKHLKSKASKLGFQIIQVPAA

SEQ ID NO: 80563 - protein, 337 aa, unidentified
MENYIGIDVAKATLQIYIPKNDIDVEIQNSPEGLKKLYSKLKKQYKKELDKIVFVYESTGAYSTILELFCQEKEILCFKVGAYQSASFSKIIKNRSKTDKLDARMLSKMSILAKEKDIKVPKRDEEAHQIRSYIKYYQSLVKEYRRQSNYLEASTYNLEDKFILKQVKKKITAIEKEKAMIIEKVLEIIKANPTYSQGYENITSIKGIAEKSGIILLYLFLKYPNASRQQITALCGLDPIQRSSGTSVQHKERISKQGLSLVRAILYMPTLNTIVYNPEMKLIYDRLVERGKPKMLAQMAIMRKVILLAHSLYKNNQKYDENRYLTFTQIKEVDMVE

SEQ ID NO: 80564 - protein, 420 aa, unidentified
MQTNIQHPQLTRTYVGCDSHQNTHTFVFLTCFHQKLGEITVGSAPSEFPKFLKQAKKYLQPNTEFVFAFEDCSAYGRAFVKFLVERGYPVKHANAVLVAGMRSVLHSTEKTDSHDAECCAKVLINEFDKLPHANPQDKYWTLSTLVTRRNGITKNNVGVKNSLHHLLAENYPHYKTFFSSIIRDSALAFYEAYPASHFLENVTVETLAEFLHSASKGRLSTTKAQLILETVQRDKVPKTEYQDTRDFNIRSLIRQIKSNLAELVAIDCEIEKLLVHFEYPLTSIKGIDTLTAAKLISEIGDIKRFKSAKALAKYSGVAPVTYASGMTKLQMANERGNRKLNEIFYRIALTSVMPLGSKGALINPIFREYYLKKISEGKLKNQALKCVMRRLVNIIYKVMKEQKPYINPDVGYVPQDVQVA

SEQ ID NO: 80565 - protein, 309 aa, unidentified
MDVIVGIDVSKDRLDVHVLPVEECFFVGNDHAGVDALIARLREAKADIVALEATGGYEMLAVAGLSSAGLAVVVVNPAQVRSYANALGKRAKTDPIDAAVIAAFVAATRPQIRPLRDEESETFSAIVSRRRQIVQMITAEENRSRMAQAKETQKSIKRLLAALRRELESLDGDLDGRIRKSPVWRVREALLTSVPGVGPTTARTLIAEMPELGTLDRRQIASLAGIAAFTRQSGKWRGRSFIGGGRGKVRAVLFMAALVAARHNPTLKTFRDRLVAAGKPKIVAIVATMRKLLTILNAIIRDEKPWQSA

SEQ ID NO: 80566 - protein, 352 aa, unidentified
MKQAPIFYLACDLHTKRMNFCVVDARPRKQEYPLPPSCIVMEEEIPATPTALRAFLRRVMKALPAPARLHLLVESTTNWFWVVDCAESRVEDITLVNALKAAHISPGEAKTDKLDARKIAWMARNRLVPSVYIPLKQIRDLRDLMRFRAYLVHKRSSFKNKIHSILHKTGVQRRHSDLFGVGGRAFLAALQLPHPYAFEIEALLAQLPILSQHIQEVEDRIMNKGLVEDGMTRILASLPGFGPILAHHARLEIGAIDRFPRHSKFVKYCALAPLTHQSQDSKKRKGLIHGNIFLKYLFIEAGKHAKTHPAFSALAQRRTHRAGAMSASINVGRKLAICAFYCLSRNTMFSSA

SEQ ID NO: 80567 - protein, 344 aa, unidentified
MSIVTLQSVFVGLDYHAESVQVCVLAPDGKLLVNRSCPNDWRAVQRAVQEKCGAGATVHAAIESCCGAADLADELIAQAHWSVDLAHPGYVARIKQSPDKTDYSDARLLADLERVGYLPRVWLAPEEVRELRRLVRYRQSLTKERKNLKLQIGASLREARQKSPAEHHAWTKAWLTWLQETAVLGPNARLIVNLRLKRLASLAEEIRAVERLLAEQTQPDPLVQKLLTLPGIGLVTAATLRAEIGRFDRFRSGKQLARFCGLTPRNASSGQRQADAGLVRAGNPQLRTVLVEAAHRLMRYDERWTAFAARLSRRGKPTSVTIAAVANRWMRWLFHQMQPGQLAA

SEQ ID NO: 80568 - protein, 342 aa, unidentified
MEKIEKSGKTVLSSKACVQFIGVDVSMSDFTVSELLEDGKYILSTYKNTAVGIESFIEKINSPLDTLVTLEATGTYSMKLVFALAEYDIPTAVLNPKQSKGFISGVLLSTTKTDNKDACALALYGKVNRPTIYVLPDSKVLEIKEFRSLLSMYKKQRTVVSNKLHALSFHACPSAFVVAELEADKSYLEAKIQKIETQLCDLSAESFDDLYELAISIKGIGKATATALLMATNGCTNFDNVKQLAKFLGVCPTQNESGKSVRGRRGLAKTGAKEVRALLYMCARSARRFNLVCKDLYERLRSRGKCHQVAMNAVSHKLVKQFFAVVTKRVPFDNEYNLKNNN

SEQ ID NO: 80569 - protein, 385 aa, unidentified
MAPIRMPEAVIGLDVGKSSHWACVATRDGEVLLSAPVANREDDLDSLFGRFPDALVVVDQSRNIGALALARARAAGMSAAYLPGLAAHGAARLFAGDAKTDERDAMVIAKTALGIPDALLPVGDPGPTIAAARALAAQRNFLTRENTRNKNRLRSILLESCPAFEALVDLSDGPQLRLMASLGGAWSVADAGPRRAAALTRGAARGKIEALVRSTTSSTRPDASVVAAEDRAVKLLARRISENSAEIEAITAEISALLEGDDTYRCLLTVPGIGPKTASELAISIDIEDFPSHDRLASYCGLAPRNRQSGTSISSVTASRQGNKRLKNLLIFSCNCLTRTEGRWGDYYTRCRERGMSHGKALKALARKRLKVIYAVMRDRVPYAA

SEQ ID NO: 80570 - protein, 371 aa, unidentified
MADYREAFVGIDVAKLKNAIAVAESGREGEVRYFGEVDASYASMRRIIQRIAAKFDRVHFCYEAGPTGYGLHRLIQSLGHECMVVAPSLNPRKPGDRVKTNRRDALALARLLRAGELTAVWVPDEGHEAMRDLVRARAAAVETLRVHRQQISAFMLKHGRIYPRMKGWTMRYLCWLQEQQFDHPAHQIALQEMVEAVRVSKERVERLEKVIEEFVPNWSLAPVVRALQTLRGVDLIVAVTFATEVGDVSRFESPRQLMGYLGLVPGERSTGETVRRGATTKAGNGRVRHMLVKCAWTYRHPPKVGARKLYRLEQAPPKVREIAWKAQSRLTALYRMLTGRGKRTTVVCTAIARELTGFMWAVAREAQAIRL

SEQ ID NO: 80571 - protein, 343 aa, unidentified
MHHTVIGIDIAKLVFQLYWIESDTGEVKNLKLKRDKFLAYFVNLSPCLIGMEACGGAHHWARELTKLGHTVKLVSGRLVKSFVMGNKNDAADARAIWTVTQQPDTKEIAVKTVTQQAIITLHRMRENLKKMRTMQVNELRGFLTEFGEVMPQGQAGLSKGIAEAIDRVAQKLPGVVVEALRDQWKRIGELGERMADLERKLQSWLKTNVDASRLMAIPGVGVLTATAAVANMGDAQRFKSGRQFSASLGLVPAQTGTGGKVRLLGISKRGDVYLRTLLIHGARSALIHSKNPPRWIQELKQRRPMNVVVVALANKMARMIWAMMAHGRAYDEHWVSQELRTAM

SEQ ID NO: 80572 - protein, 346 aa, unidentified
MEYYAGLDVSLKEISICVVDRDGETVARGVCPADPEGVAGWFRNRELTPRRIVHESGMLSIWLQRGLAGLGLPATCIDARKAHKSLSARLNKSDAADAEGLAQLARTGWFTPVHIRSEEADRLRSLVGARERLIRLRKDLEGHIRGVLKTFGIRMIGIGQGRQRQAFRDQLAAAGETDLVLRAIADAFIATHAKLCQVADDLDKAVRKTAKVHPVARRLMTIPGVGPVNALSFIALVDDPGRFSRTSDVGAYLGLTPKRHQSGEVDWSGRVSKCGDSAMRGLLFEAASSVIHQVKRFSRLKSWAVRLAGRRGFRKAAVATARKIAVLMLTLWKNGTDYQWKKEATA

SEQ ID NO: 80573 - protein, 387 aa, unidentified
MAEVLGKLTGKLDAPTVSTSAQENRRGNTVGPNRDRLTVGVDLGDRWSQYCILGLEGETLAEGQLRTTQEDVGEFFRGLTTARVVVEVGTHSAWVRDVITECGHEVLVANPRLMEGSKRRKRKSDRIDANKLARLGRVDPQSLYPIRHRSREVRQDLVVLRARDALVSVRTELINTTRGLVKSMGTRLPRCSSPSFAEKVKDAIPVEVGEALQPLVQLVETVNECIERYDEKIEELGRKKYGHTTLLRQVKGVGPITSLAYVLTLEDPQRFASSREVGPYLGLVPKQEDSGDSQPQLGISKAGDRMLRRLLVGSSQYMLGAFGPDTDLRRYGLRLCERGGKNAKKRAVVAVARKLAVLLHHLWVTGDVYEPLHRTETGTGTAQATAA

SEQ ID NO: 80574 - protein, 344 aa, unidentified
MEEVITIGLDIAKHVFHAHGADERGRAVFSKRISRGKVLEFFASKPRCLVALEACGGAHHWARQLIALGHEVRLIPPAYVKPFVKRQKNDAIDAEAICEAAQRPSMRFVAIKSEEQQAAGLVFRTRDLLVRQRTQLINAIRGHLTEYGWVAPKGPSHVAMLADLLEEEEMASSLPQAARSMFRVMLDLLDELDGKIAELDKEIARRAREDEVSRRLMTIPGIGPITATAIAALAPPAETFAKGRDFAAWLGLAPLQRSTGGKQKLGAISKMGERTLRRLLIIGSSAVVLHASKRGAPRGSWLEQMLARKPRMLVTVALANKMARIVWALLVKQEDYRAPVAAMA

SEQ ID NO: 80575 - protein, 341 aa, unidentified
MERTVIAVDIAKKVFQLHWVEMDTGCIERLQLKRAKMLEWFANRAAALVVMEACGGANSWGRALMELGHEVRLISPRKVRPFVQRNKTDAADAQAIWTACQQPGMRFVPVKTEAQQIVLSLHRMRSQLMKTRIMQTNELRGLLYEFGIVLPEGHVALLKALPDAMRDARTLLPAILMDSLAEQLRRVQQLQADIDMIERRLSQQMRELPACKAVAEIPGIGLLTATAVVASMGTPTAFKDAREFAAWIGLVPRQTGTGGRVRQLGISKRGDAYLRTLLMHGARSVVVRAKDGPTWPWLTALLQRRPYSVAVAAVANKLARTIWAVLAGGQAWRPEVWQAAH

SEQ ID NO: 80576 - protein, 424 aa, unidentified
MHSRVKIACGLDVHRSKIVGSIVTFSGTHETRTFTTNIDDTLALKDWILTHEVERVAMEATGIYWYPVYNLLEEHVTVQVANPLFIKGIPGRKTDQLDAEWIATLCLNGLVKPSFVPGLQVRTRRDLVRTLSRLIQIRTRHKNRIHKVMIRAGIRIGAHLSDLFGPSGLRILHGLLEGQSIDTILKNLKNAKITKKREELAKSICGTLDENDVYLIRLELNAIGSINHLIDDLKQRISHQMNPENEDIDTMMSIPGIGYDSAVNILAEVGDVRRFPSGKHLVSWAGLAPGMNESAGKLGPGHITKRGSKFLRTFLIEPAHSIAGMKRNNQLKRFFSRMRGKLGYKPAIIALARKLLMLIHHLLVNREPYFEENLPMKKPINIYPSALSSMTPDQILKILSDAIAELSPSDRIEFNQKLYRLDNS

SEQ ID NO: 80577 - protein, 406 aa, unidentified
MAAVMIGVDPHKGSHTAVAIGEREAPLGEVRVRASAAQAERLVAWAAGWPERTWAVEGAGGLGYLLAQQLVAAGELVLDVQPKLGARVRLLATGATSKNDPNDARSVAIAALRSTAPRMVAAENHAAVLKVWSKRHRDLGRTRTQVACRLHAVLCELIPGGIAKEIVAAQAAHVLEQIEPSGAVQIARCELAADFLDDLRRIDAQMRDTKKRLAVAVRASGTTVTEIFGVGPVIAATLIGYVADASRFPSRDRFAAYNGTAPIEVSSGDRKIYRLSRRGNRRLNHAIHMAAVTQIRHRHSDGRAYYDKKIAEGKTRKEALRSLKRRVSDAIYARLQADARRTAAAARTRGPGGQPGNDSVASAAGSHPEHRLFGPATPEPATTLRPPSGRSPTRPAPASKKTRKGS

SEQ ID NO: 80578 - protein, 417 aa, unidentified
MNISKSQKGKFSNAGDMIAGIDVAKHKHISRILFPDGSESSAFEFLNNRKGFQAFLHWLFSFKANASNTSVMIGIESTGHYWEPLAFFLDTVPGIRLVQVNPKHIKKTKELYDNSPGKTDSKDAGIIAMLIRMGRFQRLVLPRGYFAQLRSYGKLREQKIVELGVQRNILHSLVDRVFPEYGSIFKKIESKTSLMILKQYTTPERMLRAGFNRLTSVIRKASYGKLSKACAAKLLEAASTTVGLKEGIEATSFAVRNTVCSIDRIQKDIAAIEEELKRELMNIPYAAKLSTIPGVGPISLSIILGESGDLKRYQKAEELLKLAGLNLYEISSGKHQGRRHITKRGRPLLRKCLFFAALRTVKTGGAFREDYMRLTQTNQMLKTKALVAISRKLLRVLFALVRDGVGYNQKGIALLAA

SEQ ID NO: 80579 - protein, 414 aa, unidentified
MEKQWNIVCGADIHKKFLIATILSRDGTKITNRFGMTLNDLLNFKNWVIENGCEQVAVESTGTYWVPIHTVLEGSVGLIVGNAYKIKHTPGNKNDLADADWIAELCLNGMIEPSRIFPKADRDLRRLTRIREGYVNDMTREKNRIHHALDSCGIKLSSVLTDIFGKAGQTILNGLLEGRTIDDILKDINLKRLKATAEEIRDAIKGSLDFTQIFLIRGSLEQMEAIQKRIDEIRKEIKGRIAYRKDELKIAMSIPGVGFTSASTLLAEIGEIADFKKPEQLAAWAGLVPSVYQSAGKLITGSITKHGSRHIRWILVQVARVIARGRNSKLKRFFLRVKSKKGSNVAVVALARKVLCILHHLLINREMYKEDGINKKVKIDVGNEIPPREMDLEEMITYIVRAGYEVRKGSTGGG

SEQ ID NO: 80580 - protein, 348 aa, unidentified
MTTMVEDARVITGGVDTHADMHVAAALDSIGGLLGVQEFPATAAGYASLLGWLRGFGTLAVAGVEGTGSYGAGLARHLAAAGVRVVEVDRPDRQDRARQGKSDPLDAVSAARAALSGRASGAPRGRDGAVEAIRALMVAKRSARQERIQAINQARALIMTGPEELRARFVRRSPAQLIEAIAALRPRPGDVPGFATRVALRELGRRAQFLDAQLDRLDELIGPLVTARAPGLLALHGVGPDTAAMLLVAAGDHPERLRSESSWAHLCGVAPIPASSGKTAGRYRLNRGGDRQANSALWRIVIVRMNSHPATRAYAGRRSEEGLSKKEIIRCLKRYVAREVYRQLRNGA

SEQ ID NO: 80581 - protein, 367 aa, unidentified
MYLAIDQHAKQITVCARNEDGGTVLRRQVSTRPEKIEAFLQQFTEMDAEFMAILEVCGFNDWLVEELRKWKCREIVLIHPEKPSQKKTDRRDAQKLADLLWLNRQRLAAGEIVRGLRRVYMVSQQEREDRQLTSLRKNLGQRRIRTLNKIHRIVNRHNLIWQYPTKTFQTRAGRRWLADVQLPPIDRLEMDMLLKEWEICDEQIAQVDNEIAERASRTVPDCLLNATQILMTIPGVSHYSGLTLASRIGPIQRFPRPRSLANYFGLTPGCRNFGNAQDRLGSITKQGSKIARFILGQLVVHLLKHDPKMREWYRKIKLRRGSKIGRVAVMRRITTIIWHMLTYKEPYTIGGPPPRLRKGGASAAHAA

SEQ ID NO: 80582 - protein, 405 aa, unidentified
MGIYVGIDWAEAHHDICVLDESGASLAKRRIAEGLEGVGQLHAMLADHAVEPSQVVIGIETDRGLLVGALLAAGYQVYAINPLAASRYRERHATSGAKSDPGDAKVLADLVRTDRHNHRPVAGDSELAASLQVLARAHQNLIWSRQRLVNQLRNNLREYYPAALAAFGTDLAHPVALGVLDAAPTPAIGRTLSRARLVAILRRAGRERGGAEKATAIQAELRAPQLAAPTLVAEAYGKSVASTVRILRELNVQLASLEADLAPSFEKHPDAEIYRSLPGLGIVLGARVLSEFGDDRTRFAHPKARKNYAGSSPITKASGTRRVVLARMARNRRLADACHQWAFCALTGSAGARDYYRLLRQRGKTHHQALRALANRLVGILHGCLDHRQTYREETAWPRSLTVAA

SEQ ID NO: 80583 - protein, 471 aa, unidentified
MEAVEPATIGDELRPLFLEHFPDRLFRTLGMGVGLRPHQAPIEQPGVKFVVAWEPGFWDEEALADEPDLVLDLPFLPARRRRAGDRLDQMMRAHLNKAAIVLPSLADEHRIDRRFHVMGWTSPAFLPALPGTKEGNMSLKLLAIDLGKRSFHCHGIDSDGVILSRKVSRCKLLETIKELAPETIAMEACASAHFWGRLFLANDHRVLLINPRFVKPFVKGSKNDAADAEGIYEAALRPTMRFVPVKSIEQQDLQSLHRARERVVCARTALINHMRGLLGEYGVILPQGAWRFLTQAADAIVTAELSDLTRELFGDLLEELRVLDLRLDKLDRQLLAICRTNEACRRLSKLPGVGPVIATALVAAVDDGHHFRSGRELAAWIGLVPRQYTTGGKPRLGGIGRRANHYLRRQMIHGARAVMFRLAKHDDRRSQWLKELAARRGFNRAIVALANKTARIAWTVLTRKEDYSAAA

SEQ ID NO: 80584 - protein, 337 aa, unidentified
MQVEPDYKRILQYIQEMKKAWGDDIEIVCGYEAGCLGYSLYHSLTDHGVNCVILAPSTMACSPNERKTDMRDAEKIAKCLAYGTYSPVYVPTQGDEAVKEYIRMRDAHKANLKRIKQQIIALCHRYGKQYAKQSHWTQAHLTWLKAQRFNDPILQETFEEYLIQYHQAVEKLERFDKRILEISGKEEYAEKVHKLTCFNGVREHTALSAIVEIGDFNRFPSADHFAAYLGLVPGEHSSSTNIQRTGITKKGNAHLRTLLTESAQCYSRGQIGRKSKALKARQEGNEPAVIAYADKANERLKRKFKRINFSRPHNVAATAVARELACFIWGMMTNHID

SEQ ID NO: 80585 - protein, 370 aa, unidentified
MMGWTPPDGIDVPKSGGVKHHLREGSVSEAIIIGLDIAKYVFHAHGVDERGRAIFSKRISRGKLLDFFAAQPSCTVALEACGGAHHWARQLTQLGHEVRLIPPAYVKPFVRRQKNDAIDAEAICEAAQRPSMRFVAVKSEQQQAAGLVFRTRDLLVRQRTQVINAIRGHLTEYGWIAPKGPSHVAMLADLLEEEEMASSLPEAARAMFRLMLDLLAGLDGKIADLDKEIARRARQDEVSRRLMTVPGIGPISATAIAALAPPAESFAKGRDFAAWLGLTPLQRSTGGKPKLGATSKMGERTLRRLLIIGSSAVVLQASRRGAPKGSWLEQMLARKPRMLVTVALANKMARIIWALLVKQENYRAPVAAKA

SEQ ID NO: 80586 - protein, 387 aa, unidentified
MPFSPMSHALVCRLAAVRGNADGVNYAELNLWVFTPDLEAMALPPSALDKVEDTKEVDMAKEMKPSFVGVDVSKDTFNAHWENRDAKYENSQKGWRKLLKEAPLDARFAMEATGNYHYMLASFLHGKGRHVLVLNPLRVRRWVQSFGGLADTDKIAAMQIARYAEAKEKQDLPEWEPMPPKLARARAIVSVLAGLAHLATAAGNMKHAVSFMAGKNDKDIPGVMGDVVDFCGERKQVMESELGSIVNEIFPEQFRLLKTIPGIGAKTAAVMLVCCRGMENFQTHRQLAAFVGVSPTVKESGTSVRGSGRVAKVGNPYLRSLLFMCAFTASKACKPCSELYARMTGNGKSKMLALMAVMHRLVKIAFGVVRSGEPYRGGWGRKKTEQE

SEQ ID NO: 80587 - protein, 327 aa, unidentified
MRQHKSLTDKVKTTVAFDVCKAALDVHIRVDNKAFRVPNTHEGFDQIHLMLADYDVSLILMESTGGYEDLAACNFQSLGYDVAVINPRHARNFAKAMGKFAKTDRLDAAILADFADVINSRSDRSRYIKPTTDSERKYLSQMVARRRQVVDLIATEKQRLAHADEYAQLSIHKILKFLGLELKEINSDISAYVKKNFADLSKLLSAIPGIGDLSVGLLIGDVPELGEIGNRQLSAVIGVAPFNHDSGKMRGKRCISGGRQNVRNVLYMGMMSATRFNPVIKEFFDRLVAKGKPKKLAYIACIHKLLRIINAIVRDGTKFNPDLHTAI

SEQ ID NO: 80588 - protein, 415 aa, unidentified
MKVVFPTCCGVDVHKTFVVATIITTPADSLQPHYQKKRFSTFNSDLNRFADWLLEHNCLDVCMESTGKYWVPVFNILEKHGIRVVIANPKWVKAVKGNKDDTKDSKWIRDLFRIGLVKSSFIPELNIRILREFLRYRYKLVSMKSSEKNRFQNAFTVCNVALDSVVSDMFGKSATAITDYLTSDESFDPDHCVSLLQRSLKKKAEKVLESIEGYSISDEQKARIKIIREHYDFVEKLIAKVDTCVNEMVEKYEGEINLLCTIPGVDRNSAITIISEIGTDMSQFGSSKRLCCWAGLTPGNNESAGKKKSVRISRAGVYLKPALVQVAHAAVKDKANPYYALKYERIAKRRGKKRAIIAIARMILTAIYTMLCTGEVWNPVDLFKIDMPEHLKEQQLAKAIKQATRFLEKQGLTVA

SEQ ID NO: 80589 - protein, 456 aa, unidentified
MAKLSKRNNKTKRDWDEGLAALNRNAAGIDVGNAEHYVAVPAGRDSEPVQTFGSFTADLHRMAQWLKACCVETIVMQATGVYWVALFQILENHGFQVNVVNARHTKTLPGRKTDVLECQWLQKLHTFGLLNNSFRPTEEIQILRTYLRQRENLVAAGSTCIQHMQKTLTQMNVQLANVISDISGVTGMAILRAIVAGERDAEKLSTLKHNRVRASREEIARSLEGNWREELLFVLEQSLELYDLYVRKIAVCDQRIERHLKTMTSKLEPEQKSDPGALPSAKHEPRFSLKDHLCRITGVDLTRVAGLQVQTVQTIISEVGVDMSRWNTEKQFASWLGLCPDNRVSGGKILKSGTRQVVNRAATALRLAAWSLIRSQSALGANFRRLRSKLGAPKAITAMAHKLARLIYRMMKFGGEYLDKGMAAYESRYRQQQMKWLAKQAASLNLQLVPSTEVTG

SEQ ID NO: 80590 - protein, 342 aa, unidentified
MNKLSVIGLDLAKNVFQVHGINEDGDIVVRKQLKRREVLRYFARLEPCLLGMEACAGAHYWSRELSKLGHCVRLMAPAFVKPYVKSNKNDRNDAEAICEAVQRPNMRFVAAKTPEQQAILHLHHGRQLLLQQRVALNNHMRGVLLEYGISLPKGTKVLSQHLPGLLEDAENPLPMITRHLLGELKVRHDELNASIATLENQIKSWHQANPASQQLASIPGIGILTATALAATIGQVQNFANARQLAAYLGLVPRQHSSGGKEKLLGISKRGDGYVRRLLVHGARAVIRHIKRRLKAGQPGGNAWVEQCLQRMHVNEVAVALANKMARTAWALLAHNETWRAA

SEQ ID NO: 80591 - protein, 417 aa, unidentified
MKPIDEGGIGVWVGLDWADEEHAYGLRMSGSSEIETGEVKQTPEALASWINELRQRSGGGWVAIAVEQSRGALLYALMDYDFVLIYPINPKSLSSYRKAFYPSGSKDDPRDADLVLDFLLKHRERIRLWQPQSPEVRCLRLLCEQRRKLVDLRAELTNQWTANLKNYFPQALKWAGPLKGNKACDFLNRWPSLQSLQRARPSTIRRFFKSHRGGGSEQLQLQLEEIKQARALTGDTAIVTACSLLTQSLAGQILQLNDSIQRFDAKIEELFNHHPDHFIFSSLPGSGKALGPRLLTTFGEDRDRFECAEEVQTVSGIAPLLRTSGKSRIVSYRWACPKFVRQGVHEFAALSRHWCPWAQAYYQMQISQGKDHHVAVRSLAFKWLRIIYRCWKNRVPYDDAIYMDSLKANNAPLLAFL

SEQ ID NO: 80592 - protein, 320 aa, unidentified
MERGSFVGIDVSGDRLDVAFRPGGECLQVSNDARGISRLTRMLERSQPELIVLEASGGYEVALLERLFAKKLPVALLNPRHVRDFARASGRLAKTDAIDAEVLAHFAEVMKPEPRQMADPETRKLRALVTRRRQLVQMVTAELNRRRHSLEAVREGFVATIRCCKRQIAAIDKQLAALIQQTPKFRQKAKLLRSAPGIGGIASATLLARLPELGTLDRKKIAALVGVAPYNRDSGKMKGKRAIWGGRGDVRAVLYMSTLVAVRLNPSLREFHQRLRRAGKSPKMALTACMRKLIVILNAMLKNEMPCAGNVTPIVGTVSS

SEQ ID NO: 80593 - protein, 340 aa, unidentified
MEYGAIDLHLKASLIRIVDADGVVILDRTVATTRAALTQVFAGRGPLRVLVESGTESEWVAQTVEACGHGVIVADPNYALMYGHRSRQIKTDRRDVAALAEACRLGIYRAAHRVSAAQREARRVVRIREQLVRMRTQTINQLRAQLRQEGIRLGPGGAETVVRRLDALALPAAVQAGLAPLRAVLASLAPLIAAATADVGARASADPVVRRLLTVPGIGPITAVTYRAALDTWERFRDASAATAFLGLVPREDSSGTRHRKGAITKTGPGPVRALLVQAAWVVWRQRQGRAALHAWVERLAARRGRRIAVVALARRLARILFAVWRDETEYQAVPIVAAA

SEQ ID NO: 80594 - protein, 434 aa, unidentified
MVPETQELGTAEDLVERVAAIDVAKASGMVCMRLPHETRTGRRVQEVWNVPSTTSAILELGDRLVCQGVTRVVMEATGAYWKPYFFLLEARGLECWLVNARDVKNVPGRPKTDKLDAVWLAKLTERGMLRPSFVPPKPVRQLRDLTRLRAILNQERSRHKQRVEKILEDAQIKVTSVLTDLFGASGRDMLAALIAGERRPRVLADLARGNLVRKKVALADALTGQFEDHHSFLCQTLLDSIDHLTGQIARLNEQITAAVQDLPGPEEHTRPGPSLVERLDAIPGVGPTTAHILLAELGPDMAVFPTADHLASWAKLTPRTTQSGTKRGSSPTGRGNPWLKSALGEAASAAARTDTYLGARYRRIVKRRGRKKALVAVARSILIIAWHLINDPDTTFRDLGSDYHQRLIDPKRRTRDLVRQLNALGHDVTLTPAS

SEQ ID NO: 80595 - protein, 311 aa, unidentified
MNNTIGIDISKDTLDAHRLADGQHKQFLNGKTGHAQLVKWIGKQSDPLIIFEATGAYHRQLERVLCTHIIPFVKVNPKQARRFAQASGKLAKTDRVDCEMLAKMGAALQLMPKPFTAENLYDLRELLSARRALIKDRTAAKARKATVINALIKQQLEKRLRQIKNDIAKIDALMLDVAREDQYMSERLDILFSIPGIGVITALMILVDMPEIGALNNKQVASLAGLAPMSQSSGKWMGKARIQGGRPNLRNAIFMPALVAIRHNADLKTKYDQLVTAGKEKKVAITAVMRKLLVLANALLRDNRKRAEKAA

SEQ ID NO: 80596 - protein, 344 aa, unidentified
MTLVGCDLHTRKQQVAVLDTATGEIGEHPLLHEGRAVEEFYAALPGPVTVGIESTGYALWFHTLMQRLGHTLLVGDAAKIRAMVVRKTKTDRRDARHILDLLVHDRFPIIWIPDPATRDLRALLTHRMRLVRIRTMVKNGLQAIALNYRVALGAKLLRQAGLTQLQALSLPPYTAQRRDQSLELLAGLTQQIRQLDDAITTAALAHPDAPRLITHPGVGPLTALATIVVLGPVARFPGTKHVVSYVGLAPAVNASADKYHLGHITKQGSTLLRAVLGQAASHAGRMDVDLKRTYLALVHRRGRPKAKVAIARKLLVRLFIMLRDRIDYDEFRRRGRRSPAVASP

SEQ ID NO: 80597 - protein, 387 aa, unidentified
MLKPHDDSKACLTAFVQDNTLTVVIEMSLASWLVAGTIPGVDREPRKKIGPDPEVLLQLLYRWRDEAIKVGKEITRIAVAYESGRDGFWLARWLRARGIDAHVIHATSVAVSREHRRAKTDRIDTAMLKRGFLGWLRGERGHCSMAIVPTVEDEDAKFPHRDRESLVKLRTRTVNRMKSILIQFGVRNFNPVLRKAPEKLDSVRTPEGIPMPPNAVGALRRHMERFHVIKEQMKTIERTRLQRLQRDPAEKFNAMVFLLVRIIGLGLETAEQLVHEILSRNLRDRKAVARYAGLTGSPDESGSRRREKGLSRSGNGRVRNILIQLSWRLLRFQPESNLVLWFKKRTADAHRSRKLMIVAFARKLIIALWRYVNTGLVPEGFQFKSAA

SEQ ID NO: 80598 - protein, 346 aa, unidentified
MKFYIGHHKFYCGVDLHARTMFLCVLDERGYPLLEKNIKTDPDLFLKTIAPYRGDLIVAVECMFTWYWLSDLCSREGIPFILGHALYMKAIHGGKAKNDRIDASKIASLLRGSLFPVAYVYPPKMRSTRDLLRRRMFLNRKRSALITHIKCTFAQYNLPDPEQNVSRVSQRVGVAELIPDPGASRNVQLDLDVLDFYDQTLTKLEQELTVLAKDHDPDAYFRLRTVPGIGRILSLVILYEIHDINRFPSVQDFASYCRLVKPAKESGGKRLGSGGAKIGNVHLKWAFSEAAVLFLRKNESAKLYRARLVKRHGKAKSLTILAHKIARAVFFILKRRTVFQPETFFA

SEQ ID NO: 80599 - protein, 348 aa, unidentified
MQITIVGIDLAKNVFRLHGCDRQGRAVLRKQLTRGQLLAFIARLPACTVAMEACASAHYWAGKIEQLGHRVRLISPRLVKPYVKANKNDANDAEAICEAAGRPSMRFVPVKTAAQLEVQALHRVRQQLVKSRTALINQVRGLLAEHGIVIPQGRAQLHRALPRILEDADHRLSGVMREILSEVGERLKYLEDRLHQYELRIERLFRQDQRCRRLAEVEGVGPLIATALVAAVGNAAEFRSGRQLAAYLGLVPRHRASGGRTIMQGISKRGDRYLRSLLIHGARAALWTSARRGDQRSAWATRLKVRRGSNIAAVALAHKNARVLWALLRSGEAYRAAPGSSRIAQAVG

SEQ ID NO: 80600 - protein, 357 aa, unidentified
MTTQQKQSCLFIGIDVHKDTHTAVGISPYGEKLFEIMVGNYKNDFENLTNKVEEMKGTLSPFFGLEDVRGYGERLAGFLYEKYPVYHVPSILVDRQRQNATHPEKSDSLDALGVAKVMIQSIDTLLPYTISKESEKAKQIKEISIDREDLVLERTRLKNQVHTLLYRIYNTEYEQKFKDPFSIKALRFWSKAKPKCDPYLLKTMKRKIRRLLDIHTEVVDLEKDMDKLLTEGEYTIQTASGCGVVIASTIIGEIGDITRFTSPGALSKYAGCSPRERSSGKKTRHVKSRSGNRRLNCAFHRMALSQISRMGNDRARAYFKRKISEGKSKSQAFVCLRRQMVNVVWMMLKHKTIYRNA

SEQ ID NO: 80601 - protein, 419 aa, unidentified
MNKLYVGLDLSLKDFKVSIIDQEGVVAIKPFAATNDLYGAEFLIDAIEDCCRRLSASTVFIGYESTSVYGWHIQHLLADCPSLKPYHPNIICFNPKIIERFKESLGNLPKNDYVDANTIAERLRFGRLPKSCPVDFRYLALQRLTRHRFHIVNNLVREKSYFLSNLFLKFSGLCQEKVFSNNFGAVATELFQEYLTVEDIATRSLDDLIDFIMEHGKKHFDDPKATASALKEAARKSYRLNPSVNNSLNFVLRSCLENIKALEKQKKAVEKAIENELPFFNNEYLCLTSVKGIGPVIAAGLISEIGGISRFDNDNALAKFSGLYWSEYQSADFVADDTYIKKTGNVYLRYYFVQAAEQLRKYLPEYISFYSRKFKESKTHHHKRALVLTARKAVRLIFALLHEEKLYNPSARKGEVDIT

SEQ ID NO: 80602 - protein, 400 aa, unidentified
MQRVDHAWAGIDAGKSHHHVVVIDGEGHRLLSRRVTNDEPELDTLIAAVVAQAEKVTWAIDLADGPAALAITLLLERGQQVLFLPGIAVNRLSGAYRGEGKTDAKDAAIIADQARMRRDLRELHLDDTVIAELRMLTAHRADLAADRTRTINRLRIRLLGIFPALERALDFTNRGPLVLISQFQTSTALTAIGQQALELWLRNNKVRYADKLATAAMHAAAAQQVRVPGETMAAELVARLATNVIELDKQLTEVDKLIADRFHRHHHAKVITSMVGIGDLLGAELLAATGGGLESFATADHLAGYAGLAPTPRDSGRRVGNLHRPKRYNRQLQRVFYASALISVQRSPASRAFYDRKRADGKRHSQAVLALARRRVNVLWAMLRDGRPYEERDDPTTLAA

SEQ ID NO: 80603 - protein, 321 aa, unidentified
MQPVTVTVYAGVDVAKASLQLHLQGRQTEFPNQPAGLAKLRQQLQKIPHVHVVCEATGGYERPLVQALHQAQIPVSVANPAQVRAAAQAQGQRAKTDRIDAALLTDYGHRYQPKPTPPTTPSQEQLVALTQWLTQLVQAQALAKTQAEHHEAAFVCKQHAQLMTHFRSQIEAVEKQIRALLAQDVVLQQRVDCLDQIKGVGPRTAWLALAHMPELGQINRQEVAALAGLAPWTRESGTMKGMRCIGGGRPEVRLALYMAALSAARCNPVLKPFYQHLRAKKKPAKVALTAVMRRLLVYMNHQLKALAATQPAPQTENAKFP

SEQ ID NO: 80604 - protein, 361 aa, unidentified
MRIIGCDLHARQQTLAMLDTETGELVNLTLMHEGDEVREFYSKLPHPVLVGIEATGSMHWFLNLMDELGIECRVGHPATIRAAEPRKQKHDRRDAELILKLLVENRFPTIWLPSKELLDLRALLLHRHQWVRMRTRIQNALQAIALANGLRRGPGLWSYDGQAKIAFLPLMPHTAYRRSALQAMYKTMESEIEKLTEQIAEQAANRSGARLLMTHPGVGPVTSLATEVFLGDPKRFVDGKALASYVGLIPGERSSGRRQRLGKVTKQGSPLLRFLWGEAGAHAVRRDPQLKRFYRRKLVQKGMGKARVAVARKLGIRLWIMLRDEIDYQEFCRRGQEQQSGAACAGMPETRYGANSHRSID

SEQ ID NO: 80605 - protein, 411 aa, unidentified
MDLMYARCAGLDVHKATVVACVRMPGPRPDARHAETTTFATTLRGLEALAAWLTAHGVTHVAMESTGVYWRPVFAVLEGTVQVQLVNARHVKMLPGRKTDVRDCEWLAQLLECGLLRGSFIPPAAVRDLRDLTRLRKALIRERGHHVNRIAKTLELANIKLGSVVTDIMGKTGRAILQALSAGLDDPEQLAACAQGSIRKKQAALREAVEGRLTPHYAFLLEQHLALIDTLDAHITTLDARIEAAMAPFAEAAALMQTMPGVATRAAEAILAETGMDMSPFPTAAHFASWARLCPGNHESAGKRRPTTTGKGATWLRATLQEVAWAAVKTKKSYYRALYYRLKARGGPKKAIVAVQHAMLVALWHMLKRRVPHQDLGADYFAQRNTERTLRHHVRRLEQLGYQVLLAKEAA

SEQ ID NO: 80606 - protein, 388 aa, unidentified
MNITTDQPEAPTAIRTDLGAIFVSLELSRSSWLITSLSPGGGEKMSKHAVRGGDVSRLLERFSQLREKAQARTGKVFPLIVIQEAGLDGFWIDRVLQNEGIESHVVDPASIATSRRRRRAKTDKIDGETLVRSLLAYKRGEPRVCSMVKAPTPEEEDQRRLCRERKVLTAERVLHVNRIKGLLFCQGICGYEPLRRDRRDRLEELQTGDGRPLPPHLKAQVERELDRLELLLKQIKTVEGERDALLAVAITSMPAPAAMLLDIKGIGPEFAAVLWSEGLFRHFDNRRQVAAYAGLAPTPWQSGAIDREQGVSKAGNPRLRTTLIQLAWLWLRNQPQSALTIWFHERVLRNGGRLRKTTIVALARKLLVALWKYVTTGVVIEGATMKAP

SEQ ID NO: 80607 - protein, 414 aa, unidentified
MTEQIQVAAGLDLHKSFIVATILTTAGEKFLERFNRTQTGLFALKDWILSNKVQVVGCESTSDYWVRIFDLLDPYVQVIVGNARDMKALSHKKTDKIDSEFIALLALKDMIRPSRIFPKEHREFRATVRLRHRIVQKRTSIKNEIHHILDSELFRLSAVLTDIFGKSGVLIMRGILNDIPVNEILALLPPSVKKKEEALREVMQSTLSDGALARLASCLRIIKTLNDEIAELTNISTNYALVNFPREFEILRSVPGVGEIVAITLLAEIGDVRDFSTGDKLASWLGIVPRVYQSADKLHTGSITKRGSKTARWILIQAAHAAVRARDNDLKTFYIGKKEVIGAGKAIVGVARKMITIIWHLLTNDETYEDNQYRVIKLPKKVYVKVPRETSLEEVLRLLRDAAVVLKEPDPEIG

SEQ ID NO: 80608 - protein, 411 aa, unidentified
MQIVYSRCCGLDVHKETVVACLLIPEEGKIAKEIRTFQTMTSDLLTLHDWLLAHQVTHVAMESTGVYWKPIFNLLEGSFKVLLVNAAHIKAVPGRKTDVKDCEWIADLLSHGLLKGSFIPPEPIRDLRDLTRYRKSLSDERVREVNRLQKLLESANIKLSCVATDVMGVSGRAMMEALLGGKSDPGALADLARGKLRKKLPLLKEALRGRFRPHHQFLLGEILSHIDFLDEAIASVSQEVENRMGPFSKEVGLLKTMTGVKQTVAENMISEIGVDMSYFPTHRHAASWAGLCPGNNESAGKRKSGKTRKGDRWLRRFLMESAWAISRSEGTYLSALYHRLARRRGKKKAVVGVAHAILVIAYHILRDQVPYRELGPNHFDRLNIPHMKRHLVQRLEGLGFKVALEPLLTPP

SEQ ID NO: 80609 - protein, 404 aa, unidentified
MYYFGVDWSEDHHNLCIQNRFGAVITELELRHSLDGFEQLDLERRKLAVPANDCLVAIETSYNLLVDYLLDRDYIVYLIPPQVTDNYRGRRRSSGARTDESDAAVLAMALRIDRDCHQRLRPNSALTQQILAQVRLVEILRRSIQRQTNQLRTVLLRTFPQAFGLFGKLTTQISLHFLMTYPTAKEALALDKSQFEAFCRSHRYSRPGLISRRYAQLMEPAPEANPIAVQAYRDQVRILAELLLAQVQSRLQALSRLRHLFDQHPDAFIFASLPGAGDLLAPALLAKFGDHRDRFPSAASAQALAGTCPVTKASGKRKIVSFRRGCDREFRRIAQQFALASCSQSGWALAYWREARPRCSSDSDAYRRLANRWLVIIWKLWQDRIAYDETFHLRQRAQRRRPRS

SEQ ID NO: 80610 - protein, 375 aa, unidentified
MAKNTRFVGLDVHAETIAVAVAEGRGQVRSLGTIPNRPEAVRRLLGKVGKPSELRVCYEAGPTGYALYWQLTAMGIACEVIAPSLAPAKPGDRVKTDRRDAERLASSYQAGTLTVVWVPDPKHEALRDLVRAREAAKQDVKRAKHRLGKYLLRYGQRPGSGCRAWTAAWWQWVRKLELPHAEQNTTLLELILEVDHQSQRVQRLDGAIDRAVATAPEQLRAIVAALQALRGVAQETAVTLATEFGSFVRFERAPQAMGYTGLVASEYTSGTKKRQGAITKTGNSHLRRALVEAAWHYRHRPRLNQRQKQLQRELPPKIAAMAWTAQERLHRRYWALTNKSKPSPKVVTALARELVGFVWAIGKETEQALMSGRAA

SEQ ID NO: 80611 - protein, 418 aa, unidentified
MKADPETIPIERFIALDIHKHYVLVGGMNSQRDWVLRPRKVRMSRFPEWVQKNLRSTDDVVLESTSNAWEIYDLISPLVGRALVANPLKVGQIAGAKVKTDRLDVERLIILLIADIVPEVWVPPHHVRDLRALISHRWRIHKQISMTKNRLHSFIHRFNLIPPEGPLFSKSNCIWWEEQEFSSMVRLQIEQDLLILEHLTAHKEAIHQELACLSNRKPWAEDAVFLMQVPGLGVVLTMTVLSAIGDISRFEKAKNLVGYAGLGAGVHDSGLKHQGKGITKSGRKELRWAMVEAAWGAVRSNLHWKAQYEQFKKRGKHSNEAIVAVARKLLVAIWHMLTKGEPHRHSTEEDLAYKMLIWSQRMNEDALRGMTRQQFAKYGLLRLGKGIHLTRIIRNGLPRRIAPTDEVLALLPELNLLE

SEQ ID NO: 80612 - protein, 343 aa, unidentified
MKEAITIGVDLAKNVFQVHSVDAAGAVVVRRQLRRGQVLPFFRKHPSCLVGMEACATSHHWGREITALGHEVKLMPPRYVKPYVKRNKNDAADAEAICEAVTRPTMRFVDIKTPDQQSTLMVHRTRHLFIRQRTTLINALRAHLAEFGIVAGIGRLGVERLVKVIEDGEDDRVPPMARDCLMALRAQLDLVKRQILEADQRILAWHRASEVSQRLDDIPGVGPLIATALVASVPDPHAFKSGRDLAAWIGLVPKQNSTGGKERLGHISKAGNRYLRMLLVAGALSVIRRAKQVGYTRRPWLTKLLERRSTKIAAIALANKNARTVWAMMTQGTFYKEPEAQAV

SEQ ID NO: 80613 - protein, 344 aa, unidentified
MNKLSRVGIDLAKNVFQLHGVDRNEKTVWRRRLTRNNWQKVLLDKVEPGCTIGMEACAGSHHWARQLQARGFTVKLIAPQFVKPYVKSNKNDANDAEAICEAMSRPGMRFVTVKTVEQQDIQAVHRIRSELLGQRTSKANQIRGLVAEYGLVAPQQMTRLRAAVPDWLEDAENGLTCRFRGLLNGLWDDLIRLDHRVAELDREINAIAQHDPVAKRLQQLRGVGPLIATALIAAVGNAEQFSNGRQMAASLGLTPKQHSSGGKDRLLGISKRGDVYLRSLLIHGARSVVWSAKKKDDRLSQWVTSLAIRRHPNVAAVALANKTVRIAWAMLRQGTDYQPEQIAA

SEQ ID NO: 80614 - protein, 382 aa, unidentified
MNRIIKIGMDVHSTNYTLCAMEPVLDGEDRIFTNIQVTPDYENVIQFIDNLKERLGSSDSYSIECGYEAGCLGYSLYHQLTKAGVKCTILAPTTMLTQQGKRVKTDKRDAVMIAQCLSYGGYHAVHVPTDQDASVKEYLRMRDDHKLALKKIKQQINAFCLRHGYIYGGHKWTIKHLEWLKKLDLSELNRETLNEYMTSYEEQTAKIERFDKRIEELAADSDYHENVRKLSCLLGIQTYTALSLIVETGDFKRFRKGNTYAAFLGLAPGESSSGEKISRTGITKAGNSRLRTLLIEAATGICKGKVGHKSKALCARQAGNPAEVIAYADRGNIRMRSKYKRMIRHEKKRNVAVAAIARELACYVWGIMTNHIEPREEGKKAA

SEQ ID NO: 80615 - protein, 342 aa, unidentified
MGEVSTIGLDIAKSIFQIHGVDVDGAVVIRKRISRAKLLEFFATLPACRIGIEACPSAHYWSRRLEALGHAVRLMPPSYVKAYLKRSKNDANDAAAICEAVTRPSMRFVARKSEQQQCGLMLHRSRQLLVCQRTMLSNAIRGHMAELGVIASKGRNGTAELLKIIADEHDDRIPAAARLSLDVLARQYAAVRAEIVTIEKRIHAWHRSSEESRRLEEIPGVGPIVATALVAEVGDWKEFTSGRSLAAWIGLVPRQHSTGGKQRLGGISKQGNRHLRWLLVAGAMAVIRYARQRGTKRPWLARLMERRPIKVAAVALANKIARMAWAMMVRGERFKEPRLLPA

SEQ ID NO: 80616 - protein, 344 aa, unidentified
MQFFVGVDVALENSSICVIDERGAIIKEGRASSDPESIGRFIRHHGRRIEHVGLETGGLSQWLHAGLARQGFRVTVMEARHVHAAFAAMRIKTDRNDARGIAQLVRLGWFKSVHVKTASAQEIRALLNARQFVVDKVTGIENSMRANLRNFGLKVGVVSRRTWPDRARTLAMGIPALEVLVEAMLRIRDVLLQELRSLDRRLLDAARADPVVQTLMTAPGVGPIVALTFRNAIDDPSRFRCSKDVGPWLGLTPSRYQSGRIDRSGNITKAGDTSVRTALYEAATTLLGRVVKWSALKSWGLRVASRSGIKKARVAVARKLAVILHCMWKTQTPFQWVSDKKGLV

SEQ ID NO: 80617 - protein, 354 aa, unidentified
MNSLRYVGMDVHRDTISVAVLDESGRLMMQSVLATRAGAILDFIRGVRGTVQVTFEEGTHSAWLYDVLVRRVAKLVVCNPRKNALLKSGSKSDAIDARKLAELLRAGMLSPVYHGETSALEVQQMARSYSQLTEDTTRVMARLKAVFRGQAVSCVGKRLYGKRHRDEYLEQLSGGLRRRAQHLYQELDALQALRHGVRRELIVECRKHAAAHWLQSVPFLGPIRAALLIGRVQTPHRFRTKRQFWTYCGLGLETRDSGEYRVVNGRVERRCRPALIRGLNWNHNHEMKNLFKSTATAASVRQGVWREFYLGLLAKGMRPEMARLTLARKIAAITLKIWKKGERFDAEHLKLQAA

SEQ ID NO: 80618 - protein, 340 aa, unidentified
MQAITIGLDIAKNVFQVHGEDASAGVVLSKRLGRASLERFFSQLPPAVVGMEACGSSHHWARVLGSLGHEVRLMPAAYVKPYVKRNKTDARDAAAICEAVQRPSMRFVAVKSVEQQCERALHRARDLLVRQRTQLMNAVRAMLAEMGIVAAQGLKGFASLRAMIEGEDARIPALLLPSLAAMTRQWHALDTEAVELERRIGERARTHDNARRLMTIPGVGPITAHAIVAAIGDGRQFASARDFVAWVGLTPKQASSGEKQRSGGITRAGDNGLRRLLALGAASRLRQVQSKPDKAGPWLTGILARRPMRVAVVAQAAKTARIVWAVLTSGEEYRARSLAA

SEQ ID NO: 80619 - protein, 337 aa, unidentified
MIAAGVDTHKDEHVAVALDGLGQVLGELAVPASQAGYQQLTTWLEGLGEDPRAGVEGTGSYGAALTEHLQNMGIPVFEVERPRRRDRRSGKSDSIDALLAAKRVLAGDGLSTPRRSGERRALQTLLSAYQSCVGERTRLYNQLHALHATAPAALRERVGRGGGATLARRLTRMRNQPDASVQETTILAVLRDLTRRIKATSETVDRYKSEITDLVRVLHPTLLEQPGVGPITAAKLLTCDAARFKNEAAFARTNGTAPIPASSGQTIRHRLNRGGDRQVNAAIHMIALSRSIHHPETQTYLARRTSEGKTKREAMRALKRHLSRTLYKQLVHQPLTS

SEQ ID NO: 80620 - protein, 388 aa, unidentified
MSERQAPLSTETAFDHDSTMVVALELSGKSWEVGAIVPGLSRRPRRRLPPRDMPGLLTQLERWRAEALKAGRTVRRIVLTYEAGRDGFWIARYLLANGIEVHIMHPASIPVERRGRRAKTDRIDLDMLLRTLLAWLRGEPRVCSMVRIPDAAEEDMRRPERERERLVSERIALENRVGNLLCLHGVAGFKPRLRKAAERLEELRGFDGGALPPKLMDELRRLLVRHRLLSEQLEEIETAREQALAAAAEQDKAARQIRVLTYLAGLGLGTATSLVREVFCRSFRDRKALASFVGLTGTPFNSGGMEREQGISKSGNPRVRRLLMQLTWRWLRFQPDSALSRWFDERTGGAKGRIRKIMAVALARKLLVALWHYVETGELPAGARTAAA

SEQ ID NO: 80621 - protein, 391 aa, unidentified
MIYIGIDVAKDKHDCFITNSDSEVLFKAFTIFNNLDGFNDLYQKIESVMDDVTKVKVGLEATGHYSYNLLGYLIDKGLPTYVINPLHTNLYRKSLSLRQTKTDKVDARTIASMLMSDVNLKSYSDTSYHNEELKSLTRYRFDKVKERAKLKTSVSRLVCILFPELEKLVPTLHMASVYALLSEFPSAKHVATAHLTRLTNLLSESSKDRYGKDTAITFRDSARASIGSNMPAKSFELKHTIKLIQELDSEIDEIENEIKIIMDEINSPILSIPGINYRMGAMIIAEIGDFNRFDSPDKILAYAGFSPSTYQSGQLDGAYAHMEKRGSRYLRYALYNATKYVCHWDPTFAAYLAKKRAEGKHYNVAISHAVKKLVRVIYHLEKTKQQYIKAA

SEQ ID NO: 80622 - protein, 348 aa, unidentified
MSITMIGLDTAKSVFQVHAVDGTGKTAMRHKLRRSELIPFFEGQPHCTVVMEACGAAHHWARVLGGLGHGVKLIAPEAVRPFVKRGKKNDAADAAALCEAASRPDMRFVPVKSLEQQGTLALHSTRTLLVKQQTMLANAMRGLATEFGLVVPKGMSRLEELMALVEEDETFPEQARGVFAGLFEQCRATAERIAALEAEIVAHARGDDTARRLATVPGIGPITASLIAATVGGNIGAFRSARHFAAWLGLVPRQHSTGGKTRLGRITKAGDREIRTLLVLGATSMVYRAVQWNSAAGAWTRGLLTRRPVRLATVALANKMARIAWALMTRKEIYRATGHAAAASAATA

SEQ ID NO: 80623 - protein, 358 aa, unidentified
MESQEVKYVGVDCGKKSIEVVRINSENSLERRQFSTTESGINNLLQWLTLNDIVGLEAGSQSFRIAKSILNKGVQVIVLNPGNLATIYQSLKKTDKEDSLKIARLIQRHPIEELPTVPIPNDEEEDNRRLCSEHENWTKQLTQGKNRLHSLFTQAGLTQITKKHLRTKVSREASVTLLSDRYKKEAERVLKVLDLVEQNLKLIEKEIQEALKKNKAYVQTIMSMPGIGMITSLANYESYMGDCKRFSSAKQAAYYAGLVPRVDISGDTVRYGRIINRGCHSIRRVIVQAAWSLVRCQHGGKVKEFYQRLYLKKGAKKSIIATSRKMIEVLYVMIRTGKLFDSMPENILNRKLTQYGLM

SEQ ID NO: 80624 - protein, 354 aa, unidentified
MKKQLKLLNFDGQNLFIGIDCHLKSWKITIYSEEFELKTFSQEPNSAKLAQHLHKNYPGAAFSCVYEAGFSGYWIQRELSEYGIDCIIAHPADIPTMDREKKLKSDVIDSRKLCRSLRNKEIEGIYVPSIELQEARSLVRARVKLVNDMTRVKNRIKFFLMFYGTTISTQGNSWGKKYLAKLQQIQLKTEAGQRSFEFFLQELHFLIEKEKWLRKQIELLSLTEPYQEDVRLLRTIPSVGLITAMTIITEIGDIMRFKSLAKLCCYFGLIPTSYSSGEKERIGRNTSRGNKYLKHLLIESAWIIIRKDPGLLLYYKKQIAVMESNKAKIKVTRKLLNRIRLILTMKVEYQCSRP

SEQ ID NO: 80625 - protein, 418 aa, unidentified
MKKHNNSGKKSEPTSKPTKSRGPVQRDTKEVLAELVGKQKEKLDPKKVAATSAGEKLQSGELRPNLDRLTVGVDLGDQWSHYCILGLEGETLAEGQLRTTQQHIAEFFQALNAARVVFEVGTHSPWVQEVICGCGHEVLVANPRLMEGSKRRKRKNDRIDANKLARLGRVDPQSLHPMRHRSKEVRQDLVVLRARDALVAARTELINATRGLVKSMGARLPKCSSPSFAQKVEETVPVELRDALLPLVRMAATLSDCIQGYDEKIEKLGREKYGHTALLRQVKGVGPITALAYVLTLENPDRFVKSRDVGPYLGLVPKQEDSGESQPQLGISKAGDTMMRRLLVGSAHYILGPFGPDTDLRRYGLRLCERGGKNAKKRAAVAVARKLAVLLHCLWVRGEVYEPLRQGMSATIAPAVAA

SEQ ID NO: 80626 - protein, 387 aa, unidentified
MPQPNDLSRSLAALDQDSTLVAVIEISQSSWLVGGIVPGVNRQPLKKLAADETALLQLLSRWRDEATKAGRTISRIAVAYEAGRDGFWLARWLRGRGIEAHVIHPTSVAVSREHRRAKTDRLDTELLKRAFLGWLRGEQRHCSMAMIPTLEEEDAKRPNRERENLVSERTRLVNRMKSALARLGIRGFKPHLRKAPERLDTLRTAEGMALPPNTLAELRRDMARLRFVMDQIREIEAARLARLEQHPEQANHAMVRLLARVVGVGIETADMLVHEILSRHLRDRKAVARYAGLTGSPDESGARRREKGLSRAGNARVRRGMIQLAWRFLMFQKDSALAQWYRRQTTDGRGATRKTMIVALARKLLVALWQLVTTGEVPEGVVLRRAA

SEQ ID NO: 80627 - protein, 402 aa, unidentified
MTESPTRFIGLDIHKQYFVAVGVNQQREVVFGPRRASVYQLEDWVLSHLTKEDAIVLEMTTNTYLFYDILLPHVHSVLVVHPPHVALVTKASVKTDKKAALALAQLHAVGMLEGVWIPPHSVRDLRALLAQREKMVRLSTMAKNRLHSLLHRNHLVVPGKAFSPEQREWWNDLNLSETEQVMVSSDLDTLEFAQKQIEKIKEYLKQKSAQDPRMPLLIQLPGVAMLTAITILAAIGEIERFPNAKQLVGYAGLGARVHDSGMRHASGRITKAGRKDLRRAMVNAANHAVLHHVHWKRELQRLEPRLGRSKAVVAIARKLLVAVWHVLHEEVADRFADPHAVAVSFLNHAYQLGVKKYLKGKSALVFTREQLDRLDIGQELETLRWGSNRYKLPPSQPLSQKE

SEQ ID NO: 80628 - protein, 451 aa, unidentified
MKTKNRNQSSDKMISMPVVNSHAAGIDLGSRSHFVCVAQDNVKEFGVCTDDLHAIARHCKKYEVQTIAIESTGFYWRPLYLLLLDYDFKVVLVNARHLKNVKGHKTDVVDCKWLQLLHSIGLLSNSFQPDTFTHELRVLTRHRKSMIEDASRFISKMNKVLVLMNIQLHTVLRDITGESGLKVIEAILQGERDAKKLTELVSLRAKAKREDIEKALVGDFREEYLFELNHCYQLYNYYWQKITETDKQIEELLKGKVANMPDNTDYRAPKNKQYQKNDPTFNVGRYANQMSGGVELLQINGVGAITLLTLISETGLDLSKFKSAKHFASWLGFAPNRKITGGKELSSHTRKKTNPLAKAIRDAANAAGNSKSRLGDFFRHLAYRKGRVVAIIATARKIAVIIYKMLMEKKAFCYEYAKNELEYLRNTKLKNIVKTLKNYNISKNELELAMA

SEQ ID NO: 80629 - protein, 477 aa, unidentified
MKDNRRPPAPRHAAATKPRGWSPLLKRIQPDAAGIDCGATSHYVAVPEGRDPQPVRAFRTFTADLHQLTDWLVQCGIKTVAMESTGVYWISLYEVLEERGLEVVLVNARQVHNVRGRKSDVQDCQWLQELHSVGLLQASFRPAGEIVALRGYVRHRQTLIEAAATCIHRMQKALTEMNLKLHHVLSELTGVTGMAIVRDILAGVRDPHLLAAHRDGRCKASETEIAAALTGHYRAEHLFALRQNFEAFEFHQRQIAQCDQAIEGQLAHLADSRPSAPSELPTARQRYKHSKNEPRGELRAPLHRITGGADLSQIDGIGPYGALQLIAEIGTDMSRWRTEKHFTAWLTLAPNNKISGGRLLSSKTQPSANRAAAVLRRCAMSLTRSATALGAYYRRLAYRLGQPKAITATARKLAILVYRVLRGEMVYRDSGATAYDQLHRTRLINGIIRRAQQFGLSLINLQTGEVLHHAAVPQSVS

SEQ ID NO: 80630 - protein, 408 aa, unidentified
MAAVMIGVDPHKASHTAAVIGPAEEPLGGIRVAASASQAEQLLAWAAARPDRTWAAGGAGGLGNLLAQQLVAAGEVVLDVQPKVAARVRLLASGNSNKNEPNDARSVAVAALRSPARRPVTAENHTAVLKVWSKRYRDLGRTRTQVACRLHAVLADLVPGGFGREITAGQAAGLLQRTEPSNATARARCELAAEFLADLRRLDAQIRDTRSRLAAEVRESGSTLTGIFGVGPVIAAAILGAVGDVARFGDRDRFAAYNGTAPIEVSSGERKIHRLSLRGNRRLNHAIHMAAVTQIRHKHSPGRAYFDRKIAEGKTGKEALRCLKRQLSDVIYACLQAGARTAAATAPGGSPGGQPGNGSDSSAAGSHPGHRLFGQATPGPAPTLRPPPAATRSRRQLAARPARHVTTT

SEQ ID NO: 80631 - protein, 343 aa, unidentified
MEYGAIDLHSKESEIRIVTADGQVVLHRRIATRRDLLCAVFEARPRLRILLESGTESEWVARSLESWGHEVIVADPNYAPMYAHRGRGIKTDRRDVMALVEANRRGLYRDAHRVSAAHRTMRRHLQVRDQLVRMRTQIINVMRAQIRSEGLRIRSGRAESFVTRYQALAVPAALQAVLEPLVRGLAALEPLIAAADGWAQQTAQGDAVARRLMTAPGVGPITALSFQSALDTVTRFHSPGAVSAYLGVVPHEDSSGERQRRGSITKAGPSPLRAVLVQASWGVWRSPRRSATLHAWVHRLADRRGKRIAIVALARRLTRILFAMWRDGRDFQPARVSRRGVAA

SEQ ID NO: 80632 - protein, 367 aa, unidentified
MRAVFGIDVSKTSSEVAILVNGEKVHGYTILNDAIGFNRLLGDLKTVHNPEIIFEATGVYSRRLQAFLEEYSYAYTRLNPLEAKKQLDSLRVRKTDKIDAEKLAKSQLVHNRKPTYVQEEVYQHLRDLSRFYQNMTEDLVRTKNRLHKVLQVTFPELETLLSTPTGEQYWNLVMAFPCKEFVLSLSQSNLCEIVRQSTSKRISEKRITYLTDKLIKLAKQSFCAVKNTSPMLEEVRYYAQELLRLSERRQVVLNDMVALAQPLPEYDILRSIPGIAETTATSIIGELGDIRRFQSSNQINAFIGIDLRHYESGNFLAKEHITKRGNPYARKILFKCIHNIASASHTNPCNIADFYEKRTRHLELFLN

SEQ ID NO: 80633 - protein, 339 aa, unidentified
MNRIVVGVDIAKRVFQLHWVEPATGEIVALQLKRGKFLEHFANRSSCVIGMEACGGAQHWARSLQKLGHEVKLLSARMVKPFVGGNKNDAADARGVWTAMQQPGIKVVAVKSEEQQAVLALHRMRQQLVKFRTAQINGLRGLLTEYGEVMPQGRAGIKKDIPGALQRISERLPAVLIDTLREQYARLAQLDQHILEIERRLRQWHHQDVDSQRIAEIPGVGLLTATAAVAMMGDAKAFKSGREFAAWLGLVPRQSGTGGRVRLLGISKRGDTYLRTLLIHGARTVLTHSKSPPQWLTELVKRRHKNVAVVAMANKMARTIWALTAHERVYQQGYVSQCP

SEQ ID NO: 80634 - protein, 344 aa, unidentified
MTIIGVDFHSRFQQIAMLDTDSGEVVERRLDHSNGEVPNFYSGLPKPVLVGMEATGYAQWFERMLAKLGHKLWVGDAAKIRAAMVRKQKTDARDALHILDLLVENRFPQIWIPSPAERDLRQLLRHRHKMVCLRTSVRNQLHALAMGQGVYRKRKLWAAGGRTELEALGLDPWASRRRQELLEILDRLDPSLAELDQAVGKEAEQRPAARCLMEQAGVGPVTALMFVLTIGPVERFRSSKQVVSYLGLNPRESSSGGRQRLGSISKQGNSMARFLLVEAAQTAARYDEELRRDYQRLKFRRGTAVAKVAIARKLAVRLYWKLRKHTSLVPPTRMRVARKIPWWA

SEQ ID NO: 80635 - protein, 346 aa, unidentified
MGMDISVLGVDLGKNVCSVVGLDASGAVVLRRRAKRQMLIALAAKLPPCVVAMEACCGAHHLGRVFAGHGHDVRLMSPEYVRPYIKAQKNDDRDAEGIAEAATRPTMRFVELKSQDQLDMQTLHRSRDRLVGERTALINQLRAILLERGMVAPQGKRKLEQFLAVLMDEQGGAGLSSRMIVLVADARTQWAEIDRRIAAFDGEFARWVKENEEARRLMTIPGVGAIVASALVAAVGQAESFERGRDLAAWLGLVPRQFTTGGKPKLLGISKRGNKYLRRQLIHGARAALPYVAERETPLGRWAKALMSRAHHNVAVVAFANKLARIAWAVLRRRERFAVTGMPVVA

SEQ ID NO: 80636 - protein, 314 aa, unidentified
MEEILDRCCGIDVHQESLTACIMKGSGKDMHKEIREFSTFTDGIQQLGKWLKEHDILHVAIESTGVYWKPVFNILTEEELDLMLVNAKHVKNVPGRKTDIKDSEWLCKLLKNGLLERNFIPPEDTRNLRDLTRYRSKLVATMASEKNRIIKTLETANIKLSTVLSDVFGESGSKIIEDLAKGITDPKKLAEHVVGRVKHSKEDFNRALTGRITEHHSFMIQQSLDHICDMGKLIENIEQKIDAITSKHTQEFELLQTVPGISSTAAAAIMAEIGVNMDQFPSDQHISSWAGLSPGSYESAGKKKVLASCRVGEA

SEQ ID NO: 80637 - protein, 410 aa, unidentified
MELLHPHCAGLDVHKESVVACMRHMVDGKVTTGVKTFQTTTQELMALSDWLSAEGCTHIAMEATGVYWKPVWHILSDSPFELVLANATHVKNVPGRKTDVNDATWLADLLAHGLIRASFVPPEPTQQMRDLLRTRKQFVRERSGHVQRIQKTLEDANIKLDSVITDIVGLSGRRMIEALIAGQTDPEALAGLAHSRLHASKQELEAALRGRVKAHHRFMLRLHMDHLQALDAAIACIDQEVSAQLEPFRVAVEMLTTIPGISSLAAEVMVSEIGIDMSRFKTEGHLISWAGLCPKNDESAGKRRSNRMRKGAPWLKTTLIQCAWAASRSKGTYLQAQYLRIRSRRGPKKAIGAVAGSILTAAYHMLKNGTLYQDLGANHFDRREKGKHVLRLINRLQNLGFTVQITSMAA

SEQ ID NO: 80638 - protein, 423 aa, unidentified
MDILYERVAGLDVHKDTVVACVRSVTEGKTTRECRTFATTTDALGELRAWLEQYRCTHVAMEATGVYWTPVFRILGEGGFELILANAAHIKNVPGRKTDMNDAMWIADLLACGLIKGSFVPDEKVQHLRALTRTRKQLVREQTRHVQRIDKTLAEANIKLSSVICDIMGASGRRMIEAMIGGVHQPNRLAALAGKQIKATPKQLYDALHGRLTDHHRFLLELHLKQWDNLDETIRKLDREVDQRIARMEAPAEGGRAPFRALIELLTTIPGVSAVAAPSILSEIGADMSRFPTAGHLIAWSGLCPGHNESAGKRKSSRLRKGAPWLKTMLVQCAWAAKRKKDSYYRAQFFRLQSRRGPQKAICAVAASILTAIYHILKDGIEHHDLGAAYLDRRPIALNVSRLVARLKKLGFNVQLQPIAEAA

SEQ ID NO: 80639 - protein, 407 aa, unidentified
MAAVMIGVDPHKGSHTAVAIGAAEEPLGELGVRASAAQAERLMTWAAAWPERTWAVEGARGLGSLLAQQLVAAGEPVLDVQPKLGARVRPLTAGDTNKNDPNDARSVAIAALRSPARREVRPDDHAAVLKVWSKRHRDLGRTRTQVACRLHAALCELIPGGISKDITAAQAARVLDSITPSGAVAVARCELAAEFTGDLRRVDAQMRDTRQKLAVAVRASGTTTTQIFGVGPVIAATVIGYVADVSRFASRDHFAAYNGTAPIEVSSGNRKIYRLSRRGNRRLNHAIHMAAITQIRYRHSDGRAYYDRKLAEGKTHKEALRSLKRRISDAIFARLQADARQATAAADTEGPEGQPGNDSVASAAGSHPEHRLFGQATPGPQSTLRPRPDPQTGKTSPRAKRKAGRTS

SEQ ID NO: 80640 - protein, 317 aa, unidentified
MTQTSIATAGIDTAKDKLDVAIHGDAACWQVENSTPGFKRLIRLLAEAGIERVGIEATGGYERRAVKHLRAAGFTVLVLQPIQVKAYGRLHLRRAKNDALDAALVAACAAAIDRPRIEPDARLQDLADHLTFVEQIEEDIARLKTRLEHVDDARLRRLVMADIARLNARRKAEMLRIAAVLRSHSDLAHRFELVQSVPGIGERTALALVIRMPELGRISREEAAALAGLAPFDDDSGKHKGQRHIAGGRGRLRRSLYAAALPASFRWNKALIDLYGRLTARGKAHNAALIACARKLLIYANTVVQRGTPWTERPAAI

SEQ ID NO: 80641 - protein, 346 aa, unidentified
MLAELVDAVVGVDTHRDTHQVEIALPSGAPIACTTISNDTSGYAELLAWIVDHAPGPRLAVSIEGTRSYGIGLARAAAAAGLVVLECEQPHRKARRGRGKSDPIDAHLAVLAALRLDADRLPTPRADGDREALRILLGARQELTTASTAQTNRLRALLLGGDDTDRTLARGALTEARLASLARRRPPREASREQAVRHAEIRRLALALREAARALKANRAQLQTIVNDVVPRLIERPGIGPVSAAQAIVSFSHPGRCRNDAAFAALGGVSPLPASSGRTVRHRLNRGGDRALNRALHTIAATRMRSCPTTQAYVARRTAEGKNPREIRRCLKRYIARQLYRTLATA

SEQ ID NO: 80642 - protein, 392 aa, unidentified
MFSACVPPVPAVGGVTQKRYVHSTKSECPSRAAGRGPTETEVRARMKVLIGVDPHKTSVAVAAVDEAAGELVERASFPQDRAGLRFLERWAKRFPERRWAMENAHGLGRHLAGRLAATGESVVDVPPKLSARVRVLSSGNARKNDGLDALATALAASRNERLAAVNPEADSEVLRLLSERREDLVAERTRALNRLHGLLRDLLPGGVAGKLSADRAARILRGIRARGGASDRLRRRLASEVLRDVRTLDRKIADLNARVEAEVEASGSTLTEIFGVGPILAATILGTVGDVARFPTKAHFASYAGTAPVEASSGKVVRHRLSLGGNRKLNYALHMAATSQARSDAPGGSYYRKKIEEGKSCKEALRCLKRRVSDAVFRSLVADSQAPSRSAA

SEQ ID NO: 80643 - protein, 409 aa, unidentified
MDLVITRCAGLDVHKATVVATVRVPGEAGRRQVVTETFGTMTPDLIALREWLQAYGVTQVALESTGVYWKPVYYVLEDAFDLWLINMLHLQHVPGRKTDVKDSEWLTQLLECGWLRRSVVPPAPIRELRDISRYRVQQTRDRSQEVNRLQKVLEDAGVKLTSVLTDIMGVSGRAMVEALVDGTTDPQVLADLARGKLRKKLPLLRRALVGRVRPIHALLLQEILAKIDYLDEALERLTAEIDRRVAPFEPMLTALDTIPGLDRIGAISVLVETGGAMDRFPSAAQLCSWGGMCPGHDESAGKRRSGRTRKANRYLRTTLIQAGVAASRKRASALQALYARVKTRRGHKKAVVATGHQILEIAYYVMRDGITYHELGADYFQRRDRDRTVRRHVKQLQALGYVVTVNPAA

SEQ ID NO: 80644 - protein, 482 aa, unidentified
MKKRNIYVHQSQELLGLFEQAGNSTKVMCVPIDYAKKDHVVMFCNGNGDILRKPFPVKNTPEGVNYLAEQVSRSCRYHRINPGHVYFGGEDGGSYTENFANTLRSRGWLVAGVNAHDAKKQRENLQASTDRLDLMGIARMLLNRRGNCCPAQSGAYRNLRTLVRHRRKLVVMTTEVRNRIHTVVDRLFPGFLSESNSGITPFSKSSLWLMGSRFSAPQIRRRNRQTLIESFRRNGTPKPDQAAVKLQEYASRVLNTPDEYIDTLQLSLSQHVIHLRCLQENIGQVEKEIAVWLAQTQGAFLTSVRGIGIVLAAGVTAEIGDPDMQKPLNNLTSYAGIVPKVTQTGGPEGSVYIGKVAKRSNRILKDYIVQSASHLGLHGPEELMADYKRRDAAGQHADFGIARRYLRMGICLMKTSQIYLPDRLRKNDVNPEERAGYYLMNWPYLREKWRKDGALKAAFEQTNPLGQWRDMVQRIYDIKLML

SEQ ID NO: 80645 - protein, 385 aa, unidentified
MGSQTFIPRDYDVFAGLDVDKKSISVTFTDHQGFLKSMRMPYSVEHLVNHVRKHYGDKKVAFAYEAGPTGYGLYDGLVAQQYPCLIASPSMIPKAPGQRVKTNRLDSVGLAENLRGGQLKSIHVPTTLYRELRHLTQLRDALVSEVAAMKQRIKSLLLMEGLEFPPAPPGSQWSFVVKAKLRKLPCSSVVRFKLDQLLDNLEFGEKQVLKTTREIHRFCQNDPELSQCIGYLKTLPGIGWIVASQMLARVGDWRQIKNIRQLPAFLGLVPTESSTGERITRGSITHSGDPRLRSKLIQASWSAIRQDGELLEFFRTVVKKHPRPLGPRVAIVAVAHKLCVRAAVVLMKQRPYEMREKVQSAPLTQEETVPQGTTRRRRVPGDKTS

SEQ ID NO: 80646 - protein, 355 aa, unidentified
MNSEKYIGLDVHQATISVAVLDHTGKLVMECILETKAATLLEFFAGLRGTLSVTFEEGTSAAWLYDLLKPHVARLVVCNPRKNALLKAGNKSDRIDARKLAELLRGNNLKSVYHGETGVRTLRELARSYLTTTRDLTRVMSRLKAVYRSWAIPCAGRDVYYTRHRKEWLGKIKHAGVRRRAEHLYQHLDILKQLRQQVRRELLAESRRFQITSRLRQIPCIGPIRSALLVALIQTPHRFRTKRQLWAYSGLALETRISAEYCYVEGQLRRSKKLLSIRGLNKDHNHDLKGLFKAAAITASARPGPLQDFYQAALAKGIKPPMARLTLARKIAAISLTLWKKGEDFDAEKLKLQAA

SEQ ID NO: 80647 - protein, 285 aa, unidentified
MNSEKYIGLDVHQATISVAVMDCRGKVVMESILETKAATLLEFLAGLRGTLSVTFEEGTWAAWLYDLLKPHVQKLVVCNPRKTALLKHGNKSDRIDARKLADLLRLNDLEPVYHGETGVRMLRELARSYLTLVKDLTRVMNRLKAMYRSWAIPCSGRDVYYKRHRAEWLSKIPEAGVRRRAERLYQQLDMLQHLRQQARRELLAESRKHAITAKLRQIPSFGPIRAALAVALIQTPHRFRTKRQLWAYSGLALETRTRGILLRARPTAALQKTDLHSGPQQGSQP

SEQ ID NO: 80648 - protein, 324 aa, unidentified
MEVYILGIDVAKAKFDVALLLGKRVAHHQFPNNANGFAVLKGWLRKRGATQLHACMEATGRYWEALATYLHQAGYTVSVVNPRRVKSFWESELQRQKTDRVDAGVIARFCRAAAPRPWTPPPAELRELQELVRRLDALKRMDTQEKNRLSNPGISPVVQAGIEGHLAYLGEQIKEVERTIRKHINGSPQLKEQRDLLTSIPGIGETTAALLLGELGEVSNYASGRQVAAQAGLTPKQFQSGSSIKGKPRLSKMGNVHLRKGLYMCAVVAKHHNPTIKAFCERLLAAGKPTMLVIAAAMRKLLTIAFAVLKSQTPFNPNYQPCLP

SEQ ID NO: 80649 - protein, 322 aa, unidentified
MTEPTLFVGIDVAKAKFDVALLTPEGKYRSKVFPNDPAGHQQFIDWLDHHGAREAHLCMEATGAYGRCLARYLSRQQLLVSVVNPAQIHAFGKTELTRAKTDKADTRLIARYCRMHRPAAWVPPADEIVVLQALVQRLEDLLTLQNMENNRLESAEGLARTSVESVLEFITQQIQIVRLQIEVHIDNHPDLKKQQDLLSSIPGIGDDTAAILLAFLSPWDRFHSAKQVVAYAGLNPSIRQSGQWAGKTPIAKAGNALLRKVLFLPAVVAKKHNPLIAAFCNRLLLNGKRPMQVVVAAMRKLLHLAFGVLKSGKPFDPEFKVA

SEQ ID NO: 80650 - protein, 425 aa, unidentified
MNLLILKGVPMALKIVYKICCGIDVHKTFVVACIASTNDKGVTSYESHRFSTYTSGLKTLLQWLLNRNCKDVCMESTGKYWIPVYNILENDCSIVLAHPKYVKAIRGKKTDKKDAKWIADLFKHDLVVGSFMPPADIRQLRDLMRYRFKLTCFQSSEKNRLQNCLTVSNIQLGNVVSDTFGKSAQAILDKLLENPADTSLDLEPLIYKSLKKKLPELRDAIDGYITPEQVGKLKVIKAHYESLESRKAELEELILALAAPYQQELAILQTAPGIRSDFTAIGIISEIGTNMEAFPSAKHLCSWAGLTPTNNESAGKKKSVRVSKAGCYIKPLLVQCANAVVTSKKHPEIRNRYLRLKKRRGHKKAIIAIARMLLTALYHMLKNGENYNAELYRKSDLPPADWEITVEQAIIIARNQGYKIKSATA

SEQ ID NO: 80651 - protein, 322 aa, unidentified
MSGSSVMVGIDVASTHVDVAALGAELPANLRQVSNDADGHSALAEGLARLKPNLVLMEATGGYEAALACALQAAGLRVAVVNPRMARDFARAMQRLAKTDRIDAATLAEFAGVLARRPDAERFIRPLTDPEQQDLAALVTRRRQLVSMQLSERQRLRLARPVARPSIEALLEAIGRQLDDVEAEMSQHVEQHHAQMARLLQSVAGIGRVAAATLIAELPELGRLNRRQICALVGVAPYANDSGASKGRRRIVGGRFEVRRALYMATLTATRHNDAIRAFYERLVAAGKLKKVALIACMRKLITHLNAIVRDHLNAQHHPSTA

SEQ ID NO: 80652 - protein, 426 aa, unidentified
MAYRIAGIDVHKKMVAVVIADVDVAGTWQFDRRQLGTSPAQLRGLADWLVEREVVEVVMESTAQYWRPVWEALERSWQPRMQQTDPAPRAGTLHLAQAQSNEGPRGRKRDVPDAERLVKRLVAHELTLSFVPDVTQRLWRTVARRKYQSTCNRVQLQNRLECLLEEMHIKLSSLVADLIGPSARRMLRAIANGDTDPGAVVALGSRRLHATPDQLRDALGACTDLHPVYRRLLALTLDELEVIERHIHQLDEELAQLLRGHQDAVERLAAVPGLGVDSAQQIITEVGPTAATFPAAKRLASWVGACPGHDESAGINHSHRAPNGNRQMRRLLNQAANAAVKAKGSIFQLVYRRLVVRLGHAQAIGAIAHRLCRLIWKILHDGVTYEERGPAVTKHRAQRRAAKMIRELRSLGYRVERDLPPASALA

SEQ ID NO: 80653 - protein, 391 aa, unidentified
MPTMTHPDPVEQTCTHTAGGELPGTQTIGTQTTGTQTTGTQTTGGEVTGGVDTHSDTHTAAVLDVTGRLLGHRQFPATPAGYAGLLGWLCGFGPLARVGMEGTGAYGAGLAHHLQTAGVELVEVDRPDRTTRRHRGKSDPVDPEAAARAAQAGRAVGVPKTRGGPTDALRSLRVARRSAVAARAQAQTQMKSLIVTAPDTLRTSLRELGNRELITHCATRRPDRSTATDPATATVLALRALARRHQHLSAEITELDTLIGPLVAALNPALLATAGVGVEVAGQLLVTAGDNPQRLVSEAAFAMLCGVAPLPASSGVTVRHRLNRGGDRQANSALYRIVLCRLHWDPRTRAYAARRTTEGMSKPEIIRCLKRYIAREIYTALLNPHHPTGTA

SEQ ID NO: 80654 - protein, 351 aa, unidentified
MRYYIGVDHHKKFSYFSVMNEKGVVVKEGRIGNSKESVENFLGKEYSEGASAVLEAGRNWTVMHDWLEEEVDEVKLAHPLKVRAIAEAKIKTDKIDAKTLAHLLRADLIPEAYVPGKDTRVVKNILRQRMFLVKLSTMVKNRIHVIIDRHPEVRNQIDPSDLFGKQGIQWLKEVSIPKEDRKLLDEELDLLGYLAKKIESSNNWITQLGKDDKRVKLLMTIPGIGKFFALLIANEIDNILRFKNKNKFASYAGLVPSIHASAGRVSHGRIVKSGNKYLRWALIEAVWPAIKKDLALRETYQSLKARKGFNQAKVAVARKLSVIVYRVLSQKRPYYSSFPGRPHILLAKAIL

SEQ ID NO: 80655 - protein, 381 aa, unidentified
MIVMHFGGIDLHSNNAVLVIIDQAKTWVFKRRLKNDLSLILEALLKFRETLAGIAVESTYNWYWLVDGLMTNGYKVHLAHPAETSTKSRKKYSDDYRDAFKLADLLQRGELHEGYIYPKEDRPLRDLLRKRGMLVKSRAKYLQNLGNFVNQQLGIQFKGYDVKKMGLVEFDEMFSDELLRLSGRSNLAVIKTLNLEIRKLEKATLKKGKLKPEFHALYAIPGIGDIISLAISLETGSINRFRDGGDYVSYSRCAPGDLWSNGKKKGEGNRKNGNKYLDWAYTEAANFTVHRCPYAKAYFDKKLKRTGERIVAIKSVAGKLARGVYCILTKGEKYDPEKLFGVHTSHTSVSAVRKPQKPKKTYKDVAGGSKPKRGPALKPTA

SEQ ID NO: 80656 - protein, 350 aa, unidentified
MVVVGADVHKRTHTFVAVDEVGRKLAEKTVTATSHGHAEAVMWARERFGSEVVWAIEDCRHLSARLERDLLTAGQKVVRVPPKLMAQTRASARTRGKSDPIDALAVARAFLREPDLPVASHDEGSRELKLLVDRREVLVAQRTATINRLLWRVHELDPAHAPKARSMDLAKHQGILGQWLATQPGLVAELARDELADIVRLTEAINAVAKRIGERVRALAPTLLAMPGCGELTAAKLVGEAAGVTRFKSEAAFARHAGVAPIPVWSGNTAGRVRMTRSGNRQLNAALHRIAVTQIRLDGLGQTYYRHRLAQGDSNREALRCLKRRLTRVVFGHLHTDHQNHQTACQPAAA

SEQ ID NO: 80657 - protein, 343 aa, unidentified
MEAIATAGLDLAKSIFQIHAVDASGVVVMRRTLRRANLLDFFRRLPRCLVGMEACATAHYWAREIQACGHEVKVIPPIYVKAYVKRSKTDAADAEAICEAVTRPTMRFVPIKSEAQQAAEIVLKTRELLVRQRTQTANALRAHMMELGFAAAKGMTNLEKLADMVRDPTSQIIPDLAKRALLEMVEQIDALSVRIESLDADIKASVHSDDVSRRLMTIPGVGPIIAATVRVVVHDAGGFKTGRDLAAWLGLTPRAHSSGGKEKLGSISKRGNAQLRTLLILGATSIIKLGKRGLKLPEWVAGLIARKPFKVVVVALANKTARIIWALLTKGGVYRQPMPAAAV

SEQ ID NO: 80658 - protein, 404 aa, unidentified
MKPTTTLFAGIDWASKTHMICIVDDTGRIKIRFEIANTGKTFTGLLKRLTRLRVAAVAIERCDGPLVEALLDAGLRVVVITPRQVKGLRSRYTGSGAKSDAGDAYLLADVLRTDGHRLTALTQDSDATQVLRALSRTRKQLVESRVGLTNQLRALLERVFPAAVGLFARLDSDVAIAFLRRYPTQHAAARLTQARLTAFLRRISYCGRKPVEELFTRVHDAPPAGLTPAEADGHAVCVLALLRAIETTRREERDLQAEIIKRLDAHADAHIFTSLPRAGHGVRAATLLAEIGDVRARFPHEEALAALAGVAPVTRASGKMTSVGFRWTADKKLRNALIDFADDSRHASPWAKHIYDQATARGKRHPHAVRILARAWTRVIWRCWQDHVPYNPDQHGGATRLAAA

SEQ ID NO: 80659 - protein, 461 aa, unidentified
MRKARKVAGRRGKKRVDVTANLEILHPNAAGIDVGNAQHYAAVPVGRDPQPVQTFGSFTADLHRLGQWLRACQIETVVMQATGVYWIALYEVLESYGFKVYVVNAKHTKTLPGRKTDVLECQWLQKLHTFGLLNNSFLPPEEIRVLRTYLRQRENLVAGAGTCIQQMQKVLTQMNVQLANVLSDLSGKSGLEILKAILSGERDPYRLAALADPRVQASRKEIAQSLEGHWREDLLFVLRQVHDLYFFHLDNIAECDRRIEAHLQTLQSKVDLASQPLPQPTSLPRRKHIPQTNLQEELYRIAGVDLTRIDGIQVQTAQVVLSETGVNMTHWEDEHHFASWLGLSPNHQITGGKVIRRGTKKVLNRATTALRLAAQTLHHSQSYLGAKYRRLRAKLGAPKAITAMAHQLARLIYRLLRFGTEYHDKGMEHYQRQYRKNQIEWLKRQAAQLNMQLIPNTGVAG

SEQ ID NO: 80660 - protein, 370 aa, unidentified
MKPSTSYVGLDVHKSTISVAVADEGRGGEVRSYGVVENRVDLLIRLAERLSRRGQHLHFCYEAGPCGYGLHRLLSGLGHDCTVVAPSLIPKKPGERVKTNRRDATMLARLHRAGELTAVWVPDAAHEAMRDLVRARATAARGLTKARQHLSGFLLRHGKIYVGPRAWTVAYRHWLTTVRFAHPAQQIVLQDYIHAVDDAEKRIARLVAQIELLLEQWSMAPVVAAIQAMRGVAFINAVTIVAEIGDFARFTNPRQLMAYVGLVPSEHSSGDNVRRGGITKAGNSQARRALIEGAWTYRMQARVSRKLHDRIAGLPKSIRDTAWRAQVRLCARYRRLVAAGKKTVVVTTAIAREMIGFIWAIARQVELRSA

SEQ ID NO: 80661 - protein, 390 aa, unidentified
MQTVADRPEAPTAIRTDLGAIFVSLELSRSTWLITSLSPGGGEKMSKQVVRGGDVAELLERFARLREKARARTGKVFPFVVIQEAGLDGFWIDRALQNEGIESHVVDPASIATSRRRRRAKTDGIDGEALVRALLAYKRGEPRVCAMVKAPTPEEEDRRRLCRERKVLIGERVQHVNRVKGLLFSQGISGYEPLRRDRRERLATLQTGDGRLLPDHLKAQVCRELDRLELLLEQIKAVEAERDVLLAAQQVAAPAPAAMLLDIKGIGPEFAAILWSEGLFRHFDNRRQVASYAGLAPTPWQSGSVDREQGVSKTGNPRLRTTLIQLAWLWLRHQPQSALTLWFEERVRRNGGRLKKTTIVALARKLLVALWKYVTAGVVIEGAVMKRTCR

SEQ ID NO: 80662 - protein, 353 aa, unidentified
MVVLIFGLTAVMMGMMGPRFAKFQTLLERINAIAKENLRGVRVVKSFVQEKEQFAKFTEVSDELLGQNLYIGYAFNLLNFLHEQGYKVYTYTPLLIKEFAKSLSLRKTKTDKKDAHGIALKLLSDPNREQFQHDNRQVELKILARHIHRLKKKQSDWKVQYTRCLDIIFPELDKIVGKHSEYTYQLLTCYPNPQKRLEAGFDKLIEIKRLTASKIQDILSVAPRSIGTTSPAREFEIIENIKHYKRLIDKAEKCVNDLMAEFNSVITTVTGIENRLGAVILAEIRNIHAFDNPAQLQAFAGLDSSIYQSGQIDLAGRMVKRGSPHLRWALIQAAKACARFSPAFKAYLKTKLE

SEQ ID NO: 80663 - protein, 347 aa, unidentified
MKDVTIIGLDLAKHVFQAYGADAEGAPLFNRKLRRAEVLRFFEKLPPCLVGMEACASAHYWAREISAFGHEVRLLPPQYVKPFVKRGKTDAADAEAIAEAMTRKTMRFVPVKTAEQQAAVMVLRTRALLVRQRTQAINALRAHMSELGVIAPTGIANVKALAAIIREKNDARLPPAARFALTEIIDQIDMLATQIDKLEREIIIQARKDEEMMRLATIPGVGAIIAMAVKAFVPDPAGFKSGRHFAAWIGLTPKAHSSGGKERLGRISKMGNPVLRSLLTTGAAAVLRHVRDRDRVWSWLKDMLGRRPFKVVAVALANKIARMIWALLTKGGTYRNPVGIEAEAVTI

SEQ ID NO: 80664 - protein, 318 aa, unidentified
MNIIGLDISKDTIDATLHKTNGSIHYIKFKNNDDGLKQFRLWIKGNRIRKVYIGMEATGIYYEKAADMLSSYYTVYVINPLKIKDYGKSRFNRTKTDKADSNLIADYIKRHQDTLIPYQIPKNKALQKLINLKNQLQQQQKQIKNRLHSTEEDFIRNIHQDLIDTIQDKMEQVKIAIFEQIKKQTDYNHYRNLQTIPSIGKDTASVLYAQLTEKHFKTANQFVSYAGLSPAIIQSGTSVRGRGRLSRYGNRRLKSTLYMPALCAYRFNAFPKLINNLKKAGKPKMVIIVAIMRKLAKLAYYIVKTGQPYDAERHRLNQ

SEQ ID NO: 80665 - protein, 338 aa, unidentified
MNSSVIGLDIAKHIFHLFTLGIDEKTTKKKLKRNELLAFFANYPVSIIGIEACGSAHHWARELTKLGHEVILLNARYVKGFVVGNKNDFNDAAAIFDAVTRPNKRVVAIKTVEQQDIQLIHAIRKELVDKRTALVNQTRGLLSERGIIINKGITQVRQQLPLILEDAENGLTVLSREMFAEQYEKIKALDDEIKAQDLRINRLCNANELSKRFLEVPGVGPLTATIVAADIGSTGKGYESSRDYAASLGVVPKQHSSGDKQVYLGISKRGNRYIRTLLIHGARAVLKNCSKKTDKLSLWLQALVNRRGFNKAAVALANKNARILWAMASKNMAYEALA

SEQ ID NO: 80666 - protein, 427 aa, unidentified
MEVIHPRVAGIDVHKKIVWVAVRLPGQRPGERTVTAKRFKTFWRSLRQMAAWLAELGVTDAAMESTGVYWWPVYHALAQAGIEVCVCNAAHMRNVPGRKRDVMDCQGIAELHEHGLLRPSFIPAGAVAELRARTRYRKKLIEQRTSEGQRLAKVLEDAGIKIDSVASRLLGVSGRAMIEALIAGERNPGRLADLALGRLRRKTEELQLACDGRFTVAHGQMCRLHLDAYDHLTAKIAELDQLVAAAAAPFAPVIARLVTIPGIGQRTAEVIVAETGADMTRFATPARLAAWAGLAPGDNESAGKRKKAPARNGNPHLRTAMVEAAWATRPGARFRRLARRFGTGNEKKAAIAVAHTLLSIAWAVMRYDADYTDAGADYYEQRDQRNREHLVRYHQNALARLGVEVIVTPPGDGAPPPPTPDNPGQAA

SEQ ID NO: 80667 - protein, 339 aa, unidentified
MNNIKPITTVSSLNHQNRADDCIRSRRAKPLYMGVDVSKAELVLDRNGSIVRFENSRAGIAGLLASLKRHPCLPHIAFVVEPSGGYETHFVAAAHNAGFEVCPAQPLRVRRFAQSLGLHAKTDPIDARLLSRFGVERTPRPAQPADAERQALAALCNRRADLLDMLAREKMRAEHYHDPIVLKSHRVILKHIESQLKKIDTAIEKLIATSERLCAARARLCAVKSVGPQTSAVLLAHLPELGRLNRAQIASLAGLAPFNRDSGTLSRKRFTKGGRAKIRRALYLAALSAARFNPTLRIFYQRLRTNGKPAKVALIAVARKLLTHLNAIASQPLNFAIAR

SEQ ID NO: 80668 - protein, 423 aa, unidentified
MMKLKYSICCGLDVHKNVIVATIVTTNKDGISEYLQKSFSTINSDIQRFHNWLIENNCYHVCMESTGKYWIPIFNYLENDIDVCLTHPKYVKAIKGKKTDKKDSKWIADLYKFDLVRCSFIPPKDFRQLRELSRYRFKLVCMKSSEKNRIQNCMTVSNVGIASVLSDPFGKTATEIISYLLEHTADSMDEKAVRKLIKKGAKSKSDEIIEAIKGYTIETDQAKKLELARGHLEYLDDMITQTEVELYVRIKPYYEFVEFVSTMPGMTELSSTIVLAETGVDMDIFDDAKHLCSWCGLSPANNESAGKKKSVRIAKAGDYLKPMMVQCALAAIKSKKQPYFAIKYGRIKKRRGHKKAIIAIARMMMVCIYHMVSEKKPFTPTDYEELMDPQNHVESVVLNENNVFAYLESLGYDSSKLVKRNDN

SEQ ID NO: 80669 - protein, 409 aa, unidentified
MEILHPRCAGLDVHKETVMACVLSSGEGAEPSKQIRQFGTTTAELRELATWLRQEQVTHAAMESTGVYWKPVFNILESSCELILVNARHIKQVPGRKTDKADSAWLASLLRHGLLEASFVPPLEVRELRDLCRMRTTLVRECVQVGNRLRKVLEDANVKLDSVASNTLGVSGRLMIQALIEGEQDPAVLAELARGRMRSKLVELTAALEGQVRPHHRFLLRQWIELLGSLEQHIGEVEQEIERRMPPFQWAAELLVAMPGIDRTAACALIAEIGVDMTRFASARHLASWAGLCPGNNTSAGKSRSGKSHRGNRWIKGLMTEIAWAAARTKLSYPAALYRRLAAHRGKKRALVAVANALLQVVWHLLTHRTTYRDLGADYFDHLNQKRLTQSLIRRLEKLGHTVILQSAA

SEQ ID NO: 80670 - protein, 385 aa, unidentified
MQKLNDLSQSRIVLKQDSTLIAVIEMSQSSWLVAGIVPGVERQPLKKLAVDESALLKLLNRWREEAEKAGRRIERIAVAFETGRDGFWLARWLRARGIEAHVIHASSVAVSREHRRAKTDRLDTELLKRVFLGWLRGERDHCKMVAIPTIKDEDAKRPHRERESLVGEQTRIVNGMKAALVRLGIRGFNPKLKKAAGRLEDLRTPEGEPIPPNTLAELRRDMERRQLIGGQIQQIENARLERIVRGPSDRPHAMVRLLARVIGIGIETADMLVQEVLSRTLRDRRAVARYAGLTGAPDESGAKRREKGLARSGNERVRRGMIQLAWRFLMFQKDSALAQWFRARTENSRGARKTMIVALARKLLIALWRLVTTGEVPAGVILRAA

SEQ ID NO: 80671 - protein, 349 aa, unidentified
MSQNLKTAVAVIGIDIGKNTFHVIGLDGRGAIVLRQKWSRGQFEVRLANMPPCLIGMEACVGAHHLSRKLQALGHDARLMPAKYVRPYSKGQKNDFRDAEAIAEAVQRPTMKFVATKSADQLDLQALHRVRERLVSQRTGIINQIRAFLLERGVAVRQGLRFLRAELPRILATPPDVLSARMVQVISDLAEDWRRLDERIDRLSREITVLAQQDAGCERLMSVPGIGPIISSAMVAAIGTGDAFSKGRDFAAWMGLVPKQISTGDRTILGKISKRGNRYLRVLFVQAAWVVLIKPRSWERHGLKHWIEAARKRLHRNVLAIALANKLARIAWGVLAGSRTFEASKLQVA

SEQ ID NO: 80672 - protein, 603 aa, unidentified
MEITTIGLDLAKNVFQVHGVNERGKAVLRKQLKRDQVAPFFANLPSCLIGIEACASAHHWARKLQALGHTVRLMAPQFVKPYVKSNKKNDAADAEAICEAVSRPSMRFVPIKNVEQQSVLSLHRVRQGFVKARTAQANQIRGLLGEYGLVVPQGIAYIAQRVPPLIEDAENELPGTFRLLIQRLLDHLKVLQEQVDEIEVQIKAWHRASEASQRLEKVPGIGPLTASALVASIGDAKNFDNGRQFAAWLGVVPRQHSSGGKPTLLGMSKRGDAYLLAHLLVAKFMDHLPLYLQEAVFARAGHLIARSTLAQWVGECGAQLQPLVQALADELRRHMVLHADETPVAMLNQGNGKTHKAYIWSYCTPSTNPVKAVVFEFSETRSCENVRDFLRLDAPGAWQGTLVTDGFSGYAACVDKDVTSAQCMAHSRRKFHELWANHGSKVGEQALRFYQVLFRIERQAEQITSEERRRLRQRQSRRVLAVFYRWLLGQRQLVPPGSATIKAIDYSLNRWKELTHFVNDGDVPISNNWVENQLRPIAVGRSNWLFAGSLRAGKGAAAIMSLLHSARINGHDSYAYFKDVLDRLPTQPANRIDELLPHRWSPS

SEQ ID NO: 80673 - protein, 350 aa, unidentified
MRKYYIGLDVHCAFIEAAVVSAQGKLVERRRCETTIAALWNILNDVGGELHVALEEGPLADWLWRNLHERVKRMVVCEPRRNHLIAKESDKDDAIDAEKLANLLRGDFVKAVHHPESLERTLLKQQLMLYHDRVRGRVREANRLMALFRRHGVFIKEKDLGVTKRKGLLASLPASLREAVSGLWDGYELIGAQEHALRGQLHRTAKHDELLRRWLKVPGIGPVRAVTLLAFLDTPHRFRSKEALWRYLGIGLERWHSGNGPMRVRVGQRCNRMLRETILGAAKSAMMAEKNPFFEQYRRWSQAGISFKNARRNVAHSQASVLWGMWKNGSDYDPSRVGVPAAERKQPVSV

SEQ ID NO: 80674 - protein, 351 aa, unidentified
MAAKKQVLIGGVDTHRDTHHAAIIDNTGGLLADAEFPATTAGYADLLAWMRSFGQVTAVGVEGTGSYGAGLARYLTSKKIAVVEVDRPDRRARRAQGKSDPIDAIAAARATLAGTAMGTPKTRTGPVEAIRALRVARRGAVKARTAALNQMRGLVAAAPEPLRAHLTRISAAVLVSRCAVLAYDPTKLHDPQHATAAALVGLARRVTALTEEITTLDRQVTPIVRKAAPRTTALFGVGPDVAAQLLTTAGDNPDRLHSEAALAHLCGAAPIPASSGRVRRHRLHRGGDRGANHALHTIALCRMRYDQRTRAYLHRRITEGLSKQEIIRCLKRYIVRDVYTALRADFAALAP

SEQ ID NO: 80675 - protein, 403 aa, unidentified
MNAVGIDVSKGKSMVAIMRPFGEIVASPFEVKHTASDIKSLVKLINSIEGESRIVMEHTGCYYQVLAHQLSQTNLFVSAINPKLIKDFDNDSLRKVKSDKADAVKIARYALDKWQNLKQYSVMDELRNQLKTMNRQFGFYMKHKTAMKNNLISILDQTYPGVNSYFDSPARNDGSQKWVDFVSTYWHVDCVRKMSLNAFIDHYQKWCKRKKYNFSHSKAEEIYGKAKELVPVLPKDEVTKLIIKQAIDQLNSASVTVEELRSLMNETASKLPEYPIVMQMKGVGPSLGPQLMAEIGDATRFTHKGALTAFAGVDPGVNESGSYEQKSVPTSKRGSADLRKTLFQIMDVLIKTMPQDDPVYQFLDKKRAQGKAYYVYMTAGANKFLRIYYGRVKEYLSLLSESE

SEQ ID NO: 80676 - protein, 343 aa, unidentified
MDTITTIGLDIAKSVFQVHGIDAAGNPVVRRQLKRRHVISFFGKLEPCLVGIEACASSHHWARELMALGHDVRLMPPAYVKPYVKRHKNDATDAEAICEAVQRPSMRFVPVKTPEQQAGLMLHRTRHLFVRQRTAVSNSIRAFLAEVGIVAPVGRQGLDDLLKLIAEGRDERIPPAARTCLVALSIQLEALREQIRILDRRILGWQRTNETAKRLVALPGVGPALATALVASVADPTVFRSGRDFSAWVGLVPKQNSTGGKAKLGSVSKQGDRYLRSLFTVGALAVIKYAKQHGTQHRPWLAKLLERRPTRVAAVALANKLARMAWAMMASGEAYREPEALAR

SEQ ID NO: 80677 - protein, 421 aa, unidentified
MNFKAQDKQNQLIENITVSHLVIGVDIAQEVHVARAVNFRGIALGTSLEFGNHREGFMLFARWIQDLLKTYKLSSVIVGMEPTGHYWFSLARWLDTQGTETVLVNPHLVKKNKENRDNTPSKSDRKDALVIADMIKNGYYSPVRFHPEAYEELRILMANRETVTKRLNSAVNQIHRWVDIVFPELRQVFKILTCTSAIATLRLFPLPSEISRLDTEQILNGWKQFVKRHAGVKRADLLISLAKSSVGTTQALHAYKLHLEHLLAEYDLAQCQLEQIEHELHLILERIPYAKKFLEIRGISVTSLAGVLGEAGDLSGYSHGNALLRHAGLNLAEASSGKWRGKMVLSKRGRPRLRHFLYLMTMCMVMTNPEIRALHRYNVEKKNLKKMKSIMKLCSKVSRLLVSLAKSNEAYDSTRVFPQAA

SEQ ID NO: 80678 - protein, 447 aa, unidentified
MVEAITWVGIDAHKKRLQFCVVHGREQQEFEVLNEPKTIGRVARKLTRQAPGEVRCCYEAGPCGYALKRQMESAAPDLICEVVAPSLIPVKSGDRVKTDKRDARKLAHYLAAGLLTEVSPPSEEQEGVRDLTRCRRALKGDLMRARHRLSKLLLRRGIHYTVGKKAWTTTYQKWVQGLTLENPVDRTVVDQYRLGIEQLTERIAAVDAELQKISQEDEYREAVGWLRCFRGIDTVAAMTILAEVHNFQRFSTPLQLMAYLGLTPSEDSSGDGKNRGPITKTGNTHVRRVLVEVSWHYRHRAGVGKRLAERRQGQPAWAIAKADKAQLRLTRRYQRMVARGKPAQKVVVAVARELVGFIWATVLQGSAQQLRTAPSAQVVTAEGVDEHRAGTDLADALPTGSVAPPQRGKACRAAPMDNAPNPRQRSAQQSQPRGGTKARNHEASNVA

SEQ ID NO: 80679 - protein, 356 aa, unidentified
MPILADTIDGVIGVDTHRDTLTAAIVSPVGGILTQTTTSTTTQGYQQLLDVALAEVPGRRVWAIEGTGSYGAGLGAFLHAHGERVVEAGHPKRPARRTGAKTDAIDAVRAAREALGYEHLALPRHRGDREALRVLLGCRRNAVTARVVAINQLKALIVGACDELRAELRGVATATQIARCAGLRDRPARSLEHRMTVRVLRTTAQRIQHLQAEIEELTGQLTTLVAAVAPWLVDLPGVGPVTAAQVLVSWSYAGRLRSEAAFAALAGVSPIPASSGQVMRHRLNRSGDRQLNRALHTIVLARLRDDPQTRAYAVRRAAGGKSPREMRRCLKRFVARQLFKLLEQCDQPGVEILRTA

SEQ ID NO: 80680 - protein, 388 aa, unidentified
MIYLGIDVAKLNHFASAISSDGEILIEPFKFTNDVDGFQLLSSKLYHLDRDSLIIGLESTAHYGDNLVRYLVTENYKVCVLNPIKTSSMRKNNIRKTKTDKVDTYIICKTLMMQDSLRFISFFDLDLMELKDLGRFRQKTIKQRTRLKIQLTAYLDKVFPELQYFFKSGLHQKSVYALLKEAPTPQAIASMHMTHLAHLLKVSSHGHFDKNDAQQLRVLAQKSVGVSDSALSIQVTHSIARIELLDSQLDRVEAKMTDIMKFNDSVIMSIPGIGFVNGGMILGEIGDIHRFSNPSKLLAYAGLDPSVYQSGNFQAKRTRMSKRGSKTLRYALVNAAHNVVKNNATFKAYYDAKMAEGRSHYNALGHCAGKLVRIIFKMLTDNVEFNLD

SEQ ID NO: 80681 - protein, 382 aa, unidentified
MKKDIRFVGLDVHAETIAVAVAEPNGEVRSLGTIPNRPEAIHRLMKKLGPAETLRVCYEAGPTGYVLYWQLTALGVGCEVVAPTLVPVKAGDRVKTDRRDAEKLARSYRSDVLTPVWVPNAQHEALRDVVRAREAAKKDQLRARHRLGKFLLRQGWHPPKGVKPWTVKYLDWVKKDVAFDHQAQTAVLLDSITEIDHARDRIERLEKAIDEAVETAPEPMRDVIAGLQALRGIAKISAVTIVAEVGELSRFARPRQLMGYSGAVSSEHSSGKKLRRGAITKAGNSHLRRIVGEAAWSYKHRPAIGAGLRKRQEGLSEEVKAIAWKAQHRLHSRYRRLLGKGKIKQQVVTALGRELLGFIWAIAVTIERAAPRSESERLRPAV

SEQ ID NO: 80682 - protein, 314 aa, unidentified
MAEGEVYVGIDVGKARLEVAIRPSGEQFSEANDARAVRRLIKRLAPLGCTRIVLEASGGYEALLAAALYAAGLPVVVVNPRWARDFARGIGQLAKTDALDAALLAQYAALPQLKVRALPDARTRELKALCARREELIDMVVAEEHRLAHVPQRPRREINGHIDYLRKRLKHLDHDLDQAVRDSELFRERSALLTSVPGVGRVLCVALLARLPELGRLNRAEVAKLAGVAPLNHDRGKLRGVRMIAGGRAAPRRVPYMAALSAIRANPTRRAYYRQLRDRGKPGKLALVAVMRKLLLILNAIIKTQTPWRPPCPA

SEQ ID NO: 80683 - protein, 407 aa, unidentified
MDLLKTVFGIDVSSRKSNVCIMVNGQKVNDYAISNDMVGFNRLLGDLKQVTKPQIIFEATGVYSRRLQAFLDMHELRYVMMNPLEAKRKTKDDLHQNKTDKLDALYLAKLQSEHPQRLAYVQNKEYQELMANNRIYEQASHDLITNRNRLHKAIQLTFPEIEHLMVNPRGKNYWSIALRFPHPDIVLETKEADIIDFLKGLSGIGKKRANDITQNLIRLAKVACPAVKKNSSHIRGLKMAINNILSAEEECQTALQEMAKLAPKRDLEILTSIPGIGENTALRIISELGDIRRFNNPSQLNAFVGVDPQVYESGNLTAHLSISKRGTAIGRKVLYLAINQIQSAKKVGNPCHIADYYEKRKRSSETASHKKAAIASIHKLLRTIFALIKNDQLYSYDVAKHNQRLLS

SEQ ID NO: 80684 - protein, 310 aa, unidentified
METYVGIDVAKDKLDVHVRPGGEVFCVTRDAKGLADLVQRLQALPAPMLIVLEATGGFERTVAAALAAAKLPLVVVNPRQIRDFARAVGRLAKTDAIDAAIIAHFAEALRLKPRPIRDDEAQALDDLVSRRRQLIDMIVAETNRQKAIVNKRIVREIGRHLLYLQKLLTELDGDIDNAVRSSPVWREKEELMVTVPGVAQKTARILIAELPELGALDRRRIASLVGVAPMNRDSGTMRGKRRIRGGRANVRSALYMATVAAIRWNPPLRETYQRLRAAGKPAKLAIIAIMRKLIVTLNAIIRDKTPWKTA

SEQ ID NO: 80685 - protein, 308 aa, unidentified
MANHVTKITLGIDVAKDQHVIYNWQTGQTTKLRNEISDIKTWLKTFHGPVRIAIESTSNYHLTLVDEALALGYEVYLVNPRQLAHYREAVNVRNKTDPLDAWLLARYLEHEVDQLRPFQPRDPRAQRVWRLVLRRATVVKSRQQLQQSFAEVQMSIRGVLSQLQSLLVRIERRILTLIRELGWWPDYQHCLSIPGIGSSNASALVVAYHRGAFSGSDAFISYLGLDVRIRDSGCFKGRRKLTKRGEPELRRLLFCASHPARHYHRFAQYYQRQLDKGLCKIAARVALSRKLARIAFTLMRNEETFIKE

SEQ ID NO: 80686 - protein, 339 aa, unidentified
MQHIATLGIDAAKNIFHLHGVDAHGKVVLKKRLVRTKVLPFVAGLAPCLIGLEASGSAHYWARELTKLGHTVQLISPQFVKPYVQGNKNDPKDAAGICEAVSRPHMRFVPIKSVDQQDMQALHRIRERQIKARTALVNQIRGLLAEYGVVMPKGVAQVRQKLPFILEEAENGLTMLAREWLQALAAELQALDQRIRETNTQIQRVFESHEACQRLAQLEGVGPLTATALVAAVGEAATFKNGREFAAWLGLVPRQHSTGGKPLLLGISKRGDRYLRKLLIHGARAVVRTVDGKQDGRSRWLQGLIVRRGKNRAGVAQANKTARVAWALLAKGERYRPAA

SEQ ID NO: 80687 - protein, 462 aa, unidentified
MSKNTRNKQSLSKPTSTSKPTPKHLEHINLWAAGIDIGATSHFVAVPDGCDKNPVREFKTFTTNLNELAAWLKQCGITTIAMESTGVYWIPVYELLEKQGFEVKLVDARQVKNVSGRKTDVLDCQWLQQLHTYGLLNAAFRPSEEVCELRAYVRQRSMLVQSASRYIQQMQKALTQMNLQLHHVISDITGDTGMKIVRAIVKGERNADTLAGYRDPRCKNDIETIKLALTGNYRAEHLFALKQSLELYDYFQKIIQACENEIEKKMAEFSTNAAVIDVPIYQLNPNKKKITKSSPIFNLGGELHRLTGVDLLAVPGVSTVTAMQLISEIGLDMNRWKDAKQFVSWLGLCPENKVSGGKRLSSKTKASNNRAAVTLRMAAFTLYRSPTALGAYLRRLKARKGPMKAITATAHKLAKIIYNMLRFGTEYVEAGQAYYEEQYRDRVIKNLRRKAAEFGLELQVKS

SEQ ID NO: 80688 - protein, 351 aa, unidentified
MAASTRSIIGGVDTHTATHHAAVIDRNGRLIDDAEFRATPAGYAAMLTWMRGKGTLTQVGVEGTGAYGAGLARHLHDQGIEVLEVPRPDRRLRRQRGKSDPIDAEAAARTVLAGTASGAPKLADGPIEAIRMLRVARTGAVKACTAARNTLRSMVITAPEPLRSQLRAMSSAQLVAAAARLRPDLENLADPVQAAKHALRSIALRVQHLNAESRSLRTQLDALTKRAAPSASAVFGLGPDTVAALLIALGDNPDRLRSEAAFAHLCGVAPIPASSGKTNRHRLHRGGDRAGNSALHIAAVVRLRYDPRSRAYADRRTAEGMSMPEIIRCQKRYLAREVFRALRADYAELNT

SEQ ID NO: 80689 - protein, 332 aa, unidentified
MTTHTHDRTDTDLAPLFIGIDVAKGKLDMARSDSDDVVTFNNDDAGIQQLARALKPAAPKLIVVEATGGYERPALNTLLDVGLPVALVNPGRVRHLAKALGILAKTDAIDAKVLVEFARHAQPRIAQKTPEKQAELDALVTCRRQLCKTRTEQSNRRDVTRSKHARKAIDAVLKTINKQIDTLDEQIRKLIDADDHFNRMDKIIRSVPGVGAVLSATLLASLNELGATDRRQVGALVGVAPFNQDSGRLQGTRSIRGGRADIRSTLYMATLAATRCNPVIQNFYQRLKAAGKRSKVALTACMRKLLTLLNAMIREGLYWHQLETVQKLANNP

SEQ ID NO: 80690 - protein, 487 aa, unidentified
MILAREKAMSKRTPRKTATDPPKRAPRSRAVKRIRLTHPHAAGIDIHSEIHWVAVPPEDAPPAPSGHPAHLPANVRSFGACTADLSQLADWLAECGIKTVAMESTGVYWIPLFELLESRGFEVYLVDPRQSRHAPGRPKSDVLDCQWLQRLHSYGLLSASFRPSEQVVVLRGYLRQRQMLLRYAGQHIQHIQKALEQMNVKLAEVVSDITGVTGMAIIKAILAGQRDPNTLAELRNVLCKRTRSEIARALEGNWRVEHLFALKQAVELYEFYHRKVRECDAEIDAHLKTFADRTDGQLLPPPAKRRGRTHGPNVLTFTDARETLYRMAGVDLTVLEGINESTALVILGEVGPDVSRFPSAKHFTSWLGLSPLHRVSAGKIQKRRVRHGSNRVTQALRLAVQSCHHAKNALGAFYRRIQARAGAPKAIVATARKLAERVYRLLRYGEVYVRQDVEAYEAAYRERVVKGLARRAGEMGYRLEPTTPVSG

SEQ ID NO: 80691 - protein, 402 aa, unidentified
MFYLGIDVAKKSSRYLVLDEQGKRVTSFTLENLKEQFQNLLLRLQEVKIDSKDILAGLEATGHFWENLYQFMQEKGFKVILLNPYYVNKFREALAKKAKTDDIDALVIASLLRTGEYMNSIVPEEKIQVLREYTNLRYEFLKTKKDYQRKVISLLGVVFPEYERTALRNPFGVASLQILKEFPTAKDLALAKPKQIEKIVRSIQGNNFDVKEIQTLLDWAKNSIYSGRAQEARGISLKMLLEQVQNLEHNIQELGKKIEEILSPSSDDSFPGENLLSIPGVGKKTIAAVLSYLGIDGSSFATAKKVAGFVGFFPKLYQSGETKRENRISHRGPKVLRWALYMSAVACLKHNKEMRAIYHKKISQGKTAKQALIVVAKKLLQIMLAMLKSGKPYNPIQVFANS

SEQ ID NO: 80692 - protein, 349 aa, unidentified
MQITTIGLDIAKNVFQVHGIDAAEKVVVRKQFRRGQVLRFFEALPRCRVGLEACATAHHWARELAKLGHEVRLMPAKDVKAYVRRNKNDAADAAAICEAVRRPTMRFVGIKSADQQGRLMQHRTRDLLVRQRTQVINALRAHMAELGIVAAQGHEGLKKLVAIIADEKDERLPADARASLIVLTAQLQALQTMIRVIEKRIIAQHRASEASKRVATIPGIGPLGASAIIATVTDPSAFRSGRDFAAWIGLVPRQDSTGGKPKLGPISKQGDRYLRRLLVVGAHSALRRAKQSPQNYPWLVQLLARRPFKVVAIALANKMARVAWALLARGGRYRAGGGSTYRAPQLAAA

SEQ ID NO: 80693 - protein, 343 aa, unidentified
MDHIGIDVHKMESQLCILSESGEILERRIRTQRERFAAVLGERPPARILIEASTESEWVARCLEQLGHEVIVADPNFAAMYATRSRRVKTDRRDARTLAEACRLGAYRAAHRTWDRQRHVRTQLAVREALLQTRNRYISLVGAALRREGFRVATANAEGFVKRVEKLALPGQLKSEIAPLFTVLLSVNHQLEWLDCRLERLAQSDETVARLCTAPSVGPVTAAAFASTIDEVSRFSNAHQVEAYLGLTPSEMSSGEAQHKGHITKAGNSRMRRLLVQVAVSILRLRSPRTEGLRDWASKLAVRRGKKIATVALARRMAGILYAMMRDGTCYLVAQPRKARDAA

SEQ ID NO: 80694 - protein, 323 aa, unidentified
MTNVRNYVGVDVSKKTLDVSIPQENGTYLHKKISNDAVGFKSIIKHLSIDFCVVMEATSSYYMPFAYYLHANQIAVSIVNPLTVNHFCKMRMSRAKTDKKDASMLAQFGKSETPKLWKPKSDHLLELQQLQAVLDNFTNQKKSFANQLEAFNSNGKMSKSVKKIIEDQINYLKEKIKEIESAMVTITEKHHLELYKNLQTIPGIGKRTAMLLIVITDGFTKFEQAKQLVSYVGLCPRLYESGTSIKGRTRICKMGMSRIRQLLYLCSMRAMRTNKQCRELFERLKQNGKNGKLAIVALANKIVRQAFAVGTGNIAYDANFYSK

SEQ ID NO: 80695 - protein, 346 aa, unidentified
MEHYIGLDVSLKLTSICIVDRRGKVEREGVVASDPEAIATFIKLHAPHVVRIGLETGATSTWLWTELNKMGLPVICIDARHAKAALKMQINKSDRNDAVGIARIMQCGWYKEVCVKDLDSHATKALLVSRALLVKIKRDIENQIRGLLKNLGLVIGRAKMNMFAVRAAQLAEDRSELFAAVDPLLKAREAVEQQILDLDRKVLRLARNNAQVRRFMTTPGIGPVTALCFLATIDDPARFKRSRSVGAYTGLTTRRYASGEIDWTGRISKCGDKMLRSYLYEAANVLLTRVAKWSALKAWGVRLAKRSGLRKAKVAVARKLAVILHRMWIEGTEFKWSSKEVADQPA

SEQ ID NO: 80696 - protein, 356 aa, unidentified
MTSTMTTDVVIGVDTHKDVHVAVALDFLGARLATTTIPVGAKGYQALDTWAAALGPIRAFGIEGTGSYGSGLSRFLRKQGHVVLEVSRPNRQLRRQKGKSDAVDAENAARVVLAGQATGQPKSGTGTAEMIRHLKVARDTAVRGRTQAMQTLKALIVSAPDALREELERATGRMALLRRLAAMRPGPLTSTLASAKTSLRAIARRWLALDAEIREHDVHLGALTTARAPELLKAYGMGTDTAAEMLLVVGDNPERIHSEAAFAKLCGACPIPASSGKTNRHRLNRGGNRQANATLYRVVIVRLRGHQPTLDYVRRRTAEGKSKAEIIRCLKRYVAREIYGYLCSQPRPVSQPGSVH

SEQ ID NO: 80697 - protein, 430 aa, unidentified
MKTNTPSDSPVQWAALIGFDWGDSRHAVAIRVKDQSVETLELAHTAEGLQGWLDQLEQRFEGHPVAVAIEASRGASVYAMMERPWIQIFPIHPATSTHQRRAFQPSGAKDDIPDARVLLLLLEHHQDRLRPLQPDDQATRTLQGLLQARRKAVDRRTLLSNQLTSLLKDYFPQALGWSGENRAAPLALDFLDKWPSLIDLKASKAQTLRRFYHPHNVRSPELIDQRLEQIRGARPLTLDTAILEVSVRTARLLVAELRVLQEHIAGFEDAIAQAFAAHPERALFRELPGAGANLAPRLLVAFGTDRSRWESAAEIQRFSGVAPVTERSGARTWVHWRWNAPCFLRQTFSEWAAQTLVSSAWARAYYEHQKAKGHHHWGILRALAFKWQRILWRCWQTKTAYVEERYLAQLEKRRSPIAARARQIAQEMTI

SEQ ID NO: 80698 - protein, 476 aa, unidentified
MNLKGTKKKNQVSNANIFEQQELLKKIEVVRENLTASTWHELETKGKFDKNAKLSFICDDMLILGCDVGSETHYLRAIDTRGRELSKSAFSFSNNVDGFSKAKEWAVKIAAEYDKKQIVLGLEPTGHYWFCLATWMISNGISVVQVNPYAVKQTKELEDNSQLKDDAKDPKLIANLVKDGNFGMPYLPEQLYADLRRLSMFRDQLNEDRIRSINRLHRELKIYFPEYKEALGKTEGTFSLELLKQAPFPDDLAALKEDGIRQIWHNAKLRGRGYSRAGEILEYAKASVGIREGKETGKLVVQWFVQKILELDAELALIETQINQKCLEIPHTDKVLEICGIGENTLSGMVAEMGDISRFDDVKEIQKLSGLGLVASSSGKHKGQTKISHRGRKRLRYWLFQAAKSAVAHAVEFKQLHAYYTTRSMNPLKKMQSLVVIACKILRVIYTILNTGMKYDPERMLRDIRYPQGNTVQAAA

SEQ ID NO: 80699 - protein, 441 aa, unidentified
MAILSFLTNSKLVYSTHSERSIAMKNNNTKKLKRISEKTLLVTVDMGKVKHTGYCRCPDGTETKPFDFANNRKGFEQFWQRVCEMKERHHLHEVVVGFESTGPYAEPLLHYLKDRGVRLVQVNPFHTKRLKELQGNSPGKTDDKDPKVIADIIELGHALSVIIPEGTYAELRRLTQARERGMQRLTALCNQLGDLVFVIFPEFLDVMKGVSGRSSRYLLIHCPRPEDIVREGVDGLTEILKKVSRGKLGRGRAYELYKAALDSVGIREGRESIVFEVADTISSIDACERFIGNIEKEMVNQLRCIPYSRCILSIRGIGMVTAAGLIGEVGDFRKFSTISEIMKHAGLDLYEISSGKRRGKRRISKRGRPLLRKLLFYGALNTVRKGGVMEGYYLNYRKRMHRQKALVAVARKLLGIIFALIRDDSRYRESYSQRHYMLEVA

SEQ ID NO: 80700 - protein, 355 aa, unidentified
MLGTKYIGMDVHTATISVAVLDAAGKLIMDSVMETKARTILQFIHGLRGDLYLTLEEGTWAAWLYDLLKPHVTNIVVCDPRRNALLKEGSKSDRIDARKLAELLRANLLRPVYHGEKGLRTLKELARAYLTIGKDLTRVMNRVKAIYRSWGIPCAGRSVYNPRHREEWLRRITQASVRRRAELYFEQLDALVLLRKQARKELLAEGKKHQAWRLLRSIPALGPIRAAVLMAIIQTPHRFRTKRVLWKYSGFGVVTHTSADHRYVKGHLERSKKPALVRGLDPVHNHDLKDVFKGAASQASTGKGPFRDFYEALVAKGMRPEMARLTVARKIAVITLTVWKKGVAFDAKYLKPQTA

SEQ ID NO: 80701 - protein, 342 aa, unidentified
MYYIGLDVHKKTISYCVKDAAGKIHQEGKIGSTRRELDAWINTLPQPRMIAMEATIFTGWIYDHLLPHAEKVKVAHPLMLRAIAAAKRKNDKIDASKIADCLRCDFLPECYMTSTEIRDRRRTLRYRGLLVKQMVQMKNRISGLLMETGASFNKQRLHKVGYFTELMSGNEEIDCVRPLLKLSRETINRSQKLDYALVSSLERDPLLSERLERLRTVPGVGPITALTWVLEIGDVARFQSIKNAISYCGLCGAEKRSADKVVRTPISKQRNKHIQQVLVEAAKLAPRYSHELSLIYEKEKQYGNRNRATLAVARKMVAWMVAVERRKQDFVPAEKRGGTVAA

SEQ ID NO: 80702 - protein, 381 aa, unidentified
MDEDRTVCVGLDTHKAKIAVAVAEPGRSGEVRFRGEIANRPEAVRRLLERLAERHGELRVCYAAGPCGYGLYRQITALGHDCTVVAPSLVPRRPGDRVKTNRRDAVTLARLHRAGELTAVWIPDPTHEAMRDLVRARTAAMEAVRRARQQLQGFLLRHGRVFTGRKTWSPAHRRWLAGLRFAHPAQQVVLQEQIDAVAEAERRRDRLGQQIRELVPGWSLAPVVAALQAMRGVALLSAVVLAAEVGDFRRFASPRQLMAWLGLVPSEHSSGAKVERGGITKSLPRTRSGAGNGRARRVLIEGAWSYRFPARVTAEIQGRLEGVPDAVRAIAWKAQLRLCARYRRLVAAGKNANLVTTAIAREMAAFAWAIACRVQPTGAAA

SEQ ID NO: 80703 - protein, 336 aa, unidentified
MKTIPVNVGLDYADAVVQVCVMDAEGQLLRNVRCENRWTEIAARVQPGERVRIAVIEACTGAADLADELIGKAGWPVQMALPGVVKRMKCNPDKTDWADARLLADLGRVNYVPRVWLAPQAVRELQLVVRYRQQLVDARRAVKLRIGAVLRQQRVHLAGGRWSRKWCAALLTSKALSEQGQWLVGRQLGQLQRLSAEIAEVERHLAVLAGDDWLVCWLTSIKGVGLVTACILRAEIGSFARFRTAKQLARYCALTPRNASSGTRQADAGLIYAGNLLLRRTLIELAHRLARWEPRWHELAMRLRARGKHGSLAAAAVANRWVRSIHAAGVRLEQAA

SEQ ID NO: 80704 - protein, 499 aa, unidentified
MKTNPRHHSDHKAKTVSPVSAAGKAKRRRHGPKAAAVLESLEQINLHACGIDVGSAENAVCVPAHSLKAGQPNVRSFGVFTQEQDDLVEWLKDCGVTSVAMEATGIYWMSLYDKLEAGGLAVLLVDPHSVGHVPGRKSDVLDCQWLQQLHTYGLLRGAFRPEATVRRLRALSRHRADLVSEGGSHLQQGQKALVQMNVQLPLVVSDINGETGLRIIQAILEGQRDPNELVKLRDPRCKKSTVAEMEAALNGHYTEELVFVLRQNIEAWKFYQQQMEACDQQIESALKAMASANNAEAPTAPPQPMPPAAPGGPGAKKKRQRPLHGNNALTVDLSEQIRRICGVDLMKVCGLNLLSVLMLIAEIGVDMSPWRSAKAFSSWLGLCPGTKISGGKKLSRRSRHVVNRASVLLRLAALAAGQTDTWIGRFYRRKRAHLGAPKAITATAHKIACVIYHMLKYREEFVPLDVVVYEFKSQERRMRHLRKQAEELGYELVEKQEAA

SEQ ID NO: 80705 - protein, 413 aa, unidentified
MDVLPPRCCGLDVHKSSISACILVQGVGRVEKHQRRFSAMTQDLRELAIWLRQFEVTHVAMESSGVYWKPVWNILEGKVAVILVNAQHIKNVPGRKTDQKDAEWIAQLLQHGLLRPSYVPCEVIRDLRDLTRMRASLSQEASRISSRVQKVLEDANVKLASVATNTLGKSGRAMLEEIIAGQNDPEYLASFALGHLRAKTPQLKLALEGKIPPHHRFLLRRLLDQLRFVEHEIELLDERLEDIGRERPELSQAVARWDTIPGIDRVAGWTLLAEVGHSLAQFPTPEQLASWACLCPGNHESAGKRLGGTTRKGSPWLRRMACQCAWAAARTKHTYLSVQFRRLAARRGSKRAIIAVAHNLLIIGYYLQKNQRDYEDLGGDYFDRINSDGLKRYFVRRLERLGHKVTLVPIQAA

SEQ ID NO: 80706 - protein, 354 aa, unidentified
MNSVRYIGMDVHRDTISVAVLDESGRQTMQSVLATRAGAVLDFIHGVRGTLHVTFEEGTHSTWLYDVLVRRVARLVVCNPRKNTLLKSGSKSDAIDARKLAELLRAGMLSAVYHGERSALEVQQMARSYSQLTEDTTRVMARLKAVFRGQAVNCVGKKLYGKRHREEYLAQLSGGLRRRAEHLYQELDALQPLRHAVRRELIAECRKHAAARWLQSVPFLGPIRAALLIGRVQTPHRFRSKRQFWSYCGLGLETRDSGQYRVVQGQVQRRRKPALIRGLNWNHNHEMKNLFKSTATAASVRQGVWREFYLQLLAKGMRPEMARLTLARKIAAITLKIWKKGEPFAAEYVKLQAA

SEQ ID NO: 80707 - protein, 353 aa, unidentified
MSKVKELSFEGETIFIGVDVHKTNWKVNSRMGNMELASFSQDPSPEILSKHFKRNYPGATITVAYEAGFCGFGIQRSLTDLGIKCIVVNAADVPSSDKERKRKDDKRDARKLSRELADGSLNAIYIPDMEMEQVRTLIRQRYRLVQDQTRCKNRIKHLVMFSGIELATEQRWSQKYVKELEKLDCKTVALKTALNLAVQEYKQIRTIIKEATVSIRQIAQQQPFEAVQKYLQSIDGIGLINGMTIQTEIQDMSRFRTLDSLCDYAGFVPDISSSDERMVIKGITKRCNEFLREAIIESSWILIRKDPAMLMKYNEYRKRMNTNKAIIRIGKHLLARIRYVWNNQKEYERGVVG

SEQ ID NO: 80708 - protein, 343 aa, unidentified
MKLSRVGVDLAKNVYQLHGVDRFGKSTWKRRLKRQQWLKVLLDQTEPDCVIGMEACASAHHWGRELQSRGYTVKLIPPQFVKPYVKSNKNDARDAEAICEAMSRPNMRFVTVKTIDQQDIQATHRIREEFKGRRTAKANQIRGLVAEYGLVAPKRLSSLRAAIPCWLEDAENGLTHYFRSLLHGLWNDLLALDDRMCEMDKTIRRLAKDNEDCVRLEQLRGIGPMTSTAMIATVGDARQYHKSRQMAAGIGITPRQHSSGDKHRLLGISKRGDVYLRTLMIHGARSVVASAKHKDDPLSRWVTEIATRRHPNVAAVALANKNARMAWAILRHKTDYDPDFAIG

SEQ ID NO: 80709 - protein, 509 aa, unidentified
MLVPALCYVCTGMPGRAPQVGDHFLEWGAAFFKVRLEPQRIDFVGYWSTSHPLVLGVWPLPESNGHCPQECSLSANVRAEPRAAASGYHGQEASRLQRELVTMERPAPIRSSWVTLRVGDSQTQSHMRKEPVMSTVRFIGLDVHADTIAVAVAEPGGEVRSLGIVPNRPKSIRKLVKKLGAVESLRVCYEAGPTGYVIYWQLTALGVPCEVVAPTLVPTKAGDRVKTDRRDAEKLARSYRAGDLTAVWVPDAAYEALRDLVRAREAAKKDQLRARHRLGTFLLRHGRRPPTAMTAWTQRHLTWIQQVQFEQPAQEATRLDYLHEVEHVVGRIERLEHAIDEAVKTAPPSMRAVIEALQALRGIVLVSAVTIVAEVGALSRFARAPQLMGYSGMGAREDSSGPRTRRGGITKTGNAHVRRIAIEAAWAYRHRPAVGGALRKRQATLSEEVKAIGWKAQIRLHGRYRKLLGRGKCPQQVVTAVGHELLGFIWAIGVTVERQQRKTSSSIAA

SEQ ID NO: 80710 - protein, 350 aa, unidentified
MLIIGCDFHSRFQQVAMVDTETGELIERRLEHGKGEAKKFYAELHPPVRVGMEATGYAQWFERMLAGLGHELWVGDAAEIRAAMVRKQKTDSRDALHILDLLLANRFPRIWIPSPAERDLRQLLRHRHKMVCLRTSLRNQLHALAMGQGVYRKRKLWTAGGRTELDALGLDPWASRRRRELLAILDQLDPSLAELDRAVGKEAEQRPAARSLMEQPGVGPVTALMFVLTIGPVERFRTSKQVVSYLGLNPRESSSGGRQRLGSISKQGNSLARFLLVEAAQTASRNDEELRRDYPRLKFRRGTAVAKVAIARKLAVRLYWKLRKHSSTVPPARMQGSSEHPVVDESLSSN

SEQ ID NO: 80711 - protein, 350 aa, unidentified
MKRATEKLYAGLDLHGNNVVIAIVNQDGKRVAHRKVDCNLEQVVSFLQPFKPRLQAMAVESTFNWYWLVDGLRARGYAIDLANPAQIQQYNGIKHADDQHDAFHLAELQRLNILPKAHIYDATLRPVRDLLRRRTNLVHQRTALMLSFKSLYARTTGQSLALNELKQLTSKEAVALYQHPANQLMARVQVEHMAALAASISGVEKAVLACAREIPLYDRLLTIPGIGKILGMTITMEVGDIKRFQTDGDFASYCRTVDARRLSNGKQKGDNNAKCGNQYLSWAFVEAANFAKRYDEPCRRWYDRKATKTSSVLATKALACKLAKAAWHLMARQTNYDEKRMFPELAMKRT

SEQ ID NO: 80712 - protein, 329 aa, unidentified
MQHYIGVDLHKASFHACAVDGRGARCWEDRFPRTEAGIAAFLRRCSPEVAVAVEASGPTWRFADQVLSHVGRLQVVDAARTRLKAGYAAKTDRLDARRLADALRRDSVVGIYYPPPALRDLRELGRYRVSLARSRAALKQRIHALLLRQGVEFPTVSDLFGRRGRTWLASVRVPGWAGESLTGFLRMLDEVTTELERIDAAVRTHGLRDPIVTALRNLPGIGLVLGLILRAEIGVIDRFPDAAHLASYAGLVPRVEKSGRRVHYGPLTKRGSAWLRWALTEAATHGLRRQDAVGHWARRLALRKGILKARPAIARALCVDILRVWPRTV

SEQ ID NO: 80713 - protein, 381 aa, unidentified
MVFEVINLKRGKGKSVEQITRGEQRGQIVRVGADLAKRVIQVHAVDVAGRVVCRRALPRDKFMAWCSRLPAGCIVAMEMSSGAHHWARCLARLGLAPRLMSAQLVAPYRSQGASGKNDANDAAAICEAACRPTMRFVPVKSVEQQSMLCVHRLRESAKADRTACINRIRGLLAEFGLAFAQGPEALRSVLAEVLEDGSHEMNLLGRLVIQRAAQHWSELDAHIAWCDQRIAQHACDNVAVRQAAQLMGIGVVGASAAVATVDDFGQFKNGAQFGAWCGIVPRQHSSGGKTQLGHITRRGDGYLRNLLVQGAKSAVFTAHKRSDPISRWALALRERSGWQVAAVALANKNARILWAVMTKGQRFDPHHVSVKPAAAPQCAPA

SEQ ID NO: 80714 - protein, 425 aa, unidentified
MTDLYISVGIDVGADFSFMSIALPNQTFVGKPFKITHSNLDSVETAVKKIKEAEESNSLKARIFLESTGIYHYPLFCYLCDKGFDVSIINPIITNNSTNLNIRKVHNDKFDSKKLALIALKPDLKTSVMPSDFVLNIRNLVREYYRFTDQRSAYVNKLTALLKVSFPEYIGIFSKITVNTSLALLDKYPSPDAVLNAQKSSITGLIRKTSRFGTAYAEEKYEMLISAAKKAKSFGHSLPSHTELIRLYISMIRTFDSAAKQLIRSVKDIVESYPDELFCRQIKLLETIKGCGFISAVTLMCEIGNFSVFSAPKKLYAYLGLDPSVKQSGKFNGTNVKLSKRGSRLARRVLHMMAINSIGLTKNGKSKNPILRDFYDKKCLSKPKMIALSAVMHKLCNIIFAVLRDNKPFEFISPEQHNLVYRNVS

SEQ ID NO: 80715 - protein, 358 aa, unidentified
MPQCIPTDAAVITLGVDTHKDNHVAVALDGLGRCLGTLSVPTNLAGYKKLVSWANKFGSLKHAGVEGTGSFGAGLTRFLKAQGIKVSEVIRPKRRDQYRCGKSDPIDAEAAARAVLAGTATGQPKDADGKVEMIRTLRVTRRSAVKTRAQAVNQLKSLLVTAPEGLKSELWGLSTVKLVGRALRFRPGTNPSEVEAATKFALRSVARRYEYLSKEIQQLDEQLDRLVSVAAPELIAVEGVGTDTAASLLIAAGDNPERLKNEAAFAHLCGAAPIPASSGKTVRHRLNRHGNRDANRALYVIAVCRMSHDERTRTYVAKRTAEGKSKKEIIRCLKRYIAREVYRILSSLSLHNPSISVP

SEQ ID NO: 80716 - protein, 377 aa, unidentified
MRNVRFIGLDVHAETIAVAVAEPGGEVRSLGTIPNRPESVARLVKKLGKPEQLRACYEAGPTGYVLYWQLAQLGVKCEVVAPTLIPVKAGDRVKTDRRDAEKLARCYRGGDLTAVWVPDAAHEALRDLVRARLAAKRDQLRARNRLSKFLLRHGRRSPEGTKAWTAKHLMWIKVQRFEQAAQQVTLEDYRHEVEHAAERIGRLERSIDASIETLPVKMRAVVEALQSLRGVAQVSAVSIVAELGAVSRFERARQLMGYSGAVPWEDSSGPRVHRGSISKAGNAHLRRIVVEAAWSYRHRPAIGYALKVRQRHCSTEVCELAWKAQHRLHARYARLTARGKSKQHAVTAVARELLGFIWAIGTEVERNQQTKERRRAA

SEQ ID NO: 80717 - protein, 377 aa, unidentified
MLYIQYIQPGDKTKGDFSLFSLSKLHGMKKVIKQVLGIDVAQKELVSCLGRMYEDLELELYGHKTFANTAKGFEALLQWVKKLTKEEVVVRYVMEATGVYHESLAYFLKDQAKEVSIVLPNKISNYARSLTIKTVTDKTASEAIAQFGLERNLDSWEKPSTVFKKIKQLTRERDQIIEERTMVKNQFHAEQAEAEPNKTSISRIKKRIEFLNKQEKEVSAEIVALVTSDEKINEVVDLLRSLPGVGLLTASIVLAETNGFDLIRNKRQLASYAGFDVKEKQSGTSVKGKSRISKHGNKYLRKGMHLPALAAIRHDQRYKAIFVRLVSKHGIKMKAAVAVQRKLLEMTYTIFATKNKYEKNYLNKTEQGCQQEEMAMA

SEQ ID NO: 80718 - protein, 348 aa, unidentified
MARVLNLGLDVHYRQVTVAMQEDGGRIKAAGKMSHGAFLNWVRAKLAEGWRIESCYEAGASGYWLQRELVELGVRNLVVVPKAMGGPEAKRQKTDKRDSAQLCDALDRYLRGQDKALSVVGVPTLEQEEHRGLIRYHRQLIKDRTRAEARGKGLLCAQGIEVGGLWWQGKGWVAVHSDPRLKDWMQEQLADWRKKILRAQAEEKPLRERIEALAPESLPKGVGAYSAAVLHYEMKGWERFSNRRQVASYTGLCPGIHLSDSRGKEGSINRCGNRTVRWTLVEMVWRLMIWQPHYGPVRQLAAVKSKRAKKRLVVKAARRLAIDLWRLETGQTTAEKLGLIMRLRTSSN

SEQ ID NO: 80719 - protein, 503 aa, unidentified
MTTPSIPGQTASASSASGPQAQARAHRQAYHRRQTRAKAKSEALRHKEAAHVEALPVLHPHAAGIDIGSRSHWACVGFTSEAPSCLIQEFPAHTAGLKAIVAFLREHQVTTVAMESTGIYWVPLYELLQAEGFEVFLVDPSYSHQLKGRPKTDRRDCQWIYRLHSVGLLAAAFRPDEKTCQLRVYLRQRANLIRQASRHVQHMQKALEQMNLKLTEVLSDITGVTGRTIIRAILRGTRAPEKLAKYRDKQCKASETEIAQALTGSYREEHLFELKLAYEAWQFSLKQVEKVDTQIALQLGRMKCDRALPPLKPKARPKRRVHSPRFDVRMALYYVVGLDLTEIEGISELTALTVISEIGPGVSRFATVKKFCSWLGLCPNWKKTGGRVQSSRTRRGVNRAALALRLSAQSLHHSRGALGGFLRRMRGRLGTQAALTATAHKLARIVYLALKHGMPYVRQSQEEYLVQMREKQIKALRRKARQLGLEIVEKPSGGVAESASVQG

SEQ ID NO: 80720 - protein, 456 aa, unidentified
MPKPKHAQRGSRISPTIRVLEPNAAGIDIGATEVYVAIPSDRDLRPVRRFSTFTDDLNCLVDWLQTCGVDSVAMESTSVFWIPLFQILEDRGFRVCLVNARHVKNVPGRKTDVSDCQWLQYLHSVGLLRASHRPPQTICAVRSICRHRESLVQMATVHIQHMQKALDQINLQLHHVISDITGATGLAIIDAILRGERNPEKLAGLRDGRIAASKETIARSLVGDYRHEHLFTLRQSLEAYRQYQQWIAACDGEIERQLQALPGNLANDQKALSKPKDRHKPRRNELRFDLRGHLYRIFGVDLTEVPAISGLTAHTLLTEVGSDLSRFPNPAAFASWLGLCPDNRTSGGKILSVATRKVKNRLAIALRMAAQSLHRSQSYLGQYFRRMRTRLGTPAAVTAAAHKLARILYHLITTRQPYQEATFAEMDQRARKRQFLRLAKQAANFGFQLAPVGSVP

SEQ ID NO: 80721 - protein, 488 aa, unidentified
MTDRILAVGIDPAKRTHRAVAVLYPDTVLLDTGFSNDIEAIEALDDQLIQLAQARGAELRYGLEDHRGCGSTVCRVLQDRERSIRVVNPLWTHRQKDFYGQDKSDSIDARAIAAVVLRRGDGLPDASAHDELITTIRQTEQAVEELGRQRARQLNRLHQLLSETYLPVYETFFRHLKCPWALRFFARYPTAHDLNGCMVDQLAAELFELTDRHLFGCRVADRPARLAGKATHILTATAALRRQKASRALAIKGELVRQLCEDLLANLDHRQRLERRLRDELLPASGQHLETVPGIGVIMAATIIGEAGDVHRFASRHAFAKYNGTAPASQSSGGRERHVARRSCNHRLKRALWLVACAAVRHDDLARSHYHACVARGLSGVDAIKRVARRMSDIVYALLCRGASYDRSIVERAIAHRAAAAATGSRAVRAVVATVESDGGASTPVAEPGSSPKPPEAGARSARLGAGEQPEKIIARMRRVPRGHLLTA

SEQ ID NO: 80722 - protein, 412 aa, unidentified
MTMSEKTFAAYIGLDWADAKHDYCLRSATSEKVEYGKMEHTPALIDQWVMSLKERFSGQPIALCLELKSGPIVSCLLKYDFMCLYFVSPQGLANYRRVFTQSGAKDDPTDAFLQFDFLTKHFSDLKEIKLDDSETRLLDQLTKHRKSFVGEKVKLTRKIQAALKCYYPLILTIFPTIDTAIFCDFIKRWPNLSKLKKARRKTLEEFFKTHRCGRADVICNRIELIDTAIALTDDEAVIKPYQRYALGSVVLLKKTLETVKEYDVEITKIFKHHKDSHIFASFPGAGNVLAPRLLTAFGTDRSVFSSASEVTKYSGIAPVLERSGKKVWIHWRFKCSKFLRQTFVEWANQTIKYSYWAKAFYEEKRAQGKAHQATIRALAFKWIRIMYRCWKNHTIYDESKYLFALKKHGVKS

SEQ ID NO: 80723 - protein, 354 aa, unidentified
MKRDKYMGMDVHQATTVVVVIDSEARLVLETIVATEKGAIVRLLESISGPLQVTFEETTQAGWLYELVRAHVREVIVCDPRRNKLLTEGSKGDKPDARKLAELLRAGMLRSVYHGNHGTRTLKQLVRAHETLSSDCQRTMVRIKALYRGQGIGTSGRGVYQAKQREHWLRQLSEPGMKQRALWLFEQLDQLRLLRKQAKEAVLVEGRKHRAVKLLGTIPQLGPIRSAQIVAILDTPYRFRTKRQLWSYAGLAVVTHMSAEYEIRDGRVVRTRKPLATRGLNRNCNRGLKEVFISAATGGGHSEAYRSYIENLLKNGMREQMARLTLARKIAATALHIWKKGESFDPKKLNLATT

SEQ ID NO: 80724 - protein, 450 aa, unidentified
MMEPQEIEDGEYEQILERVAAVDVAKASGMVCTRVPREDQPGKRRTRVWQVDAATSAILELADHLVGEGIEKVTLESTSDYWRIWFYLLESAGLSVQLVRAQDVKQAPGRPKSDKLDAVWLAKLTERGMLRPSFVPPVEIRQLRDYTRLRTDLTRERTRHYCRLEKLLEDALIKVSAVASKLDTLSVRDMLEALIGGERDPQVLAGLARGRMRAKHDRLVQALTGKFDDHHAELARMLLDQVDALSAQIGKLTTRIEELIAAIPAAQGVDADGTTGPTAGLGARAPVLPAVDRLDEVTGIGREAAQAIVAEVGLHMSVFPTPAHLVSWAKISPRTVQSGARSRAGRTGKGNPYLKGILGEAAAAAGKTDTFLGERYRRLARRRGKLKALVAVARSILVIVWHLLADRTTRYHDLGAGYYTSRIDKNRKTRNHIRQLEALGYTVTLAQAAA

SEQ ID NO: 80725 - protein, 379 aa, unidentified
MWKKVSKFGSSLVNQTVQNAKPTFHQNLNSTLGKSLYNCDDRFFTSNPFKERKMKLIIGIDVSKKKLDLSIYNGDQHKALCINNDKKSIEKMLKSFVSKKDDCLFVMEATGVYHLRLATLLHEQGFKVGVINPLIIKRFAQMKMIRAKTDAVDAKLIAQYGYEQKVSLFQPRSIERQKIIKILRAIDALIETKESYHNRLEALAQDPLQVKSVIRSFKQLIRNAEREISKFEVELLKIVKEHYSDVYDRLLSIDGVGVKTAVVIIGFFGKFEDFENSKQVASFVGINPSPKESGSSVRGRGRISKKGNSYLRKQLYMTSLSAMQHNKSCKEFYERLTSKGKEHKVCRIAVVNKLIKQIFAILKYERTYDQDYFKNCLAS

SEQ ID NO: 80726 - protein, 341 aa, unidentified
MEQATTIGLDIAKHVFQLHGADAAGHVLFRKRITRAKLLSFLAAQTRCVVAMEACAGAHYWAREIAKLGHHVRLIAPAYVKPFIKRQKNDAADAEAICEAAQRPSMRFVPVKTEEQQANGIVFRARDLLVRQRTQCVNALRGHLMEYGYVFPKGITHVETLVALVEDLQSSLPDSVRIILKLLVDTFTALEAQIAVLDAEINQRSKSDPTARRLMTIPGVGPIASTAITALVPAAEGFPAGRDFAAWLGLTPLQKSTGGKQKLGAVSKRGERTIRRLLIIGASAVVQQASRRGAPKGSWLAQMLARKPKMLVTVALANKMARIIWALLVKGGTYRTPAAAA

SEQ ID NO: 80727 - protein, 400 aa, unidentified
MLSIGIDVSKGKSTVCGMKPGGEIVYAPFEVQHTREGMLELVSLLRSSGEEVRAVLESTGSYHCPVVAALLENGIFVSVVNSLRMKRFCSQSIRKVKTDRIDAMQIALYGLAYWQELQPARLPEDTYRELQLLARQYYQMTSLLIKAKVDFNAICDQVLPGMQELMNDHAGRHKLSDFVLRYRHTTHILEMGETRFRKDYCKWAEKKGYRNCERMAALIFATAQNGIPVLPNAPSTQIVITEAIRVLHTVEASRDAILTQMQALAKTLPEYSLVREMPCIGDTLAPRLIAEIGDVRRFHSKRALIAYAGIDAPPYQSGKFCANNRHISKRGNRYLRKTGYEVMQSYVMHKPANDPIFTFIEKKRGEGKSGKLAMVAGLNKFLRVYYGKVTELYRSLPAIE

SEQ ID NO: 80728 - protein, 389 aa, unidentified
MYFIGIDISKYKHDCFIVSSEGEAPFGVFSFENNKAGFEMFLDKLNLLDSSEEKRIGFESTSHYSLNLKLFLEKHNYTFMEFQPALISQYGKALTLRKTKTDAIDSQTIARWLMNVDYKPYPHSFYHNYSLKSLTRLRFSLIKQRNLYLIKLTDILDHTFPEFKPFFNDRFGVTALHILEKYGNPTKIANMRTTSYDELRRISRGKFSMQKFLKLKELAKDTVGESNHIFELELSCVLRLYKQIDDEITKLEEKITVLTNELNRPTMTIPGVGVLSAAVILSEYGDVTKFKSPAQMLSFAGLEPGYYQSGQSEHTGHMVKRGSSHLKCAIMNCCLPLIQFNMVFAEFYAKKRSEGKPHRVALSHVAKKLIRVIYTLETTNQTFDADKLR

SEQ ID NO: 80729 - protein, 372 aa, unidentified
MSQSRTLYVGMDVHKESIAVAYVAQEHGAEVVSLGTVGTRQCDIDKLIRQLQSKSQQLVFVYEAGPCGYWLYRYLTKKGYTCWVVAPSLIPKKAGDRVKTDRRDAMQLARLMRSGDLTPVYVPAVDDEAIRDLSRAREDTLRDLKAAKLRLKAFLLRHDIRYTGRANWSPAHLRWLSEVVCPTPAQQIVFQEYVQTVTEQTERLGRLELELHEQVQTWRLAPVVEALQALRGVQFTVAVTTVAELGDLTRFENPRQLMNYLGLTPSEYSSGARRQQGSITKTGNTHARRALIEGAWAYRYPAKVSRHLQLRLEKLPTAIQAISWKAQVRLCKRYRQLMAKGKNANQVVVAIARELSAFMWAIAKQVAGSPKA

SEQ ID NO: 80730 - protein, 351 aa, unidentified
MLIIGCDYHPSFQQIAWLDTESGEIGERPLSHRDGDAEKFYRKLKDDGVKVRVGIEATGHARWFERLLTELEYELWLGDAAQISARRVRKQKNDRDDARLLRTLLVEDRFPRVWLPDVDNRDLRQLLWHRHRLVQMRTRVMNQLQAVALNEGVRRKKGLWSKAGRAQLESFPLLPWATVRREDLHKLLDDLTPRIAALTAEVDKQAEQRPEARRLMTHPGVGPLTALAFVLIIGSPTRFRCGKQIGSYVGLIPCEDSSASRQRLGHISKQGNSLLRFLLIEAAQAATRSNPTWRREFVHLTMRRGRQIAVVAPARKLAVRLYWMWRNGWDYEKSLQFGSHVGQPGTGYGVK

SEQ ID NO: 80731 - protein, 344 aa, unidentified
MGEVSTIGLDIAKSVFQVHGVDVDGAVVIRKRISRAKLLDFFAELPPCLVGIEACPSAHHWGRELVGLGHTVKLMPPSYVKAYLKRSKNDANDAAAICEAVTRPSMRFVPIKTKQQQTVLMLHRTRQLLVRQRTMLSNALRGHLAELGVISAKGRNGTTELLKIIADSADSRVPSFARSILDVLARQYSAIGAEIGVIDKTILAWHRSCEASRRLAEIPGIGPIVATALIAEIGDWKAFASGRNLAAWIGLVPKQHTTGGKDRLGGITKQGNRYLRWLLVVGAMAVIRHAQKHGTKNRPWLGRLMERRPTRVAAVALANKIARMAWAITVHGDAYKEPKLSMAA

SEQ ID NO: 80732 - protein, 337 aa, unidentified
MDKLFKQCVGIDIAKHKFTACVSKYYLSDLQEMSDVEEFENNKSGFNQFVRWSRKHLLKEMPPVFLMEATGIYYEALAYHLHKLNQDVVVILPNKAKYYAQSLYVKTKNDIMDARVLATMGCLQRFKHHWTPPKPIYRQLRALTRFYSDLHKQKTVLTNHLEALNNSGEPMPAIIKSYQKLVKEIDKSIEDNLIEIRKLVATDSELQQRIQKLETIKGVGFITLAIIIAETQGFELITSRKQLASYAGLDVIERQSGQRVYGRTKISKKGNSHIRAALYFPAMVASRHNKLLREDYNRIISKNPRHKKIGVTALQRKLLLLIYTLWKTGEIYEEANR

SEQ ID NO: 80733 - protein, 421 aa, unidentified
MDTRTLSEEPISVVHPRCCGIDVHKREVQACVLVSAPGGRVRQEQRAFATTTDALLALADWLVAEGCTHVAMESTGVYWKPLYNVLDGQVEILVVNAQHIKAVPGRKTDVKDAAWIAGLLRHGLLRPSFIPDRAQRELRELTRYRTSLVQEKAAEVNRLQKTLEGGNIKAAGIATDIMGKSGREMLDLLVAGETDPVVLAQCARGRMKEKIPQLERALDGRFGPHQRFLVARQVAHIDFLDRAIEEVSTEVATRMTPFEEEIALLDTIPGVGRETAEVLLAEIGTDMGQFPSAAHLASWAGMCPGNHESAGKRKGGKTRKGSRWLRATLVNAAHAAGRSKHTAVGARYRALVSRCGKKRGAVAIGHTILLIAYHVLRDHDPYDDLAQQPVTRRRTPTRDHLVQQLQALGFDVTIAPRAPAA

SEQ ID NO: 80734 - protein, 409 aa, unidentified
MLKIVYPNCCGMDVHKTFVVAVIAITDDQGITQYYRRRFSTFTNQLKELRKWLNYYSCFHVCMESTGKYWIPVYNILESDHDICLAHPKYVKAIRGKKTDKKDAQWIADLYKHDLVAGSFIPPAKIRQLRDLFRYYNKLTSIQTSEKNRFQNSLTWSNIQIASVVSDVFGKSAQKIIKSVLDDPSQMPDIETLVHKSMIQKVDRLKLSIEGEFSDEQAEKIRVIKAHYDAIVLCKNDLEQLIKELAQEYQSQIKLVQSVPGFKKELTSIRLISEIGVDMTKFPTSGHLCSWAGVVPANNESAGKKHSTKISKGGRYLKPLLVQVANAVVRSEKHPEIRNKYLQLKKRRGHKKAIIAIARRLLVAMYHVLLNKEPYNPDLYHVTNYIPPEEELSIEEAIQFAKSHGFKIA

SEQ ID NO: 80735 - protein, 403 aa, unidentified
MNNVAGIDVSKGKSMVSVLRPFGEVVAKPFSIGHTGSELKELADYLKSLDGETRVVMEHTGRYYEPVARFLHDEGVFVSAVNPKLIKDYGNNTLRKVKTDKADSRKIARYGLDNWAELRQHTPMDTIRMQLKTLNRQQSLYTKTKTMMKNNLIALLDQTYPGVNALFDSPVREDGSQKWVDFATAFWHVDCVRNMSLTAFAERYRKWCKRHGYNFSQSKAVEVHAGAQDLIAMLPKDALTKTMVRQAIDALNAVSASLERLKAEMQALAAQLPEYPVVMAMHGVGDSLGPQLMAELGDVARFTHRNAITAFAGVDPGADQSGTHEAKSTRVSKSGPPELRRALFLVMDCLLKTQPQDDPVYRFMDKKRAEGKPYLVYMTAGANKFLRIYYGRVKEYLASLEEN

SEQ ID NO: 80736 - protein, 342 aa, unidentified
MGEVIIIGVDLAKNVFQVHGAAADGSVVFRKKLSRPQFARFMADHLPCLVAMEACASAHHWAREMARYGHEVRLIAPHYVKPFLKRQKNDAADAEAIVEAALRPTMRFVEPKTADQQARAVAFRTREQLVKQRTEAVNALRSHLYEFGHVAPEGIGYVPRLAKVVDDPDTGIPELARDVCRMLLEQIAHLTDRIDALKARIAALSNEADLPRQLQTMPGVGPITALAVETFAPPMDQFRRGRDFAAWLGLVPRQHSTGGKQRLGKTSKMGQRDIRRLLITGAMAVIRWATRRGSPKGSWLARMLERKPLSVVAVALANKMARGIWAMLTRDEDYRGPVLIGA

SEQ ID NO: 80737 - protein, 380 aa, unidentified
MKHYAGLDVSVKETSVCIADASGKICWEKKVVSHPEDLVAILSDPALNLERVGLEAGPMSQWLFEGLAKAGLPVFCIETRHTKAFLKASQTNKSDRNDARGIAQMMRVGLFKNVHVKTLTSQKRRALLTARSLLQEKAISLENDMRGLLRNFGLKVGIVSGGTFEERIRELVEADPDLAEIMEPLLAGRRKLREELAKLDKKVVHEAKCDEVCKRLMTVPGVGPVVSLAYVSTIDIPSRFRHSRAVGAVLGLTPVLNQSGESKRVGHVSLCGDAMMRALLYEAAQSMLTRVVKWCWLKAWAMGIARRHGRKKATVALARRLAVVMHRMWWTAQNSAGRGRRRPAPWPRRVVSSLVSSQGNRCKRNSKFRFAAEDVLRGRW

SEQ ID NO: 80738 - protein, 489 aa, unidentified
MAKMSTFERLQRGKLSRQQCKELGRRLQSPNPGLEIIHRNAAGIDVGSGSHFVAVPPDRDVQPIREFGSWTAALHEMAAWLKSCAIDTVVVQATGVYWVVLSDVLEAAGLKVWVVNAQGTKNLPGRKSDVQECEWLRKLHTYGLLRNSYRPPEEIRGLRDLWRLRERLVADAGRAVQQMQKSLTGMNLQLTNALSDISGVSGMAIIRAIVGGERDPWKLAQLRQPGVRASEAEIAENLRGTWREELLFELRQVVEYYDFLGKQVIELDQLLEKRMAAMPSREVTPKGSPVTEQEEEPNGKRRGRKPKTKVKPAPKNAPAFDIGRELTRLLGVDLRTIEGVNIHIAQTVYTEVGPDLSAFPTEGNFTSWLGLTPMRSVSGGKVIKHEKKRVKNRLADALRMGASTLERSQSYLGARFRYLKARLDGRRAVKAMARYLACLIYRLMTKGQAWIDRGEAYFEQKKAERELRTLQSRAQKMGLQLVPLATVNA

SEQ ID NO: 80739 - protein, 343 aa, unidentified
MEYYVGLDVSLKQTSICVVDQTGSVVREGVVDSDPEAISVYVRSKAPDAVRVGLETGPASTWLWTELKRLGLPVICIDARHAKAVLKMQINKSDRNDAIGIARIMQTGWFKEVHVKDIDSHSVRALLASRALLVKIKRDLENHVRGLLKNLGLVIGRAKFNVFAVRAEELIEGRPELIAAIRPLLEARNAVGQQVSELDRKVMRLARHDAQVRRFMTVPGVGPITALAFKATIDDPARFARSRSVGAYIGLTSRRHASGEVDWTGRISKCGDAMLRSYLFEAAGVLLTRVPKWSAVKAWGVRLAKRNGLRKAKVAVARKLAVILHRMWIDGTEFNWSKKEIAA

SEQ ID NO: 80740 - protein, 345 aa, unidentified
MPIVGGLDIHRKQITFDYLDTSTGQVQRGQVSPADREHLRAWLTRFAGCDDVAFAVEGCTGWRYVAEELAAAGVTAHLAEPADTAFARGRKRHAKTDKTDSRHLRQLLAEGRLPECWIPPGRILECRALLELYHDLRAEHTAWVQRIHAVLFHHGAPALGEGTLRTGPGLAALREVSAVHLSPAGQLQVATALEVLEALETRMHAVRHQLLDAARHLAGAKVLAERLYGVGPFAALAITCWLAGKDRFSSSRQAVRFAGLDVTVWSSDRKGPPGRLSRQGPPVLRWAVYEAGKTHARASAPDHAYYAAVKDRCNGKRAALSEARKILRQAHHILAGLGDDALAAA

SEQ ID NO: 80741 - protein, 347 aa, unidentified
MSKINVIGVDLAKNVIQVSVVSGSNRELSNKSYTRKKFAAFLARQKPSLVAFEACGTAHHWARCAQRHGHEVLIIPAKVVAPYRQGHKTDANDALAIVEATRRSDLKEAPLKSVEQQGMQSIQRSRELLVQNRVGLSNHIRGLLMEFGIVIPQGWAALHRRIPEILEDGENELPDLYRPTLHLLWRRLCELRKDIEQLDAEVKQLTKQHAACKELLALEGVGPIGSILLYASLGTGEAFASARQFAAYLGLTPKQHSSAGKVKLIGISKKAANRRLRAVLIQGARAYVHRLKEPKSYKDRWLLELIERQGHGKAAVALAHKNVRTAWAMLTRGESYQRNYEYRQLAA

SEQ ID NO: 80742 - protein, 346 aa, unidentified
MNSNDPHYKLYLGVDTHLELHVATLINGLGQVVKSNAFSANLSGYRELFAWCKSYGFLQKAGIEGTGSYGAELTKYLIKNGVDVYEVMRPNRMERRLKGKTDGIDSENAARSVLSGEVKVIPKSHAGPVESLRSLLLTRNSAVKARTQAMNQIRALLVSGPDELKQPLYLPKPQACATACLAQCSNSSEPLMISLVLLAQRWNFLNEQVKKLDKALKKLTLSAAQDLVSRFGVGANVAATLLVAAGDNANRLRKESSFAALCGVNPIPASSGKTTRHRLNRGGCRSANNALWTVAMVRMRSDPRTKDYVARRTAEGLSTKEIARNLKRYIARELFPLILKDLARLA

SEQ ID NO: 80743 - protein, 356 aa, unidentified
MRFYKELHQFYTGIDLHARTMYVCIMNNSGSVVYHKNMPSTPECLQHVVSQFGTDNVIGVECIFTWYWIADFCSEHSIPFALGHALYMKAIHGGKSKNDRIDSEKIAAMLRGGMFPVAFVYPKEMRATRDLLRRREYFVRHQAELYTHIENTNSQYNFDSTLETRRMKSASYRRTLPEQFSNPLAQKNIKADLFLADAFHTLISGLEKEIQIQASSHDPRSLELLRSIPGVGDTLSLVILYEIQDMHRFPGVGNFISYCRLVKCAHESAGKKVIGGNNMIGNVHLKWAFSEAAVLFLRKNEPAQKMHQKLVSRYGKAKALSLIAQKIGRTVYYMLKHNEPFDSKKFFQDGISEHSA

SEQ ID NO: 80744 - protein, 315 aa, unidentified
MVDRLGAHLATIEVSADAAGYAQLTGWASKHAPGPRIAWAVEGCGSHGAGLARALAAAGHLVIEADRPKKARRRGGKSDQLDAIRAARQALAIPDPAQPRTGDTREALRILLATREHATKTRTATVNTLKALILTAPEDLRAQFRGRRTAAQVRAALALRPRPGQPVSEQHLRQALRELARQITGLDAALKTSLKDLRSLARAWMPALLAEPGIGPISAAQLLVTWSHPGRFRTEAAFAALTATAPIPASSGRTDRHRINPYGDRNANRALHTIAISRLRYHQPTITYAARRTCGARLFDLAWPWAVLRAGIIAE

SEQ ID NO: 80745 - protein, 348 aa, unidentified
MTEAYDGREVVGMDLHRRRSVLVRMTADGKKLETARITNSPAELRRQIARAGKSPQVVLEATYGWYWAADTLAAAGAEVHLAHPLGVKGFAYRRVKNDERDAADLADLLRMGRLPEAWVAPHEVRELRELTRYRHKLVRIRTSCKDQVHAILAKLGIPVTCTDIFGVWGSTWLDELALPQPYAGKMTSLRKVCAVLAGEIALLEIAIAGLLQDDQGYQAIRALPGIGPVLGAVIIAEIGDVTRFPRPAELCSWAGLTPRHRESDVKVSRGHITKQGSRILRWALIEAIQHVPAGHPLRQRKDDIIARRGAQARNIAKVAAARQLLTWVFYAMRDGQVRSLAAARRQAA

SEQ ID NO: 80746 - protein, 359 aa, unidentified
MKCNIKFVVGLDLGDKKHDICELNWDGDKTLTDKIKNDVKSLNSFFDRYKKPFEVRVAMESGSSSAWISDILKIRGFQVYVGNARKMRAIWDTDCKTDERDAEMIARIARFDLKLLHPITHRSAEAQMDLAVIKARDGIVRNRTVLVNEVRGLVKNAGTRLPSCSADSFAKKVKEFIPEGLKPALLPLLMMIEAQTKLIHHYDNVIEKLCEKYKETETLRKITGVGPLTALGFILTLEDPSRFSKSRDVGPYLGLVPKKDKSGNIDRTLGITKAGNSHQRRLLVGAAQYILGPFGKPCDLRRYGERIAGDGKNKIRKRKAVIAVARKLAVLLHHLWKTEDKYDPDYKLNSKRSKLKKAA

SEQ ID NO: 80747 - protein, 337 aa, unidentified
MALYCGIDLHSNNSLVAVTDEQDKPVYERRLPNELPTIISALEPYRPELIACVVESTYNWYWLVDGLMDAGLPTRLAHTVAMPQYDGLKHGDDRSDARHLAHLLRLGLLPEGHIMPRELRAVRDLLRRRLLLVRQRTLHHLSLQSLIARHTGKRLNANEVKRLDGPALDALLAEPTRFGGQITRLAMNWLNDAIGLLEQEVAKHLKARPEYRLLTSIPGVGVVLGSTIVLETGDIGRFAAPGNYASYARCVKSERLSNGKRKGSGNRKNGNRYLAWAFMEAAHYAAIWSPPIKRYYAQRKATRHLLVAKKAVANKLARAVYHMLKNREPFVVERAFG

SEQ ID NO: 80748 - protein, 345 aa, unidentified
MEIHTIGIDLGKTVFHLVGLNQRGEVVVRKKCSRNQVLRFTSNLHVSLIGMEACGGAHFLGRALRDQGHEVRLMPAQYVKPYVKTNKNDYIDAEAIAEAVGRPNMRFVPIKTDDQLDLQSLHRVRERWVVRRTAVINQIRGLLLERGVTIRKGRHHIEVSLPGILEDSENKLSGALRVLLAQLQLEMQYLQRQIEESDKLIGRIAGDLEACRRLVAIPGIGPLTATATVAAIGNGAAFKKGRGFAAWLGVVPGEHSTGGKQKLTGTSRRGNRYLRKLFVQGAHSVLLQKTKQATGLGTWLSNLTSRKRAQVATVALANKMARMAWAVLTKGEAYRPPLLPQAVEL

SEQ ID NO: 80749 - protein, 368 aa, unidentified
MSERTRFLGLDVHKETIAVAIADEGSQPQIHSTIRNEPGAVRSLVKALKGPGVRLVAAYEAGPTGYTLHRQLTRLGVESQVIAPSLTPRPKGNRVKNDRRDALLLARLLRSGDLTPIWIPDEAHEALRDLVRARADAKADQLRARHRLSKFLLRKDSRPPAGARAWSVKHQDWLRHLTFEHEPETAVFRDYCQQVEAAGERVKRLEAELRHCAESSPHLPLIAALQSMRGIAFLTAVTIVTEAGDLRRFKTARQFMGYTGLVPSEHSSGGSTHRGPITHTGNGPLRHVLVEAAHHARHAPRVEAALKQRQAGVPPRIVDISWKAQQRLNLRYRHLSARLGRPKAITAVARELAGFVWALGQEMEAPAA

SEQ ID NO: 80750 - protein, 383 aa, unidentified
MTRISHLPSTDQPVQPESSHEVARKPLKTGGVAEVVLGVDTHRDMHVAAVLTVLGALVASKAFTATEAGYRQLTEWARSFGELGRAGVECTGSYGAALTRHLLAEGVQVIEVNQPDKANRRKRGKTDAVDAEAAARAVLSGRATATAKTGDGAVEALRVLKLTRDSAVNARTKAINQLKAILVNAQPALRESLAGLGPATLVNRCADLADDPAAGTAGQAVLCSLRLLARRIKALKAEAYELEKQIEQIVAAHTPQLLERQGVGPDSAAALLIAAGDNPERLHSEASYAALCGVSPIEASSGKTQRVRLNRGGDRQANAALYRITLSRLRWDPRTRDYIERRMRDGKTKREAIRCLKRYIAREVFALIRPDTPTSADTQPVAA

SEQ ID NO: 80751 - protein, 407 aa, unidentified
MEVLYPRCAGLDVHAGQVTACVRVADGPEVIYHRRTVATTSRDLLTLADWLTEYACTHVAMEATGVYWKPVWHILEDQFTLILANAMQIRQVPGRKSDVNDATWIADLLAHGLIRASFVPPTPIQDLRDLTRTRRQLVAEIARHTLRIQKTLEDANLKLTRVISDVLGLSGRTILKAIVAGETDPERLVDLTSGRLKASRAQLVQALHGRVTAHHRFLIGLHLTQVEALEAAVAQLEGHLGDVLGPFQSAVILLTTMPGVGETAARVLVAEIGVDMTRFPSAGHLVSWAGLCPRLDESAGKRHSTRIRHGDQWLKTTLVQAAWAATRAKNTYLQSQFHRIKSRRGPKKAIIAVAASMLTAAYFMLRDGVEYRDLGGRYFEDRNKQQTTDRLIRRLRDLGVSVEIKAA

SEQ ID NO: 80752 - protein, 289 aa, unidentified
MLPERTQVAWMSLVMGIDQHRAQITAEWLDTETGEVSRARVRPADRAGVRRFLARFAGQQLEVALEATTGWRFLVEELRAVGAVVHLAEPAETAALRGNKRRAKSDRADARHHRELLLAERLPESWIPPDHILDVRARVRLRHTLIEQHTEWQQRIQAVLYHHGCRQRRRLMEGDGREWLASQALSETAREQITVAMAIIDALDVQLAPLTKELCAWARRQAGCKALIDAYYGIGELCAVTVIAELGDCRRFQNSRDAVRYSGLDVTVYQSDRHRAPGHLSRQGPPALR

SEQ ID NO: 80753 - protein, 371 aa, unidentified
MKKFSMFVGLDIHKTSIEIALAEAGRDGEVRSYGGIDGTLDALDKVVRKLVSKGCNLHFVYEAGPCGYDVYRHLTAQGFDCVVVAPSKIPRQSGNRIKNDRRDAQMLARLHRAGELTAVYVPCVEDEAMRDLTRAREDAKTSERKAKQRILAFLLRHGHCYSGKSAWSRAHFRWISILKMPHPAQQIVLQESLDTLAECTRRVDRLTEQIQTLSPQWRLFPVTQALQTMRGVSLIVATTTIAEIGDLTRFKKPTELMSYLGLVPSEHSSGRTTRRGSITKTGNGHVRRVLVEAAWAYRLPARVSRKLLIRQEGLSQEVCAISWKAQLRLCARYKRFTTKGKSHQLVVTAIARELCAFMWAIANEVQGPVKV

SEQ ID NO: 80754 - protein, 348 aa, unidentified
MLIIGCDYHPGFQQIAFVDTETGECGERRLTHREEAEQFYGMLKQRSVRVGMEASGHARWFERLLSDLQFELWIGDAAEIRTKRVRKQKTDRQDAQLLLRLMIEDRFPRIWVADAENRDLRQLLWHRHRLVQMRTRVMNQLHVVALNEGLRRKKALWRPAGRNQLESLILAPWASRRRQDLLDLLDQLSPKIQELTRALEDEVEKRPVTRRLMTHPGVGPLTALAFELVIGSPERFHCGKQIASYVGLVPSEESSGDRRRLGHISKQGNSLLRYLLVEAAQVTVRSQQHWRSKFFHLAMRRGRKIAKVAMARKLAVHLYWMWRQGWDYGQFEKLGSYAGEPGNRQGVQ

SEQ ID NO: 80755 - protein, 413 aa, unidentified
MEILYECCAAIDVHKDTAVTTIRFPEGKAGAKSQRRSETRTFSTKTPGLLELFDWLSVCGATHVAMESTGIYWRPVHNILEGSFEILLVNAHHVKAVPGRKTDVKDSEWLAELLEHGLLRGSFIPPQPIRDLRDLTRYRKRLVQDRTHHINRLMKTLEMANIKLSSVATDILGKSGRRMIESLIAGQQDGEVLADMALGVLKKKRADLKAALTGRVRPHHAFLLREQLRTIDDLQQRIAAFDKQIEECMAPFHDAVARLVTIPGVAQRTAENILAEIGTNMAQFPTPEKLCSWAAICPGNNESGGKRKTGRTRKGNAWLKTTLVEAAWSAARTKGSYLHTLYVRLKLRRGAKKAIVAVAHSMLQSIWYMLSMNVDYKDLGPQHFDRLNHRRVRDHHVHRLIELGYEVTLAEVA

SEQ ID NO: 80756 - protein, 338 aa, unidentified
MKKFSGIDLHSNNSLIVVSDEADKIVYQRRHPNDLEEILRALEPHRKELVGIVVESTYNWYWLVDGLMNAGYVVHLANTAAIKKYEGLKYSGDDADAAYLAKLLRLGLLPEGYIFPPEGRATRDLSRKRMQLVRCRTLQILSIESILARQTGSRLKSAQVQRLTAEEIEKLGFSPDVTLALQANAAVMRTLQNQILVLEERLQQRVRLSEEFALLKSVPGIGTILATTIMLEVGTVKRFVKVGNFSSYCRCVQSLRVSNGKKKGEGNSKNGNQYLAWAFVEAAHFALRHCPQAKSFYERKKQQRNAVVATKALAHKLARACYHMLRERKSFEVERCFV

SEQ ID NO: 80757 - protein, 502 aa, unidentified
MKFSAGFLQWEPSEASRGYEFNRQTCDVLNQNLEPRDALCFLNEYSDEVWNNAVKKAHYKGFAEAKPASARSEGKENEEIAMTGRGSVEQEPEFVAFVGIDWADQKHVWSLQAADSSKRETGELEHKPEVVEAWVGELCQRFGHGAIAVAVEQVKGALVFMLRKYECLHLYPVPSTMSASMREALYPSGAKDDPRDAELLLDLLLQHRNKLRRLTPDDEATRRVQNLVEERRKLVEEKTAQLNRLTGYLKVYFPQMLEWFAKLDTKLGCEFLERWPSLEELQGASPAEVRKFFRQHRGRHPELTEWRLQGIGQAMPAIRDRAVIEAKRMVVQVIAQLLRTLLEGIATLDRKIAEAAEAHPDFFIFKSLPGAGAALAPRLLAALGSQRDRYASAEEVQKYSGIAPVTERSGKKKWVHFRWACPKFLRQSFHEWAGHSIAQSVWARAYYHQQRQRGKDHHAAVRALAFKWIRIVFRCWQDRAAYEENRYLEALAKRGSPLTPVP

SEQ ID NO: 80758 - protein, 320 aa, unidentified
MTQVASFVGIDVAKGKLDWCIRGTAHGTTPNTPAGCAKLAGELQRLGIKIAVMEASGGYEQTIALALRQKGLLARIVDPKRVRDFARAAGRRAKNDPIDADTIAWFAETFNLEPGSPPDRDREQLAALVGERQDLVEMRIQCLNRGEHKRPALCQNLRNDVLKHINRAIAKLEAAITALIAQNELLAERARLLDSVPCLGSQSIAALLAWLPELGQISNLQIAALLGVAPYADDSGQQVGVRHIAGGRRQLRNILYMAVLGGATQHNPVLKAYYTRLVLRGKLRKVALVACLRKLIVILNVMVARQQHWNPPAQAGATCP

SEQ ID NO: 80759 - protein, 414 aa, unidentified
MNGMKAKFAAYIGLDWADKKHDLCVQIGDIDERNYYVIEHTPEAIEQYLLDLHKRVKGNIAVVLELNKGPVVYALQKYPFVTVYPVHGLTLARYRQAMFPSGAKDDPSDAELALDMMLHYPKKVKPLKPSSNDTRTLNHLVEQRRTLIDDKRRHVNRLINALKQYYPQPLGWFSHRDSELFCDFLIKWPSLQSVKRARATSVEKFFKSYGGNAVSNTAKRLEAIKTSLPLTEDEAVIIPHQMLVVALCKQIITQIENIRVFDKAIYELFHKMPDAELFETLPGTGPCLAPRLMAALGEDRTRFNSAQEIQNYAGLSPVTERSGQSCWVHWRWQCSKFVRQSFIEWAAKSVQQSYWAGLYYANQRAKGKSHQQAVRALAYKWVRIVFKCWKTRTPYDESKYLKALKERNSPLLAA

SEQ ID NO: 80760 - protein, 331 aa, unidentified
MFPVGIDVSKNTLDLCMLYDGIKGRIKTRNIQNNRHSVENILRWLRLQHCSPEDVHVVMEATGVYHERLATELHDAGFQVSLANPHRSREFARGMGIMTKTDKVDAYMLACYAFLKKPHRWEPPAPEIRYLGALLRRRDVLLGDALREENRLEKYLSTDTPADIISSCRRMAQLLREEISNIERQIKAHIKASPALRRDYTLLTSIKSVGPQLGMHMLVVLRSHNFVSAEQAAAFLGVVPIEKRSGTSVRRRPRMSKIGPPQLRAKLYMSALCGKIYNKRMRNIYDEMCLRGKPKMVAIGALMRKLVHWCYGVLKTGTVFNDEDLKPVLST

SEQ ID NO: 80761 - protein, 357 aa, unidentified
MEKYLKQSLGIDVSKLNLSLSLGSLNKKLVKEFESHPDVSNDLKGYKVLLKWLKASVDPNVELLVVMEATGVYHQGIVHFLYEQGYNVCVMQSGRVKRYAQSLDQRSKTDALDSRMLSMLGLERNIRLWHPPSEELQELKELSRERSSLLNDRTMETNRQGAIASSVHNNARALKRHKIRLKLLNTQIAAVEEDMRLLISKNKVLKRKLDYLISIPGISFISAATVIGETLGFESIVNAKQLASYAGYDVVLRESGNFKGKTRISKKGNSHIRAVLHMPSMTCVRCNPTLKQFYNRLKPNKANPLVALVAVQRKLLILMYTLWKNEENYDAKFEIKKQQKHEALAARDNSLINQPVS

SEQ ID NO: 80762 - protein, 339 aa, unidentified
MRLYTGFDLHSTSSYVGIIDEDGKKIWKKKLRNEPKLILAALRKFKNHIDGVVVESTYNWYWAVDLLIEEGYQVHLANPSRIQQYSGLKHADDEHDAFWLAEMLRLKILPEGYIYPKEQRPLRDLLRKRGHFVKLRTSLITSLQNILARNIGTKMSTNQLKTLTTDHVAPLLAGNDDLSLSGKVSKDAIDFLTKQIIAIETVVQKKLPLKKPYDLLLSISGVGKVLALTIMMETGPIDRFPKAGNYVSYCRKVPAARYSNEKKKGTGNRKNGNKYLSWAYAEAAEFARRFDPKARSYYDRKRKSTNAPVAYNALANKLSRAAYYIMKDRVLFMPERIFT

SEQ ID NO: 80763 - protein, 394 aa, unidentified
MEVVYPRCCGLDVHKKSISACIVIREQSKPERLERRFGTYTGQLEELAEWLEQHQVTHVAMEATGVYWKPVWNVLEGRLALLLVNPQHIKALSGKKFDRGDASHLADLLQHGLLQGSFVPSAAIRQLRDLTRNRARTVQETVRIHNRIHKILEEANIKLGSVASDVLGVSGRMMLDQLVAGESDPVKLADLALGKLRRKREQLEQALAGKVTDHHRRMLDKLLRALRTREAEIAEDEADIRRQIAPFAKAVKAWMQQPGIEEITAWSLVAEMGADMAPFDTAEQAASWSCVCPGNHQSAGKQSDGRTRKGNPWLRHAICEAAWGASRTKKSYFHAQYNRLCARRGPQRALLAVAHSMIVVGFYLVKYDLLFKDLGADFFDRQHRERTRNRAVKS

SEQ ID NO: 80764 - protein, 424 aa, unidentified
MKSTRNAATNQRIERITREHVVVGIDIAKEAHVAQLTDYRGRTLTSRPLSFRNEREGFERLLRWVKDAQAKHRLPRLLVGLEPTGHYWFNLARWLLQQGIEVVLVNPVTTHRNKENRDNSPSKNDAKDALTIADVVSRGYYTDYSPPAPQFARLKAIMSDREFWVKQATSYGNRIVRWIDLYFPEFRRVFPDWTVLRSLASLHAFPLPSDLGELSVDEVIAGWRKQGMKRAGGISGKAKAAALLAAAARSMGDSRAPEEARRDVQRLLAAYEQTVQLLEAMQQEIETLLEAIPMARQLRSIHGLGSIALAAILGFGGDLSHYAHGRQLLRRAGLNLAECTSGTFKGQIKLSKRGDSALRKYLYLGMISLVRQHPDFKHWHEHNVAKGMKKQASIFKLIGKLARILIGMVQRGETYRGEQARLAA

SEQ ID NO: 80765 - protein, 391 aa, unidentified
MIYIGIDVAKDKHDCFLTNSDGEVLCNPFTISNNHEGFETLFQQIQSVSDDLIKVKVGLEATGHYSYNLLGFLLDKGLPTYIINPLHSNLYRKSLSLRKTKTDKVDAHIIASMLMSNANLKPYSNISYHNEELKSLTRYRFDKVRERAKLKNSISRLVCILFPELEKMVSKLHLSSIYALLSEFPSARAIASAHLTKLSNLLSENSKGRYGKETAIRFREAARNSIGAYIPAKSLELKHTIKLIGELSAEIAEIESEIKSIMDKINSPILTIPGISYGMGAMILAEIGDFNRFNSPDKVLAYAGMSPSTYQSGQLNNCHSHMEKRGSRYLRYALYNSAKYVCHWDESFGAYLAKKRAEGKHYNVALSHAAKKLVRLIYAMEKSGEVYHSAI

SEQ ID NO: 80766 - protein, 345 aa, unidentified
MEIRTIGVDLGKTVFHFVAVNARGEVVVRRKGSRTQLLRFTANLPQCLIGMEACGGSHFLGRALREQGHDVRLMPAQYVKPYVKTNKNDYIDAEACAEAVTRPTMRFVPIKTDDQLDLQSLHRVRERWVVRRTAVINQMRGMLLERGITIRKGRHYIEESLPSILEDADNKLSGALRVLLTQLRMEMQYLHGQIEETDKLIARICGELEQCRRLVAIPGIGPITATATVAAIGNGAAFKKGRGFSAWLGVVPGEHSTGGKQKLTGTSRRGNKYLRKLFVQGAHTVLLQKTKQSSGLSMWLVNLTARKRPQVATVALANKMARMAWVLLAKGEAYRPPTAPQVIAA

SEQ ID NO: 80767 - protein, 369 aa, unidentified
MGKHSEVFVAFDVAKKKHAVAIAEAGRTGEVRFLGDVENAPLPIERTIKRLANRYGRLHVCFEAGPTGYGLHRQVQALGHDCMVVAPALIPKRSGERVKTNRRDAVTLARLHRAGELTGVWAPDAAHEAVRDLVRAREAAADDLRRKHQQLLSFLLRHSRIYRGGGHWTLAHRRWLAGQKFEHAAQQIVFQEGIDTIEDALQRLRRLEKQLAVIVPEWSMAPVVEAYQAMRGASFLVAVTFAAEIGDVRRFDTPRQLMSFLGLVPAESSTGDTIRRKGLTLAGNRRARRALVEAAWTYRYPARVSETLRARLEGLPKPVRDIAWKAQVRLCARYRRLSAMGKKLPIVVAAIAREMAAFLWAIGREVAPV

SEQ ID NO: 80768 - protein, 339 aa, unidentified
MKVTTFGLDLAKRVFQLHWVDMETGEICRRQLKRGEVAEFFANRAPAVVAMEACGSAHYWARKLAAMGHEVKLIAAQFVRPFVKSNKTDAADAQAIWEAVQRPGMKFVAVKSEGQQSVLTLHRIREQLVKMRTMQINQLRGLLYEFGADLPAGRQKGMARIPVELAKLEPTLPAMVIETIRSQLQRLAGLDKDIAETEKKLSAWKKENAASKKLMQIPGVGLLTATAAVATIGDAKAFKSGREFAAFVGLVPRQSGTGGRVKLLGISKRGDVYLRTLLIHGARSVVTHQKGHEPWLDKLLARRPFNAACVALANKMARTIWALLAHDRTYQKGYVANVA

SEQ ID NO: 80769 - protein, 346 aa, unidentified
MMIIGCDYHPSWQQIAWVDTETGETGERKLMHGDGEAERFYRQLAKPALVGMEATGNSHWFVDLAAGMGHQILIGDAAAIRAKQVRKQKTDRRDAAHILDLLLKNDFPRIWTPSVEQRDQRQLLIHRWGLVRLRVRAKNELQHLALNQGVQKKSRLWSKAGQKLLRELPLPYWAGQRRENLLRLMTIFDEQIAVLDQAAEKAARESEMARLLMTQPGVGPITSLAFVLTLGDITRFPRGKQVASYLGLIPRECTTGGRQRLGAISKQGNGFLRMLLVEASHSAIRCDPEFRKYYLHLCHKKPKHVARVAVARKLAIRLYWMLRTRTAYPEIVRMESSSQVALVGAS

SEQ ID NO: 80770 - protein, 467 aa, unidentified
MPIGDSSSTINVGMVLASHRGLCQALRAIGRTLNRKYRREPRRNTFSEVNPMDGEVYYERCAGIDVHKKLLVVCLRIGRKSEVREFGALTHEIREIVAWLKTNGCQMAAMESTGSFWKPLYNIFEQEGLPAMVCNAHHIKNVPGRKTDVGDAQWIAKCLSQGLLNPSFVPDREQRELRDMTRFRKSQIEERARNINRLQKFLEGANVKLGSWLSDIEGKSATALLELVIGKPDFTVDEVAARMHGNMKSSAEELFLSLEGSITPSQREFFAHVISVIREQTAQIEKTDTMISRSLGANYKAAVEALDAIPGIGRISAEQIIAETSIDMCRFKNQHSLSKWAGVCPGNNESAGKRKSSKTPPGNKTLKTTLTQCAKAAAKCKHSFFSAQYSRLVSHRGKNRATMAVAHSLLIAIFFVLSGSPYKDLGADYYTQFNREKKINSHVKQLSKLGIIIPGDFLRLAFQPPDG

SEQ ID NO: 80771 - protein, 355 aa, unidentified
MTVTIVEEARPVTCRAAVTGGVDTHADTHVAAALDPVGGLLGVAEFPATTAGYARLLGWLGGFGTVCLVGIEGTGSYGAGLARYVTATGIRVVEVDRSDRQDRRRQGKSDPLDAVSAARAAQSGRASGAPKGRDGAVEAIRALMVARRSAAGERTRTINQARALVLTGPDDLRARFAKHKPAALITGLAALRPRPGDVAGHATRIALRELGRRAQFLDGQLVRLDELIVPLVTARAPGLLAVYGAGPRTAALLLIAAGDHPERLRSEAAWAHLCGVAPIPASSGKVTRHRLNPGGDRQANHALWRIVFTRLGSDAAARAYAERRTAEGKSKAEIIRCLKRYVAREVYRQLRPAVG

SEQ ID NO: 80772 - protein, 401 aa, unidentified
MKTVFGIDVSKSTSNVAILVDSKAVKQFKIDNDLIGFGRLESDLNSFINPEVVFEATGIYSRRLAFYLQTHHFPYTQLNPLQASKEMDGLRKNKTDKNDALHLAETQFRLHRQKTLLQDPIYSELMDESRFYQEEISDFVQEKNRLHRILQITFPELTTLMSAPTGIVYWNIVKKFPIPSKVRKYGIDQLTQIIYDFSNHNISVGDAKKIALKLTDISKIAVSTVSPNSLTLQQVKHHADRLMNIDKMKKRIIRSMEKLAVKLPEYQSILSIPGFSTVTTVSLIAELGDIRRFSTTNQINAFVGIDLRHYESGNYTASDRISKRGNPYARKILYQAVIDMVSISRYQPTHINDFYQKKKQPSQHGTKKIAVASMSRLIRTIYHLVIKNETYDYKIASQAVL

SEQ ID NO: 80773 - protein, 590 aa, unidentified
MNGQIPYEAKFERAIRDVYARTECGPEDTATSERPDVTDVISHRSRNWFGFDCAGAFATIASASGNRGRPTSGVAEPVSERGPGSGGRISGDTRGDTRRDPVWEIALRTASLFPDAPVSMKEHPMRHNRRRSRHPSRHSPTQLTCLNPDVAGIDCGAAEHYVAVPPDRDPQPVHAFSTFTDGLQRLAGWLTACRVKSVAMEATGVYWIPLYELLEARGFDVVLVNARHLKNVPGRKSDVSDAEWIRDLHSVGLLRGSFRPTAAIATLRAYLRHRQTLVESAGIYTQRMQKALVQMNLQLTQVVSDITGVTGLRILRDIVAGQHDPQRLATHRDYRCQASPAEIVAALTGHYRPEHLFVLQQNLELFDACQRQLAACDTAIEAQLALLTAPIARPATPVPPSRTARKPRDNQPGFEIRRPLHHLTGGVDLTQIDGIAPYTALKLVSELGTDMTRWPTEQHFTSWLTLAPKNKISGGRLLSSRTGPSANRAAATLRFAVMSLSRTRTALGAFYRRLAARIGKPQAVTATARKLAILVYRALKGELTYRDPGADAYDQQQRARVLRSLRKRAATLGFELVNRETGEVLSLATT

SEQ ID NO: 80774 - protein, 417 aa, unidentified
MKKDSNCLKKSEAHAKRRKSGVAVERKPQEVMADLVAKLALQLEEEAVPTAEGEKSELDRVRPNLDRLTVGVDLGDQWSNYCILGLSGETLAEGQFRTRKQEVAEFFQDLATSRVVVEVGTHSAWVREVIAGFGHEVLVANPRLMDGSKRRRRKNDRIDAEKLARLGRMDPKSLHPIQHRSTEVREDLLVLRAREALVESRTKLISAVRGLVKSMGGRVSSCSSVGFSRKAAAEIPEEVRETLQPLLRLIATLSEEIKTYDQRIDKLATEKYMHTQLLRQVTGVGPVTALAYVLTLETPLRFARSRDVGPYLGLVPRQEDSGDSQPQLGISKSGDRMLRKLLVGSAHYILGPFGPDTDLRRFGIRLCERGGKNAKKRATVAVARKLAVLLHRLWVSGEIYEPLGHGTLARTEHDVAA

SEQ ID NO: 80775 - protein, 367 aa, unidentified
MKKVSTAATKQSKNFSEQKLTIGLDLGDRSSWYCVLDEGGAIVLEQKLGTTPKAMKEMFGALPRCRIALETGMHSPWVSRLLSALGHEVIVAHARKVRLIGESRKKDDRLDAQTLARLARIDPGLLSPVKHRSAKAQADLTVIRARAGLVRARTALVNTARGLAKSYGERLRGCNVRNMNPEKAAALSPELRTALEPLLAGIESLSERIRECNEGIERLAQESYPQVAQLKQVKGVGTLIALTFLLTLEDAHRFRKSRDVGCYLGLQPGRRNSGQSESQMHISKEGDPYLRTLLVQGAHHILGPFGVDSDLRRWGLKLAEHGGKSGKKRAIIAVARKLAVLLHHLWVSGEVYEPLRHGKPRAMPAAA

SEQ ID NO: 80776 - protein, 322 aa, unidentified
MNKYNEIFGVDISKDVFDVYGSKSGHNQFKNAASGFMFFLKNLPKKSLVVMEATGYYHYSLAQFLFKQGVLVSVVNPLSVKRFIQMKLAKVKTDKSDAKAICEYGQINQVPLYSALSDVQSECLQLFRLLDSYLKKRTMTKNKLHGEDVLGIPSKHVYRSLKRNRKHLDTEIASIETKLLSLVKQDQQAQLTLLKSIPGLGVKTALFLIVITDGFTKFETAAQLCSYVGITPTIRQSGSSVRGRSSISKVGNKKLRNLLFLCSFSACKHNKSCREIYERIVNKGKSKKLALIAVSNKLLKQAFAIAKSGNPYDETHVSLLSK

SEQ ID NO: 80777 - protein, 366 aa, unidentified
MGVYVGLDVHSKWSVFVIEQEDGKVIGRGQIPTTPAGLGRLKEEHRLGPGTPVALETGTVAFYVARELTRLGLKAVVIDAYEVRIKAHRPKQKSDRRDAFELCEGLRRGIYRTIVHVPSEEISRLRETLSRRRHFVWVRTGEINAAKRLLRAAGLGHLSKSLGTEAAWERLVVALPVEGELRSYVVQHRAVWRCVQEQIGVLEEALAAQQAPVASRVEQLQSVPGVGPIVALTTVAVFSDVTRFGSCKEASSYGGLVPSGNQSGDRDTHGHITKRGSAALRSMLCEAAHHAARPTHPLNPYFAKLCAKGGYQLAVVAVAHRLCRILFAMLRDGTVFDVSKLGVEEGPFRRTRIRYYRLKAVPAVHG

SEQ ID NO: 80778 - protein, 324 aa, unidentified
MAKRTTICAGIDTGKRKLDVAIDGSSLQLQVDNTAEGHKVLLEWLRRHKVKRIGIEASGGYELPVVTELRRKRFVVVVFQPAQVRAYAKFHLQLAKNDKIDAALIAACTAAVKKIHAAPDPRLQPFAEHLTLIEQIGENIRLYKNRIETCRDPRIQKLWKEEISRLAKRERAELKALVAAIRQHPDLAQRLDLIYSVSGAGMPTAVAVLVRMPEIGTLSREQVAALAGLAPYDDDSGERSGDRHIDGGRKRLRRALYTAALPASFRWNPHLIALYQRLRAAGKVHKSALIACARKLLIFVNTVVARGTPWQNEQPVRATNPAIA

SEQ ID NO: 80779 - protein, 354 aa, unidentified
MIIIGVDFHPEFQQIAFLDSDTGEFQEKRLTHPAEAEEFYRALAATGQKVRAGMEASGHARWFERLLGELQFELWIGDAAEIQSKRARKQKTDRQDAQHILKLLLKDDFPKIWVPSWENRDLRQLLWHRHRMVQARTRIMNQLQAVALNEGLRCKKRLWRGRRQQLESFRLAPWASRRRHDLLELLDRLNPTIAGLSQAIEEEAEICPEARRLMTHPGVGALTALAFVLIIGNTERFQCGKQIASYLGLVPLEKSSGNRRRLGHITKQGSSMLRFLLVEAAQVAVRSLPEWRSHYFRLLMRRGRKTAKVAMARRLAIRLYWMWRQGCDYQQCTSSVRTQDRPEISMVCSRTPSY

SEQ ID NO: 80780 - protein, 428 aa, unidentified
MICAAVERCAGIDVGKRWLSVCILIGPLNGEPRVERRRFGVNVGDLQQLRDWLQREAITHVVMESTGSYWKPIFNVLEDSVKVYLANSQEVKNRKGHKTDDKDGWWLAHLLRHAMIHPSFIPPRAIRQLRDLTRRRERLNGDGTSEKNRVQKILEDANVKLGNVLSDVFGVSGQLMLEALLRGQAKPEEIAQFAKGRTKQNMPAIIAALEGHQMSEHHRRMIRYSLAHMKFIEEQIEEIDRDIAAQIHAAGLDGPWQLLQSVPGVQQRSAAKILAETGADMAQFPTQRDLGSWAGVCPGNNRTAGKNRSSRPTKGNPWLRSALTECSWAAAAKKNCFLKEKFWRITTKHGGQKNSALIAVAHNLLQLVYIVLKTGQPFRDRQAPPLDQGQKERLIRHHVRRLGKLGVRVHSLRAPTGSPQTATVSAID

SEQ ID NO: 80781 - protein, 331 aa, unidentified
MRYIGFDIHKQFIYAVVKDKEGNVLEENRFDNNKEQISQFLINSNPTETKIVMESTGVWEWIYEFLEEQKYNVILANPIRTRAIASAKVKTDKIDASILSDLLRANLVAQSYVPPKEIRILRQLSRQRKTLVKGRTEISNKIHALLAQRGINLPWTTFCKKALLWLKELSKEQPLIKSYLHLRDQFTQEIIKVNAEIFDYAEQDEHAQLLMTIPGIGPRRALELLAEIGEWNRFPDSDKLCCYAGLVPSIRQSGSTLKFGGLIKQANTSIKYVLVEASWNIVRTKESNSLQEFYKKLAKKKGKQKAICATARKLCCVVYAMLRKQQPFMFL

SEQ ID NO: 80782 - protein, 408 aa, unidentified
MKDSRKRFIGLDVHKHYLIAIGVDEELNVVLPVRRVEFSYLEAWMKKTLTRQDEIVLEMTTNTWQLYDELCVHAGSVLVVHPPHVALITRSQVMNDKIAASILARLLAKGLLVGIWVPPQEIRELRGLVAQRKKMTGLVTQAKNRLHAVLQRHHLAPPEGNPFQEAQSAWWLALPLGKFEKVNVQSDLETLRFAESQREQLTLMMEEIASQEEQITRLLQLPGFGVVTAVTVWAAIGNIQRFTDAQHLVGYAGLGTKVHDSGMTTHTGRITKAGRRDLRMALIEAAQVAANSHPHWKAELARLQPRLGRNKAIVAIARKLLVAVWYILAQHKTDRFAEPERVAQKLLKFAYQLGKANRPAGQSAAQFVRQRLDTLHLGSEMTSIAWGTKKPIPLPPSTNKVSDVPHTK

SEQ ID NO: 80783 - protein, 397 aa, unidentified
MYIVGIDIAKRKHEAAVIDGEGTVIIKPFSFTNNCSGYNRLLAMLTKAKLPLDEVSFAMEATGHYWLALFTRLQKEGFRVQVINPVQTNSIRSFYIRQAKTDPRDALLIAEVIRFGHFSESTLHPENIYELRELCRGRHAIVSMQADVKRKVVALLDQVFPEYETAFTNLFGDTSMAILQTCPTPKELSEMPLEELCHLIEVSSHKRFRMAKAQELQALARNSFGFAMAGDVFSTMIRLYAKHLDFLKQQVREMDHKIAEIMDTLDTPITTITGIGPTLGAYILSEIGDISRFSSAAKLAAYAGIDPTMRQSGEYNGVRNRMSKRGSPYLRHAIWLAASSAVLHDPALKLYFQKKRDEGKPYMASVGHACRKMVSIIYAVMRDNKAYTPYIPNEISA

SEQ ID NO: 80784 - protein, 410 aa, unidentified
MRYYLGVDWADKTHAVWVVDEQGTKVASRAVPHTAVGLSEWGRELDEWRAKGIELWAAIERPEGRVVDFLLDHGVVVYPVNPKALDRARDRFRPSAAKSDPFDARVLAEFLRTDHRHLQALPPSSEAAQELKYLTEDYRRHVRQQTRLVNQLTATLKAYYPRALEVSELTTALARQFLQAYPTPVAVTALTAKRWQRWASAHRLSDVRTHELWGILQRPQLPVPDHVVRAKARLMLTLVEELTAVVAAVGQYREAIDAFFAGLPEAQWIRTLPIGNHGVTAPTLWALLGDAPRRWESWQHLQGHAGTVPVTIRSGQQRVVRFRFACDKALRYVVDQVAFLSLGKSEWARAYYDQQRARGHDHHPALRALGAKWLKIIFVMWDRQIPYDEEHHLATMTRQQLRQRGQKKVA

SEQ ID NO: 80785 - protein, 343 aa, unidentified
MQAVTTIGLDIAKSVFQVHGVDGSGKVLVRRQLKRRYVLPFFKKLSPCLVGIEACATSHHWSRELQALGHTVRLMPPAYVKAYLKRQKNDAADAEAICEAVVRPNMRFVETKTAEQQSCLMVHRTRHLFVRQQNAVINSIRAHLAELGIVAPVGRNGVEELLDVVADPNDDRVPEVARDCVTALGAQLRMLKAQILEFDRRIMAWHRSNETSKRLDEIPGVGPALATALVASVADARAFRSGRDFSAWIGLVPKQNSSGGKERLGSITKRGDRYLRSLFTAGALAVIRYAKIHGTKHRPWLTALLARRPTKVAAVALANKIARMAWAMMSKGERYREPAALAR

SEQ ID NO: 80786 - protein, 429 aa, unidentified
MNFRPIAGIDVGKFFSEMAILSPSNEVIARMKIRHDSSTDVERAVELLKKTEKDFDSRPFVVMESTGHYHKILFHSLYKTGFEVSVINPIQTDSIKNIGIRKVKNDKVDARKIALLYRFQELKTTNIPDEDIECLRSLCRQYYKLSDELTAYKNRLMGIVDQLMLNFKDVFPNIFSKAALAVLEKYPAPAHILKANRNKLIALIQKNSRRSLKWATAKYELLNSKAKEFAPLSISNSSNVAMLGVYISMIKTLEENLEKVLKAIRSLIIEDMAKDMPMLALTLELLQSIPGIGLISAVTILAEIGDFSAFSKPGKLVAYFGIDPSVMQSGEFTGTQNKMSKRGSRLLRRVLFTIALANIRTKRDKTACNPVLMEYYKNKCQSKPKKVALGAVMRKLVNYIFAVLRDRKPYELRSPQEHAQMLAAKHTAA

SEQ ID NO: 80787 - protein, 340 aa, unidentified
MNATTYGLDVAKRVFQMYWVDAQTGEVVNRRFGRDELIRFLAQRPAGRVALEACGSGHWWARKIKAVGHEVVLLHAKFIRPFVQTNKTDAADARAIWTAVQQPEMRTVAAKTEDQQAMLSLHRMRALLVKFRTMQVNQLRGLLYEFGATFRAGRVAGLAEIRARMAELEDALPGMMIYSLRDQLKRIDALEQDIDRLEQQIGAWQKQEAACRALAEVPGIGKLTATALVATMGDATTFKSGREFASFLGLVPRQSGTGGKIRLGSISKRGDPYLRTLLIHGARSVMCHAKAPTTWQREIQARRPANVAAVAMAHKMARTAWAILAHGQGYQKDYVSVKPT

SEQ ID NO: 80788 - protein, 321 aa, unidentified
MQYVGIDYHKRYSVLCATDERGQELKRRRINGNSASGFAQFFSELGQESKVVMEACWNWGWLYDLLVQIEQVDEVVLAHPYKTRLIAEAQIKTDRLDAQMLAKLLRCDLIAQSHAPSATTRARKHLLRQRLFWVRLRTMLRNRIHAVLDRQHDLERPQLKNFFSRRGQSWLEQIQLPTHEDQPLLEQNLEVAQLLEAKIKQLDRTIGQSQSAEEKLLESIPGIGPLFSSVIATEIDGIGRFHCAAKLATYAGVVPTTHASGGRVFNGRLLWQCNKWLRWALIEASWSAIQFSGLLRLDLLLRPGPGQKQKHRHPPGGPSHG

SEQ ID NO: 80789 - protein, 416 aa, unidentified
MTDDARWFVGIDWASETHQVCLVDAGGKIVGERGFPHGGAGLAEMCIWLLVTTRAKPTVIAVAIEVPHGPIVETLLERGFLVYAINPKQLDRFRDRFTVAGAKDDRRDAHVLGDSLRTDRHCFRHLTAEDAVIVELREWSRMAEDLQQEHNRLANRVREQLWRYYPQALKISDDLGADWFLELWAAVPTPTKAARVRESSIDRVLKTHRIRRIAAAEVAQVLRQQPLTVAGGTVAAASAHIRAVAARLKLINRQIKEAHRRLDALCGKLAAGEEKAASGQEPEPRDVTILRSLPGVGRIVLATLLAEAAEPVRRRDYHALRTLSGVAPVTKRSGKRCIVIMRQACHMRLRSAVYHWARVAIQHDPLSRCRYAELRKRGHSHGRALRSVADRLLAVACAMLDQQTLFDPGRAEKQAA

SEQ ID NO: 80790 - protein, 347 aa, unidentified
MDHIGIDVHKRESQICILAEGGELIERRIRTEPERFAAVLGGRPQARIVIEASTDSEWVARCLEALGHEVIVADPNFAPMYATRTRKVKTDRRDARALADACVLGAYRRAHRLSDVQRHVRGRLLVRDALVRTRTRYISAIRALLRQQGYRVSSGSAEAFPARVRALALPGPLLSLIAPLLAVMRHLNRQLAYSDETIERVAAYDERVQRLRSVPSVGPVTAAAFVATIDDVQRFQHAHHLEADLGLGPRECSSGDTQRRGPITKAGSGRARWLLIQAAVSILRRRPPEAEALRTWALRIAARRGKHVAVVALARRLAGILYALLRDGTVFTPRQISPPLASAARAV

SEQ ID NO: 80791 - protein, 346 aa, unidentified
MSDIIRIGVDTSKSVFQLHGVDAAELPVLRKKLRRRDMLAFFRRLPATKVGMEACGGTHYWARELTALGHEVKLLPPQHVKPYVRRGKNDRNDADAICEAMSRPRMSFVAIKSADQQAAQMLMTTRERLIASRTQLINTIRGHAAEFGLTAAKGPAHVAPLLLRIAEDKTVPELAKELFALHGQELNRLKIELREIEAKLKVWHRQNELSRRLAEVDAIGPIGGCLLAIKAPDPQVFRGGRDFAAWMGLTPKDHSTAGKMRFGAITRAGDEALRRTLVVGATSVIKQVSKGKGDPSPWLRDLVARKPPKLAAVALANKVARIAWKLMVGGERYDAARAGVVSPTAS

SEQ ID NO: 80792 - protein, 339 aa, unidentified
MHFIGCDLHKQTVTLNVVNQDRRTLASRRFSCSDPEGILQWCRQFLPFTLVVEATASYEWFVQLIEPSAERVVLAHPGKLRIIAESTRKSDKLDAKVLAEFLALDMIPEAHRPSPRQRAHRSLVRQRYYLRKRATSVKNRIRRILCNTNADFPGLFGLRVRRRGSHMPACLSAADRFVLTQLWKEHDFHLEQTDAIEKEIRTWAASAPIPEAQARKLLHTIPGVGEVTVEAFLSEVGDVRRFGSQKKVAAYAGLSPGQRESAGKVKELNITHRGSRLLRWALNQASWQRVRRDLRWRKIFEGLAKRRGKKRAITAISRRLLCVMVSMVQRGQAYRLSPT

SEQ ID NO: 80793 - protein, 355 aa, unidentified
MERYLGLDVHAASCTLAVISQTGKRLKDFPVETNGQTLVEAIRMIPGRKHLVFEEGLQSAWLYETLSPHVDEIVVAGITESRGAKSDKRDAYGLAEKLRVGNLEKHVFKAPRQFTQLREFSRTHMTLVGDVIRTQARIKSVYRSRGVLVAGVDVYSPRRRKEWLDQLPSTTRARATRLYDQLDFLLDQKKQAEADLLREAKKHPIVVTLETAPGFGPIRAARLVPIVITPHRFRTKRQFWSYCGLGLVTRSSSDWVQTTDGAWIKSRVPMTRGLSRHHNHFLKSIFKGAATTVITQRNKDPIHARYERLLDGGTKPTLAKLSLARMIAATVLRMWKNEEEYDPGRAGLPTQTRKG

SEQ ID NO: 80794 - protein, 387 aa, unidentified
MPQLNDQSRSHTALKPDSTLIAVLEMSQSAWLVAGLVPGIERHPLKKIEPDEAALLRLLRRWQEEATKAGHPITRITLAFEAGRDGFWLARWLRAHGIEAHVIHPTSVAVSREHRRAKTDRLDTALLKRAFLGWLRGEQGHCSMAEIPTLEEEDAKRPTREREGLVRERTRLVNRIKGALARLGIRGFKPTLRHAPERLSALRLPEGAPLPPNTLAELRRDMARLRFVLDQIREIEAARLEQLEQHPEEGTHTMVRVLARILGVGIETADMLVHEVLSRNLRDRRAVARYAGLTGAPDESGRRRREKGLAKAGNARVRRGMIPLAWRFLRFQPESALTRWYRARTADARGTTRKTMIVALARKLLIGLWRLVRSGKPLEGVVLRPAA

SEQ ID NO: 80795 - protein, 442 aa, unidentified
MRLLNANANEHPLRIKLSAHIRTGIIMEPQRNKVCGIDVHKRFLIATILSRDGKKDSQRFSVTLEDLLKFRDWVIENGCEQVAIESTGIYWHPVHAVLEGKIDLIVANAYKIKHTPGRKTDVSDSEWIAELCLNGMIEPSRIFPKDDRELRRLTRAREGYVKQMTQEKNKVHQSLDSACIKLASVISDIFGKSGMYLLNCVLDGRDIDEIIEGIPSGRLKKKADQIKESIKSRLEISQVILIRGSLNLMRSIRERIDELDGEISARIQYRKNDLAIAMSMPGMGFVSATAILAEIGNCTDFKKPEQLAAWCGLVPSLYQSAEKAILGGITKQGSKHIRRMLIQVAYAISRTKDSKLKKFFLRIQAKKGSKVAAVALARKVLCILHHLLTNQEMYFEDRDTKNKRRKALTPPSPIDIPIQEMIDYVVRAGYVVTKSDSRGGFG

SEQ ID NO: 80796 - protein, 376 aa, unidentified
MSTIRFLGLDVHADTIAVAVAEPNGEVRSIGVIPNRLESIRKAVAKLGPVKHLKACYEAGPTGYVLYWQLTQLGVWCEVIAPSLVPVKAGDRVKTDRRDAEKLARCYRNGDLTAVWVPDAAHEALRDLVRTREDARQDQQRARQRLGKFLLRHGAQPPADIKKKWTAKYMTWMHDHVHFEQPALQAAVTDYVHEVQHAGERIARLEEAIDKAVASAPEQIRHVIAALQALRGVAQMTAVTIVAETGSLSRFQNPRQLMSYSGLVSREYSSGNRIQRGGITKTGNAHLRRVLVEAAWAYQHKPWVGGLLLKRQQGLEQKIKDIAWKAQWRLCTRYKKLAANGKNKPQVVTAIARELLGFMWAIAAELEPQPQQQNAA

SEQ ID NO: 80797 - protein, 461 aa, unidentified
MSSKKPEGKRHKSVSTKMEWKALEVVHPDAAGIDIGGSEHWVAVSPERDPEPVRCFGCFTADLREMARWLVVKGVRSVAMQSTGVYGMPAFEVLQQHGLEVFLVNARHTKNVPGRKSDVQECQWLLKLHSFGLLNNSFQPSDEIRIARTLWRQRGNLVAEASSVIQRMQKVLIEMNIQLSTVLSDISGLSGMSIIGAILAGERDPWTLAALVEPEVKATPEEIAKGLEGNWRKELLFVLRQEVELYRIYQNKIRNCDRELRKHLQSFASVVDLKKQPIGPQPKHKKVAKNAPSFDLRSELYRITGIDWSQVNGINVLTAQTVIAECGADLSGFPSEQQFTSWLGLVPTNEQSGGKILKRRTRKVVNRAATAFRQAATTLLRSQSYLGAQYRRLRTRFGAPKAITAMARKLACLFYRLIKHGQQYVDKGNEYYEAKYRDQQIRALAKRAQKLGVQVVLPALA

SEQ ID NO: 80798 - protein, 312 aa, unidentified
MQVTTIGLDIAKNVFQVHAIDAAEKVVVRKQLRRSQVLEFFKALPACLVGMEACATAHYWARELTKLGHQVRLMPAKDVKAYVKRNKNDAADAEAICEAVRRPTMRFVQVKSAEQQGRLMQHRTRDLLMRQRTQLINALRAHLAELGIVAAQGNAGLKELLKIIAAERDARLPAEAHMSLVVLAAGLHTVQTMIGSIDKRIMIEHRSNEASKRLRSIPGIGIVGASAIVATVADPMAFRSGRDFAAWIGLVPRQDSTGGKQKLGPISKQGDRYVRRILAVGAHAVLRHAKQNPENIPGSHNCWRDDPSRSWR

SEQ ID NO: 80799 - protein, 470 aa, unidentified
MCFDLTTHSQMLSFEDCTIRVVQDQSPNPFVRNIDQENQTMNHSDLKTIEFAAYIGLDWADQKHDICLQENHSHRVESLRLDHKPDAISNWAAELRQRFQGRPLAVALEQKRGALLYALMRFEFIVLYPINPKSLASYRDAFTTSGAKDDPVDALLLMEMVRLHRDKFQPWIPDDPLTREICLLVEYRRRLVDDRTRLTNRLIALLKQYFPQALNWAGKLGCLPAVDFLTQWPQLETIQRASSAEVQDFYRQHGFRLGKKIQTRLDEIKAARPLTTDQAVIAASASMMRALLGPLRGVITGIEALDQQIEACYEQHPDRQIFDSLPGAGPALAPRLLAAFGADRERYRSAEEMQCFSGIAPVTKRSGKTTFVQRRLACPKFVRQSFHEFAKSSICRSSWARAYYDQQRQRGNKFHEAVRALAYKWIRVIYQCWRQRVPYNETVYLARLELHGSLLAKLVSSNGCKNQELS

SEQ ID NO: 80800 - protein, 351 aa, unidentified
MMIIGVDYHPGFQQIAFLVEETGECGERRLNHSDGEAEKFYRDLKVRGISIRVGMETTGFSRWFERLLAELGFEVWIGDAAEIKTRRAKKQKTDRQDAQLLLKLLMEDRFPRIWIPNPENRDLRQLLWHRHRLVQMRTRIMNQLQALAMNENRCWKKKLWSEQGRTELEKLPLAFWASRRRQELLELLDRMNPTIEELTAAAALEAKKRPEALRLMTHPGVGPLTALAFVLIIGTPERFGCAKQICNYVGLIPSEDSSGGRQRLGHLTKQGSSLLRFLLVEAAQAAVRCNADWRRRYRHLAMRRQRNIAKVAMGRRLGARLYWMWRNGREYSPSLEFGSHAGELGTGNGGQ

SEQ ID NO: 80801 - protein, 447 aa, unidentified
MAQRKRPTTQSAISLTHPNAAGIDIGSAAHFVAVPPDRDDEPVREFASFTTDLHRLADWLDACGVDTVAMESTGVYWIPLYELLESRSFSVLLVNARHVKNVSGRKSDVLDCQWLQQLMSFGLLRGAFRPAEQVCVLRSLSRQRTMLLRSQGRFVQHMQKALTQMNIQLANVISDVAGETGQKILRAIVAGERDGQALAQLKNARIRASKDEIAKSLQGSWRAEHLFALKQALDAFDFCGTQLAECDAQVQAQLQALHVREDAPAKGKKRGRSRNAPKFDLRTQLFQMCGVDLTRIDGIDVTTALVVVSEVGADMGKFPSDKHFASWLGLCPGTKITGGKVMSGKTKRCANRAAQALRLAAAALRSSQSALGAYYRRMCARMDKPKAVTAAAHKLARLIYAMLTHGQEYTDRGQDYFEERYRQRVLHNLAQKAKAMGMQLVPSDNAA

SEQ ID NO: 80802 - protein, 488 aa, unidentified
MSFELEEVGAGQALVPPFRLNFVRPRRPFKPVRRSAEPQFDNAQVPGPRSQGVYHMTRYVGIDLHKHLIVGHVLDAAGTKVDTFRYESVDAATLEHIGRKRLRPEDEVVLEATTNCWAVVRALEPFVARVAVSNPMATKAIAKAKVKTDKVDAAVLAHLLRLGYLPEVWQPDPATRGLREWTIRRSRIVGQRTTAINRLRSTLAQRLLHCPYDMSSPVARDWIANQTIDEDTRWLLESDLRLMDSMQAELDAMDQLLAQRGYVDPRVKLLMTLPGISQHSGQSLLAAIGDITRFRDADSLASYLGLVPSTRQSASHCYHGPITKQGRSHTRWMLIQAAQAVRLHPGPLGHFFRRLKRRKPYNVAVVAVAHKLVLLAWHVLTKQEPYRYAVPQATENKLRRLRIQATGQKRPTGSAPGTKKSPARFPGGSQRIKPLAEVYANEQVPAARPAPAGELRHLDELELKDFTDSLQHEQIVPRRRRKNAASSG

SEQ ID NO: 80803 - protein, 461 aa, unidentified
MTPIQKPAGKKARSRRAKKPKTTTAQPFIHPHAAGIDVGSTELYVAVPADADPEPVRTFATFTEDLHALADWLMRCGIQTVALESTGVYWIAIFQILEARGLEVYLVNARHVKNVPGRKTDVSDCQWLQYLHAVGLLRASFRPPAEVCALRTYWRQRDTFIRYASSHVQHMQKALTQMNIQLANVISDLSGKTGLAIVDAILAGERDPQKLAALRDPRTKADPQTIAKSLVGDWKEEHLFTLRQARATYTHYQQMIVECDTQIALRLRGFESRVDVAAQPLPKKAYGPRRNEPAFDLRSELYRILGVDLTEIPGLQVTTAAAFLSEVGASVERFASAKHFASWLGLCPDNRITGGRILRAATRKVKSRTAYALRMAAQSLHHSQTALGDYFRRMKAKLGAPAAITAAAHKLARILFHLIKHRCPYDASVFAKEEELHRQRREKNLRKQAALFGYQLTPTPV

SEQ ID NO: 80804 - protein, 407 aa, unidentified
MEVLHPVCCGVDVHKDLVVACLRVQQARGRAKVEVRKFGTTTGELLRLHAWLSEAGATHVAMESTSVYWKPVFNMLEGSVEVVLANAHHLKAVPGRKTDVKDCEWLADLLAHGLIRGSFIPPAPIRELRELTRHRKNLVRNRVDEVNRIQKLLETANIKLGSVVSDVLGVSGRTMLRALVAGERDPMVLAKLAKGSLIPKVTKLAEALRGRFTDHHAFLLGQLLRHVEHLDEFISVCDERISRLAMPYAAELTRLQTIPGIKARASQALISEIGVDMSRFPTAGHLASWARICPGNHESAGKRRTGSTGTGNNWLRSTLLECAWAASRSRKTYFGAQYRRIVRRRGPKRAVTAVAHSILVAAYHVLRSGVAHRELGPDYFDRIQTAKLTRYHLRRLAELGYPVAPAA

SEQ ID NO: 80805 - protein, 326 aa, unidentified
MSRIKGKATTNQTPSEAVMVGVGVRKTWLDVFLHPMGERVRVGNDATGIGKLLTCCLAHSAGLVVMEATGRYHRAAHTALHEPGISVALVNPYCTRRFADVLGCLAKTDEIDAEVLARFATIMKPAPTEPSSATMARIREIVVARRQVINERFVLENQCAEATSDIVKDLLTERIALCRRHCDLLDAELQAGLKADPQIARRYAILTSIPGIGPTTAATLLAEMKELGSANAGEVAALAGLAPMNRDSGMMRGRKTIRGGRVLARNTLYMASVSAVRWNRDFKAFYERLRRAGKPFKVAITAVMRKLLILANTLLKEGRAWSATPP

SEQ ID NO: 80806 - protein, 401 aa, unidentified
MQQRLWAGIDAGKTAHHCMVVDADGQRVLSRRIDNDESALLELIRAVTSLAEGGHLTWAIDLNAGGAALLITLLLAHDQELLYIPGRTVHHAAGSYRGDGKTDAKDATIIADQARMRRDLHPLRRGDELAAELRILTSRRSDLSADRTRTINRLRERLGEYFPALERAFDYSNNQAALILLTGYQTPAALRRIGTARLETWLQNRHARKVSSVAASAVAAADTQYTVVPGEQLAADLVARLTQEVIDLDAALKEIDVMIEDRFRRHRYAEIIVSLPGFGPRLGAEFLAALGGDIALYDSADRLAGVAGLAPVPRDSGRVSGNLHRPRRFNRRLLRASYLAAQLSIRHDPASKHYYDRKRAEGKRHTQAVLVLARRRNNVLWAMLRDRTHYQQPTGDPATAA

SEQ ID NO: 80807 - protein, 393 aa, unidentified
MICVGIDVAKDKHDCFIFNSEGEILADVFTIPNNAEGFDALLQTIRHCAKPADKIKVGLEATGHYSYNILGFLLDKGLPTYVINPLHTSLYRKSLSLRKTKTDRVDARTIATMLMSDVDLKPYTDTAYHNEELKSLTRYRFDKVKERAKLKQSVSRLVTILFPELEKMVPTLHAASVYAFLSEFPGAKQAARAHLTRLTNLLHVASKGRYGRNMAMGLRDAARCSVGSVMPAKSLELQHTIRLIRELDDEIEDIESAIQAMMEDIQSPITTIPGIGVRMGAMILAEIGDFSRFDSPDKILAYAGMSPSTYQSGQLSLSGAYSHMEKRGSKYLRYALYNATKYVCLWDPTFEAYLAKKRAEGKHYNVALSHATKKLVRLIYALENSRQPYNSVA

SEQ ID NO: 80808 - protein, 452 aa, unidentified
MTKARTGGHPEMKLVNPWAAAVDIGSTMHMAAVSPESSDTPVRAFGTFTQDLHELATWFRSCGVTSVAMESTGVYWIPAFEILEQHGLKVILVNARYAKNVPGRKTDVSDAGWLRQLHSYGLLRGSFRPEAEIATLRSYLRQRERLVEYAAAHIQHMQKALMEMNLQLHHVVSDITGVTGMRIMRALVAGERDPDVLASCRDVRCHASSETIRAALVGSDREEHIFALAQSLDLYDTYQAKIAACDARLETAVSALTVRSESATPLPKPRFRQKPAGAPALDVRAALHGVLGLDLTQIHGIGPSLALKLVAECDTDLTAWPSAKHFTSWLCLAPGNKISGGKLLSSRTRRSSSRAAAILRLAATTVGRSDTALGAFYRRLSSRVGKQKAVTATARKIAVLFYNTLRFGMAYRDPGAAAYDERHRSRVLTNLQRRAKSLGYHLAPMPEPAGVS

SEQ ID NO: 80809 - protein, 346 aa, unidentified
MLHVGLDLSRHRLDYQALAEDGLAVDAGAAPPDADGLRGLADRLADRGEPIRAAIESMNGARFVHDQLELAGWEGQIADALKIKGLAPLACKTDRIDASVLAELSRRDLVPAIWLPDPEVRAERERARWRLHLVRHRSRLKHRVHSTLLAWGRPCPVSDLFGARGRELLARLEVPEPWRANLELAVEMIDSLDREIDAIERGLRRLGAEHRYAALLTTIPGVAWVLGYTIAAEIGEIDRFGSPRKLAGYTGLCPRVHQSGERDRRGPLSKQGPKYLRWALMEAALHACRYPPYAERHARTKRRLGKQRGPKVAQIEIARKLAEAIWHMLTRNQPFAPAGAAPALAA

SEQ ID NO: 80810 - protein, 361 aa, unidentified
MKDTTIAVDLAKSVFQVAVSHKPGRVDAERRLSRDRFLEYLAKQPPATVLLEACGSAHHWARQLQPFGHTVRLLPAHDVHRYVRRNKTDRTDAKALLEADRNEEIHAVPVKTIEQQSIAALHRMRSTWLATRTARINTVRGLLREFGMVIPVGAPHVVPHVRELLATSSHVPDLMRTSLSSACDEIETLEQHMGAVERQLTALARSRDDVKLLQTIPGVGLLTATALVALVGDVRRFHSSREFASFLGLTPKEDSSALRRRLGAISKQGDAYLRMLLIHGARSVLLRAHGAGDATAFQIWARTTQQRRGHNVAAVAVANKLARIVWAVWRHQRPFAADYRSTITTQTATISTHQEDGTELT

SEQ ID NO: 80811 - protein, 397 aa, unidentified
MDAAGRRLAAARLPEGVAGITRLHEMIGAQLGEDAGAGADAGAGEVAIGIETDRGPWVSALVAAGYTVYAVNPLQAARYRERHGVSGAKSDKADAHTLADMVRTDAHQLRPVAADSPQAEAIKVVARAHKTLIWERTRHTLRLRYVLREYFPAALEAFDDLAAPDTLELLAKAPDPASAAKLNRSQIRAALKHARRRDIDMKTTRIQAALRSQQLGRAPVITAAYAATTRSIAAVLATLTEQINTLRGQVETHFGRHPDAEIILSQPGTGVLLGARVLAEFGDAPGRYADAKARKNYAGTSPITRQSGKRKITHARFVHNDRLVDALMSQAQSALLASPGARAYYDKQRARGLDHHAALRQLANRLVGILHGCLKTRTLYDEATAWSHHNQDQRTAA

SEQ ID NO: 80812 - protein, 331 aa, unidentified
MRKVVIGIDVSKVTLDAYWVNAENLKEHYHDSFLNKLLGFKQLIEWVKYKGTDEVFYCIENTGHYGRSLCSFLQKNSFDFAQVNAAEIKLSMGIKREKSDRSDALMIAHYGIKFPERMYTNTLLAEDLLGLQLLLSQRKLLQEKELAFQRSLKLSKHCLPSDQVARSLVKDNTRHRKYLHRERGKIESRIEDYVSSLPVVKSNYDLLKSIPGVGPIIALHTIVQTHNFKEISCPRKFSCYCGVAPFKNESGTSIRKGTRVRFYGHKVLKRILNFGAMNAVKCDPQLKVYYKRKVAEGKSKMSVLNAVRNKLIHRMFATVKRGTPYVVHEMH

SEQ ID NO: 80813 - protein, 396 aa, unidentified
MQTRLHVAIDVGSQQHRVAIGWEEGEPIEEFDCAHTPAGMNDFFNRIRKHEDSHHAEVCVAMEGYGGYARPLDSRILAQGWRLYAINNLKFVRFKEIFPAPAKTDAIDAKRMLQLMQLREHIPMASAVLQEVAPVDPLHQQIKALTRRRKQLVAERMKISQRMQAELQGVAPGLLAITGQADNLWFLNFLTCRTDLGKLKTVKRATLLKLNGIGVGYAAKIATWQKTAIFAPAIAWIGPMIYADAMRILSLREAIAQLEMQIAELTDQSQIAQRLLSMPGMGSVCTSELAGEIGNIERFKDEASLAVYLGVAPLDRSSGKRIGAKLPRQINPRARDAMINAMAHHMRVVPASRAYYDRKRVEGKTHMQALRALARHMVRILFRMLADNRDYRLPIT

SEQ ID NO: 80814 - protein, 341 aa, unidentified
MKKTSALPTAVGIDVAKATLSVCVVYPDGQERALSIRNIDTDINKKLLPFLSKYTGKVVMESTGHYHWKPALLLSKAGCDVRVVNPLLAKQYTTGNIRKVKSDPADANGLARMARVADNLPHSFSDTPKTLWMRKRLGLLASLNKHVQGINSTLSSAEEAQGIVEGEDSSSVTLIKETVLKLRLMMTKLENECVEETIKDPVLKEKSDLLATVPGLSPFASALFLHWFADDKGTNPKSWIAYAGLDISVRESGTWKGKCRITKRGNAYLRKRLYSSAWGAWMNDPHFKAYYEALKAEKRPHVEILLMLARKIVRIAFMVLKNKTSYDATKCFSVPSTTVTA

SEQ ID NO: 80815 - protein, 391 aa, unidentified
MPRQKRHRRRALSSPSRRGMEATAETYVGLDVHRKIVVATALDGAGRELAQEKFGPEPSELIDFLSQLPGRKHVALEACSMWAPYYDTAASTGAEVTLSNPYKTRLIAEASLKSDKVDSEALARLLRVDSLPTSFAPPPELRALRRLVQDRVFYRRYWTAVANHTYHILIARGLPYEDRVLRLRRKREVLRKFRLPEVDRGLETLRALEDRGKELDREIHRAWLESEEGQLLTTIPGIGELTAMALVAYLCPIERFPTARHAASYVGLVPRSYQSADRQYHGPLKKDCNAFLRWLLVETSWTHRFRQSRGTVAKTARRITRRRGAGKGTIAGAHKLLRIVFAILKERRPYLPHAPEPTAPSQPLQRPRTAASQCVGRATLESPATDRLPAL

SEQ ID NO: 80816 - protein, 356 aa, unidentified
MKKNNKLDFTGQSIFIGLDVHKKSWNVSIHTRYGEYRNFSQPPRAAVLGHYLQHHFPGALYFAVYEAGYCGFWIHDQLLQQGIRCIVVNPADVPTKNKERRGKRDRVDCRKLARSLRNNELEGIYVPPRAKLEDRSLIRTRLSMGRKQSRCKNQIKSMLLFYGIDIPEQREMGHWSRRFLQWIEGIRMERASGDLALKFHLEELYHLRQILAKLNRAILALARTEEYRPWVSLLRTVPGISTLTAMIVLLELGEMARFPSLDQLCTYVGLIPDIQSSGEKEHVGGITQRGHSYLRWLLVEASWVAVRKDPAMMEAFHEYSKRMKKSKAIIRIARKLLNRIRYVLKNQAEYVPCVIE

SEQ ID NO: 80817 - protein, 378 aa, unidentified
MHEVRRFSTMTSGLLELSEWLSTGKCTHVAMEATGVYWKPVWHVLEPGFELVLANAGHIRNVPGRKSDVNDATWIADLLAHGLIRSSFVPPQTIQELRDLTRTRKQLRREIVQHTQRIQRVLEDGNVKLSSVISDILGTSGRRIIRAIVEGESDPGKLADMGHSRLRCTRQELLESLRGRVNSHHRFLLGQHLRMIEELERIVGEFDAQIERALLPFRDEIDRLTTIPGISRLAAEVIVAEIGLNMEQFPTVGHLLSWAGMCPRMDESAGKHRSNRVRKGDVWLKQILVQCAWGAAHSKNTYLNAQFLRLKSRRGPKKAAMAVGGSILTATYYMLKNGTSYNDLGPDYFTRRNEAFVALRLTQRLKELGYKVEIHKVA

SEQ ID NO: 80818 - protein, 523 aa, unidentified
MQLVGRADISFGVIHGRAKRPRAARRSEVVNNSAVGENSVGGRPASARPRSGTRDPERVRGRLPGEPEALAETSNRTTPHEGRNISSIDGRAKGRKHQRKIPDSGATGHWLANRGFGALDWASEKHSVVVVNAQGQVLEDFEIEHSASGWKKFGERIKPYGSIPFAIETSQGAAVEQLLEAGMEVYPLNPKSAQAYRARKAPSGVKDDQLDAWSFADALRVDGQNWKPLRPESPLIKELRLLCRDEVGLIEQRSAFINQLRHALAEYYPTALEAFEDWGSISAWAFLERFPSAQLLEKAGKRQWEKFLHSRHLWRNESGPKRMELFAKATEFCGGEATTRAKSMLALSLVKMLFALEKQLSEYRQRIEALFESHPDHDLFGSLPGAGPKLAPRLFAEIGDDRGRFGGEAQNLQCLAGTAPVTKRSGKHRECHQRWACNKHLRHAVHLFSEHSITRCAWAEIYYKAHRAKDHSHARTLRCLGQRWLKIIHKMWMDRTPYNPELHHLNQIKHGSWVFELKTVNCK

SEQ ID NO: 80819 - protein, 394 aa, unidentified
MKLVGIDVGKNSHHFCVMDKETGEFNVAPSSFSNNKEGFDFLINSLKPYSKKSILIGMEDTGHYHVALLKFLLSNGYTVALINPKTTDLTRKMEGGITKNDKLDTITICDVLDTPERKKQYRITKVDRFDLYEQRQLTRHHHNLKEELNVYCNRLQKSIDLVFPEFNTLFSSKYSIVYMNLLKTFGSAEAIASTDIRTIRKCFEIKGRGNRISLTPEKLKECAKNSIGISSEVETIQIKHLVSQITLIKEQIAEIDKKIEEFSIKNNSPILSIPGISHFSGTSILAELGDIGNYSKPSQIIKFAGVAPYHYESSQYNAQHTGITKKGSKYLRKTLYQIILTVINNNPVFKKYYRLKISQGKGHRCAQGHCIRKLLRIIYHLLETGQSFDPALLR

SEQ ID NO: 80820 - protein, 339 aa, unidentified
MGLYCGIDLHSNNHVVTVIDEADHRLYEKRHPNELAGTLEVLERFRGDLVGVAVESTFNWYWLVDGLMDAGFAVRLVNTTAVQQYSGLKHSDDWHDPFWLAHLMRLGILPVGYIYPKEHRGIRDLARQRMRLVQHRTSHIVSVQNQIWRSSGVRLDAGTIRGKRPSVQWPALADSYVTMSVEATRTVIDTLGAQIEELERTLLSLMKPTPMYRLLNTVVGIGPVLALVIALEIGDIGRFASAGDFASYCRLVDSQRTSNNKKKGEGNRKNGNPYLAWAFMEAAQFAQRYLPDAKRFYERKRRQRHSVLAKKALAHKIARACYRMLREEVPFECKRLFAA

SEQ ID NO: 80821 - protein, 347 aa, unidentified
MTLYIGVDFHPHQQTVSYCNTEHGEVEQISLAHNVELVRRFYKQFPKAVVGIEASCTAAWFEHLMSELGHELQVGNPTLIRARARSRHKSDKRDADLILELLLKGEFPSLWRRSTKSQSVLGQLRFRHQLVKHRTQVCNRLQALAHSAGLPKRGIQTKRARLALMAANFTETQSFERSQLFELLDDLSGRIKVIEKWLEEKAAGDAQVGLLLSHKGIGTLSALVVVHTLGDITRFPSSKEAVAYTGLDPLERSSAGKVRTGSISKDGSAVLRHLLGQAMHVAARFDGELKAFYKRLANRRTKSVAKVATTRKLLIRLFIMLRDGIDYQEFKRRGSAVGMPVLSHGLQ

SEQ ID NO: 80822 - protein, 340 aa, unidentified
MSEITTIGLDLAKHVFQVHGIDAEGAAVVRKQLRRGQVLAFFRKLPRCVVGLEACATAYYWARELCALGHEVRLMPAQYVKAYVKRNKNDAADAEAICEAVGRPTMRFVPVKTANQQAAVLLHRGRERLVRQRTGLVNALRAHLAEFGIIAPQGLRNVGGLIAIVRDETDTRLPGLARQVLTVLAAQVEQLEAAVAALEKQLMAWHRGNPVSQRLATIPGIGPIIATAIAATVTEPGQFRSGREFAAWLGLVPRQNSTGGKNRLGGITKRGNQYLRRLLINGASANLLRSKATNANPWVIGLRRRRPSLVVAVALANKTARIAWAVMQRQENYQRVAVAA

SEQ ID NO: 80823 - protein, 360 aa, unidentified
MSDGSKGRPKITAGLDLGDKYSYLCLIDQESGEVVEEGRLRTTPEALRRRFGSEQPMRIAIEAGTHSPWVSRVLEECGHEVLVANARKLRLIYANKRKTDEVDAENLARLARLDPKLLYPLKHRGEDSQAHMAIIRSRQALVGARTQLVNHVRGAVKSFGARLPKCPARSFHKRASEHIPEALLPALGPILEQIGSLTERIRDYERQLEAISKEHYPETELLRQVEGVGGLTALTFVLTLEDPYRFERSRSVGAYLGLVPATERSGERDPQRRISKEGDQMLRKLLVGSAHYILGPFGSDSDLRRHGEKIASRGSKNSKKRAAVAVARKLAVLLHRLWVTAEVYDPLYNAHRSQEREEAA

SEQ ID NO: 80824 - protein, 310 aa, unidentified
MDIVIDKGCGLDVHKETVVACVMGSGIKQEVRTYGTMTGELQKLKEWLKGLGITHVAMESTGVYWKPIFNVLEDSFEVMLVNARHIKNVPGRKTDVKDCEWICKLLRNGLVNGSFVPDTDIRVLRDLTRYRKKLVETISSEKNRVQKVLEDANIKLSSVVSDTFGVSGSEIIEALLKGELTIEEMSGLTHGRLNKKKEKIREALEGYFTEHHRFMIRTLLDHIKYVEKQIELIDKQTQEKLKPYEEEYTLLQTIPGVKKQGAAAIIAEIGTDMGRFPSEEHLASWAGMSPGNNESAGKKKVDTQPTETSF

SEQ ID NO: 80825 - protein, 352 aa, unidentified
MEKYIGIDVHSESCTIAVMNSAGRQLRQQVVDTQAKVLIEFLKGLAGDRYVCIEEGQLAEWLVETLEPYAKEIAVVQPKAHQGHKSDAADAWALAEQLRVRAKGVYVFKPTRQYRPLREAVRTHGIAVKDMTRAKNRFRSLLRARGVANFDSSIYETEQRSAWIRKLPAAYRRRAEWLGKQIDSRAEAHKIAESWLKEEAEKCPEVERLQTLPGFGPIRAAQVVALVVTPHRFRTTRQFWNYCGLAIVTRASSEWKRGSSRDGWQHVRGNVQTRGLNRNCCSQLKAVFKGAATTVIGKPNPFREHFEQLVANGTKAHLARLTIARRIAAATLAIWKKKEDYDPTKHQSIKPA

SEQ ID NO: 80826 - protein, 342 aa, unidentified
MQITTIGFDLAKNVFQVHGIDVKEKVVARKQLRRGQVIAFFKALPPCLVGMEACATAHYWARELTKLGHEVRLMPAKDVKAYVKRNKNDAADAEAICEAVRRPTMRFVRIKSAEQQGQLMQHRTRDVLIRQRTQIINALRAHLAELGIVAAQGDAGVNELREIVADDRDERLPIDARASVIVLAAQLEALQTLIGSIEKRIKMQHRSNETSQRVETIPGIGVLGATAIVATVPDPKIFRSGRDFAAWIGLVPRQDSTGGKQKLGPISKQGDRYLRRILVVGAIAVLRRAQENPGKYPWLTQLLARRPFKVVAVALANKMARTAWALMVHGGTYRAPELAEAA

SEQ ID NO: 80827 - protein, 354 aa, unidentified
MADTILSIDLGKFRSVCCWYDPETKQCDFATVVTSAFEFRRVLTQRPVMKVVFEAGSPAGWVHDLCCELGLPCLVANTLGAVWAWKNIKRKTDRDDAIKLAKLATINELPTVTVPSKPMRQWKSLVGLRKRLISERVRGQNRIRGLLVSQGWPSLAGARAWTRLGIAGIAQFAKPFSECGPEDFWRGELKTLLTRHESLTNQIDEIETVLDNLGDASPTVQLLLSVPGIGIRTAEIIAVYLGDANRFNNSNEISAYAGLVPRQYQSGETDRRGHITKRGPKVLRSAMVECAWGCLRLNAWARATWERLIANGVGKKKAIVAVARKLLVRCWGMLKAGKSWRNPLSAVVVGPTPG

SEQ ID NO: 80828 - protein, 338 aa, unidentified
MKLYGGIDLHSNNSVIALLDDNDRAVYRKRLPNDLGHVLGQLEPYRDDIQGLVVESTYNWYWLVDGLMDTGYRVHLANTAAVVQYEGLKYGDDDSDARWLAQMLRLGVLPEGYVYPKEERPVRDLLRKRSHLVHQRTSNLQSVQNLLARNRGVSVSANRVKGLAFEEVQRLLGNEDLSLAVNSSLSVMHCLDEHIERIEKTAKQRIKLKPQFSLLLSVSGIGQILGLTIMLETGDIGRFDKVGNYASYCRCVGSERISNGKRKGSGNTKNGNKYLAWAFVEAANFAVRYNPRIKRYYQRKRAKCDGVVAIKTIAHKLARACYYILRDQVPFDQERAFA

SEQ ID NO: 80829 - protein, 413 aa, unidentified
MSVNPEPITTRVCAGLDWAKDDHVVCVLDTDGEVINRFTVAHTAPGLQRLVRRLARLGVTEIGIERGDGPVIEALLATDLVVLVISPNQVKNLRSRYGSAGNKDDRFDAYVLADVVRTDRRRLTPLVRSSPATRALRTSVRARRDLVEHRVAAANQLRAHLQIVLPAPVGLFSELDSSISLSFIERFTTQAKLDWLTPIRMGEWLQRVSYTGHTDPAVLHQRLITAPRGTTGADAEIGAAVTLAYVAVLRVLNTQIEALAATIREQFEAHPDHDLFASLPRSGTLRAARLLAEIGDARGRFPTADSLACLAGVAPSTRQSGKVKAVTFRWSADRDLRDALCDFAGDCRRANAWADDLYNRARARGHDHPHAVRILGRAWADIIWRCWQDRTAYAPDRHNALQRVLNQHTPQAA

SEQ ID NO: 80830 - protein, 360 aa, unidentified
MQVEQSVTNRYVNGGVDTHKDLHVAAVVDEHNRVLGSQCFPTTRHGYKQMLAWMRSFGQLRRVGVEATGTYGAGLLRYLQNAGVEVLEVTTPDSGDRRKRGKNDDLDAQNAAHAAFAGKRTVTPKTRDGMIESLRVLKACRKTAVAARRVALQMIHNTVVCAPDELRDTLRKLTRMELIRTLAAWRPDMTDYRNVASAYRIALKSLARRYLELHDEIADLDAMIAAIVDELAPALVTRNSIGHASAAQLLLTAGDNSERLHSEASFAALCGVSPVPASSGKTTRHRLNRGGDRAANSALHIIAIGRLRTDPRTKSYIAKRIAEGHSKLEAIRCLKRYIAREIFSLISQRRQEINQAQIAT

SEQ ID NO: 80831 - protein, 316 aa, unidentified
MFKNSTTFIGLDLGDKYSHVTIIDRDGELIEESRLPTTKTSFQRKFSTLQPCRVAMEVGAHSRWASHLLRDLGYDVLVANARKLRAIYHNPRKGDRADAEILARLDPALPPDGDLRLSPIHHRSPQAQADLAVLRSRDALVRSRTLLINHARGIVKSTGARLPSCSADSFARKVAPSIPDELQPALLPILDIIASLTQQIKTYDQKVEELCSERYPETKLLRRISGVGPLTALAYILTLENPERFRKIREVGPALGLVPCRDQSGDHDPQLRTLAPALQVQVSRKREMTTFVVCWLDRRNTSWVHLGRIAIYAVGA

SEQ ID NO: 80832 - protein, 371 aa, unidentified
MKKHSTIKFIGLDVHSKTISVAIADEGRKGEVRHYGTIENTFEAIDKVIKSLTETGVELRFIYEAGPCGFALYRYLTGNGFTCIVTAPGLIPKRSGVRIKNDRRDAMTLARLYRAGELTGIYVPEPEDEAVRDLARARDDARVAERKAKQRLNSFLLRHNLIYPGKTKWNRTYFNWLGSVGMKYPAQKVALQEYIEAVNECTGRVARLSEQIGLAVEEWRMAPMVKALQALRGVSLICATVTVAELGDLSRFQNPKELMAYLGLVPSEHSSGETIRRGGITKTGNGHARRVLVEGAWTYKHHARITPPLIKRQRELPKSICQISWKAQLRLCARYRKMVARKKPNNVVVIAIARELAAFMWAIAQEVKAAA

SEQ ID NO: 80833 - protein, 356 aa, unidentified
MQQFIGCDAHKRFSVFVAVDERGRATKPVRVEHSQRHFADFLKQLPAQSEIAVESTGHWYWLVDEMERAGHHVHLANPMEAKKRMGRTHKTDALDAKGLAILLRNGTLPESWIPPGPLRDRRELLRTRMALRDLRSSLKRRIHAAVDRYGLHTDSIADLFGNKGHEYLASRLAEFPPETARMVQIQLDALDELALHLEAIERRIHVEITPGPEVQLLRSVPGVGEILAPVIWLEIGDVLRFPRAENLASYAGLVPRVFSSGGHTRLGGLSRFVNQYLKWAFVEAANCAVRLKSHRHSHIGSLYQRLLARRGHGRAIVAVARHLAEASYWILRKREPYRPPRRKTDFVQERVSARHV

SEQ ID NO: 80834 - protein, 404 aa, unidentified
MKIYHPYVLAIDLGKRKSVALLASRKRKILKKPWTFSRSFRDYQKLVEGLNPKDVLVGFEATAHYWLALHEFLTKKGFEVVVLNPLAVKSFRDTGIRGSKTDKLDAYLILRVLLFSDHIHPLKNLTESISELKNLSRWRGELAFSRASLITKLISILDQVFPEYERILSPKNLASLRLLKKYSTPDEIASLPLPKLTKILAQASRKKEKAEKWAKDLKMEASQTIGQRIGINAFSLEMKIVIERINQTAKQIKLMEKEIERIFSGLPESKYLKSISGIDNITGATILSEIGDITKYIAKDGADNIVALAGLDAKLRQSGEYSGKTKMTKRGSPYLRCALYQSARVAYRYESMFKKIYEKQRAKHKPHMVCLGYVAKKLARIAYSVLVNKKTFDPQIYYQSSSID

SEQ ID NO: 80835 - protein, 370 aa, unidentified
MIGHRTSVGLDVHARSVVGCALDGDTGEVVERRLTPDYQDVLEWLRSLPGRVAVTYEAGPTGFGLARFLIAAGIVCLVAAPSKLQRPSGDRVKTDARDAAHLARLLHLGQIVDVTVPSAEQEAARDLVRAREDCRGDLMSSRHRVSKLLLRQGIIYSGGRTWTGKHETWPRGQRFDAAPLQLAYDTAVDTMLATVDRRNRLDDAIAELAADSAYTPVVTRLGCLRGVSTLTAFGLAAEIGDWERLTGRSIGAYLGLVPTEYSSGTSRSQGPITKTGNGHARRLLIEAAWHHRQPYRPGVDLRRRWDAASPAARARGQQANRRLHTRWCRFDARKKRPVVANTAIARELAGAGHWPSSIPEYRPMIVRTDP

SEQ ID NO: 80836 - protein, 386 aa, unidentified
MKYVGVDVAKNVHYARVASQNNKILPGPFAFNNDMDGFNKFVGAFRKFPKSDIIVGLESTGVYGENLIAFLSEQGYKIALINPIETVAVRRKRIRNAKTDKIDSKNICKYLFQEEYRLLEQKELVAIELRGICRFRQALKKSNARLKAQLVSYLDVVFPEYHTLFSTVHGKGSYAVLSEFATPVSIMNVNVTRLENLLSTASRGKLGRAKADALKSLAKRSIGSKNRDKGLQISLTIAQIRLIEAQIDETENRITQLWNESDSVLKTVPGIGEICGAMILSEIGDISRFGKPDHLIAFAGLDPATKQSGNFRAGSTRMSKRGSPFLRYALVNAAWNVSMNSATFGEYYNLKLSQKGRYYKALGHVAGKLARVIFKMLRDNVAFDLP

SEQ ID NO: 80837 - protein, 318 aa, unidentified
MIFIGIDVSKDVLDGVRVNRAGKPLASFAVPNTAPGIAAFLDGIRDRSQSVTIAAESTGEFHRLIAIACLERGIRFRLLNPIVVKQFTRATVRKKKTDPADALSIAKLALQGEGQLITGTFYPTVTLVSRTANRLGRVAQVLHLMDRRLERHFPAETELRQQIQRLHDATMRTIGTVQEQAIGAADPALRVLLASIPGIGPMIATTLLAEIQDVHRFPDGKTLVAYAGLDPRVRQSGHTLKRNTRLTKRGSPYLRRSLFIAASIAQRHDPELKAYFERKVREGKRYKEATVAVARKLLYRVHAVWKRGTPYVPAKLST

SEQ ID NO: 80838 - protein, 483 aa, unidentified
MNNVISIKGKKKLFCGNSQKLLIVADCAKSEHLVHFFDCISGRYLYKHPIRIKNCLTGFYFLREKYQQVLAKKNLQPQEVNFVLEDPASYSHHFIYFLQKEGFNVLYTNALQASKYRENSRASSDTLDLDGIVRSALMGQIYETDVCGDIYSKIKESHRERCRLVEEHSRHKSLLHNQIDRLFPGFLSQKKSGVAPFSKACINLMRCKNFGPKIFVKAHSKRALKLIEKAGFNEPEKIQQKLCTLANDCLQIEDFESGVIEKRRLRLQTQLDLYRSREECIDIEEHILADLLQNTHYALLLSISGAGLITVSAIAAELGNPLKWPDADRIASYAGIIPRQKQSGGSHKSPLITSPPKSANKYLKNALMTIVRITKDCQHPTYKDLAIVHPLKAHFDKVDLRDGSSYTASAKKLVRIIIAMLRDQTIYLPDIKTVQPQAYRIWLEQGSQKMLKKWRERGISPTENNTLGKWLKDKEKIIVLLDK

SEQ ID NO: 80839 - protein, 395 aa, unidentified
MSKDQCNFLFIILKYGIMNLKYSVGLDVSSKKINACMSCIDEKQKVIVKSSTVISNNKKGFKILQDWVLKHVKENVPVVVCMEATGIYHENCAYYLFEKGFSVSIILPNKAKKYLEAIGLKSKNDSIDAKGLSQMGAEQCLDTWQPMGTFFYELRLYTRQHQNVTELKTVLKNQFDALSFAMHQVDPVTNQLKETIILFDKQLKELEKVINNHIKSDAKIAERVANILEIKGIGILTLATILAETNGFELFNNYKQLVSYAGYDVVEAQSGTRVGKTKISKKGNSRIRRAMHMPSLVVIKCEVKPFKELFERTYNKHGIKMKSYVAVQKKLLTMIYYMWKKKERFEPNYIKSIQEKEQKSFSLFAFEKGIKNSPNKIEAAQGKHPANDHSKFPLC

SEQ ID NO: 80840 - protein, 457 aa, unidentified
MKSFYLGSDVSKGYADFVILDSTKQQVMKNFQLDDTFKGYCRLHDILSQFLMVHPDATLFAAVESTGGYENNWYNALVKFQSTLNIQTARLNPLGVMHNSKADLKRNITDKISAQNIAEYLITHSEKVTYQQQDQMATLRKQWGFIKMLTKQSTQLLNQLESLLYTANTELLGYCKNGTPDWVLKVLLKYPTAAKLARARVLALARIPYVTSERAQELVISAKRSVASASDRITEKLVAATVKQILNLKKTIDEQAELMVKECSIPEADILKTFTGISDSSAIGLIIEIQAIERFKTVKRLSSFFGIHPVYKISGDGSGSFRMSKKGRKEPRKILFMVTLTAIRSNPLIRNIYLERTDKGMEKMAAIGLCMHKILRILYGMLKHGKPFDPQIDLDNRQRSVKKKPAGQRDKSRRFQDYDSNAPISRRQNKKRLERKQSHSVSDTKFGINAPVPELVS

SEQ ID NO: 80841 - protein, 296 aa, unidentified
MIIIGVDYHPEFQQIALLDQDAGELQEKRLSHPGEAEKFYRALAVSQKVRVGMEASGHARWFERLLGELQFELWIGDAAAIQSQRGRKQKTDRQDAEHILKLMLKDDFPRIWVPSGENRDLRQLLWHRHRMVQARTRIMNQLQAVAINEGLRCKKRLWRTGRQQLALLRLAPWASRRRHDLLELLDRLNPTIAELSQAIEQEAAKCAEARRLMTHPGVGALTALAFVLIIGDTERFQCGKQVASYLGLVPLEKSSGNRRRLGHITKQGNSLLRFLLVEAAQVTVRSLPEWRSPPGG

SEQ ID NO: 80842 - protein, 398 aa, unidentified
MLYVGIDVAKYKHDLAVIDSEGEIFIRHLKIANNREGFTQLQMALENLRVSTGQSIQIALEDTGHYSFNILRFLRTNGYPTFSYNPFLIKEFAKSHSLRKTKTDKKDAMTIARKLRDDVDKNLFDADTVMIELKYATRNVHRLKQDCTKQKIHYVRLLYILFPELSTALGSTNALHNRYIYEMLKVFPSPEKLTNAHLTKLTNILNGSSRGKVGKENALDLKKLAASSIGQSSPALEFELLQTIDLIQHLTELREAADKEVEVLMKEIDSPLLSIPGIGVKLGAVILSEIRSIHNFKTPAQLLAFAGSEPSISTSGENQIEKGHMVKRGSSQLRWALHEAARLCAIWSSTMRIYFQKKRNEGKHYNVAISRVVKKLVRILFRILKTGELYKEDKMVVN

SEQ ID NO: 80843 - protein, 326 aa, unidentified
MTDSLNTIDIIGADVSLCEIVFAWARPQKPCLTIANNRKAIVAWLKLLPDHCIIGMEATGRLHHLLADLAVAHGHTVYVVNPKHVASYARGVGQRGKTDPMDAAVIARYVDRERDGLHPYTTPSALQRKLRDLISQRAAVVRHCTALKQSIKATGEGLNRTLKRAHQAALKSLNTLLTEINNELKRTIAADEALENNRKRLQTITGIGFINSAALTHRFDRTPFANSDAVVAAYGMDPRPRDSGNQVGKRRLTKQGNPEDRRLIYLAAQSASKTKLFNPLYKVLLAKGFSTTEAILIIARKLLRIAFAVWTSGKPFDPDKVGRKTC

SEQ ID NO: 80844 - protein, 340 aa, unidentified
MTITTIGIDLAKNVFAVHGVDQNGKTVLVKSRVTRAALPGLIASLPPCVIGMEACSGAYYWARLFLQYGHEPRLMAAKFVSPYRMAGKSGKNDAADAQAICEAVRRPHMRFVPVKDESQQAMQCLHRNRQGFIEEKTATYNRLRGLISEFGVIAPQSTDALRHMVSAQKSSLPLQVQQCVDDLLEHVDRIEANITEYDRILSRIAKTDHRSQRLMKLKGVGPTTACALVACIGNAHDFKNGRQLAAWLGLTPSQYSSGGKSKLGRITKAGDSDLRTLLVQGARSVLIGAEKRTDLFSRWVCSLVERRGYWRAVVAIAAKNARLCWASLHYGDDFRLYSAS

SEQ ID NO: 80845 - protein, 350 aa, unidentified
MEYIAFDAHKHYTVASVERPTGEVLRETRLAHHRGVIRDFLQQWTPGSPVAVETVGNWYWLVDEIEEAGMVPRLVHARKAKLMSGMINKTDKLDVRGLNRLQRTGTLPTVWIPHAEIRDQRDLPRTRMVLVRARTRLKNRIHATLAKYALTVTDVSDLFGKQGRIILSDKLTQLPPHSRFSTEHLLEQLKALDAHIAEFEVRIRKVFKKTPALEWVISLPGVGLILGIVILLEVGDIHRFPDAEHLAAYAGTTPRVSGTGGKIRFGRLRTDVNHYLKWAYTEAAEVICQHRADWSHRHVSQLYTRVRHRKNHQKAIGAVARHLAEATYWILTKRESYQEPKRRSDASMKA

SEQ ID NO: 80846 - protein, 410 aa, unidentified
MTLYCGIDWATAHHDVAVVDDNGNVVARGRVSNDAAGFAQLLTLLAQAGDSAEDPIPVGIETDHGLWVAALRATGRVIYPINPLTASRYRARYAVSGAKSDATDAVLLANIMRTDRQAHRPLPADTELAQAIRVLARAQQDAVWARQQIGNQIRDLLKDFYPAALVAFDRLPEGGLARADARTILAAAPTPAQAAALSPARLRRLLISAGRRRHLDRDVDRLREVFTDTYLHQPPQVETAMGIQLGALLRQLQAACTAADELAEAAIAHFQRHPDAEIITSFPGLGMLAGARVLAEIGDDRARFADARGLKAFAGSAPITRASGKKTVVLHRHIKNRRLAAVGPIWALASLRASPGARRHYDARRATGDWNHQAQRHLFNKFLGQLHHCLHTGNHYDEHLAFPPPLTRAA

SEQ ID NO: 80847 - protein, 350 aa, unidentified
MLYTGIDYHRSFSYLTTMNEKGEILNQKKLPSNGEIVDFLKEFGEEMEVAVEATPSWYWLYDLLEDEGFDVNLSHPLKTKAIAYARVKTDKVDSATLAHLLRSDLLPLSYVPEKTVRLNRELLRYRASLVKIQTGVKNKIHTILAKNNVSHSYTDLFGKAGMALLHSLALVENYKIALEGYLTVLDSLRQEIRTASKKVRQLAEKDPATLLLITIPGMGYYSALLTKSEIGDVRRFRSAKQLCNYAGLVPSTYASGNTCFHGHITKQGSRWLRWILVEAAIHAVKRPGVLRRFYFKIERKKGGQIAKVATARKLLEWIYPILRDGKTYQEVEEIADLLGRGELGNPSGRA

SEQ ID NO: 80848 - protein, 313 aa, unidentified
MPQLSASCFVGVDVAKRSFDLSFGDDRPQRAVLNQPDAIARVVLELRERRPQLIALEATGGYERPLMHALLDAQLPVVRLNPLRVRRFAQSRGLLAKTDAIDARVLADFARLNADRLSPMQPIGETARMLKELVTRRRQLVEQTVASKSQLEHATFKPLRESIDRTIKHLCDEIRQIETLIQEQIENDPTLRDRQKKLLAASGIGPRVSRVLVSELPELGQLNRKKIAALVGVAPFNDDSGTHSGARHIQGGRPTVRAALYMATLVAIRHDAILKARYQHLLARGKPKKVAIVACMRTMLNYLTSLMVREENA

SEQ ID NO: 80849 - protein, 408 aa, unidentified
MKDSRKRYIGLDVHKHYLLAVGVDDELNVVLPVRCVEFSYLESWMKKTLTRQDEVVLEMTTNTWQLYDELSEHAGSVLVVHPPHVALITRSQVMNDKIAASILARLLAKGLLVGIWVPPQEIRELRGLVAQRKKMTGLATQAKNRLHAVLQRHHLVPPEGNPFHASQQRWWLTLPLGALEKVNVQSDLDTLHFAEVQRMHLTSMMEEIASQQEQVTRLLQLPGFGVVTAVTVWAAIGNIQRFRDAQHLVGYAGLGTKVHDSGLTMRTGRITKAGRRDLRMTLIEAAQVAANSHPHWKAELARLQPRLGRNKAIVAIARKLLVAVWYILTQHKTDRFAQPEAIAQKYLKFAYQLGKANRPAGQSAAQFVRQHLDALHLGNELTSIAWGTKKPIPLPPSANKVSDVPNTK

SEQ ID NO: 80850 - protein, 375 aa, unidentified
MIKDSEVFVAFDTSKLRNAVAIAEAGRAGEVRFLGEIENTAGATTKLVRKLEAKYERITFCYEAGPTGYELQRHIRGLGHECIVAAPSLIPKKPGDRVKTNRRDAVSLVKLSRAGELTAVWVPERRHEAMRDLTRAREAAVIDLRAKRQRISALLLRQGRPYPADKKTWTKVHMNWLASQRFEQPELGVVFAEMMFATRQAQERVERLEQAIRTAVPDWSLAEMVTAFMAFRGIDLVSATCLLAELGDLTRFPTAPEVMGYVGLGCSEGSTGDKIKRGGITKSGNRRARRMLVECAWSYQHPPRVSIAKQANVAAAPAKVREIAWKAQCRLNRRYRVLLRRGKLKTVAITAVARELAGFLWAAARELSSPERVAK

SEQ ID NO: 80851 - protein, 354 aa, unidentified
MSQIPNSAIAVIGIDLGKNSFHVVGHDARGAIVLRQKWSRGQVEARLANIPPCLIGMEACVGAHQLSRKLASLGHDARLMPAKYVRPYSKGQKNDFNDAEAIAEAVQRPTMKFVATKTAEQLDLQALHRVRERLVSQRTGIINQIRAFMLERGIAVRQGIGFLRTELPTILATRTDALSPRMLRVIEELAGDWRRLDQRIDGLSGEIEALARQDQACSRLMTVPGIGPIISSAMVAAIGTGDVFSKGRDFGAWLGLVPKQISTGDRTILGKISRRGNRYLRVLFVQAAWVVLVRIKNWERYGLKSWIEAAKRRLHHNVLAIALANKLARIAWAVLAKGRAFELTRTDDAGVRPA

SEQ ID NO: 80852 - protein, 323 aa, unidentified
MADKPTVEFEQAASRCCGLDVHKKEIVATVEGEGLPKETRSFTSTTRSLTELKDWLLELGITHVAMESTGVYWKPVMNILEPGGFTILIVNARHIKYVPGHKTDKKDSAWICKLLRAGLLKGSFVPDQSQRDLRDLTRYRRKLVQNLAAEHNRLIRIFEDANLKLSSVFSDVTGKTCTAVIDNVIDGNTDPEYLASLCTHWRLKSTQEEIALAVEGKFREHHKFMLRAIRRSMEHLTEEIKALDEEIALRMQPFEEEIARLCQIPGISKTSAKDLLAEIGVDMEIFPSAAHLASWAGVSPGNNESAGKKKARIQTTATNRRKR

SEQ ID NO: 80853 - protein, 352 aa, unidentified
MRFYKNQHQFYIGIDLHARTMYVCVINNCGETVFHKNMECSTDNLELVANTFGKDIVIGVECIFTWYWVADFCAERGIDFALGHAYYMKSIHGGKTKSDKIDSEKIANMLRGGMFPTAYAYPKAKRAARDLLRRRLYFVRRRAELSVHLQLTNHQYNINAPLDSSKMRSRAYRDAIPGKFSDPMTLEMVNADLFMFNAYNDIITRLESRIEGCMEVQDPVSYAIINSVPGLGFILSLTILYEIDDINRFPDEGKFISYCRLVKCSHESAGKKESGRHNKIGSVHLKWAFSEGAVLFLRNNELGQKWHDRLVQRYGKARAMSMIAQKLARTVYFMLKRKVPFNAKQFYGLEKT

SEQ ID NO: 80854 - protein, 410 aa, unidentified
MWFAGIDWADAHHDVAVVDEQGRQCGALRVAHSAAGLETLVNYLRGYTARPDAAPHPEQIACIVETTQGLLITALLEASFPVYPVNPKTLQHWRKPSGAKTDQIDAYLLARKGRSDLGELRRLEPDSPLVQELKLLTRDQDALVQTQTRLVNQLTSCLKASFPVALTLFTKLQQRATLVFLQRYPTLEVAEAASVEELTAFLRTLPRFPGPRVAAQRIFIRLHQPHLRADLVTTRVKARLTQALVAQLLPVVEQIAAYDEEIERLFRDHPDATLFLSLPGAGKRLAPRLLAGWGDDWARYASAQSIQGLAGTAPVAFQSGKYRKAHKRYACIKSLRNALYQFAWQSTIAKVAWALDYYQRKRREGKSYSVAVRALVYQWVRLIHAMWRSQRPYDEAIFRAAQEAHARPAA

SEQ ID NO: 80855 - protein, 460 aa, unidentified
MNPKRSKSRNGGKMPMVHPNAAAIDVGATMHMAAVRADRARKPVRSFGTFTADLHRLVDWFTECGVETVVMESTSVYWIPIFELLDARGFTVFLVNARDARHVPGRKTDVSDAQWLQRLHSFGLLRASFRPKGQIAELRAYVRQRERLLEYAASHIQHMQKALTEMNLQLHHVVADITGATGLRIIRAILAGERDSEALACLRHYSCHSSAETIAKALTGSYRAEHLFALEQALALYDAYHEKASACDARIEAVLKELSIHRGHGHGPAPQASRRRNRTDQANALAFDVREALFALLGKDITTIDGLGPYLSLKLIAECSDDLSSWPSAKHFTSWLGLAPSNKVSGGKMLSSRTRRSGGRAAALLRLAAVTVGRIDTALGAFYRRLSARIGKAKAVTATARKIAVLFYNAVRYGMDYVDPGASSYEARYRTRVVNNLHRRAKAFGFVLQPLEPKVGAAVS

SEQ ID NO: 80856 - protein, 351 aa, unidentified
MIIVGCDFHPKWQQVAVFDAETAEIGEHKLMNGDGEAERFYRSLPAPALVGVEACGNSQWFIDLLERLGHQVWIGDAAQIRASYVRRQKTDRRDAAHILRLLMEKRFPRLWVPSAEERDLRQLLIHRHRLVEIRTRIKNGLQHLALNRGMQKQHRLWTLKGMDAFKNLPLKGWSGKRRGDLLHLLEELNVQVATLDAAVNEAATNDRRARLLMTQPGVGPVTALAFAVTIGDVGRFATSGQVASYVGLIPREHSSGGKQRLGAISKQGNRFLRQLLVEAVQTTCRLDEGFRKQYAARCHHKPKGVAKVAAARKLTVRLYWMLKTQTGYPEIARIESSSGVPMVCTNNRWID

SEQ ID NO: 80857 - protein, 397 aa, unidentified
MYIVGIDIAKRKHEAAVIDGEGAVIIKPFSFTNNCSGYNRLLAMLAKAKLPLDEVSFAMEATGHYWLALFTRLQKEGFRVQVINPVQTNSIRSFYIRQAKTDPRDALLIAEVIRFGHFSESTLHPENIYELRELCRGRHAIVSMQADVKRKVVALLDQVFPEYETAFTNLFGDTSMAILQTCPTPKELSEMPLEELCHLIEVSSHKRFRMVKAQELQELARNSFGFAMAGDVFSTMIRLYAKHLVFLKQQVQEMDRKIAEIMDTLDTPITTITGIGPTLGAYILSEIGDISRFSSAAKLAAYAGIDPTMRQSGEYNGVRNRMSKRGSPYLRHAIWLAASSAVLHDPALKLYFQKKRDEGKPYMASVGHACRKMVSIIYAVMRDNKAYTPYIPNEISA

SEQ ID NO: 80858 - protein, 340 aa, unidentified
MTAPNQFYIGIDVSKLHLDAALMVVENHRKGAICTERFENNAAGLKRFDKWLRSAGVTRDEHTLLVIENTGIYHRLIWQFCAQSGIRINIGNAAHIKWSLGITRGKSDKTDSIRLCNYAYKEAEDLKAAPALDPVVLQLKDLVTSRTRLITQRGANRKYLKELKGTNDRQTQQVIEKAHRDAIAGITKSIKAIEAQIRAIVQGSESVARNYKLLLSVPGIGPVTAIYIICCTANFAAKPSGKQLACYGGVAPFGRQSGTSIKGKPKVHKMANKELKRLLHQGARSAVQHNAEYRQYYERKVAEGKHELSVINAIKNKIILRAVAVVNNQRPYVDKLKLAA

SEQ ID NO: 80859 - protein, 398 aa, unidentified
MSFDHHSEEPTAIRTDLGAIFVSMELSRSTWLITSLSPGGGEKMSKRSVLAGDIPALLARFADLNQKALARMGKSFPIIVIQEAGLDGFWIHRKLEDEGIESWVVDSASIATSRRRRRAKTDRIDGEALLRALLAYKRGEPRVCAMVRAPTPEEEDNRRLCRERKTLVAERVEHVNRIKGLLFSQGVSDYKPLRSDRRQRLDALKTGDGRPLAPHLKTQIDRELDRLELLIKQIKAVEKERDALLASPAESAAAPAPRALANGAQRPAMLMELNGIGAEITAVLWSEGFFRSFANRRQVAAYAGLAGTPWQSGSVALEQGVSKAGNRRLRTTMIELAWLWLRHQPDSALSRWFHERVQRNGGRQRKSTIVALARKLLVALWKYVTAGVVIEGAVMKRS

SEQ ID NO: 80860 - protein, 416 aa, unidentified
MEAAVELYRERVCGIDIGKAAVAACVRIDKGLGVKPSLVTRTFSTTTAGLLLLLDWLKAQRVQLVGMESTGVYWKRPFYLLEDHFEVWLLNPKHVKIVPGRKSDVKDAQWLAELTAYGLVQPSFVPPRPIRGLRDTTRYRTALVRERTREIQRLHKVLEEAGIKLSLVASDINGASGTAMLQALIDGQSDPGVLADLAKGSLRDKIPQLVEALTGDFTKLHGLMCKRMMQRIRELDRAIADIEIQIQVQLLPYEQQARRLRTIPGVGEHVAPVIIAEMGIDMDQFPSAAHVASWAGLCPGLNESAGRRKSSATRKGSPHLRGALGEAAWAAAHTKNTYLADSHRRISKRRGPAKGVVATSRKIAEAAYYVLKNDVDYQDLGADYLAHRKNPQRRAKQLLHELTRLGYEVQAVPPAA

SEQ ID NO: 80861 - protein, 362 aa, unidentified
MKNSQLDFTGQTLYIGIDVHKKSWQVTILLNGMKVKVFSMNPNPKELNNYLTNHYPNANYHSVYEAGFSGFWANRQLQALGIKNIVVNPADVPTKSKERRKKTDKIDSSKLARELSVGNLDGVYIPSTKAEALRTLIRLRRQIVNDQTRQKNRIKSLLLFLGYSVPEDVETKHWSQRYIKALRNLDIEHEESKATLNELLNNLNFIRSQLVQILEQIKGFIAKDQQADKTVRLLKTIPGIGPILAVILYSEIIDIYRFKKLDELANYVGLSPAIYSSADKEINLGLTKKINKYIRNYLIESAWIAIRKDPALQMAYGLLCKKMSSNKAIIRISKNLLNRIRTVWINQQEYVIATVAWIKNKQ

SEQ ID NO: 80862 - protein, 354 aa, unidentified
MSGNSNTSVAVVGIDIGKNSFHIVGLDSRGAIVLRQKWSRGQVEARFANMPPCLIGMEACVGAHHLSRKLKALGHDARLMPAKYVRPYSKGQKNDFRDAEAIAEAVQRPTMKFVATKTAEQLDLQALHRVRERLVSQRTGIINQIRAFLLERGIAVRQGLRFLRAELPHVLATPPDVLSPRMVRVIEDLAGDWRRLDERVESLSSEIEAVARQDADCERLMSVPGIGPIISSAMVAAIGRGEVFARGRDFGAWLGLVPKQTSTGDRTILGKISKRGNRYLRVLFVQAAWVVLIRPKSWERHGLKPWIEAAKKRLHPNVLAIALANKLARIAWGVLAHGRNFEARMDTNATAQAA

SEQ ID NO: 80863 - protein, 317 aa, unidentified
MAEVTFPQLIQRACGIDVHLKVVVATIDGAGIQRETRSFKTFTSSLNELKEWLLSNGVTHVGMESTGVYWKPVYKVLEDSIPNVWIVNARHIKNVPGHKTDKMDSEWICKLLLAGLLKPSYIPPKVQRQLRDLTRYRNKLIQQIASEKNRMMRILEDCNIKLSSVVSNTSGTTATSLIDMLCEGKVLTLDDINSVYHGKLSASPEELLEACTGFVEEHHIYLLQMIRKDIDQTQTLVDDLSERIKRLLSKYENVLELLREIPGFSTKVVEDLVSEIGLDMSHFPSEKHLSSWAGLSPGNNESAGKKKAHESLTETNR

SEQ ID NO: 80864 - protein, 460 aa, unidentified
MNRKRSKSRIDRTLPMMHPNAAAIDVGATIHMAAVRADRAPQPVRSFGTFTTDLHRLVDWFTECGVETVVMESTSVYWIPIFELLDARGFTVFLVNARDAKHVPGRKTDVSDAQWLQRLHSYGLLRASFRPKGQIAELRAYVRQRERLLEYAASHIQHMQKALTEMNLQLHHVVADITGSTGLRIIRAILAGERDPEVLACLRHYSCHSSAETIAKALTGSYRTEHLFALEQALALYDAYHEKASACDVRIEAVLKELSIHRGRDVGSVPPASRRQHRTDQANALAFDVRAALFALLGKDITRIDGLGPYLSLKLIAECGDDLSSWPSAKHFTSWLGLAPSNKISGGKMLLSRTRRSGGRAAALLRLAAVTVGRTDTALGAFYRRLSSRIGKAKAVTATARKVAVLFYNAVRHGMEYVDPGASSYETRYRTRVVNNLHRRAKAFGFVLQPLEAKAHAVVS

SEQ ID NO: 80865 - protein, 469 aa, unidentified
MFTALASSPQVRLSSLTNTQGLPHNRLTYIAFAEFKACMSLLLNLPFWRQVMQTELSQFTAIIGIDWADKKHDICIQVAETGRRKVLQIPHRAEKIDDWARSLYREHGGPIAIALELSKGPIVSALQKYDFFVIFPIDPTTLANYRRTFTLSGAKDDPTDAEYALNLLLTHTEHFKALRPQSVEMRTLMTLVEQRRRLMNDRVRITNRLRNALKQYYPQALEWFDRIDTLLFCDFIKRWPSLAQARRARKATLEKFFREHNMNRKALLERRMTAIKSALALTEDEAIILPYRLQALTLVAQLEVALASIRHYDDEIAALAPQHPDYGLFDGLPGAGPSLAPRLLVAFGEQRERYGKAAELQKYAGIAPVTERSGQSTWIHWRWQCPIFLRQTFVEWAAQTINKSYWAGLYYYQQRAKGCSHQAAVRALAFKWIRILYRCWVTRTPYDEAKYLKALQERGSTLLKMAEAA

SEQ ID NO: 80866 - protein, 419 aa, unidentified
MTFHIARGYVRTNESVDQSSVKYSFGGSAMFYAGIDVAMDKHDCVVLDSGGNIVFEVFTFENSRDGFRTLKKVLQACSKNPKKIKVGLEATGHYSDNILAFLNNSGYDPVLFNPLHTNLFRKGLSLRKTKTDHVDAHTIATMLRTEDLKSYSQQSYHLAELKSLTRYRSALVSDCSRHKISLVRLCQILFPEIKNLVPTLHMSSVYTLLSECPSADKIANCNLTHLTSLLSSASKGHYGRDKAIEIRDAARKSIGIKSTVKELELKQTIDLIQIYLQQIETVDEEINKHMDEIESPITSIPGIANRMAAVILAETNNFQDFERAEQVLAFAGLDPSVYQSGQLTSTHSKMVKRGSKYLRYAIFNAAKYVCHWDPTFRTYLHKKRAEGKPYNVAVSHAAKKLTRVMFHLVKTNKEFISQA

SEQ ID NO: 80867 - protein, 342 aa, unidentified
MEAATIIGLDLAKRSFQTHGALADGSVAFRKKLTREKVLGFLAEQPRCVVAMEACGSAHHWGRAIRDAGHEVRLIPPAYVKPFVKRQKNDAADAEAIAEAASRPTMRFVAVKTAEQQARAMLFRTRDLLVRQRTQLINALRGQLSEHGVVAPQGPANVVILAQAIDDMTASLPLLVVELARVYLDQIVGLSEKVAELEKAIACEARRDATTRRLQTMPGVGPITAMAIETFAPPMEVFRRGRDFAAWLGLVPVQHSTGGKQVLGKTSKMGQRDIRRLLIIGAMVIVRWACRKGAQEGTWLHRMLGRKPRMLVAIALANKMARSIWAMLTKGEDYRGPVAATL

SEQ ID NO: 80868 - protein, 344 aa, unidentified
MIYYAGLDVSLRTVNICVIDDEGELVAETKLASDVQDLVASLDDLELDIESVGLEAGTLTQYLTYGLQAAGFEVVCMEARQVKGALSAMRNKTDKHDARGIAQILRSGWYSRVHVKSMESHHTRMLLSSRKAVLSKCVDLENEVRGLFKIFGIKLPPKLGHGAYDIAVRDIIEADETLSQALLPLLDARLFLYQTFRVLDNRTRKMANADPVCVRLMSVPGVGFITALTFKAGVDDPHRFKRSRTVGAYFGLTARRFQSGEMDIDGHISKCGDADVRGTLYTAANALLTRSSRWSPLKAWGMKLAKTRGHRRAVIAVARKLAVILHRVWIDDTQFRWGTEGARS

SEQ ID NO: 80869 - protein, 396 aa, unidentified
MLKSITSTGQMETAVGKLAERSVASFPTAAGDRSFNPRSNKTVEKLDRRRFHEISPNSRKSRRGAGRRASSHSQGRDIVMDVAFTSFVGIDIAKRTLDVHVLPERRSLQHSNDSKGRRQLREQLPPPGLCLIVVEATGGYERALVAELIDAGYHVAVVNPRQARDFAKACGHLAKTDRIDAAVLARFGEAVELRIQAKIPEKQLELQDLVARRRQLVELRAGEMNRKEKASSKLVRKSLQETIDLLTKQIRRFEKQIAALVQSDDEWKQKTQIVQSVPGVGSQVSACLLADVPELGQLNRQQIAALVGIAPFNCDSGPFRGRRTIRGGRISVRCALYMAALTARRANPVIRAFADRLAALGKKPKVILTACMRKLLVILNTMVKNKTLWNPEISIT

SEQ ID NO: 80870 - protein, 338 aa, unidentified
MELYCGIDLHSNNGYYGIVQKNGKRMYDQRLPNDLPLILQSLEPFRKNVKSVAVESTYNWYWLVDGLMDKGYDVKLANPSAMRQYEGLKNVNDRTDAFFLAEQLRLGVLPAGHIYPKAERPVRDMLRRRMMFVQQRTAQIISLNNLIIRQSGMNMKMRSILRLEPDELGKLVGEEECLFIGRQNMDTVRFLSEKIKMIEGRVLEQVELKPEYELLTSIPGVGKILALVIMLETGDIGRFLKSGNYTSYCRCANADCYSNNKKKAENNRKNGNKYLSWAFVEAAHHCIAACDKAKRFYERKKSKSNGAVATKALASKLSKAAFHILREGTPFDEKKIFG

SEQ ID NO: 80871 - protein, 334 aa, unidentified
MTFRNFIGIDISKGTFDFALIKDGDLLNLISGETSNNPSGIVKLEEFLKKQGLIMDETLFCMEHTGIYCRLLSHYLVENKYNVWLEMPVQIIRSLGLQRGKNDHIDAKRLAEYACLKKDKAVLWQPPREVVIQINDLLTLRERLIESRKSLKQPIKEFKDAGFKDVANLIQSKCSGTLRELDKEIEQIEKDLDKMINKDSNLKKLFKLATSVSGIGKITALTLLYFTNEFKLYTNANQLACYCGVAPFEHTSGTSIKGRSRVSNFANKRLKKLLHMVAMATIQYDKELSQYYQRKVSEGKNKMLVINAIRNKILHRLCAVINRGTPYQLDYQTT

SEQ ID NO: 80872 - protein, 353 aa, unidentified
MKDYTGKTIFLGMDVHKDSYSVTAVYDRQIVKKDRLPADPSNLIRYCQRFFPNAEIYSAYEAGFCGFNLHRFLLKNNIKNIVVDAASIEVQANNKVKTDKRDSLKIAAHLSDGRLKGIYVPSIDQEAQRSVSRLRATVVNEKTRCTNRLKGFLYYLGFKLDFNRMCPKVIKNLRNMDIEPANKFTLNSLLDDWEYYANKIAACDQELQKQAEEDSLTEYYRSVPGVGPTIARVLSNELGDMSQFSNERLIFSYCGLTPSEYSSGETTRKGHITRQGKPHLRMYLTQAAWRAIRKDPSLNDIFERIGGRAGGKRAIIAVARRLIGRIRSCVKNKQYYVLATSQRNNKSKDCDPV

SEQ ID NO: 80873 - protein, 458 aa, unidentified
MVRNRSTNNAKPAMSLVHPNAAAIDIGATMHMAAVSADRTPEPVRSFGTFTADLHRLVDWFTECGVETVVMESTGVYWIPIFELLDTRGFAVFVVNARDAKHVPGRKTDVSDAQWLQRLHSYGLLSTSFRPKGRIAELRSYVRQRERLLEYAASHIQHMQKALMEMNLQVHHVVADITGSTGMRIIRAILAGERDPAVLAALRDSRCRADVETNEKALGGNYRAEHLFALEQALALYDSYQEKVLACDARIETVLKELSLDRDRCTTPVPPPGRRMPSTANALDFDVRAALFKLLGKDVTRINGLGPYLTLKLIAECGDDLSAWPSAKHFTSWLCLAPHNKISGGKVLSSRTRRSGNRAASLLRLAAISVGRTDTALGAFYRRLAARIGKAKAATATARKIAVLFYNALRYGMEYIDPGALAYETHYRERVIDNLQRRAKAFGFALQPLEPTPDYAVS

SEQ ID NO: 80874 - protein, 363 aa, unidentified
MTDGICFVGLDVHARKTAAAAVQLGSGEVFKAQLPGSPAAVLEWLATLPGPVRAVYEAGPTGFGLARAARAVGVEVMVCAPGAIPRQPGDRIKTDTRDALKLARLLAAGQLRPVVVPAPGLEALRDLVRAREDLRGDLMGARHRVSKLLLRRGLIWDGPGEAWSQRHLRWLSTIRFDDELVEVVFGEYLAHNEVLLARRDRLDTLLLEQSTQGSWAPTVARLRCLRGVDTLTAVGLVAEIGDITAFKHPKQLASYLGLVPSEQSSGTKRRQGAITKAGSSHARRLLIEAAWHYRRPSRVSEALKRRQTGQPPAAVDAAWRAQLRLHQRWAHLDGARAKKRTTVAVAVARELACFVWEIAQQPD

SEQ ID NO: 80875 - protein, 344 aa, unidentified
MTEITRIGVDTSKAVFTLHCVDEKDRPVLRLNLRRGQFLGFFRKQQPAIVALEACGSSYHWARELTALGHTVRLLPPQYVKPYVKRGKNDQKDAEAICEAAGRPGMHFVPTKTLEQQADGMVLKARDMLIGQRTVLINTVRGHAAEFGLITAKGAANVEVLFPAIEQQSDIPLVAKEMFAMFRQQISDINERIAELDARVNAMHKTSALSRRLATIPGVGPITALTLTIEIDAAQFESGRHLAAWAGLTPKDHSTGGKQRLGVITRAGNETLRRLLVSGATAVIRVASKPGNRQMTEWLRALLARKPRKLAAVALANKMARIAWALMRSGETYRREATPAVASV

SEQ ID NO: 80876 - protein, 403 aa, unidentified
MDHALLAYDVYVGFDIGKFTHHALAQRAKDQKIILSRTVRQDEGEIRGVLEELARFGRMLVAVDQKASIGQLVVSVTKAMGIDIGFLTPNDFHYFSKGYSEIKSDIKDAFVISDVAMRFTDRLSAITEDDEEKESLKVLCARRKALVEENTRDKNRIRSLLVQTHPALDAIIDRSDLDKACYLRIFEHYGGFLGIRQAGRKRFVHFVSKQPYYKNKAFDLSERFFEAIEQQTVVMPGTSTKESAVKQMASAIIARNVKIAPLEDEIAALYSSFPESAVLGSIPGVGAFWGPVLLSEIGDINQYKDAGHLAAYGGVAPSRRQSGTTLDQANKKIKCNRRLKEALCQSAWSSVSWDEWSAWYYSKKRAEGKKHKQAILALARHRTDIIYAMLKNGSMYEPKTMKH

SEQ ID NO: 80877 - protein, 306 aa, unidentified
MGHSAGLDVSVKETSICIVDDAGKIVREVKVASEPEALLSVLTNPGYHFKRIGLEAGPLSQWLYSALAEAGLPVICVETRHIRAVLKAQINKTDRNDARGMAQMMRVGLYRPVHVKTLRSQKLRMLLTHRKLLQSKAIAIDNDLRGTLRNFGLKVGVVGTVKFEARIKELVENLPDLAELVEPLLVVRRVLREQFVIQHRRLLAIVRDDEVCRRLMTVPGVGPVVSLTYRATVDVPARFRKSKAVGAVFGLTCAKHQSGESERSGKISRCGDEMMRVMLYEAAQSMLLHSKKWSWLKAWAMQIARP

SEQ ID NO: 80878 - protein, 394 aa, unidentified
MILVGIDIGKNKHTFSIINKSSGEILLSPSDFSNNLEGFLFLIQKLNNYTKSELLIGMEDTGHYHFALLKYLLDRRYTVALINPTTTDLTRKLQGGITKNDPLDSLTICDVISSNHRNKPYRVTKLNRFDLYEQKQLTRHHHNLKEELNTYKNRLQKCIDIVFPEFNSLFHSKYGIVYMNILKIFSSAKAIANADIRSIRKCFEFKGKGKRISLSAEQLKLIAKSSIGIPSVAEEIQIRHLVSQIELLKKQISEIDKRIEEFSLKNNSPILTIPGISHFSGTSIISELGDICNYTKASQIIKFAGVAPYHYESSQFTAQHTAITKKGSKYLRKTLYQIILPVISNNEVFHAYYTKKLNEGKGHRCAQGHCIRKLLRVIYHILSTGQPFNPELLV

SEQ ID NO: 80879 - protein, 337 aa, unidentified
MNYFAGLDISMDETHVCVLDREGMVVRESKTESTAQAVANELAKAPSCRRIVFETGRMAPILFHGLNQLGLPVVCVESRQAYQALKSLATHKTDRNDARGLAHLARTGFFKPVHVKSLRAHALRSLISARKKLVGQRVTLENQIRGLAVVFGVRLPRALTTAFIDQALKASEGVAGLSAAMRGLSAARVAVMTAVAAIDADIRRMTRASAACRRLMTIPGVGQLTALAFVAAIDDPSRIRRSRDIGAYLGLVPRRYQSGEVDYTGGISKCGDGRVRTLLYEAANVMLTRYKGQLKLKDWAFAIAKRSTMRKARVALARRLAIIMHAMLRDGTEFAPA

SEQ ID NO: 80880 - protein, 414 aa, unidentified
MTQVSHDAFAAFVGLDWADAKHDVCLQAAGSAQRECCQLEHTPEAIDAWVTTLRTRFHGQPVAICLELNKGPIVSALRKYDFLVLFPLNPLTLARYREAFTPSRAKDDPTDAALQLELLLTHRDKLQPLNPQSPTMRALAQLIEHRRRVVGDKVRITNRLTSALKNYFPQALQWFQEKDTTIFCDFLSRWPTLKAVQLARRATLDTFFREHHVRYGDVIAQRIHAIKSATPLTTDEGIIAPNALLVQALVAQLRVTLQAIADFDSAIAKRAQSHPDFPLFQALPGAGPVFAPRLLVAFGEQRARYASASELQKYAGIAPVTERSGKQSWVHWRLQCPKFLRQTFVEWAAESIRHSFWAQVYYQQQRDKGKAHQAAIRALAFKWIRILYRCWQERTPYDEAVYLQALHRRGVSLS

SEQ ID NO: 80881 - protein, 357 aa, unidentified
MEKILKQSLGIDVSKLNLSLSLGFLTDKLVKEFKVHSDVSNDLSGYKELLKWLKKSVYDSSELLVVLEATGVYHQGIAHYLYVQGYSVCVMQSGRVKRYAQSLDQRSKTDALDSRMLSMLGLERELRLWHPPSEELQELKMLSRERSSLIKDKTVETNRQSAIVSGFYSDKRAVKRHQQRLKLLNNQIVSIEEEMRELIWNNEFLKNKLNFLESIPGISFISAATVIGETLGFESIANVKQLTSYAGYDIVLRESGNFKGKTRISKKGNSHIRAALHMPSMTCVRCNPTLKQFYSRLKPKKAKPLVALVAVQRKLLILMFILWKNEEVYDAEFENKKQQKHIAFAAQDNNLINQLVS

SEQ ID NO: 80882 - protein, 310 aa, unidentified
MDIIAVGIDVSKDRLDVAVHPGGEAFVVERNGAGLEQLTVRLKQLAPSIVALEATGGFETIAAAAVGGAGLPIVVVNPAQVRAFAKALGQRAKTDPIDASVIAHFAAATRPEPRPLPDEATRFLSDLVTRRRQIVDMIGAERQREKRATSQHLRKSITRLIKALEKELVSVDTDIDDAVRSSPAWREAEDLLASVPGVGPIIARTLMAELPELGRLNRKQIAALAGLAPYTRQSGQWRGKSFIGGGRQTVRTVLFMGAMTARRHNPVLKAFFERLVANGKPKLVALIAVARKLLTILNVMIRTKTPWQPA

SEQ ID NO: 80883 - protein, 342 aa, unidentified
MSEVTTIGVDLAKNVFQVHGVDASGKTVIRKQLRRRQVLPFFKKQPPCLIGVEACATSHHWARQLIELGHEVKLMPPHYVKPYVKRGKNDAADAAAICEAVTRPTMRFVSVKSTEQQGVLMLHRTRELLVRQRTMLINAIRAHMAEFGIVAPVGVPQVKKLLSIIADPDDTRLPPVGRTCLEGLARQLLSLHEEIHAGEKRIHAWHRANEDSRRLETTRGIGPLTASALTASITDPKVFKSGRMMAAWIGLVPRQNSTGGKQRLGRISKQGDQYLRWLLVAGAMSVIGHAKRNGTTDPWLARLIADKPTKVAAVALANKNARIAWALLRHGGTYRKPAPVTI

SEQ ID NO: 80884 - protein, 390 aa, unidentified
MIYAGIDISKHKHDCFITNDFGDVLKDVFTFKNTAAGFRELQKNLETVKNAGEEIRIGFEATGNYAINLKVFLEKTGYDYMEINPLLVKEHMKSKSLRRTTTDKISAKGIANYLCENQYRLHPTAFYPKFALKQLTRFRSSLMKNRTRYMIQLTNVLDCIFPEFKSLFDNKFTVTSLYILQNYQSPEAIANMNSRSYEILRRKSRGHFTMDMFVRLKSLAKNTVGVFDECYRIELVDLLELYHQIDAKIQELDDKITVIVKELNPPTLSIKGVGEVSAAIIISEVGDFSRFDKPDKLLAFAGLEPGSFQSGTIEHDGKMVKRGSAHLRAALMNCARSISLHNEVFAAYFRKKLDEGKEYNVAANHVAKKLVRLIFALETKGVMFDPDKLR

SEQ ID NO: 80885 - protein, 423 aa, unidentified
MRSIGLDIHRDFCEVAIAEAGEVRSAGRIAMTPETLGLFAASLAPDDRVALEVSGNAWEVARILRPHVAQVVVVSPADTGIRAARAKTDRLDARALAKLLAAGSLDGVWVPDDRTRAMRRRLQRRSQLVRVRTKAKNEIHAALMRRLIAKPAVSDLFGLAGRRWLQELELPAEERETVDGCMRQVEFCEHEIAAIEQVIAAEALRSPEIRRLMTVPGVNVITAATFMAAIGDVRRFHDRKKLVGYLGLDPKVRQSGASASSRARISKQGSASARYVLVEASWSVVRAPGPIHAFYERIRARRGHQAAIVASARKLACLFWCLLTREEDYDYQQPSLTKKKIRRLELAAGAARGDVEPGTWSTNKAMRQAEQELARQAELAYKRTVADWHATAQKSADATPGRASQGRQSGKQRGKATVPNPAL

SEQ ID NO: 80886 - protein, 339 aa, unidentified
MFYTGIDQHRRSSVLTTFAEDGQVLGHATLPNEPLRLRRSFAQFPGPHRAVVEATGRWYWLRDLLRRDGIDLRLAHAKFLKAIAYAKVKTDAVDAGTLGQLLRTGFIPEAHMISEALRGPRDVLRTRLRLVERGTSCRNSVDRLLEKFNVATVDQLPPLYQAQAAVHAAQIALLRDQIRQLERLVRPALLDCPEIQRLLWIPGIGPLTAGTIYLEVDGITRFPTVQHFWFYCRLVPGAANSAQRMRHRSGNQDGNRYLKLAVSHATIRAIQYFPEIRAWYQRWKRKKPRNVARALVAKELAKSVYLVLHEQVDFNQQFKGTPLTRQKQARWPRRASPSA

SEQ ID NO: 80887 - protein, 353 aa, unidentified
MSMLADEVDVVIGIDTHKYTHTAAVLSASTAGVLAKMTVASATAGYEELYRLGQRYGERRAWSIEGTASYGAGLTEFLQARAERVIEMDHPNRAKRRNGVKNDEVDAVRAAREALARDKLAEPRCQGQRACLATLLCVRASAVEAAKQARTQFQSLVVTSPEPLRERLGKPKGLALLRAGADLADQDGDSPELRLMAGALRALARRALSLYQEAKSYQASMRTIVEEWHPELLAQSGVGTIVAATVLCAWSHPGRFRSEASFAMLAGSAPLDASSGLSTHHRLSRCGDRQLNRALHVVVITRWTKDKATIAYCQKRRADGKSDRETKRCLKRYVARSLFRLLESSSTGTETMT

SEQ ID NO: 80888 - protein, 424 aa, unidentified
MNNTQNQKIAQVTDKTLIVGVDIGSENHFARAILARGYEVSKKPFPFTNTEGGFESFVTWTYNLAAAHKLTKIMVAMEPTGHYWFTFVAFLKKYDVQVVLVAPQHVKHSKEMDDNTQEKDDRKDPIVIARLVPEGRYLIPYIPEDVFAELRVAFNRRCELVEEQVRIANRMIRWFDIYFPEYRKVYGRIDAKTGIMILKRAPLPADILGIGVDGICQIWKDAKLRGYGPKKAKRIYFAAEHSVGMKGGASVRWKLWQLLEEYELIERQLHDILQLIEGLLYQIPGADKLLKIPGAGLVTVAGFLSEVGDIKRFSDPKQIQKLAGLAVVENSSGKRKGLPGISKRGRSRLRWVLFQLARSMVMFNPEMKAYHQYYTTRKENPLKKLQSLVAISARIARIFYGILKNGTEYDPAMVMKDFNKAVAA

SEQ ID NO: 80889 - protein, 316 aa, unidentified
MKSPQPFVGIDVSAKRLDVAVLPAATHFTVAHTDEGIASLVCRLQELGPQIVVLEATGGYEIPVAYAMSEASLPVVIMNPKVLRHFAKSTGKLAKTDKLDAQVLAHYAQAIQPPVRPLRNPEQAELATLMSRRRQLRDMIVMEENRRRTSTPKVRTNIDQHLAYLRQLLKDLDREIHDAIRRSPLWHEKSAILQSFNGVGPKVSASLISDLSELGTARGTQISALAGLAPMNRDSGQWRGKRTIQGGRPAVRQALYMAALVASRHNPVIREFYQRLRQAGKPAKVALTACMRKILVILNAMLKNRTYWNPQLPLAA

SEQ ID NO: 80890 - protein, 457 aa, unidentified
MRKKGKRTRGIEEAHPFAGMSQVQPNAAGVDIGADEIVVCVSGDENTQIVRAFGNYTVDLQAIGRWLREYDIKTIAMESTGVYWIPLFEELEREGFECLLISSRSLRRVPGRKSDIQDAQWIQTLHSYGLLESSFRPDGELIALRTLLRHRSQLVEHRSPHILHMQKSLLQMNVQLSQALSDVTGETGQVIIRAIVSGERSPQKLAAMRDYRCKKSESEIAKALTGTWREEHLYILKQSLEMYDFYTGQIESCDMEIERIYAQTSPEKEVGELPPPSAKKRNSHSKNAPKNTEVIRQHLKRISGVDVSAVDGFGVSLAQTVIMEVGTDMSKFPTEKHFCSWLGLAPKHEISGGKVLKNKTLKTKNRAGQAFRMAAHSVKQADCAFGALYRRLKARLGPAQATVASAHAIARVVYRMLKYQVEYEPLSVNEYEKRYREQQLKYMKKKAAKLGFQLVPA

SEQ ID NO: 80891 - protein, 349 aa, unidentified
MEAYDGPQIVGMDLHRRRSVLVRMSEDGRKLATARIANSPARLAAEIGRAGVHPKVVLEACYGWYWAADALAEAGAEVHLAHPLGVKAFSYRRVKNDELDARDLADLLRMGRLPEAWIAPAEIRELREITRYRHKLVKLRTGCKDQVHAILAKLGIEVTCSDIFGAWGTQWLDELVLPQPYSWKVASLRQLIGWLTSEITVLEQVAADLLAGHDAYRAVRQLPGIGPVLGAVIVAEIGDITRFRHPARLCSWAGLTPRHHESDTTVIRGRITKQGSPILRWALIEAVQHTPAGTPVCQARDAIIARRGPQARNIAKVAAARKLLTYVFYAMRDGKVRALDTPAAPHQAR

SEQ ID NO: 80892 - protein, 338 aa, unidentified
MAQVATIGLDLAKNVFQVHGVAADGKVIIRRQVRRADVIPLFAGLPPCLVGMEACASAHHWAREISALGHTVKLMPPAYVKPYVKRGKTDAADAEAIAEAVTRPTMRFVAVKTVDQQALLMLHKVRDLLVRQRTMLTNALRGQMAEYGMIAARGLGGVTALVTLLHEEQDRLPVLARTALHALATQLRELASQVKTLEARILEWHRSDEASRRLATIPGIGPITASAIAASVPDASLFRSGRQFAAWLGLTPKAHSSGGKERQIGISKQGDGYLRRLLVVGATAVLRFARQNNASRAWAAKLLERKRPKVVAVALANKTARIAWAVLARNQVYAAPST

SEQ ID NO: 80893 - protein, 491 aa, unidentified
MKEIINEKTKRKNLEKQTCSSYNTSRWSASGRELTLPRPMRTRERPVPPEAKCSESINRVPSFEDLYKATPEQTRPLKFLHKEVLVMFYVGIDWACDHHNIFIADESGAKIDSFRIPHSPKGMALLRDKLRNLLTPKEQILIAIETPRNLLVEFLLNEGYTIYPINPKSVDRYRDRYRPSGARDDSFDAMVLANITRTDRDQFRAILPNSALARELKILTQDEQHLIHLKTRLVNQIQACLKDYWPTALELFSVIDQQVTLDFLSKYSSPEIIPIAELKKFLQKHHYPRSEEKAREIHKKLSRPQIFVEDFTVRAKSRLLITLVGQLKALITQLDEYQREIAKLFNEHPDCPVFKSLPGSGPKNGPRLLAEMGDNRQRYSKAKNVQCEAGTAPITDASGKSKIVKMRYSCRKPFRNTLYQFAFSTLTQSAWAKKFYDTQRAKGNTHTEALRALGNKWLKIIFRIWQDGTTYNEDRHLASIMRYQLNQDPAT

SEQ ID NO: 80894 - protein, 343 aa, unidentified
MQTITTIGLDIAKSVFQVHGVDAGGQVIIRRQLKRRQVVAFFQKLPPCLIGIEACASSHHWSRELQALGHTVRLMPPAYVKPYVKRQKNDMADAEAIYEAVTRANMRFVPTKTPEQQSGLMLHRTRHMFIRQQTAVINSIRAHLAEFGIVAPVGRKGVTELLRIVADPNDKRMPEVARACLAALGTQLLALKEQILEFDRMILAWHRSNQTSKRLHYIPGVGPMLATALVASVADPRTFRSGRNFSAWIGLVPKQHSSGGKERLGGISKQGDRYLRSLFVAGALAVIRYAKIHGTGHRPWLTALLGRRPTKVAAIALANKIARMAWAIMAKGERYKQPAALAR

SEQ ID NO: 80895 - protein, 354 aa, unidentified
MKRSTKYVALDMHQATTVASVREESGRVIARTVLPTEAAALLECVGGMRGAIHVAFEEGTQAQWLHELLTPRVDRVVVCDRRGDPRQGNKGDFVDADQLSEGLRRGGLRAVYHGDGHWATLKELTRTYQNLVEDSTRVMLRLKALFRARGIAAAGRGVYHPRNRARWLGALAPRGAHFRAEALYAELDVLRGLRPKAKTAMIAEARRDPAWARLRTIPFLGPVRVAQLLATMQTPWRFRSKRSWWAYVGLAVVTKTSAEFTLVAGRPVRRRRAPLTRGLNRNHNRVLKDVFKGAATAATGRPGPLQDWYHGLLAGGMREELARVTLTRKLAALTLRLWKKGERYDPTQLAIQAR

SEQ ID NO: 80896 - protein, 344 aa, unidentified
MGEVSTIGLDIAKSVFQVHGVDSSGAVVIRKRVSRLKLLEYFAALPPCLVGIEACPSARHWGRALQALGHTVRLMPPSYVKAYLKRSKNDANDAAAICEAVTRPSMRFVPIKTKEQQTALMLHRTRQLLVRQRTMLSNALRGHLAELGIVSAKGRNGIGELLRIIADGADNRIAPATRGILDVLARQYSALGAEIGSIDKSILAWHRSCEASRRLEEIPGIGPIVATALVAEVGDWQEFRSGRNLAAWIGLVPKQHTSGGKNRLGSITKQGNRYLRWLLVAGAMAVIRYAQKHGTERRPWLGRLMERRPTKVAAVALANKIARMAWAVMVRGERYKEPTLLMAA

SEQ ID NO: 80897 - protein, 322 aa, unidentified
MAMLSFCGIDVAKDRLDVMVLPEQQCLSVRNDVDGWAELVEQLRSFAVAAIGLEATGGYERGIMRALLAAGMSVRQINPFRLRQFARASGVVAKNDPIDARMIASFVAVMPTRLAQRNAPAVERLTEMLAVRRRLSNGKVAAENAARLLEDAMLQRLSRRRIARLSTDIDILDERLVEIVATDPTLAHRYRLLISMPGVGPVLASTLIALLPELGRLNRKQIAALVGVAPYDFDSGLLKGVRRIWGGRAPVRNVLYMAAMSASQHNPVLKAFHDRLKAAGKEPKVVIVAVMRKMITTLNAMVRDDVAWADRSTGRHIVPTAR

SEQ ID NO: 80898 - protein, 366 aa, unidentified
MRKPSTTAVRGRGKLQSEQLTIGLDLGDRSSFYCVLNGAGEVIVEERVATSPEAMKKTFGKMPRSRIALETGTHSPWVSRLLSELGHEAIVAHARNVRLIGQSRRKDDRLDAQELARLARIDPQLLSPIQHRSAQAQADLSVIRARYALVRTRTALICSARGLTKSFGERIHSRYVRGFKPAMGETLSPQLQVALAPMLSALEAITARIREYDAQIEKLAEESYPDVALLKQVKGVGTLIALTYILTLEDPRRFRKSRDAGCYIGLQPGRRNSGQSEPQLHITREGDSYLRMVLVQGAQHILGPFGEDSDLRRWGLKLAERGGKRGKRRAIIAVARKLAVLLHHLWISCEAYEPLHNVQKRRLAAA

SEQ ID NO: 80899 - protein, 355 aa, unidentified
MSTMPCIDGEVILGVDTHAETHTAALADPIGRTLATTTVPATRRGHRALIKWAGLRGSVRVAGVEGTGSYGASLARFLALQGVEVIEITRPARKGRRHLGKNDTRDAEAAAKAVLSGEATAVPKPRNGIVESIRVLHHARASAVKARTQAALQLRNLIITAPDELREPLADLRTKQAVARCARIRRSGRLDALAATRKALRTLARRWQALDAEVRELDQDLKRLTAQAAPRLLAQPGIGRETAAKLLIVAGDHPDRLRSDAAFAALCGASPVEASSGKTRRHRLNRGGDRQGNCALWTIATNRMLHHEETRAYVERRTHEGLSGPEIRRCLMRHLVRRIYPLLRADLRAATTVPT

SEQ ID NO: 80900 - protein, 318 aa, unidentified
MSDSVFIGIDVSSQTLEVASSDQAKTWQVANEASGIEQLVSQASALAPGLVVLEATGGYEFEAACALQAAGLAVAVVNPRTARDFARAMGALAKTDALDARMLAAFARVLHQHPERERFVKPLADAELQQLQALVLRRRQLVQMLTSERQRLRLAHAAARPSIERVIEFLKHELGDGEAEVAAHVQRHHAELAQALASVPGIGAASVAVMLAELPELGKLDRRRIAALVGVAPLNRDSGQMRGQRSIWGGRADVRRTLYMATLTAVRHNPALKACYERLLAVGKRKKVALVACMRKLLTMLNAIAKHGSTWDSTMHMA

SEQ ID NO: 80901 - protein, 364 aa, unidentified
MNGPIVSVDVSKGKSDYQAFKDLNVKFTDVRSIKHTKEGFDEIVNLVKDMERKLETEVCVVYEATGVYHRVLKKVLEDNNIKQFIINPLLSAKTRKNDSLRSPKTDKLDPKSIAKTYYNQSLHSSYKPQTTYHELRELSRYYEDILVHIRKDKVAFRAQLDIVFPGYDTLFDDLYGAVSLTVIEKYPHPELLQKKSINTVSKIIQKKTRHRQAVSNKMAFKAIEYSKTIYSGCGKDDIDVLILERLIKKLNEDLNEAERTINEMIRLVQELPDFIIIKSIPGIGDNLAARIIAELGDMTRFKKKNELVAYAGLDPRIYESGQKDGAHMHITKKGNKRLRCLLYLAVTCSIRLKRDDNSLSLIHI

SEQ ID NO: 80902 - protein, 411 aa, unidentified
MEVAVITAVGIDVSKSKSTVAVRRPGGEIVLRPFEVHHTNSDLKKLASTLKKLGGDIRIVMEHTSTYWRPIALTLKEAGFFVSVVNAMLLHDFSDNTIRKLKTDRADALKIANYALTFWDTLPPFNNEEETRLLLKMQSRANERITATATALRNGLIALADQTFPGVNIAFDPNTKNANGHEKWVDFFLRYWHKDCVCQYSMEAFTESYRGWCKRKNYKFRTDTAHKIYLLAQEGVATLPRCESTKMLITQACKSLNAVCEAKQSTQLEMQRLAAMLPEYEVVMQMEGAGPITGPALMAEIGDVRRFKNKKALVAFAGIDAPPFQSGAFESKSRHVSKRGSPHLRRTIFIVSNIILTRSNPENAVYCFMDKKRSEGKHYYVYTVAGSAKFLRVYYARVTEFLRSQPSPGAC

SEQ ID NO: 80903 - protein, 389 aa, unidentified
MLHDHPSVGPTAILTQFGAIFVSLELSRSNWVLTSLSPGNGEKMSQYSLAAGDIGGLLARFAELKRKAKERTGSDYPTITIHEAGLDGFWVHRVLQNEGIDSYVVDAASIATSRRRRRAKTDKIDGEALLRALLAFKRGEPRVCAMVVAPSPEEEDRRRLCRERQTLIAERIIHVNRIKGLLFAQGISDYVPLRRDRRKRLEGLRTGDRRPLPVHLKTQISRELDRLELLLDQIRKVEAEQEALLAAESKAAPEGEPHNAVAMLLAVKGIGEHSAAILWSEGLCRQFSNRRQVAAYAGLAATPWRSGAVIHEQGLSKAGNPQLRTTMVQLAWLWLRHQPQSALACWFRARGERGRKGSIVALARKLLVALWKYVTHGVIIEGAVMKPAA

SEQ ID NO: 80904 - protein, 343 aa, unidentified
MDYFAGLDVSVKETSICIVDDAGKIVREVRVASEPEALLQVLTNTIYRFKRVGLEAGPLSQWLFSVLAEAGLPVICVETRHMRAVLKAQINKTDRNDARGIAQMMRVGLYRPVHVKTLRSQKLRVLLTHRKLLQSKAIAIENDLRATLRNFGLKVSRVGTVKFEARIRELVESLPDVAVLVEPLLVVRRVLREQVGILHRRVLAIVRDDEVCRRLMTVPGVGAVVALTYRATVDVPARFRNSKAVGAVFGLTPARYQSGENDRTGAISRCGDEMTRVMLYEAAQSMLVRSAKWSWLKAWAMKIARHCGMKKAIVALARRLAVIMHRIWVDGSEFRWTREVAAA

SEQ ID NO: 80905 - protein, 350 aa, unidentified
MVVVGADVHKRTHTFVAVDEVGRRLGEKVVKATTEGHRQAVQWARNQFGAELVWAIEDCRHLSARLERDLLTADQKVVRVPPKMMAYARASARTRGKSDPIDALAVARAYLREPDLPVAFHDEISRELKLLVDRREDLVVQRTATINRLLWRVHELDPDRAPKRASLDRAKHRKLLSDWLDTLDGLVAELARDELSDITRLTEQINVLATRIGERVRDVAPVLLAMPGCGELTAAKLVGEAAGVSRFKSEAAFARHAGVAPIPVWSGNTAGRVRMTRSGNRQLNAALHRIAVTQIRLDGLGQTYYRHRINTGDSKTEALRCLKRRLARVVFGHLHTDHNNRTQPCQPAAA

SEQ ID NO: 80906 - protein, 431 aa, unidentified
MDTQQFEVIRPKCAGLDVHKKSVVAAVCTSDPVTLTASYKTKVFNTTNSDISALRDWLLAQDCRDVCMESTGKYWIPVFNILEPHMHVILTHPKYVKAIKGKKTDKRDAKWIANLFRFDIVKASFIPPADIRALRELSRYRLKLSYMRTAEKNRYQNSMTISRIRIDCVLTDPFGLSATRIMDYLLSDEPFDEEKCRSLIDRRVKASKDEVMDAVHGYHILEEQKFKMTHAKAHMDFINKSIDEIEAELFLRSRQYDIRIKRIATVTGITELSALFILSEIGTDMSVFESDRHLCSWAGLTPANNESANKKKSTRCSKAGQYLKPLLIQCALAAVRSKKEPYFAIKYQRLCKRRGRKKAIIAIARMMLTCIYHMLSDNEDFHPDDYEAAVNPPKQKPVILTLDNTLQFLREQGADPETLKLIQQQCAAQAG

SEQ ID NO: 80907 - protein, 380 aa, unidentified
MKPITLYIGLDVHKDSIVIAIAEPGRNAEIRIFGTITNDLQALEKAINRIRKAHPDAMLEIAYEAGPCGFGIARRLKQLKVSCLVAAPSLIPKQPGSPFKTDKRDARGLARLLRAGELTGVYIPEPTDEAIRDLCRARTDAVDDHRRCRHRLKGFLLRHGFRYQGKANWSQPHMRYLRELVLPHPAMKTILEEYLQGIDAAHNRIERIEASMLTLLENWRLKPAVQALMAFRGFQLVASMITVSELGDIHRFEHPRQLMTYLGLVPTESSSGPHQRLGSISRCGNSHQRWLLTECAEHYAIPPKISKELSRRQEGQSEATKALSWKAQNRLHTRFMKLLSRRLQRNKAKVAVARELCGFVWALLRSQDCYKQSTSTNTPT

SEQ ID NO: 80908 - protein, 429 aa, unidentified
MNCTQNKKIEQVKETTMIVGIDVGSEKHYFRAFNWRGIELTRKPVAFSNSMEGFNSFYNTIVELMQKSELEEALVGIEPTGHYWFDLGQFMGEKDIKFVMVNPHHVHKTKELDDNSPSKNDRKDPRVIAGLVRDGRYFYSYMPTGAYAELRNASNRRFVLVEEQTRAKNRLQKWIAVYFPEYKGIYTHIDAKGGMLVLKKAPTPEEIVRLGVEGIIKIWKDAKLRGNGHKKAMLILAAAMRSIGLKAGLTEARMEIQDLIEDYELQTKRLERVNDLIKGLCQQVRYADKLLEIKGIGITTVAGFIAEVGDITRFDSTKELQKLAGLELVADSSGKHNGKTKISKRGRKRLRYLLFEAAISVVGKNEEFKEIHRYYTTREKNPLKKMQSLIAVACKLIRVFHAILTKGIRYDASKMLKDIRHPGEQLKAA

SEQ ID NO: 80909 - protein, 373 aa, unidentified
MHYTTVYVGMDVHKETFSLCCYTNEKELAEYPQKVEGHYSKVLNYIEAMRFHYGEDALFICGYEAGCLGFTLYHQLTDHNVKCVILAPTTMLQQRGRKKVKTDKRDAALIARCLAHHDYSPVHIPTDQDEQTKEYLRMRDDHKLALKKVKQQILAFCLRHNYRYDATNNHWTQAHLKWLRALKPEGLYEEVLKEYLLTYDTLTDKLERLDKRIEELAGGEEYHENVKKLICFLGVKTVTALSVLTEVGDFNRFASAQHFASYIGLTPGEDSSGEDQTRLGITKAGNRHVRCLLVEAAQSYTRGQIGFKSKALKARQEGNLPEVIAYADKANERLRRRYYRMVLKNNKKTNVVKTAIARELACFMWGMITGNVA

SEQ ID NO: 80910 - protein, 343 aa, unidentified
MDHFAGLDVSVKETSVCIVDDTGKIVREVKVASEPEALLAVLKNPAYGFKRIGLEAGPLSQWLYSALAEAGLPTICVETRHMRAVLKAQINKTDRNDARGMAQMMRAGLYRVVHVKTLRSQKLRMLLTHRKLLQSKAIAIENDLRGTLRNFGLKVGVVGTVKFEGRIKELVENLPDLAMLVEPLLVVRRVLREQIGILHRRLLAIVRNDEVCRRLMTVPGVGPVVALTYRATVDVPARFSNSKAVGAVFGLTPSKYQSGEIDRTGAISRCGDDMMRVMLYEAAQSMLLHSTRWSWLKAWAMKIARRRGIKKAIVALARRLAVIMHRIWIDGTEFRWTREVAAA

SEQ ID NO: 80911 - protein, 379 aa, unidentified
MEAKRKDPLSIRHRCARVEMSSNHSQDRGSDMQVTTYGVDLAKQVFQVHWVDTDSGEVKRKMLTRAQMQAFFARQAAGVVAMEACGSAHHWGRALKALGHQVRLISTQFVRPFVKTNKTDAADAQAIWEAAQRPEMRFVALKSEQQQALMGLHRIRAQLVKQRTMQANQIRGVLYEFGVVVPKSWRALLAQAGPILADTSRVEIPDLIRCELQQQLQGVRELTGRIEQLQRSIGAYRAQDERCRRIEAIPGVGPLSSTAIVASVGDARTFRSGREFAAFLGLVPRQSGTGGRVKLLGISKRGDPYLRTLLIHGARSVVNQGSRPGRAMPRWLRELLARRPKNVAIVALANKIARTIWALLAHEREFDDRWGQVMPIPVL

SEQ ID NO: 80912 - protein, 417 aa, unidentified
MKKVYRSCCGIDVHKKLIVACFLQKSNKSEVREFGATTSELLKLSDWLTGGGCEMVAMESTGSYWKPVYNIFEAAGLKCMIVNASHMKNVPGRKTDIQDAEWIADLLKHGLLEASFIPDRQQRELRELVGYRSSLIGEKTRELNRLQKVLEGANIKISGTIKNINGKSGRCLLDAIADGRKLSIEDLEQMKNEHQIAHNLKATNEQLAEDLNGVINENQVFLLKEMLKRIDELDAHTATVSGLIDKLMIEEQLLAADKITQVTGIGLTSAQAIISVIGSDMSRFPTDASISKWAGLCPGNNESANKRGSGRTQKGNKLLRTTLTVCANSAVKNKDSYFYAQFKRISAHRGKKRAIIAVAHSMLIAIYHMLKDNVDFVDLGSDYYNRFNKEKKINAYIKKLQALGAVVELKPTTTQIA

SEQ ID NO: 80913 - protein, 318 aa, unidentified
MNEPEHHQVSVGIDVSKATLDIAFHESNETWSNSNDSQGCAELVTKLKKLKPTSIVLEATGGFETLVTATLSAASLPVIVVNPRQVRDFAKATGQLAKTDRIDCRVLAHFAAAIDPPVRPVKSGETQHLEALLARRRQIVEMLVAEKNRLANNHDRAVVKDLNAHIVWLERRLKSSDDELQRVLKTSPAWRERDDLLRSVPGVGPVLSLTLLAQLPELGQLNRREIAKLVGVAPFNWDSGQWRGSRHIWGGRATVRSPLFMATLCAIRINPTIRYFYRRLIAAGKAPKVAITACMRKLLTILNVMVKTQTSWRTACSS

SEQ ID NO: 80914 - protein, 427 aa, unidentified
MGLITATPMPPEQDEQPISYDWFVGIDWGSQKHQVCMLDGNRQVVGERVVDHDGASLAQLVTWLLTVSQGQPQRVSVGIEVPRGPIVEGLIERGFHVFAINPKQLDRFRDRHSVAGAKDDRRDACVLADSLRTDRPSFRRLRLDAPQLFMLRELSRAEETLLEEFRRTTNRLREQLHRFYPQMLQLSAAADEAWLWDLIELVPTPAHATAVTAEQVHQVLTAHRMRRVTADEVLVCLQAQALPAAPGVREAAQVHCAFLLPCLRVLAEQLRSCAQQVEALLHTLAAEPGEAGGPSDVAIVQSLPGVGRKITAWLFAEAAQPVAERDYQVLRTQGGVAPVTKQSGKRRQVVMRRGCNPRLRHALYHMARVAAQRDPHFSRVYEALRAKGQRHGQALRNVGDRLLRILMAMLRDGACYDIARCRREPVV

SEQ ID NO: 80915 - protein, 394 aa, unidentified
MKLIGIDIGKNKHFFCVMDQQTVEIISQPVSFSNDKEGFDFLVQKIKSYPKDSILIGMEDTGHYHFALLKYLLDLQYTVALINPKTTDFNRKMQGGITKNDKLDTINICDVLDTPERKKQYRITKVNSFDLYEQKQLTRHHHNLKEEENVYKNRLQKCIDIVFPEFNKLFNSKYGIVYMNILKMFGSAENIANTDIRTIRKCFEIEGRGNRISLTPERLKECARSSIGISSSAEVIQIKHLTAQIELIEEQLTEIDKKIEEFSIQNNSPILSIPGISHFSGTSILAELGDISNYSKPSQIIKFAGVAPLHYESSQFNAQHTAITKKGSKYLRKTLYQIILPVIRHNPVFNKYYQLKISQGKGHRCAQGHCVRKLLRIIYHLLKTNQQFDPQLLR

SEQ ID NO: 80916 - protein, 376 aa, unidentified
MEKDSRFVGLDVHAETIAVAVAEPGGEVHALGTIPNTPEAVRRLVKKLGPPETLRVCYEAGPTGYVLYRQLTALGVPCAVIAPTLVPVKAGDRVKTDRRDAEKLARSYRSGDLTPVWVPDPGHEALRDLVRAREAAKKDQLRARHRLGKFLLRQGRRAPTGSKAWGVKHRAWLQTIRFAHAAQDATLLDYLTEIDHAADRIVRLERAIATAADLAPAPVRAVIAGLQALRGIAKLSAVSVVTEVGALSRFAKPRQLMGYSGAVASEHSSGPHRRRGGITKTGNAHLRRIVIEAAWAYRHRPAIGGTLRTRQAGLSEEVKALAWKAQHRLHGRYARLIAKGKAPTQVVTAIARELLGFIWAIGVHIEQHTAGGAPAA

SEQ ID NO: 80917 - protein, 431 aa, unidentified
MLKINPLSTLYVGIDVSSKSNYVCALDFYKNKYINSSFANNQPGAEELALKILECLKEHPDITTIVAALESTSVYSIHIANYLSSCEELMRFKPYVFVLNPKCTANYKKSYIGLGKSDPIDAFVIADYARAGNIESEPWRGSQFLALKRLTRHRLHLVECMTREKTYLVSNLYLKFSELQMLEGDDQPFCDIYGATSSSVLMEYFSPEEILDSSEEDLIAFLAKKSRNRIKDISKTADLLKKAARDSYRLDKALYEPLNVSIASSFNCIETFKREIKVIDNAIEKEIKGLNPNAFIILQSIDGIGPVFAGGIIAEIGDITAFHSSDALAKYAGLTWKSNQSGDFDGEDTPMIKAGNRYLRYYLGEAANSMRKHNVEYGTYYRKKYNEVPKHQHKRALALTSRKFVRLVYGLLARNQLYSGVSLDTSLKDSN

SEQ ID NO: 80918 - protein, 343 aa, unidentified
MDHFAGLDVSVKETSVCIVDDTGRIVREVKVASEPEALLAVLTNPACRFKRIGLEAGPLSQWLFSALAEAGLPVICVETRHMRAVLKAQINKTDRNDARGIAQMMRVGLYRPVHVKTLRSQKQRMLLTHRKLMQSKAIAIENDLRATLRNFGLKVGVVGTVKFEARIKELVENLPDLVVLVEPLLIVRRVLREQIGILHRRLLAIVRKDAVCRRLMTVPGVGPVVALTYRATVDVPSRFRNSKAVGAVFGLTPSKHQSGESNRTGGISRCGDEMMRMMLYEAAHIMLVRSAKWSWLKAWAMKIARHRGLKKAIVALARRLAVIMHRIWVDGTEFRWTREVAAA

SEQ ID NO: 80919 - protein, 343 aa, unidentified
MTHHVGLDVSVRETSICIIDEAGTIVKETRVPTEPSTIIEVLTAPGIACRRIGLEAGPLSQWLFNGLAGANLPVICVETRHMKAALAAQVNKTDRNDARGIAQMMRVGLYRSVHVKTRISQEKRMLLTSRKLLQGQIRALENDLRGSLRTFGLKVGATSAGAFDERVRELVVEHPALAAIVGPLLAARETLRAQFLVLHRMLLKLVRSDAICARFMTVPGVGPIVALTFQATVDQPQRFAKSKAVGAHFGLAPRQYSSGETDYSGRVSKCGDAMMRSVLYEAAHTLLTHTRQWSSLKAWGVRIAKRRGLRKATVAVARKIAVILHRMWIDSTDFRWGAQPVTA

SEQ ID NO: 80920 - protein, 398 aa, unidentified
MYLNIGIDVAKNIHEVCMVNENGEQIGKYFQLRNSRKSMQKFRTKIESVSKELNAKPRIGLEATGIYWYSLHSELSKYYKVHIFNPSQSSGFSSVKIRDSKTDKIDALTIANMLRFGESPKTNYGNKQRLELREYGRFYFKLTSIKTNLKKRMGRNLHLIFPGYDQIFKNLYTETSKEILKTILTPEKILETGEEKLFEIMKEKSRNHISPDKAKVLIEKAEDTIPSEIIKESSIFEFQMLFEMIEYLEKRIAAIEEKILFMWSEVRDKHYIQTITGVSQLRAAMIWAEMGDVEDFKNPDQIIAFAGLDPKVKQSGNKEIIRGPSKRGPKILRWVLGWAVQEAKNSNCVLGDYFDRKINEGKHYNTARCATAKKLIRIIWFVEKNKKPFQIPNNLQSS

SEQ ID NO: 80921 - protein, 457 aa, unidentified
MHTIRPNAIRVKRFRELKADLRTRRDRLLVGIDIAKAQHVAQIRHAHTQILDKQLPIPNTPAGFAAFWAHLETRQAETGLTEIVCAVEPTGTYHEALAQFLERHGADVVLVSNHVAHANRRTLDGTWGQSDPKDAHNLCDLLERGHVLFYSLPDERIATLRRLVRLLRSARTDLAACKARFRNTLLPALGPAGEPLPAAVVVTLPAPLLVLLPPAQRRALPEVGADLPPALAFELTDLAARLVSVRTRIAQIEAELVHVATPLPAYRLLLSLPGVGPTVAAILLAEIGDIAWYTRFSQLRKLAGLDIVRVESGQWAGTARISRGGRALLRWALYQAALGAARTPLWRARREALIAKRHGDRFAFFKANIELAAKLLRLVWGVWRSGRPYDPARVGQGPAARPAIAPRVTCAGRRRALPAEPGRAAIAKPSGTPAGRLAARGGVDRPQRIPMRRPRSA

SEQ ID NO: 80922 - protein, 331 aa, unidentified
MLDEHGQLLDQQRIPATLEGYQALRAWAECWPQRCWAVEGAHGVGRGLAQQLVADGERVVDVPAKLAARVRVLSVGHGRKTDPDDAVSVAVAAQGAPGLRRVGVEDHGVVLRLLTNRREDLVRVRTQTINRLHRLLVDLVPAGAGRNLTPDSAEVLLAQVAPSGAPAMTRWQLAGDLIADVRDLDRRIATVQARITAAVTQSKTSLVELFGVGPVLAAKLLGEVGDVRRFPTKHHFAAHTGTAPLEASSGQVVRHRLSRAGDRKLNHALYLMAIVQIRHPTAGQAYYRRKRAEGKSAKEALRCLKRRLSDAVYRCLLADQHDQRRPAAASG

SEQ ID NO: 80923 - protein, 345 aa, unidentified
MVYYAGIDLGKRKSHITVMTAERKVLEDLKIENSPEAFRRIFRKYKGQIVAACEASSNAFWVADTLEPLVEKILVGHTTKIRWIAEARIKTDKIDARILAELVRADLFPSIAIPPRRVRDLRELVRGLIRLRRQAGRLRNHVHGLLGRQGIPYKRSEVKGPKLGELVAEAKLVAPASIAAEALLRAEKALKQEEKVLEAALEKELQEEAKILETVKLLESIPGVGTFSAALFVLELWDIARFRDEKHLASYIGFVPGTHQTGETLWQGRMTKTGNRLVRWALVQDAWIAAIHHEFFGRLYERHRKKKGGGRAIVPVARALLRTIHRVWSQRKSYQELYEKKALVG

SEQ ID NO: 80924 - protein, 385 aa, unidentified
MTYLVCPDTPAVSEYATVHIAWELSKADWKLGVILPGAKTMSRYAIKGGELAAAAARLAAIRAKAGKSSLPVRILSCYEAGFEGHWLHRWLEGQGVVSHEIDPSSIEVNRRARRAKTDRIDLERIMRAFLAHLRGEPKACAIVHVPSPAEEDDKRLSRERERLLKERTAHTNRIKALLHAHGVRDVQPLARDFLTRLKGMRTGDGRPPPPRLAAEIAREHERLVLADKQIAAIEADSKAECRNAAPKSTGAKIVQLTRLKAVGVTGAQVLVNEVFYRRFANRRQVGACFGLTGTPYSSGEDERDQGISKAGNRRARAMAVELAWRWVHWQPDSELTRWFKARVGDAKGRVRRIAIVAVARKLMVALWRYLETGVVPDGAVLHASF

SEQ ID NO: 80925 - protein, 347 aa, unidentified
MKKIVIGIDISKEKIDASAIDVRNIHHGVQKLDYQTFENRPRGFCRMLVWARHLIKGVGLEEILFCCETTGGYDRSLCDYIYTKDLDIWRESALQIKRSMGVRKGKDDKADSLMIAEYAMRHMDKAVIYETPSGTIRELKALLQYRHKLVQEKTEKKVRMSHLADTAAKSKSMSFILRDARKSVKALEKSIKECEKQILELIKGDEDLDTKYRRIVSVSGIGIVNATAFIAYSNNFKGITTANRMASYYGIASFRDTSGTSVDKKAYVKCYSNSLLKAYLTQAAEWTIRENGIYHDYYLRLKEKGKPYGIIINNARNKLIHLVFSLVENDTDYEKNHEFLRAKRKSE

SEQ ID NO: 80926 - protein, 347 aa, unidentified
MRFYNVTHKHYCGIDLHARSMYLCVLDQEGKILLHRNLLTDPDVFLKAITPFREDLVVAVECIFTWYWLADLCAREGIHFVLGHALYMKAIHGGKAKNDRIDSLKIATLLRGGMLPQAYVYPSEMRSTRDLLRRRLHLVRQRGELLAHIQNTHHQYNLPTPKARITYRANREGIAEKFSDPSASESVSSDIELAGHYDSLIRDLELFLTRKAKLHDQGNFFRLRSIPGVGKVLAMTLLYEIHDIDRFERVQNFASYARLVKCEKSSSGKKLGTGGSKIGNVHLKWAFSEATVLFLRANPPAQCYVDKLRKKHGKAKSLSILAHKLGRAVYFMMKRKESFSMEAFHMA

SEQ ID NO: 80927 - protein, 322 aa, unidentified
MNPKNYGGIDVAKKNFVIGIYGQDKTKTGANTPKGHAKAVEYLQKHNVDLVVLESTGGLEVPLANALHAADIRVVIANPQRTHQYAASFSLGKTDHLDAKMLADYAQALDSRKMADDMCYAPPSEEALALEALVKRRSQLVEMRKMEKNRLEQTHASQKASVVAMIKHLGELIAALDKEIDQSNRGGFNGKGEILSEIKGVGRITCATLLSMLPELGKVPHKRAALLVGVVPPPRQSGEKEKKSGCVGGRMVVRNALYMAALAATRSEPKIKAFYEKLMSRGKAFKVALNACMHKLLRILNARMRDYLASLKETEESELQGA

SEQ ID NO: 80928 - protein, 357 aa, unidentified
MTIIIGIDMHVKTLVCEIGYGKMFPYKKTFMNDLAGHEKLFSYVDQLKKEHAIEDVLMGYEASGLGYVLYDRAIDRGYRCAVLAPTELLRSATGFKKKTDKKDASYIYETLRGHVLAGNRLSNIWVPDKEFREDRDLVRTWFDISEKISTVKTQIQTLLKKYGLRRPDEIESWTRAFMGWMEYEGSQQGKGFQISLDSLLRQLKSLNDESKLIEREVKALSQNKRYKRMCDALLTIKGVGLKTAMSFITEMGDMRRFQNRRQVGAYIGLVPSSFESGDASDRKGRITRNGPYRVRSILNQALWVHLKYNGEEKAYYDKIVSKNPKRKKKAVVACMRRLAVRMWHIAHNADTDYLKVA

SEQ ID NO: 80929 - protein, 337 aa, unidentified
MLINELSVRFHVGIDVSKLTLDIFILECNIHKKVSNNPRGFNELLQMIEKNTHVSPELVVFCFEHTGLYSLSLALYLEERNLHYAMVAPLELKKSLGITRGKNDKVDSARIADYARRFGDRVPLTKLPAKDIRKIHYLLNMRERLVKNMHGHLVTYKETLRVMRPSDFPELFSFYESTISMLKAKIKEVEHQIKTLLKENSALWSSYRLITSVKGIGLIVAAYLIVYTCNFTRFDTWRRFSCYSGIAPFEHQSGTSVKGKTQVSPIANRQIKMLLHLSAICALHTDTELREYYQRRQAEGKSKMAIINILRNKLIARVFAVIKRGTPFVDIKRYAAT

SEQ ID NO: 80930 - protein, 407 aa, unidentified
MFVGIDVAKDSLVACAMDDQGEDVFHSYSVENNRPGCLKLINLIADNANLLQPDIIKIGMEATNVFWEHCYRLIKKHELLNSNFKLQLYTVNPKVVSNFKKAYTDLPKNDSVDAWVIADRIRFGRVENSSSPEALYRALRQITRHKFKLAQHIKAEKARALNLVFLKFSDFTQKSPFGTFTKASMALLENYTLREIVNTDIHELAEFLHQNSNNRLGGSTPIEKITTALKKAARNSYRLKPEIDQAITQTLSMTFDNIRFYQSQSKRLKRVLKRQLKAIPQTLITVDGIGPVLTAGIISEIGDINRFDKETNLASYAGLTWSQYQSGSFTAEETHLTKKGNKYLRYYLVEAANSLRVHNDSYKSYYYKKYNEVPKHKHKRALVLTARKFVRLVFALLSKGEIYQPRR

SEQ ID NO: 80931 - protein, 353 aa, unidentified
MFGQVRALVDGVDEFIGIDHHKKFCQVMVKDREGHVIKSGRVVTQKAALSKFLGASNGSYRMAVYEAGPRYRPMHRWLDELVDESVLANPGRLKVISETAYKDDEIDAEKLADFLMLGMIPESYACSDQAWDRRQVLRQRAALVRTQTSFKNRVHGLIDNHPDALPPRPEVSDLFGKLGMEWLRTVELPEADRKRLDQLLEVVLFLNKQIKKSDALVRKILKEDHRARCLATIPGIGNFFAALIIAEVDDIHRFERPKHFVSYTGLVPGRDKSGEVDKPKKIHKRGSKWLRWALVEAAIPATRSNLALKNLYDRVYRKKGPKAGPNVAKVAVARKLAEIVYRILMEERAYEHR

SEQ ID NO: 80932 - protein, 350 aa, unidentified
MQGNGRWIGLDLSKKTYEMCYFDQKGKVGRSGGETTKGGRAKLYAKLKAEDIVAMEANSLAFVMEKELRAIGCTVVILNASQLSVIYASTKKTDKEDALKLARLVKIYEKEDLPIVDVPTEKEYYRRKLTKECKTLKDDRTQEINRLHALFLQCGITTMKRSNLQTDANRQKVLPQLFGYEVGQAKRVCERLTLLDAQIKELEQTITKECKADKDIKRLQTIPGVGDKTALAFAAYVGDGKRFNNGDEVANYLGLVPRVDCSGSINRYGHITKKGNRIVRALLYQAAWSIVRSKHGGALKAKYFYMTERGKGKKISITAIARKMAKLLYLVMKNKQVEYQEMPAPALQAG

SEQ ID NO: 80933 - protein, 369 aa, unidentified
MGEYSEVYVAFDVAKRKHAVAVAESGRRGEVRFIGEIENSGAAIARTLKKLASRHGRLHVCFEAGPTGYGLYREVQALGHACTVVAPALIPRRAGERVKTNRRDAVTLARLHRAGELTGVWVPDAVHEAVRDLVRAREAAADDLRRKRQQLLSFLLRQGHIYSAGGHWTLAHRRWLAQQSFEHQAQQIVFQEGVDAIADAAQRLHRLESQLAIVVPSWSMAPVVAAYQAMRGASFLVAVTFAAEIGDVRRFDTPRQLMSFLGLVPAESSTGDTIRRKGLTLAGNRRARRALIEAAWTYRFPARVSETLRARLDGLPKAIRDIAWKAQIRLCARYRRLSAGGKKLPVIVAAIAREIAAFLWAIGREVAPM

SEQ ID NO: 80934 - protein, 312 aa, unidentified
MDAMVLGIDVSKDRLDVAVRPTGESFVFRRAGAGIEDLVARLRALSPKLVAIEATGGFEAVVAAGLAAAGLPVVVVNPAQVRAFALALGKRAKTDPIDAAVIAHFAEATKPELRQMPDAMTRLLADLVARQRQIVQMITAESQRARRMSDNRLTESIARLRKALENELAELDLSIEDHIRGSAVWAEKEQLLVSVPGVGKIIARSLIAELPELGSLNRRQIAALVGLVPWTRQSGQWRGRSFIGGGRKSVRSSLFVGAMVAARYNPQLKHFRDKLVAAGKPKLVALVAVARKLITILNAILRDRHPWQPIPA

SEQ ID NO: 80935 - protein, 356 aa, unidentified
MLNKFSKNLDFTGHNVYVGLDVHGDSWAVNIIVDEIEHRRFTQPPNPVVLYNYLCKNFPGASYYSAYECGFCGYHHHRKLLELGIHNIVINPADLPITDKEKTNKRDPMDSRRISRALQNNQLKGIYVFNPDHEQFRSLNRMRWRAAKENRRVKNRIRSFLHYYGINPPEELNPEYWSIAFLNWLKQLRLPTEAGTLALDYLLIAYQNTRTQVLQVTKHIRRQVKLHYSNVYKRLITVPGIGPINAMCMIAEIGDMSRFKSCKHLASFVGLVPRSHQSGSKDPNCSLTYRSNKYLRSALVESSWMALRYDPALLKYYKERIVKHKAQVVITKIAHKLLNRIRNVWLNENTYQIGLS

SEQ ID NO: 80936 - protein, 339 aa, unidentified
MAIYAGIDLHSNSNFLSVVDNAGKIIEKRKLANDVQAILHPLATYRDQLQGIAIESTFNWYWIVDALMDEGYRVHLANPAAIQKYSGLKHSDDASDAAWLAEMLRLGVLPEGYIYPKAERPIRDLLRKRGHLVRLRTSLITSLQGIISRNNGHSLTGNQIKQLKINRVAPLCDANEDLALCGDVSKDAIDYLGRQIKRIEKQAEERFELRPAYKALLSMPGIGVILGLTIMLETGPIGRFAKAGNFSSYCRKVPSTWISNGKRKGSGNTKNGNKYLAWAFSEAAELARRYDDASRRWYDRKLSRSNRVVAHSALAHKLARAAYFVMREGVNFDHEKCFA

SEQ ID NO: 80937 - protein, 408 aa, unidentified
METIHPICCGLDVHQASVSACLRRVNAQGAVSVESREFGTTVKDLVALADWLVEEGCPIAAMESTGVYWKPVWNILASLLDVWVINARDVKQRRGKKSDRADAKWIAELVAHDLVQPSFVPPARIGVLRDLVRMRTVLVQGRTQVKNRVLAVLEDTNVKLASVVSDPFGMSGRKMMEALVKGERDCKVLSEMAMGVLRRKIPQLEVALQGSFTEHHAFLIRLGLESLDQSNRQIAELDAQIERLMEPLQEEASRLTSIPGVGQNAARVVLSEIGTDMSRFGSAERLASRAGLCPGNHESAGKRYSGKTRKGNRYLRRVMAECAWAASKTNTFLGRTFRRFQIRIGGKKAAVAVGHKMLVIIFHLLNEGQLYDDGRYDSISQREQIRQRNRALTTLQRLGYQVALTPAS

SEQ ID NO: 80938 - protein, 338 aa, unidentified
MIVIGVDVHKQSLTAAAVDETGRLLAERTLAGGEDGLLAWAAALHAERLWAVEDCRHVTGALERELVAAGERLVRVPPKLTAPERRAGRKRGKSDAIDALAAARAALREPDLDRPRPGEERMRELKLLVVHRDDLVDERRRAQQRLRWHLHQLDSTLTVPPGALDRAIQLERVGRWLARREQSVQVRIARDLLARCRSLGRAIAELERELATLTARSAPALLELPGCGALTAAKLLCEIGPIERFQTDAQLARHGGVAPLEASSGRTRRHRLDRGGNRQLNCALHRIAVTQARMHPPARAYLERKQSEGKSRREAIRCLKRQLARVVFNTLKASPALT

SEQ ID NO: 80939 - protein, 388 aa, unidentified
MAPYVDENRKEPDDMTQNPHSESSLYMAMELSNQEWKLAFGDGKQTRLVGMPARDAARLKREVAKAKVKMGLPAEASVYSCYEAGRDGFWIHRMLEESGIRNLVVDAASIEVNRRMRRAKTDRMDALKLLAMLLRHWLHGERTHWSAVRVPSEADEAQRRHHRNEERLKKERTQHLVRMKSLAVLHGTCFSRLPKDWTAVRDWKGRPLPPELVRELEQERERLEVVDRQLKEIAERRRTRMRAAKKGAEATSSERWAAKLAGARGVGEDTAWKLAHEFFGWREFRNRRQVGAAAGLTGSPYSSGDSQREQGISKAGNARVRHLMTELAWRWLRFQPGSALAKWYAARFAEGTGRMRRVGIVALSRKLLIALWRYGAHGVVPEGALIKA

SEQ ID NO: 80940 - protein, 407 aa, unidentified
MYYLGIDISKKSFTVSVLDEEGEAITRFLTFPCTRKGMEKLVDKISSLKLEKDKTVIGIEATGNLWENLYSFLEGYKVIILNPYQTRKYHQVLSKKAKTDKVDSLVIAGLLRSKEALASYVPEEEVQVLRELVRLRHHLQKDKKNYLRKAYSLLNLVFPEYTDLIKSPFKKVSSMILKKYPTAVDMARARRTDLVKMARRIQGNNYSSELAEKLIEAAKESIYSGKASEVRGMALRILIDEIQFLKNKIKEIEEKIEEILSSNEPSSPQKRLLSIPGVGPKTVAAFLGEVGGDVSRFSSANKLIGFIGWHPRISESGESKNLHPKMSKKGPSALRASLYMAAVASLKHNPYLRSLYHRKISEGKESKQALISVGKKIISIMYSMLKYEAEYDPQRIFFQLEKEQVLT

SEQ ID NO: 80941 - protein, 378 aa, unidentified
MEDTQVPECNGSGLQQYLYIAFELGNTNWVLGFSNGKKIRYRTIPARSMVDFFYEMKLAIVKLGLPNDVQIVSCYEAGRDGFWLDRVLEESKIQNLVVDSSSIEVNRKARKQKTDRMDANKLVRMLIRYINGEEQVWSVLRIPSSKIEDERRLHREIERLQKEQTAHTNRIRSLLCIHGIVLDRIETSPQWLSNCKTKDDQPLGEGLRGELARELKRLQIVREQLKEVQLEKSKILKEGQSESVEKSRKLLKIRGIGPVSSWNLVFEFFWRDFDNRKQVAAAAGLVPSQYQSGKMDKDLGINKEGNRRVRSLMVEISWLWLRYQPQSNISKWYQQRFGSGGSKRMKKVGIVALARKLLVALWKYLEKDIVPEGALIVE

SEQ ID NO: 80942 - protein, 337 aa, unidentified
MPQTFVGIDPAAESFTAALYPHPAAATACTFPNTSEGVTAFAQWLRQQGLPSAELQICIENTGVYAEALCYQLHESGYSLSLLDPRKVWKAFPAGQPKSDPLDSRKIAEYGFRYADQLRLWQPQEVIIEQIRVLLSTREQLVQQKTATQNTRSTLARKVIQTPAANQALEATLTLLKAQIATLEDELKRLIRTHPTLLQGTALLLSAPGVGWLLSAHLLVLTRGFAEVPRYRTLAQYLGLSPNEHTSGTSVRRPARSRRYGPATLRKLLHLAARTLRTHDREARHYFLRKTAEGKPKALVLNNIANQLLKRLCAILRSRTPYIPGYRSVDPRQLALA

SEQ ID NO: 80943 - protein, 415 aa, unidentified
MALKIVYKICCGIDVHKTFVVACIASTDKHGVTSYESHRFSTYTKDLKDLLQCLLVRNCKDVCMESTGKYWIPIYNILEKECSIVLAHPKYVKAIRGKKTDKKDAKWIADLFKHDLVAGSFMPPADIRQLRDLMRYRFKLTCFKSSEKNRLQNCLTVSNIQLGNVVSDTFGKSAQAILDKILENPEDTSFDLEPLVFKSLKKKLPELRDAIDGYITPEQAGKLKIIKAHYENLESRKAELEELILALAAPYQQELAILQTAPGIRSDFTAIGIISEIGTNMEAFPSAKHLCSWAGLTPTNNESAGKKKSVRVSKAGCYIKPLLVQCANAVVKSSKHPEMRNRYLRLKKRRGHKKAIIAIARMLLTALYHMLKNSENYNAELYRKSDLPPVDREITVEQAILIARNQGYKIKSATA

SEQ ID NO: 80944 - protein, 350 aa, unidentified
MKQTSALPEIGAIGVDLGDRRSHLCVLDAGGGVIEEASIATTWRAFEARFTGIPRCLVVLETGTHSNWAHDVLAEQGHEVIVANARKLRAISSNERKSDRLDARMLARLGRFDAQLLAPVQVRKEQTRLDLTMLRARAELVELRTALSNSLRGLSKSAGHRLEGSVQCLHKQPLHPSLEEHLRPMLEALAAVSRAIAAYDQRLESVTRQRYPQCALLQQVAGVGPVTSLYFVLAIDDPKRFKRPRDVGAYFGLVPRRDQSGSRDPELAISKAGDRLGRTLLVQCAHHILGRFGKDSDLRRFGQRIASRGGTRAKKRAVVATARKLCVLLLALLRSGEVYEPLRNSPAPAV

SEQ ID NO: 80945 - protein, 351 aa, unidentified
MMIIGVDYHPSFQTIAFLVEETGECGEQELNHGDGQAEKFYRDLKQRGIRVRVGMEATGYSRWFERLLTELGFELWIGDPAEIKAKRVKKQKTDRNDARLLRRLMLENNFPQIWVPSPENRDLRQLLWHRHRLVQMRTRIMNQLQALAMNEGYRWKKKLFSEQGRAQLEKLALAPWASRRRQELLELLDRLNPTIEELTAAVEREARKRPEVLRLMTHPGVGPLTALAYVLIIGTPARFQRGKQIGTYVGMIPSEDSSAGKQRLGHISKQGNSLLRFLLVEAAQAAARIHPDWRRRYIHLAMRRHRSIAKVAMGRRLAIRLYWMWRNGCEYSQSLEFGSYAGQLGTVHGAK

SEQ ID NO: 80946 - protein, 331 aa, unidentified
MTNATHETVTDSRPMDYIGVDMAKARFEWGVHGVRATRNTTNDPAGFEVLLADLRQRRVGLIVIEATGGLEHALASRLLQLGLPVAVVNPRAAREFARSMGHLAKTDAIDALALAHYAHTLAHKANQAGVLLTPLPAHLELLQAMVLRRKQLIDMRTAETNRRGGPMRVLRQSIDAVLKTLNRQIDALDQDINTHLDQHFNELDQRFENIKGIGPNTCAAVMAFMPELGHVSNARAAKLAGLAPLNNDSGNSRGKRSIWGGRSIVRSALYMATLSAVRFNPVIKVFYQRLLAAGKPKKVALTACSHKLLRILNAMARTGQNWNPELHGLTP

SEQ ID NO: 80947 - protein, 360 aa, unidentified
MSELTFIGLDVHARSVAAAVLDGKTGEVRSCEAPARSAELVPWLAGQGDALSVAYEAGPTGYGLARACEAAGIPCLVAAPSKIARAPGDRVKTDRRDALLLARLLRLGELTAVRVPSASEEAARDLVRAREDARCDLTRARQRLSKLLLRQGIVWEGGKAWTPAHERWLTAQRFPERGLALAYEQGMAAMLAVLQRRDALDRAIGEEAAKEPWAPVVGRLGCLRGVSTLTAFGLAVEIGDWQRFDGRSLGAYLGLTPSESSSGERRSRGAITKTGNGHARRLLVEAAWQQRRPLWRPSRELVRRREGQSPAACARAEAAGVRLNRRWRSFDRRGKRSTVAAVAVARELAGWCWSLAVMEG

SEQ ID NO: 80948 - protein, 345 aa, unidentified
MLYVGLDLSRKRLDWQALRPDGERAAIGAVPPDRDGLSKLVRRLGDGEEVLAVIESMSGARFVHDELELQGWDVRIADALKARGIAPLACKTDTIDTWVLAELARLELVPEIWLPDPEVRAERERARFRLHLVKHRSSLKNRIHAILFQHGVPNTSSDLFGVGGRALLERLQLPEPWASTVAASLELIDLLDERISSCESELRALGAEHRYIPLLMTCPGIGWVLAFTIASEIGEIGRFQSPAKLVGYTGLCPRVEQSGERDRRGALRKNGPSYLRWALVEAAHTANRHPCYRPVHERFLARHCRKRGTKLAAVEIGRRLAEAIWHMLTTNEPFAPAGAPVSLAA

SEQ ID NO: 80949 - protein, 385 aa, unidentified
MESTPGDTLLVEVTYDYMKALPHLLHYMWSSRMSYIIGCDAHKHYSQFAVYEGDQTRGKQVRVEHERGAIREFLSEFPEGTRVALESIGNWYWIVDEMEQAGCKPLLAHPAKAKAMMGNVNKTDKLDARGLAMLLRNGTLPTVWIAPSQVRDERELPRTRMALCKIRVALKNRIHASLAKYNLSLPTESDIFAPKWNSQLNQVIEQLPAETQKCLQQELELLDKVQGQIDAMEDRMKVCISLTPSMQLLKTVPGVGDILAIVIGTEIGLIERFSSAEQLASYAGTVPAVKSSGGKVRYGHTPKESNHYLKWAFVEAANGPAQYAKKPHWQHRHVTRLYERVKLRKGHSVAVGAVARHLAEATFWILNKNEPYREPTHQKVLPKQA

SEQ ID NO: 80950 - protein, 361 aa, unidentified
MTAHNTIGVDPHRQTFTTTVLDPRGGELGHAHFPNTRAGHDAGLTWAAGYGSIERWGIEGASGLGRHLAEFLVEAGCDVRDVPPHKTSIRGRGRHEGKTDRLDSHRVAAETQTNPRLARAFKHSISAPPDAIRERIALWHNARTSLTKVRVQLLGELDALVHDLPEDLRDQLPVTKTVSARVNSLGRLDTSGVTDPTVTLRLRLIEHRVATLHAVLEQDKAATAELTALVDETESTLTGLVGIAPRAAAAIIVEVGDIRRFTAAGFARFNGTAPIPASSGEGDGEPVRHRLSRGGNRRLNAVIYRIAMIQLRYEPRARRIYDQARANGHTRREAMRILKRHLSNAIYRTMLRDARRASGLT

SEQ ID NO: 80951 - protein, 344 aa, unidentified
MVEYVGFDVSKEETAFCVKDAAGEVLARGKVSTDPRALFEALRAHCLYPGRIVLETGTLSGWLARELGGLGVGVDVIDARQANAVMRLQHNKTDANDAELLAEIARTGFCRPVAVKSAAAQASRALLKARCHLVRQRRDTQNTMRGLLGSLGIRFPKGSGKLAGRVREALEGRPELRVVIEPLLSTVAALEREIGRLDKAVVARAKGAPACRLLMSVPGVGPVTALAYVSTIGDAERFANSRAVGAYVGLTSRRWQSGGMDYSGRISKHGDAMLRALLYEAANSLLTVVRRAHPLKDWARRIRKRTSHKKACVALARRLAVILHRMLITGEAFRWPAKKESVTA

SEQ ID NO: 80952 - protein, 322 aa, unidentified
MKKSTTISVDLAKSVFEVAVSDHPGRVRERHRLSRAGFQRFLAQQQPTTVLLEACGSAHHWGRQLQSLGHRPLLLPPHEVRRYVRRNKTDRADAKGMLEAYRNEDIQPVPVKTTGQQALMALHRTRSAWLATRTARINLVRGLLREFGVTIPLGSHNVLPRIAAVLADPPDELPAPVRPLLEALAAEILDLEPRIRSVELQLRTLARDTPTVGRLMTIPGVGLLTATALVAFVGNASHFRSGRRFASYLGLTPKEHSSALRRPSGAISKCGDTYLRTLLTHGARAVLRAAAVSAGHGKPLDRLRAWAVWVHDEPFREVPTTV

SEQ ID NO: 80953 - protein, 412 aa, unidentified
MCNKIFIGVDVSEATLEVAFLRGDGTPVRPNQTFPNIPGGHRDIKGAVIAAARLIGRKTKIIVGMESTANFHKNLELVLIDNKPQNIEVHVINPRCTKNFRKMNLKVFKTDKSDAQLIALYLAKIQPKPNAHDIEGQEELKELTRLRRSYIEESTKFKNRLRKLLRRYFPEYKQYLGKQISVKMLVAFSKFGEPDEILKKNINSIANTKTAFRHKIGTDFSFALTQLAKQAPNRRPNKGVVIAIKLTAQRILDIMTQIKLFEKLIEQTLNDYFPGHKLHSVPGLGSISIASIIAEVGDINRFDSVDKFIGYTGLYPVVWESGEMKVRFKMTNKGNKMLKMTFLIASAPARKFNPVIRFFYDRLRANGKSKKAAGGAVARKLAVIVFTLLYKNEEWNPEIAAKYLERSLKKTG

SEQ ID NO: 80954 - protein, 488 aa, unidentified
MARLLEHSPRPESTYRPTWAVVFGKAEKMQDKRKVNAGSSKQIAGLPVVRHKVAGIDLGSERHWVCAPTGEGSGRDVADFGATTCELIRMAQWLKARKVESVAMESTGVYWIAPHEVLEAEGLEVMLVDTRQLARVPGRDKKSDPFDCEWIQRLHSCGLLMGSFRPKEAVCMLRTLVRDKGNLVAEAGDWLRRMQKSLDQMNVRVHRAVSDIDGVTGMAILRAIVDGERDARQLAKLRNPRCHKSEEEIAEQLSGHWREDHLFSLRQGLKMYDAIQERITDYEKEILQKLAEMEREECRGPEVPKSKNPQKGRAIQSRGEEPMRQALYRMSGVDLTGIDAIGVETVQVVLSEYGPDLSRFPSEKQFVSHVTLAPHKPTSAGKPVKKKKRNSASTRVAAALRMAASSLRHSETALGAYYRHIARRIGGDVAVFATARKLATIIYRLLRWGQPYVDEGAQTYEQRYRENRIKSLTARAKELGYQLTPTTA

SEQ ID NO: 80955 - protein, 349 aa, unidentified
MEVLIGVDPHKATNVVAAVDEQGEAVGQETFPADRKGMRALERWAKHFPERSWAVEGAGGIGRPLAQKLLASGERVVDVPPKLSARVRVLSTGNARKNDRLDATFTALAALRNDRLASVQPEDGPEGRAEILRLLTERREDLVAERTRALNRLHVLLRDLLSDPVRKQLSADAAARLLRRARPQHPAGRVRRRLASELVRDVRALDRRMAELDERIAVEVEASGTTLTEIFGVGPILAAKIVGIVGNVGRFPSKAHFASYAGVAPIEASSGEVVRHRLSLAGNRRLNQVMHMIAVCQARSDPRGGAYHRKKLAEGKSRREAMRCLKRRVSDAVFGSLVADSARASLESA

SEQ ID NO: 80956 - protein, 337 aa, unidentified
MESQLRVGIDVGCRAHRVGIADPSGAILEEFDISHSEAGFQEFFRRVEGRRQELHLPVAVAMEGYNGYARPLDRLVQKKGYRLFNVNNLKLARFKDVFPGAAKTDPIDARKILELFHLREHLPLAKAALQEVLPASDVNEKLKRISRRRRQLVIEKLRVLNRMQGDLQAVSPELLAATHDADNLWFLRFLSFRDDLRQLAKLRRTTIREIQGVGVKFAQVIEEWQRKATFSDEVEYVGPMIVEDAKRVLDLHRQIAALDEVLAELSAQSEIARRLGTIAGFGKTSIAELAGEIGTLSRFSGEASLALYVGMSPLTVRQGRAHERRHRGRSTLVAGRQ

SEQ ID NO: 80957 - protein, 374 aa, unidentified
MKHYSTVYVGMDVHKENFSLCCYTNEKEQAEYPQRVPADYSKVINYIEAMRFHYGDDVLFVCGYEAGCLGYTLYHELMAHNLKCVILAPTTMPVPSGRKKVKTDKRDAALIARCLAHHDYSPVHIPTQKDEQVKEYLRMRDDHKLALKKVKQQILAFCLRHGYHYDGTKSHWTQTHLAWLRALKADALYQEILEEYLLTYDYLTGKLARIDQRIEELASDDEYRENVAKLCCFMGIKTQTALSVITEIGDFKRFPDAEHYAAYLGLVPGENSSGEGQNRLGITKAGNRHLRMLLVEAAQSYSRGQIGHKSKGLTDRQSGNSPAVIAYADKANERLRRKYYRMVLKNGKKANVAKTAVARELACFIWGMMTENIA

SEQ ID NO: 80958 - protein, 404 aa, unidentified
MGKIYVGIDWADDHHDIYITDDSAAALDSFSIPHSHEGMEKLISRVAKCCAERESVLVAIESHQGLLIYALLEAGYLVYPINPKAMNRYRDRYRMSSSKSDPKDAMVLANILRTDLHLYKPLPRETVFDARLRHLTRSHKSLGQQKTKLLNQLTTQLKSYYPVALRLFSRLDHKITLAFLERFPSPEKAMDASLEDLRRFFREQSYSHQWRVNGIYESLHEPSLRAPIELEGIHQTIVLSLTPVLRSLVIEIERLASKISEEFEHNQAHEVFSSLPTGELTAARINGELGSDGARYPSREYLQTAAGTAPVTRRSGKTVVVFFRWQCNKHLRAALQDLARDSVKRCPWAREYFAGQMRLGHKPSRAYRALANRWAGIIWKMLQTGQRFDQSRLDKHLAKAVATN

SEQ ID NO: 80959 - protein, 346 aa, unidentified
MDQIIRIGMDTSKHIFQLHGVNAAEEPVLRKKLRRQDMVAFFTKLAPTVIGLEACGGSHHWARLLRSLGHEVKMLPPQYVKPYVKRGKNDAADAEAICEAMSRPTMRFVPVKTADQQAALMLVGLRDRLIRQRTQLANAIRGYAAEFGLIAAKGLVRIEPLLERIRADDTLPPLARELFDIHAKDYTQLQARLEEVDDKLMAWHRADECSRRLAKIPGVGPIGASMLVMKAPAPEAFRSARHFAAWLGLTPKDHSTAGKVRLGVITRAGDEALRSVLVVGATALLQQVRRGRGSASPWLEALLKRKPPKLAAVALANKIARIAWKLMVTGEVYQPQSAPPARAHAV

SEQ ID NO: 80960 - protein, 351 aa, unidentified
MSFKTDSATARTIGIDTGKYTLHMIGLNEKGTIVLREKVARGRIAARLVNVPQCLIGIEAGMATHYVARELIALGHDVKQVPPAYSKPFRQGHKNDFRDAYAVAEAVQRPSTRCVPVKTDNQLDLQALHRVRSRLISDRTAVINQIRSFLLERGIPVRQGLRFLRHQLPDILAARTDVLSPRMVRIVEDLVGDWSHLDERIENVTDEIEALARDDASCRQLMTVPGIGPIIASAMVAAIGNGIAFARGRDFAAWLGLVPKQMSTGDRTILGRITKRGNRYLRTLFMQGARVILLRPANWAKHSFGLWLTAAAQRLHHNVLATALANKLARIAWTVLAQDRSYEARVEPKVA

SEQ ID NO: 80961 - protein, 342 aa, unidentified
MYYIGLDVHKKTISYCVKDASGQVHQEGKVGATRRELDSWIKTLPQPRTMAMEATIFTGWIYDHLLPHAQQVKVAHPLMLRAIAAAKKKNDRIDAGKIADCLRCDFLPECHMASTQIRDRRRTLRYRHLLVRQMVQMKNRISGLLMETGVSYNKQRLHKVGYFRELLSTNEDVHESIRPLLKLSRDTVVRLQKTEYALVSSLQRDPLLADRIKRLRTVPGVGPITALTWALEIGEVARFGSIRQAISYCGLCGEEKSSADKVMRTPLSKQRNKHIQRVLVEAAKLAPRQDHDLALVYETEKQKGNANRATLAVARKMVAYLLAVDRGQRDFVPAEDYQRAAA

SEQ ID NO: 80962 - protein, 361 aa, unidentified
MVIIGIDAHKATHTMVAVDGMGAKLGQRTVPARTEGHRQALRWAHSAFGSEVTWAVEDVRPVTRLLEQELIDAGQTVVRVPTWLMARVRGKGRSSPGKSDPIDALAVARSVLQEFELPTAHHDAVSRECKLLVSHRDRQVKQRNGAISRLFWYMHELDPDYDLVARRLYTRRNREALNAWLLQQHGPVARLALDELSDVGRLTDAARHIESDLADLAEQAAPNLLTLPGCGPVLAARIVGIAANVTRFRDESAFARFAGVGPKPNWSGSSYGRMRPYVGGNRQLNAALHHIAMVQIRDGHAGDRYYRKRVDEGDSAAKARRSLKRRLARVVFTRLRADYLARNPSEKVQSQSRHKGQHPGG

SEQ ID NO: 80963 - protein, 414 aa, unidentified
MQHDTPAPTAGIDWATDSNELCIIDPTGQTVHRRNTACDAAGIRRLIADLECHSVTRIGIERPDGPIVDALLAAGLQVVVIPPRKVKHLRARYSMAGNKDDRFDAYVLADVVRTDAHRLIPLQPDSAQTTVLRSAVRARSDLVDTRVALCNQLRAHLLTVFPAAVGLFADLDSPISLTFLTHFPNVDKAAWLGARRLGAWLAANHYSGRTRTSVLLDRLRAGPNGLTGDAGATAAHTTIAYVNALLAVRAQIDVLETHIAEQLIGHPDAHIFTSLPRSGMIRAAKLLVEIGDARGKLPTEASLAALAGACPSTRQSGKHHIVTFRWACNTKLRDAVMDFAADSRRASPWAAAIYDRHRAAGKTHQHATRILARAWLRVIWRCWQDGVAYDPTTHRGARQLLDPTEKAEEVRDVA

SEQ ID NO: 80964 - protein, 312 aa, unidentified
MADMVRLAGLDVSKDKLDVYVTPSGESRTVGYDRRGLAGLRRWLVGLGVALVAVEASGGYEREVSEVLEEAGLIVHRLNPLRVRRFAQLKGRLAKTDRLDARTIAEFARTWPQEHQLRRDPRRERLAEHLLVRRHTQDAILDCINQLEHLRDGRLRRLVMARKASMERTLARLDRCLVELIAEHDDLAELSQRLRSVPAVGPVLATTLIALLPELGSLTRRQVASLVGVAPFDRSSGRQIGAKSIQAGRSLVRNALYMAALVASRHNPAIAAFAERLAGKPGKVRLVACMRKLIVTLNAMVRDGSQWQPRTA

SEQ ID NO: 80965 - protein, 377 aa, unidentified
MSKIRFVGLDVHADTIAVAVAEMGGEVRSLGVIPNRLESVRKMVGKLAPIGTLKCCYEAGPTGYVLYWQLARLGVACEVIAPSLIPTKAGDRVKTDRRDAEKLARCYRAGELTAVWVPDEAHEALRDLVRAREAAKKDQLRHRHRLGKFLLRHGKRPTGAGQVWSQKYLNWIRIHVRFEQPALAATLAHYLEEVDHIAERIAKLEQGIDEAVAQAAPEIRAVIEALQALRGVAQTTAATVVCELGSLARFQSPRQLMGYSGLVSREYSSGNRIQRGAITKTGNAHLRRVLVEAAWTYQHRPNVQGRVLRRQRSLALSEEAKRIAWKAQQRLHKRFTALAARGKNHNQVVTALARELLGFMWAIAVHTEAQCKLKKAA

SEQ ID NO: 80966 - protein, 359 aa, unidentified
MRAHDWTPGPSIEWRTAMEEYIGLDVSMKETAVSIRRAGQRIWRGKCASDPSVLAELIRKRAPAVKRVVFETGPLSVWFYHSLRTEGLPAICIDARHAKAALDMATNKTDANDADGLAQLAEVGFFREVRVKGFDSMLTRTLVAARTRLVRITTELSNQIRGVMKTFGLLVPAGKGSTFEKNVRRLLADQDRLASIVLPMLEAWRGIRVRAAELGRQLVRDARQSRACRILMSIPGIGAITATSFTTAIEEPGNFRKSRSVGAWIGLTTRRYQSGEVDYDGHISRRGDHHLRGLLYEAAAVVLTRSSTHSTLRTWGLQLRERIGFKRAAVAVARKLAVIMHTMLKTGELFNPNAGAAAA

SEQ ID NO: 80967 - protein, 394 aa, unidentified
MKLIGIDIGKNKHFFCVMDQQTGEIISQPVSFSNDKEGFDFLVQKIKSYPKDSILIGMEDTGHYHFALLKYLLDLQYTVALINPKTTDFNRKMQGGITKNDKLDTINICDVLDTPERKKQYRITKVNSFDLYEQKQLTRHHHNLKEEENVYKNRLQKCIDIVFPEFNNLFNSKYGTVYMNILKMFGSAENIANTDIRTIRKCFEIEGRGNRISLTPERLKECAGSSIGISSSAEVIQIKHLTAQIELIEEQLTEIDKKIEEFSIQNNSPILSIPGISHFSGTSILAELGDISNYSKPSQIIKFAGVAPLHYESSQFNAQHTSITKKGSKYLRKTLYQIMLPVIRHNPVFTKYYQLKISQGKGHRCAQGHCVRKLLRIIYHLLKTNQQFDPQLLR

SEQ ID NO: 80968 - protein, 279 aa, unidentified
MEHYAGIDVSLELSSVCVVDAQGKIVKEAKVASEPEAVVAFFEALGFAVKRIGLEAGPLSQWLHAGLKEAGFETVLLETRHVKAALSAMTVKTDRKDARGLAQLLRMGWFQQVHAKSMASQEVRALLVGRKQLLGRLIDVELSIRGILRGFGLKVGAVTRKGFEARIRELVTGHATLERIAEAMLSARAALKAEYEKLHKAVLAIVREDAVCRRLMTVPSVGPLVAITYKSAMDDPSRIAKSKAAGALFGLTPKKYQSGEKDVTGGITRTGDEMVRTAL

SEQ ID NO: 80969 - protein, 374 aa, unidentified
MTEYSEVFVGIDTSKLRNAVAIAEGGRNGEVRYLGVIDNTEVATSKLVKKLAAQHRRLTFCYEAGPTGYGLHRLIKTLGHECVVVAPSLIPKKPGDRVKTNRRDALNLAKLLRAGELTAVWVPDARHEAMRDLVRAREAAVDDLKSKRQQVLSLLLRLGRHFTGKRTWTRAHMNWLVSQKLAHREQRIAFEEMLLAVRQANERVIRLERAIAAAVPDWSLAEVVPALMALRGLDLISATIFLAEIGDLSRFASPRQLMAYLGLVPGEASTGDRVWRGGITKAGNHRARRILVECSWSYRHPPRVGKKKLAKVEAAPPAVQEIAWKAQARLTARYRALARRGKRPTLVVTAIARELSGFIWAVSRAVGQPATPAK

SEQ ID NO: 80970 - protein, 345 aa, unidentified
MDHFAGLDASVKETSVCIVDEAGRIVREVKVASEPEALLKVLGNPAYRCRRIGLEAGPLSQWLFSALAEAGLLVICVETRHMRAVLKAQINKTDRNDARGMAQMMRVGLYHPVHVKTLRSQKLRMLLTHRKLLQSKAIAIDNDLRGTLRNFGLKVGMVGAAKFEARIKELVENFPDLAVLVEPLLVVRRVLREQLSILHRRLLAVARDDDVCRRLMTVPGVGPVVALTYRATVDVPARFRKSKSVGAVFGLTCAKYQSGEIDRSGAISRCGDEMMRTLLYEAAQSMLFHSTRWSWLKAWAMQIARHRGMKKAVVALARRLAVIMHRIWVDGTEFRWTREQATAAA

SEQ ID NO: 80971 - protein, 343 aa, unidentified
MYYIGLDVHKRTISYCVKDAAGHVHQEGKIGSTRRELDAWIKTLPQPRTIAMEATIFTGWIYDHLLPHAEKVKVAHPLMLRAIAAAKKKNDKIDAGKIADCLRCDFLPECHMTSTAIRDRRRTLRYRNLVLKQMVQMKNRISGLLMETGVSYNKQRLHKLSYFTELMSGNEEVDESIRPLLKLSRETIVRSQRLDYALVSSLERDPLLAERLKRLRTIPGVGPITALTWALEIGDVSRFQSVKQAISYCGLCSAERSSADKLIRMPISKQRNKHIQQTLVEAAKLAPRYNHELALVYEREQKRGNKNRATLAVARKMVAYMLAVERRKQDFVPAEQLGGTVAA

SEQ ID NO: 80972 - protein, 346 aa, unidentified
MTHSTTVGVDLAKNVIQVSVVSARGKELLNRSFTRRKFSEFLGKQKPSLVAFEACATSHHWARAAQRHGHVARIIPAKFVAPFRQGHKTDSNDALAVAESARRPSIKEAPMKTVEQQGLQAIHRSRQLLIQESTALSNHLRGLLMEFGVVIPQGFASLLRAVPEVLEDGENELPDLYRPTLHRMYTRLLELREHIEAMTKEVEVLVKQHPICSRLTALEGIGPIGALLLYATLGSGNVFSSGREFAAYLGLAPRQYSSGGKTNIVGLSKKIGNCRLRSILILGARAYTYRLKEPKSAKDRWLKDAIDRNGHSRAAIALANKNVRTAWAMVTQGTEYQRRGQQKVAA

SEQ ID NO: 80973 - protein, 339 aa, unidentified
MKLYTGLDLHSSNSYLGIIDETGKRVFKQNLPNERERILEALKPYQKDIAGIVVESTYNWYWLVDLLMDAGYQAHLANPAAIKKYTGLKFADDQHDAFWLAEMLRLGILPEGYIYPKEDRPVRDLLRKRMHLVRLRTSLIVSLQNILCRNNGFRIKTADIKALCDDRVAPLLTRNEDLALAGMVSKEAIDFLTRQIKKIEAVIEDKVELKPSYAKLQSVFGIGKILALTIMLETGPISRFAKVGNYASYCRKVSSKWLSNDKVKGKGNKKSGNKYLAWAYSEAAEHARRSYVQARTYYNRKMQKTNFMAAHNALAHKLARAAYYVMRDNVNFMPEKIFV

SEQ ID NO: 80974 - protein, 382 aa, unidentified
MRIIGVDLHTRQQTIAMLDTDTGELVEKTLEHDGNEVRNFYSTLPGPVLAGIEATGSMQWFLRLMEELGIECRVGHPQKIRKAETRKQKHDRRDARLLLTLLAENRFPTIWMPSTEQRDLRTLLRHRHQWVRMRSRVQHTLQSMALTNGLRRGGSLWSEAGQCELQSLPLTRYTHERRAALLGLYPRLQETIDDLDRQVREEAQQRPQARRLMTHPGVGPVTALATDVFLGDPQRFTDGKTLASYIGMIPSEHSSGRRQRLGAMSKQGNSLLRYLWCEATLHAVRQDPELQRFYRHKLIQKGMGKARIATARKLGIRLWIMLRDEIDYQEFCRRGQQRQKCGGAHAGMPDFNLNNAQISFDLRVETRIPTSSFFRSDVFSAV

SEQ ID NO: 80975 - protein, 339 aa, unidentified
MRLYAAIDLHSNNSVLVVLDQKDKVVYEHRHPNDLPTILAQLKPHKKSIQAIAVESTYNWYWLVDGLMEAGYDVKLVNTVAIKTYDGLKYTSDEHDARHLAHLLRLGILPTAYIYPKEERAVRDLLRKRSQLVRDRTTHLLSIQNLVIRNSGKAITQAGIRKLDEKALNLFCEGNAFRVMAIKSSLEILRCLDGQIAMLERKVLEQARLKPEFKQVTTIDGVGEIIGMTIMYEAGDMGRFEEVGQFASYARCVQSSRWSNGKKKGEGNRKNGNRYLAWAFIEAAHHAVQFNERVRKFYQRKKARTNGVVAWKAVAHKLARACYHVVKDHVAFDETRAFA

SEQ ID NO: 80976 - protein, 457 aa, unidentified
MARKSKSKTKGSGRMLPVLHPDAAGVDIGSEEIYVAVPSDRDGEPVRCFETFTRDLYKLADWLQKCCVRTVAMESTGVYWIPLYQILEARGFQVFLVNAQHVKNVPGRKSDVSDCQWIQYLHSVGLLKASFRPPDEICVIRSLWRHRESLVQMAAEHIMHMQKALSQMNLQLHHVLSEITGVSGLAILDAILAGERDPAKLASLCNWRVRSSRETVAKSLEGDYRPEHLFTLRQSLVGYRFYQKLICEVDQELELKMHALPRAEGAPEQMPPRTKAWVYQRAGNEPAFDLKAELFRIAGVDLTDVPGISAITAHTILMEVGPDVSRFRNASAFASWLGLCPEKQVSGGKILSTRSRKVKNRAAIALRLGAHCLYRAKNYLGEFHRRMKWRLGAPEAITATAHKLARIVYHLLSTREPYSESVLIKSDRQANNRAEMRLRRQAANLGFQLMPAPGTDS

SEQ ID NO: 80977 - protein, 457 aa, unidentified
MPQAKRSRKSRDLVPVHPAAAAIDIGATIHVAAVGPERDNEPVRTFRTFTDDLHRLANWFADCGIKTVVMESTGVYWIPIFEILEQRGFEVMVVNARDAKHVPGRKTDVSDAQWLQRLHEYGLLRASFRPQAEIAGLRAYLRQRERLLDYAAAHIQHMQKALTQMNLQLHHVVSDITGVTGMSIIRAIVAGERDPRILASHRERGCHATEETMCQALVGNYREEHIFALTQALELYDVYQAKVAACDKQIQAILARLKQTAPSPANKLLPVRRRSRQPNAPAFDARAALHAILGVDLTQIDGVGPYLALKLVGECGTNLVAWPSAKHFTSWLALAPHNKISGGKVLSSKTRRTSNRAASLLRLAAGTVGRTDTALGAFYRRLSARVGKAKAITATARKIAVLFYNTLRHGMSYTDPGATYYEDRYKQRVLNNLQRRAKSLGFVLREADQEAAQIVVS

SEQ ID NO: 80978 - protein, 343 aa, unidentified
MLDVAVLGIDLGKSSCSVVGLDTGGRVVLRRRVARGALPELLGKLPACVVAMEACCGAHHLGRTAEARGHGVRLMPPEYVRPYVKAHKNDDRDAEAIAEAATRPTMRFVPLKGEAQLDVQALHRARERLVAERTALINQMRALLLERGIVLPQRRRSLAAWVDAPPGAGEPDRLSPRIRLLVTDMRAEWAELDRRIAVFDDEFAADARCDEAARRLATVPGIGPINATALVAAVGDASAFGRARDLAAWLGLVPRQATTGGKPKLLGITKRGSRYLRKNLIHGARAVMPRLAATDTRLGRWLRDLLARAHKNTAVVALANKLARIVWAVLARGRTYEAAAAAG

SEQ ID NO: 80979 - protein, 428 aa, unidentified
MVALDRAILAIDLGEDKQVAVLLDHDGRVLGRRTLLVKAYALGVLLSWAAGQAGRHGFARVVVGCEPTGHRWRVVMQLADDAGMGFVCVQSLRVHLAREADDYTRDKTDHKDAVVIGKLIARLDCYLPERADVDWARLRHLGARRARLVTESTRCRQQIADLLGCCWPAALAAAVKPLDSTTWLACLSVVTGDGAGLAASAVAGLDAFTVAARGCLGRFGVTRLCHRIVRAFYAALTDPAGVAAQRPGALERVGLILADWQHTRARLVDTESRMVGVLDAMDLTALVTSVPGLSAVGAAVILAETGDLTRFASARSVVKHAGLNPAENTSATFHGQTRLSRRGRPALRLAAWRAVWGALPHNRVLHAKFTHLTRRDTDRLVPAQARAACAATLLRWLHAIVTRRRPFNPDIAAGLHRTTGPYTPAVAA

SEQ ID NO: 80980 - protein, 337 aa, unidentified
MIVIGVDVHKHSLTAVAVDELGRTVADRSGPVGGDVVVWAQTLEAERLWAVEDCRHVTRGLERTLLEAGERLVRVPPRLTAPQRRRGRVRGKSDRIDALAVARAFLQEPLLDGPRAGEETLRELKLLVDHRDDLVAERRRCQQRLRWHLHELDPTLAVPLGALDRAVWLDRLGRQLARREQTTQVRIARDLVGRCRTLTRSIGELERELHARTAALAPRLLQLPGCGPLSAAKLLCEIGPIERFPTDAQLARHAGVAPLDASSGKHQRHRLDRGGNRQLNCALHRLAVTQGRVHPPARAYLERKQGEGKTRREAIRCLKRQLARTVYTTLKNQPLLT

SEQ ID NO: 80981 - protein, 348 aa, unidentified
MTPAPGTVTGGVDTHSDLHVAAAVDHLGGVLGTAEFRTTPAGYRKLLRWLQAFGPVHKVGVEGTGSYGAALARHLTENDVAVIEVARPNRQVRRRYGKSDVVDAIAAARAVLSGEATATPKSHDGPVEGLRVLKVVQRSARKARTQTLNQLRAMVATAPAEMRERLRDLKSNELVETCAAFRVRAEDDGLPALTRLALRELAQRVQYLDSQLETTVTRLNRITTAFAPELVALQGVGPDVASTLLLTAGDNPHRLEREASFAALCGSSPLPANSGKRQNRHRLNRGGDRQANHALWRIALVRLSHDQRTRDYVARRIAEGRTKSEALRCLKRYIAREVFNALPITKIN

SEQ ID NO: 80982 - protein, 348 aa, unidentified
MLADQLDYVVGVDPHRDSHALAVVQVLTGAVVFETTVAASSQGYVQALEVVDEHASGRRVFAVEGTGSFGAGLTRFLSGRGERVLEVSRLRRERCSGGKTDALDAVRAARSVLGQERPATPRAGGERQALQALVAAREGAVNAKCAGLAQLRDLLVTTPEPLRSELRPLTQAPLLRRLAATRPEGRRDPELRGSMLALRSVARRVLQLQAEQRELGRQIEALTRKLAPQLLDQPGVGPHAAAQLVLSWSHPGRIRSEAAFARLAGAAPIPASSGQTVRHRLDRSGDRKLNRALHLILVTRKRTHPPTRAYIERRIQEGKTRREANRCLKRYLARSLYRLLEHGPPIAT

SEQ ID NO: 80983 - protein, 297 aa, unidentified
MSPSRTLFIGMDVHKETIAVAYVAQEHGAEVTSLGTIGTRQCDIDQLIRKRQSKATHLIFIYEAGPCGSWLYRYLRKKDDDCWMVAPSLIPTKAGDRVKTDRRDAMQLARLARSGDLTAVYVPQVQAEAMRDLTRAREDALSDCKDATFRLKAFLLRHDIRYTGRANWGPAHLRWLSEVVCPTPTQQIVFQEDVRAVQEHTERLQRLEHELHEHVQAWRLSPVVEALQALRGVQCTVAVTVVAEMGDLTRFDTPRELMQFLGLGPAEYSSGEQRRQGTMTKAGNTHARRVLVEGAWA

SEQ ID NO: 80984 - protein, 422 aa, unidentified
MDGTQRRCIGLDVHRDFAQVAICQAGQVVQAGTFATTPEGVREFAAGLGPADEVALEATGNTWAIVTVLASRAGRVVVANPGKTRAIAEAKVKTDKVDAAILAQLLAADYLPAVWQPDAAIGALRRQVLRRAHIVRQRTRLKNQVHAILHRNLVPRCPAADLFGIKGRAWLAAQQLPPDERAAADALLRQLDFHAQELALIDADLGQVALARPEVLRLMTIPGVDATVALSIVAAAGDFTRFRSPDRLVSYLGLNPRVRQSGGQPASHGRITKAGPAHARGMLVEAAWSASKAPGPLRAFYQRVRARRGMQIAVVATARKLAVLCWHLIIKQEDYAFALPSLVAHKQRKLELRAGLPAARGRKGTAARYSLKAVRAAEHDLAAQGEAAYRTMVAAWQPARPARKKVTGAAASKGTRLIKPTG

SEQ ID NO: 80985 - protein, 453 aa, unidentified
MARKAEKERTRDGLKLKIVNPNAAGIDIAYGEMQVCVPEDRDGDNNRCFGSFTCDYEEIASWLKACGITTVAMESTGSYWAGLYFFLEEKGFDVLLANAKDVKNVSGKKTDEADAEWIMLMHSYGLLKPSFHPDASARGIRELARHRDNMLRSAGKEVQHMQKSLVLMNIKVDTVISDILGKSGKAIIEAILDGNHDPKSLAQLADPRCKAGKETIERSLEGTWDVVHLFELKQSYDLYKYIHTQIADCEAEMDRLLDEYTDGCGTDMQGYVATNKRVAKKNAISFDAEKYAFSMWGVNAMEIPGMSLGALAVLMGELGSGFTEKFTSAKSFCKWCNLVPNNKISGGKLLSSKVPKQKSRVGQVFRLCANSVKNVKTGLGVYFRRQKSKGGYLQAIVATANKIARIFYTMVVSKNHYDESKVGLDEKELLQRKIALAQRTLDRLNLKLSVAQG

SEQ ID NO: 80986 - protein, 342 aa, unidentified
MQIAILGIDLGKNSCSVVGLDVAGRVVLRRRLRRDGVIKLAAGMPGCVMAMEACCGAHHLGRLLREHGHQIRLMSPEYVRPYVKAQKNDDRDAEAIAEGATRPTMRFVELKSEAQLDMQSLHRARDRLVGERTALINQLRAVLLERGIVVPQGRRKLERYVDALLAEEEIRLSLRTGLLVEDMRAEWRELDRRILAFDAEFAAEARTDETARLLTSIPGIGPLNATALTAAIGKAQTFRRGRDLAAWLGLAPKQVTTGGKPKLLGISKRGNGYLRKMLIHGARAALPTLSKGETPLGAWLRGLLARAHVNTVVVALAAKLARIAWAVIRSGEKFDMKAATAS

SEQ ID NO: 80987 - protein, 412 aa, unidentified
MTITCGIDWAEQRHDVAVLDHDGRVLARRRIDVGVAGFTELVGLLNDLAGGPSGLDGRSVPIAIETDKNLLVVALQSAGFTVYPINPLAVARYRDRHGQAGKKSDADDARVLADILRTDAHRHRALPEVSEHGREVKALARQHQEAVWAMQQTANRLRSILLDFYPQALLAFPNLLHKAAQAVLTAAPTPAHGARLTSRRVVTLLHRCGRRNDAALVEHIVGALTAPALRQPVAVEAALGVSARTLLTVLGAQQAAVETLEEALSERFAAHPLAPILRSAPGLGPVLAARVLAEIGDDPARFESPSGLRAFAGTAPVTRASGRSHYVKARKIRNKRLGDACHWWAFAMLTKSSGARAHYDRRRAAGDHHNAALRNLANKLLGRLWWCLKTNTLWDESTAWSAPTRQAAQAAA

SEQ ID NO: 80988 - protein, 343 aa, unidentified
MKITRVGVDLAKKVFQVHGVDAAGRRVWKRQLKRSSWLSVLTEAVEPGCEIGMEACGGAHHWARELKSRGFEVKLISPQFVKPYLKSLKNDVNDAEAICEAMSRHHMRFVAVKTVEQQNIQAMHRVREGLMNHRKAKANQIRGLVAEYGLVAPRQMGPLRKAIPCWLEDAENGLRPAFRVLLHGLWEDLQNLDIRLNVLDKEIFALSESHADAKRLKQLRGIGPLIATALVAQFGDGRHFKRGRQASASVGITPRHAGTGGKNYLFGITKKGNPYLRSILIHGARSVVSKAKHKDDRLSRWVTELARRKHPNVAAVALANKTVRIAWAMLRNGTDYDPELAMA

SEQ ID NO: 80989 - protein, 437 aa, unidentified
MRVLYEHVAGIDVHKDMIKVAIRSPGEKPWTRKTEILEFRTFYGVLQEMARLLRRRGVTHVVMEASGVYTDPVYYALCEQDFAEVAVVNPAHARALRGHKTDAADCRRLAELFECGLLRGSYIPPAELREVRDLNRYRMKTVQARTSEIQRLGKALESAGIKLGSVASDITGKSATAMIDSLIDGERRGAVLADLAIGRMRTAGKLADLSMALTGRFTEHHALLCRLHRDRIAGLDAAVADLDDQIAGRAGRWQRELDLLKTVPGFGDVVAQTWLAEIGPAPHRHFASHEKLASWVTLCPGNNISARKRKHGRTGDAGTYIKPMLIQAAWNAIRPKGRLQARYSRLVRRFGGEKNPGAKKKAITAIAHTLLKIAYQVLKSEVPYQDLGADFYTRRESPDQQRAYLERRLRKLYPGCAITITISPPEAVLTSTVSNAP

SEQ ID NO: 80990 - protein, 415 aa, unidentified
MSDLKSWYSGADWGSESHCVFLTDDQGRKLGQRFFKHSGEGLAEMGDWLIKTSGAEEAGQVFVAIEVPHGPVVEALIERGFAVHAINPKQMDRFRDRFSMAGAKDDSRDAQVMASSLRTDPRCFRRLSAADPVLVELREWSRIADELGVERNRLANRLREQLWRYFPALLELEDDCSAEWLLDFLVLAPTPTKAARLREPKIAALLKQRRIRRLDAAAILKAVRATPPKLSPGTVEAASAHVASIIPRLRLVNRQCREADGKIGALIDDLMASPEIEPGQKKQRDAAILASLPGVGRTVLATLLAEGSEPLQRRDYAAMRSLTGVAPVTKQSGKSRFVVRRQACNDRLANACYHWARVAVQHDPRSRAKYAELRKRGHSHGRALRSVADRLLAVACAMLKSGTPFDPSRSAQKSA

SEQ ID NO: 80991 - protein, 374 aa, unidentified
MRDGSTLYVGLDVHKDSIAVAYASAEGPTDPVHVGAIGTRQCDIDALVRKMHSKSAQLVFIYEAGPCGYWLYRYLTRKDLTCFVVAPSLIPRKPGDRVKTDKRDAVTLARLARSGDLTAVYVPDVPDEAIRDLARAREDALHDLNAARFRLKALLLRNDIRYVGRANWGADHIRWLARLVLPTPAQQIVFQEYVRTITERTELLQRLEAELLAQAKPWRLYPVVEALQALRGVQFTVAITAIAELGDLTRFDNPRQLMSYLGLTPSEYTSGDRRRLGGITKAGNSHARRVLIEAAKAYRHRAKVSEQIQARQQHLPTSIRDIAWRAQVRLCGRYRKLRARGKHPNTIAAAVARELAAFMWAIARTQPASASQTG

SEQ ID NO: 80992 - protein, 331 aa, unidentified
MHFIGCDVSKLTLDLAADKGGKQTRISFLKVSNQRSGWTEVMDWAESCCQADRSDICVVMEATGVYHLPVAAYLSSMGFKVQVCNPGRSADYARSQNRLNKSDKLDACSLQRYGSSLEKIHWFQPDSPQISQLKFLLSLLDQLDKDVLRWQNRLEKASFQDANAASIPACKRQLRNLKREQQRTQQSIDRLVRDDEQLRCNQRLMCSIKGIGLKTSQQLLPLLYGGRFESARQLAAFLGLTPCHKTSGTSLKKSGQLSGRGNAKLRSKLYMPAVSAIQWNPELRAFHDTLLARGKTEKQAITAIMRKLVHLCYGVVKNQTPYQENYAALIR

SEQ ID NO: 80993 - protein, 353 aa, unidentified
MTFYIGVDLHPHQQTVAWCNTETGETQTRDLKHDPETVREFYSSLPEPAIVGIEASTRATWFENMLFETCHKLFVGNPVLIRKRATSRHKNDRRDAELILQLLLHDEFPKIWRRPIQSNRILEMVRLRQSLVRQRTQVCNRLQAIAHDLGLPKGRVRGVAFQAILKAAPADETTSIRRSHLFSLVGTLNEHIQKLDKWLEAKAAEDNNVQLLLTQIGVGYLTALVTVHTLGDVSRFSRISKQVASFAGLDSMERSSAGRIRFGRVSKAGSPLLRYQLGVAAKMASRSDARLKSFYTRLAKKKPKAVARMAVSRKLLIKLSIMLRDKITAEEFDRRGRTVGNARVLQGSERTVV

SEQ ID NO: 80994 - protein, 341 aa, unidentified
MLMLLYVGLDLHSNNIFLAVINKQGKRVDYKKLANDPELILAALRSYRGKIAGVVVESTYNWYWLVDALMEAGYSVHLANPSAIQQYSGLKHAGDQHDAFWLAEMLRLEVLPEGFIYPKEERPIRDLLRKRRHLVRLRTSLILSLQNIISRNCGVKCKVNDVKRLKEDCVSPLLEDNEDLALAGQMSKETIDFLTHQIRRIEATVVKRIELRTSYRSLLTLWGVGKILALTIMLETGPISRFAQVGNYVSYCRKVPSRWTSNEKTKGHGNKKNGNKYLAWAFSEAAELARRYHGEARAYYNRKAQKTNFMVAHSALAHKLARAAYYIMKDEVPFMPEKLWG

SEQ ID NO: 80995 - protein, 343 aa, unidentified
MKLIRVGVDLAKNVFQLHGVGRDERIVWRRRLARDRWLETLLEKLEPGCEIGMEACTGAHHWARQLQREGFTVRLIAPQFVKPYVKSNKNDATDAEAVCEAMARPSMRFVAVKTLEQQDIQAVHRIRSGLIEQRTAKANQIRGLVAEYGLVAPRELGQLRIALPRWLENAENGLSSRFRRLLGGLWNDLKVLDDRVCELDREIAAIARNDPTAKRLQRLRGVGPIIASALVAAVGDARQFANGRQMAASLGLTPKQHSSGGKERLLGISKRGDRYLRSVLIHGARAVIRTAKGKNDRLSMWITSLAARRHPNVAAVALANKTARIAWAMLRNGTDYQPELMRG

SEQ ID NO: 80996 - protein, 438 aa, unidentified
MRSIGLDVHKRFAQIAILEGKGQPVQRRIGTTTAALRAFARTLRPDDQLVLEATMNTWAIADLLRESGARVVISNPLRTRAIAEAKVKTDKVDAATLAQLLAADFVPEVWAPDDATRRLRREVAGRAALVRQRTQVRNRVHAALNRCLEDAPVTDLFGVAGQAWLREVTLPDEERAQIEAALRVHEAIEAEIALFERRLAQVALADDRVERLMTIPGIGATTALSVIAVVGEVARFRRPAKLVSYLGLDPKVHQSGEREAWIGSISRAGHAHSRSLLVEAAHAAVGSPGPLRAFFQRVERRRGTQVALVAVARKLVVLAWHLLTTGQRYRFERATVSRQKRRALERQLGIPAVRRWPAPGQPSVALRREHELAAAAEAEVAYQSEVAARMQRDAAAANGEATMRPSKGRDARRSLHPHRSALLTGSTASEEGGYASEA

SEQ ID NO: 80997 - protein, 352 aa, unidentified
MKHYIGCDAHKKYSVFTAISEAGEIFPAKRVEHDRETFRSFLQTLPASSSIAIESVGNWYWLIEEMEKAGHKPSLVHAGKAKLMMGNINKTDKLDARGLAILARNGTLPEVWIPPGELRDQRELPRMRLALVSIRTKLKNRIHATFAKYGITFEEVSDVFGGKVRRLLERAMDELPQETRYSVEEQLQLIDQVEQSIKQAEKRIHSVIREDHAMQIIKTLPGVGPILAITIVLEMGNAERFPTGEKFASYSGKVPRVSSSGGKTYYGKVRPDVNRYLKWAFTEAANAIVLQQHRLGDCHVLRLYWRIRNHKGHAKAVTAVGRHLAEAAYWMLKNDEPYREPETKKMVSSIRG

SEQ ID NO: 80998 - protein, 486 aa, unidentified
MPSPIPKGKGQPSLTLHRYGVGVDCHSRFFQVCVLIPDGTELVKIERKVPALWAELRAARAWLLHTLRERGIDVSPSDLRYTCESTGQYHMPLCLAWKGHPAIINPSDTGHVRRKTDRLDAGKLAQHSLHGLWRESWMAPDEIQELRVLSNQRAKLVAERSRLTNRINSDMLRFGHVVGQLGKINGPVVRALIEDFCTNGSVAIHRDHFSDTRIPAGVVRVFDQRWKRVDALDQEIKMIEELCIKQVDDLTWRIGEGRTSSGRQLRSNLESIPGVGTQTVITWLGEIGDITRFDSVNKLLAYAGLDPSDEISAGKVTGAKTRKGNARLHGALRNAARAMLAHAPSCKFSMWARGYMGRHSRAGKSKAVHALARRVGKALYYCHLKNEPFDDSGYQALLSESSYPFCPVEEMGLSPGVVQKLKGNGLHTSRQVVDAFYSDLGRRPGCGKVTVQAVATWINGHTKRSQDRTRKPKGAEASETLPAAEV

SEQ ID NO: 80999 - protein, 344 aa, unidentified
MRIASIGIDLGKTTFHLVALGERNKVLVRKKFSRTQLLAYTVNLPTSRIGLEACAGAHFLGAALREQGHQVQLIPAQFVKPYRKSNKNDFLDAEAIAEAVTKQNMRFAQIKTQDQLDWQAMHRVRDRLVQRRTALINEIRGFLLERGISFAAQPIHLRKNLPGVIEDAEQNLSPRLRWLLDRLWQEWKQIESDVQAISDAIERISDEDVRCRQLRQIPGFGPLVSTATVAAIGNGAAFRRGRDFAAWVGVVPRQYSTGGKQRLYGISKRGNIYLRRMLIHGARAVLFRIKHDTGGFGQWVHRLAQRVPRNKVIVAIANKLARIAWAVLSSGKDYRHQPLQPAGA

SEQ ID NO: 81000 - protein, 385 aa, unidentified
MKKIYLNVACAGMDVHYKFSNVTFRDEAGRVVRRERLEHPQRGPLWERLNRWPKGLPMVLEASFGWGWLSDLLSEAGLEPHLSNCYKLEQMRKARGWVKTNKKDADMLSLLPFETTAWWEVWRAPREVRNRREQMRFRGDLVGLQTMVKNRIHAIFHRHGIFHEFSDLFGGQGRKFLAELCLHNPTDLSYQGLLALRGQVKLLDYLRRQLADVERILHKQLVKTPLTMRLKTIDGIGLILAHVLAAEIGMIERFRNHKALASYSLLAPRSDDTGQDDPRHSPLGRHLGKRGNRTLKWAFIEAAHGAVRSGGKWRVMFDRVTNGGKKDRNRGYIKVARELVKVVYVLWKKDVAYRDVPPQRPGANRKKSRSGTGQLLHPMVHASTA

SEQ ID NO: 81001 - protein, 318 aa, unidentified
MKDTQVAYIGIDVSKETLDIDAGEFGAMKITNTPMEVRKALKALARKAGAERTPQACFESTGPYTGALIAECQAGALRYSVLNPHKVACFAKSVAHAKTDAMDASVIRRYAEAKRPAPARPPRKALAELDEIILAREATMKTLVTLRSVLETVKAPAAAKPVKRTAAFLEKKVAGYDRLIAEAVRADAETSGLVGALSGVKGVGTLTAAKIAAWMPEIGTLGRRGAAALTGLAPHTRESGKWKGRARTGGGRKHVRNALYMPATVAIRHNPHMKRVYEGFMAKGTPYKIAITAVMRRLICHLESVAKAYYARRGLAPA

SEQ ID NO: 81002 - protein, 343 aa, unidentified
MGEVSTIGLDIAKSVFQIHGVDAGGAVVIRKRISRAKLLEFFATLPTCLVGIEACPSAHYWSRRLQGLGHTVRLMPPSYVKAYVKRGKNDANDAAAICEAVTRPSMRFVATKSEQQQSGLMLHRSRQLLVCQRTMLSNAIRGHMAELGIISAKGRNGTAELLKIIADEQDDRIPAAARFSLNVLARQYAAIREETVAIERRIHAWHRSSEESRRLEEIPGVGPIVATALMAEVGDWKTFSSGRSLAAWIGLVPRQHSSGGKERLGRISKQGNRHLRWLLVAGAMAVIRYARQHGTKRPWLARLMDRRPIKVAAVALANKIARMAWAMMVRGERFKEPKLLPAA

SEQ ID NO: 81003 - protein, 411 aa, unidentified
MDKLFVGLDVSLKDYKVCFLDTEGERVGKGFALKNNGDDSQVLVERVVQAAVKIKAGKVLIGYESTSVYGWHLQYFLADAPELAPFSPTIICFNPSLIENHKKSIGDLPKTDRMDAFVIADRLRGRLPKSASPDFRYLALQRLTRHRFHIVECIVREKNYYLSNLFLKCSGLCQTGVFANNFGAAATGLVDELDDFEQIADLPLEELVVWLVEKGREKFDNPDETAKKLQSAIKTSYRVHPSVDNSLNLVLRSCLSSIASLEKQKKAIEKSIKEQVKFFEREYTCLKSVKGIGEVIAAGLIAEIAGISRFEDDDALAKFAGIYWNKRQSGEFTADESELRRRGNKYLRYYFVMAADHMRIWLPEYRDFYSRKFKESKTHHHKRALILTSRKAVRLVFALLRENKLYSPAHQ

SEQ ID NO: 81004 - protein, 370 aa, unidentified
MSEGTTRYLGLDVHKATITVAVAEESGPATVYGTIANERAAVRKLVRQLGREARLVAAYEAGPTGYALHRELTRLGVECTVAAPSLIPIRPGDRRIKTDSRDALGLARLLRNGDLTAVWVPDPEHEAVRDLVRARYDAKDDLRRARHRLAKFLLRQGVCAPPGIKAWSARYYVWLRQLSFSQAAAQVVLDDYRVVEQAACERVRRLELALRRCAEQSPQLPLIAALQVLRGIAFLSAVTIVAEVGDFRRFTNAPGFMCFTGLVTSEHSSGASRRQGGITRAGNRYLRHVLVQAAHNARYVPNLRGLAQQRLDGVPPDLVELALRAQQRLHARYRHLDRRIGRPKAVTAVARELAGFVWAVGQRMSEARAA

SEQ ID NO: 81005 - protein, 340 aa, unidentified
MQVSTVGLDIAKHVFQVHGVDAKGQAVLRRKVRRDQLLKLFTGLEPCLVGMEACATAHHWARELGAIGHEVRLMPPAYVRAYVKRNKNDAADAEAICEAVVRPTMRFVPIKSAAAQSVLMLHRARHLLVRQRTAQASALRAHLAEYGVVAARGIRRLRDLLPVLQDGAGVIPELARQTLRLIVELIEALTIQIRKIDTELLQWHRTNPVSQRLETIPGIGFITATAMTATVRDARAFRSGRQFAAWLGLVPRQNSSGGKDRLGAISKMGDRYLRHLLVVGATAVVRYTRRKTTAISLWANRLLQRKPARLVTVAVANKMARIIWAVMARNEDYRGTPVAT

SEQ ID NO: 81006 - protein, 324 aa, unidentified
MTRHVGVDVSKAWLDVAMLEGERGKHFRAGNHAAGHAAIKAWMARQAGAEALHVCLEATGAYGFAFAKALAAAGHKVSLINPAQIKAFGRSELLRSKTDRIDAALIARFCRAMTPPAWTPPPDAVLRLRSLVRRCAALKEMRTQEINRMKSGAVSEEAMASVERLIAFLDAEIAIITKAAAQAIADDAELTRQAELLRSIPGLGPRAVAVILGELPDLRSFPHAKKLAAFVGIAPGETSSGAHVQTSSPISRVGNALVRSTMVLCALSAKRANPVLKDFAARLAATGKSPKLVLVAVARKLLVLAHAVVKHGTPFNPNLPSMPS

SEQ ID NO: 81007 - protein, 376 aa, unidentified
MNQDSTLYVGLDVHKDSITVAYAMGLDEVELLGKTGTTQVEVDRLCKRLQSKARHVHVVYEAGPCGYGLHRRLVGKGFDCMVCAPSLIPRKPGDRVKTDRRDAIKLVRSLRAGDLSAVHVPTVEDEAFRDLARAWSSARDDLKQARQRLKSFLLSHGVQYSGRANWGPAHRGWLSTLSFDSAWQQLAFNEHRRTIEDRLAQCGRLEAALHEAVLCWRFYPVVLALQAMRGIQFTSAVGLVSEVGDLSRFEHPRQLMAWLGVTPSEHSSGSKRRQGSITKAGNSYARKLLVESAWSYQHPARVSKDIQRRQEGIPKPIADRAWDAQLRLCGRYRRLVARGKSRQVAIIAVTRELAAFIWDIGRMGMTLAVPQSEQPA

SEQ ID NO: 81008 - protein, 407 aa, unidentified
MDLLKTVFGIDVSSRKSNVCIMVNGQKVNDYAISNDMVGFNQLLGDLKQVTNPQIIFEATGVYSRRLQAFLDMHELRYVMMNPLEAKRKTKDDLHQNKTDKLDALYLAKLQSEHPQRLAYVQSKEYQELMANNRIYEQASHDLITNKNRLHKAVQLTFPEIEHLLANPRGKNYWSIALRFPHPDIVLETKEADIIDFLKGLSGIGKKRANDITQNLIRLAKVACPAVKKNSAHIRGLKMAINNILSAEEECQTALQEMAKLAPKRDLEILTSIPGIGENTALRIISELGDIRRFNNPSQLNAFVGVDPQVYESGNLTAHLSISKRGTAIGRKVLYLAINQIQSAKKAGNPCHIADYYEKRKRSSETASHKKAAIASIHKLLRTIFALIKNDQLYSYDVAKHNQRLLS

SEQ ID NO: 81009 - protein, 337 aa, unidentified
MSVYVGIDVHRKRSQVAVVTEDGTVELNKNVVNGSEPMLRLIGDLPAGTPVAFEAAFGWGWLAGLLEDYGFEAHLVHPLRCKAIASAQLKNDKVDAAILAQLLRADLLPEAWIAPPAVRQLRALLRHRTGLVRLRTQQQNRIHAVVADFGYDRSGSYLSGPGRGWLAGLELPAASREIVTDCLAVIDGLAPLTDRIDGELRQHAKADPRVKVLTTLPGVGQFTALVILAEIGDITRFGSARKLASWAGLTPTVRGSDLTVRHGHISKQGSAWLRWVLNQAAQTAKRSPEFAGTYATIAQRRGKKIATIAISRKLLTRAWHLLSQLEPAEASTPPRRP

SEQ ID NO: 81010 - protein, 412 aa, unidentified
MQDILTCAMGLDIHRDVIVACLAKGELGTDPEIEIRSFSTLIPEMRKLRDWVLEAECRYVAMESTGIYWQPIYEMLEPCFDGQISILVVNARHMKNVPGRKTDMRDAQWIATLLRAGLLKGSFIPDKTFRELRHLTRYRKSIVRDITAQKNRIDKFLQSSGFRFTAFLSDAFGASGRNIIRHLMEYGNISREALDRCLKTQTRKRIDEILIALNGSLSEHQRGFLRMIFGHLEALEQHRHTVEDAITKEITKHEEALSLLCSIPGIDVTAAAAIIAEIGTDMSAFPDSQHICSWAGLSPGNNESAGKRKSAHINKGNPYLKSMLCEVGWVISGKRSLYLSGWYWRIKQRKGAKRATIALARKLLALIYTMLKTGSPYNEDCFELRRKQTERKRASRMVNELQKLGYFVVAPG

SEQ ID NO: 81011 - protein, 414 aa, unidentified
MESSYRIAGIDVHKKMLAVVVTDLTQGTEFHFERRKFGALDSDLCALAEWLNEQQVREIVMESTAQYWKPVWRHLEPEYKLYLAQAQSNRAPRGRKRDFTDAERLVRRYVAGELILSFVPDPEQRLWRIATRTKNQLTGDRVRLQNQLEALLEDSRIKLGSCVSDLLGLSSRRMLKALAGGERDAAKLAGMAEPELRASQEQLQDALRAAGTLNDLHGQILRLFLERLELIEQQMAQLDQSIAAALHTHQSAVQRLAAVPGYGVDSAQQVIAEIGPQAATFPSPAQLASWVGVCPGREESAEVSKSNRCPKGNRQMRRILAQVAQAAARTKGSIFQGLYRRLLPRLGHGKAIWALAHRLCRLTWKILHQGVEYKELGQQMNPKLVRQRTNKLTRQLRALGYDVQLTVLSSNAQA

SEQ ID NO: 81012 - protein, 331 aa, unidentified
MNYIGMDIHKQFTVAVVKDEQGNKLAEDKFDNSEDNFSRFLQAFQPQETKIVIESSSVWEYIYEILDSMSYEVKLANPVRTRAIAEARIKTDSIDASTLADLLRANLVAESYIPPKEIRRLREITRERKTFVKQITQIKNRIHAILTKRGIKIPTTTLCKGTLIWLREKFAEDNVMGHYLKLLEYHAKEMKSVDKQISILSIDNKDAKLLMTIPGIGSTRSLDIVAEIGEIGRFPSVDKLCSYAGLVPSIHQSGSTLRFGRLIKQSSKVLKYNLIEASWNIVRTKESNLLQEFYKKLAKKKGKQKAICATARKMCCVVYAMLKNREEFRYS

SEQ ID NO: 81013 - protein, 329 aa, unidentified
MQTILHNCCGMDVHKDSVVACILKTCEPTTIERKREAVDKEIRVFGTFPNDLAQMRNWLESEKCYHVAMESTGVYWQPIYEALEDAADGEMEILVVNARHMKNVPGKKTDIKDAEWIASLLRSGLLSGSFIPPQDVRELRQLTRYRKNVVQDINTQKNRIEKTLQQAGFKLSTFLSDVFGVSGRNLIRILIKRGKLTALDVETETKRISKEKKAEIKRAITGQLTEKQRNFLQLQITLLDGLLAHLESIESSIEELSAKWNDDIERLRTIPGIGLTSATAIIGEIGSDVSKFPTAEHFCSWAGLVPGDNKSAGKKKVQESLSATPTSRA

SEQ ID NO: 81014 - protein, 349 aa, unidentified
MLADQVDHVVGVDTHRDEHVLAVVVAPSGAVVAQRSVRASARGYAQALRFVEQYTNGRRVWAVEGVGHYGAGLARHLSGRGETVLEIARSPREERRLHGKDDQLDAIRAARTALASQTLTLPRAGERREALRLLLLARRSAVDVRRDALVQLRSVIVTCPDRLREQLRGLPAGRLVVRCSRFRRSSACTPDELASRLVLRSLARRVEGATAEAAELEREIHAHVRALAPRLLDEPGIGPIVAAQLIVAWSHHGRVRSEAAFARLAGVAPIPASSGQTVRHRLSRGGDRQLNCALHTVILHRRQHDPTTKDYIARRVAEGKTTRDAVRSLKRYLARHLYRMLDSQVPHMA

SEQ ID NO: 81015 - protein, 430 aa, unidentified
MSFLPNYISVGIDVAADFSWFCILTPDGREFKKPFKVDHDNADSLKNAALSIKKAEEQFSMKSKIFLESTGIYHFPLFCHLKELGFEVFVINPLITNSNKNIGIRKVKNDRLDAKRIAVTGYSPDTKVSVMPAELILNLRCLCREYYSLVDNRTSYVNKLKAQLHIVFPGFCNVFSDVTGIAAISLLKRFPTPEDVINAQSDEIVKLISTSSRKGLNYAKAKYDKLFKAAKNALNFRYNLPSVYDVLKVYIYFIEEFDKKINLILSKIKAFVDENKSEKFVQQIYYLDSIPGVGFLSAVTLMCEIGDFSAFRKPKQLFAYFGVDPSVNESGHFKGTDNKMSKRGSKIARRVLYAIALAPVRVKRNGTAINPVLYDYYQKKKESKPKKVALGAIMHKISDIVFAVLRDNKPFVLKTPDEHQLQYQNIHKAA

SEQ ID NO: 81016 - protein, 391 aa, unidentified
MRFAGIDIGGECHAVAVVNDNGVLLVRSTLFGEEAVGYQRLRELLGDPNDCLVAMEATGHYWRNLFAFLVGHGFKVALLNPLRTRRFAEEELERTKTDSVDALGIARFAAQKRPAPTPVSDEVTGELRELVRLRTRYVDQLSDRMRQLHRAVDLGFPEFTGHLRLNTLLATAILARYPTARSFARVSIRKLARLAYDGRHHVGEVLARTLIEGAKVSVGSHHSEPYQLQVKYTCADIELLRGRVKQLEQDIERKLQDHEVGKLLTTIDGIGARTAACLIAELGDPSRFRDAAALASYVGVVPRLRQSGKRAFSGARGLPLGNARLRHRLWMPTLVAVRKNPWLRAHYERLLAAGKRPKVALVACMRKLLGAIYSVARNRRPFVLHLATAGQ

SEQ ID NO: 81017 - protein, 341 aa, unidentified
MNVKTIGIDLAKNVFQIHGVDEHGKRLFNKQLRRAQMASFFANIPPCLIGMEACASAHFWANKLISMGHNVKLMAPQFVNPYVKTNKHDAADAEAICEAVTRPNMRFVPVKTAEQQAVLALHRSRQSFIKQRTAQANQIRGLLAEFGIVVPRGIQQLQRRLPELVEDADNPLPVLFRTQLSLLQHHMAYLFDVIATLDKQIEQCYRQNALCQRIGKIPGIGPVTASALIATIGKANNFENGRQLAAWLGLVPRQHSSGGKQVLLGISKRGDTYLRTLLIHGARAVLQSAKHKQDAVSSWANQLMARRNNNIASVALANKNARTVWALLAKEREYCAPIISA

SEQ ID NO: 81018 - protein, 408 aa, unidentified
MPRYYLGVDWADRVHQLYGGDENGIKVMEMKVQENPEGLAELGHWLNQSRAEQVELWAAIEKPHGRIVDFLLDHGVVVYPVNPKVLDRARDRFRMSQSKSDPFDAWVLSDFLRTDHGHLRPLAPNSEQAQELKLLTRDQQRMVRHKTRLLNQLKFTLKEYYPRPVEVFGDLESRVAVDFLKQYSTPTALSKLSRKQWSRFAQQHPHLGQARSTKLWEELKKPQLVVPDHVVRAKAQLLEVLLDQLEASLRSIEKYSDKVERFFASTPAARLVEKLPGGKSGTLLPALWAELGDAPARWESFKHLQAEAGAVPVTKLSGKSRIVEFRFSCNKQLRYAVYWFAFISINRSEWAKAFYRDQRARGHSHPQALRALGAKWLKIIFVMWRDHKPYDDTHHLANIARQKLRQAA

SEQ ID NO: 81019 - protein, 526 aa, unidentified
MVTKSKSRTKRKSRRSQKFRQAVLGKPGGVIQPRVQLVGPERFGVVAIDCAKARSKWLLADFYGNVLLPPAEVEHNRSSFARAVLSLRQAVERHRLKDLIVCVEMTGTYHKPVQRAFRDAGFETRLVHPFASSHYRLLEHGDVKTDDNDLAGIFRAGVNGFGLIEKPVDPVHCELQILARHRRDLVVKKSKLQCQIRHHLELCLPGFGDVFTGDDLWTQATPVPLLKAIAARGGTARVVAEAGPATVAGWLRDAGIRCHQRSVERVVVWAANAAASDPLAPQHTRVWQALLEDWETKTGQIAGLERDLAGVLATTPYILLLSHPGINVVSAAELAGEMGPIERYASANAVRGRAGLFPARYQSDGVDRGGNLTRFRNGRLRAAWMLVADNMCKCNAWWMAKAAAWKSQGVDPRDIRCRVANRLTRTVFQMIFGRQMFRHPSRLDRGYVLDKLLTFHREHKTPPAVIVRDLQQAAAQLPASSHSQEAEPLRELCIKGQRSRRSGPQELGTLLVAVLARLGVCDVESP

SEQ ID NO: 81020 - protein, 344 aa, unidentified
MTFVGCDLHTRMQQVAVLDTGTGEVSERQLPHDGMAVEEFYAALPRPVTVGIESTGYAVWFHALMQRLGHTVLVGDAAKIRAMVVRKTKTDRRDALHILDLLRHDRFPTVWVPDPATRDLRALLTHRMRLVRIRTMVKNGLHAIALNYRLARGSKLLRQAGLAQLHALALPPHTAQRRDQSLELLAGLSAQIRELDEAITTAALAHPDAPRLITHPGVGALTALATVVVLGPVARFHDSKHVVSYVGLAPALNASADKYHLGHITKQGSPLLRFTLGQAASHAARMDADLKRTYFTLVHRRGRPKAKVAVARKLLVRLFIMLRDQIDYDEFRRRGRLAPASASA

SEQ ID NO: 81021 - protein, 323 aa, unidentified
MNAPIYCGIDVAKRNFVIGFSHQKKTKTETNNAKGIQHTLDYLSQFNVALITLEATGGLEIPVAKALARAGYRVFIANPPKASEFAKSQTRAKTDAKDAVNLAFYGLTCELKGEVEHQLYVPLSEQEEQLEALVVRRRQLVDMRVAELNRLQQSHETQLDNIQQHIEMLDKLIAELDKDIDDQSKHFSDKADLISDIKGVGKNCVAVMMSSLPELGKLSSKRIASLVGVIPHPQESGQWKGKSFCYGGRAIVRNALYMAALSAIRFEPVFKAFYTRLVAKGKAKKVAIMACMRKLLTIMNALVRRNEKWDATRYLSTESVGQN

SEQ ID NO: 81022 - protein, 347 aa, unidentified
MRIIGCDYHPSWQQISWVDTLTGETEESKLDHASGEAEKFYRQLPGPAVIGMESTGNCQWFVEMATTAGHEVWIGDAAKIRDSEVRQQKNDRRDAALILKLLMEGRFPRIWTPSGEEKDLRQLLIHRYKLVRIRVQVKNELQHLAMNQGVTRAGKLWSKAGEKVLNELPLKPWASRRRQDLFKIREMLNGQIALLDQAVMQAAQKNEKARLLMTQPGVGPITSMAFVLTMGDVSGFPRGKQVASYLGLIPREYSSGGHQRFGPISKQGNGFLRMLLVEAAQVAVRCDPQMRQEYLHRCHRNKAKGVAKVAAARKLAVRLYWMLRTNQGYPEVVRVESSPRVPVVGAS

SEQ ID NO: 81023 - protein, 344 aa, unidentified
MDHYAGIDVSLEYSSVCVVDTTGKLVRETKVASEPEALIGWFGSLGFGLARIGLEAGPLSQWLYAAMKKAGLAVELLETRHVSDAFKAMPVKSDRNDARNIAQLMRLGWFRPVHCKSITAQEIRAMLTARKLVQSKLQDLENSLRGILRGFGLKVGKTTRTTFAGRIGELVKAHPNLQTIGEALLRVRAVLLAEFNGFEKHVRATSRLHEKARLLMSTPAVGPIVSLTFACAIDDPSRFTSSKRVGPHFGLTPKRYQSGETDYTGRISKHGDASVREALYEAAHIMLTKPIKGCSELKSWAMRIARRAGINKAKVALARKLAVVMLRMLKDNVPFNPAAKAATA

SEQ ID NO: 81024 - protein, 362 aa, unidentified
MKKPSKHLIIAEVPRRITKVGMTIGIDLGDVWSHYCTLNEDGEVVDRGRFRTTPSGVEKWFTDLPKARIAMEAGTHSIWVSEQLQEMGHEVIVANVRELRAISHSDRKSDQVDAEKIARYARLDPEILRPISHRTVAQQEALTLIRARNLIVRLRTAAVNSVRGLAKPCGYRLPASSTLCFAKRCVAVLPPGLAQALGPVLKQIAEMTKKIKHYDRLIKRLTETEYPETQALIQVYGVGQLTALTYVLTLGSKERFQRSRDVGCYLGLRPRRSQSGDRDPQLGITKAGNIYLRSLLVECANHILGPHGRDSTLRQWGLHLASRGGKQSRNRAIVAVARKLAVLLHRIWVTQEPYIPFYAVAA

SEQ ID NO: 81025 - protein, 357 aa, unidentified
MEKASSHVGKINTQVERFTMTQFSFFVGVDIASASFMACVGTAPWKLTVKPTKFDNNEDGFVSFLGWLKEHNLKPEQTVVCMEATGVYSEGLAYFLHASGYVVAVEPPLNIQRKFPVNASKTDELDCQYIGEYACRYEDKLSFWKPRAEILEQVKVLLTTRQHFSVQLIGHKNALHAVNRKKVSSELAKQVHQNMIEQIAKHIKAIDQEIRRLIDSDPTFKQTLLLLLSVPGIGLQLAAHLLIAMQETLDPKVLAAFIGICPIKHESGTSVFSAPTSRHYGPSVLRKLLYLAACSVRTHKKQFQQYFFRKAAEGKHNKLILNNIQNKILKIACAVVRSKQPYIPNYVSVNPLVLKNA

SEQ ID NO: 81026 - protein, 356 aa, unidentified
MSTSKHIDFTGQDFFLGLDVHARQWKVTIRHHDMEVKTFSMDPSPSVLARHMHRHYPGGRYHSVYEAGFSGFWIHRELSRLGFDNIIVHPADVPTSHKEKDRKSDAVDSRKLARELASKKLKGIYVLDEFHEQLRSLVRLRGKIIVNSTRVKNRIKSYLYLNGIPIPPRSECSHWSNNFIRWLESLELTSPAGSQYLRLCIDELRSHRQRLTQVTTSLRTLARSSNINHIIKLLGSVPGIGFVTAINYYAELVDMDRFSGADRLAGFVGLVPSVSSSGTTERVRGLTRRRNRYLRYLIIEAAWRAIRKDEALLYSFNQLTKRMKKQEAIIRIARKLLNRLRSAWRKEVPYCPGVMA

SEQ ID NO: 81027 - protein, 338 aa, unidentified
MTIETLGIDIAKNVFQLHGVNRGGRVVFKRRVMRDQLLEVVSRIDRCTIAVEACTGAFYWARKFEGLGHQVRIISPQYVKPFVRRQKNDGNDAEAICTAARQPHIPFVPKKTVEQQDIQTLHRARQRMVNHRTAVVSQIRGLLLDRGFAMAKSITRARRLVPEILADTTNELTALAREAISELYDLFRDLDRRIASFDKKIDRIFLESEPCRRIATIKGVGPKTATAIIAAIGDGSEFKNGRHLAAWIGLVPRQFSSGDRKVLMGISKRGSQHLRSLLVHGARAVVRTAPSKMDPNNTWVNQLRERRGFNRATVAVANKNARIIWAVLQTGEPYRAAF

SEQ ID NO: 81028 - protein, 376 aa, unidentified
MTMMHQRQIRYIGLDVHKATISAAIAEESGAPTSYGRIPNDPAAMRTLMTRLGGPQVELRVAYEAGPTGYALHRQLTSMAISCMVVAPSLIPKQPGNKVKTDRRDALKLARLLRSGDLTPVWVPDEAHEALRNLVRARADAKADQLRAKHRLSKFLLRQGCWPPVGVRNWSKRYVTWLHQLEFEHLPDRVVCADYLTEVTAAGERIKRLEVALYECAQSSRQVALIRALQAFRGIAFLSAVTLVAEAGDLRRFRTAPQFMAYAGMVPSESSSGGKQQRGSITKTGNSLLRHVLGEAAHHARHAPRVTSKVKQRQTDLPADIVDLAWRAQVRLHTRYRHLSGRIGALKALTAIARELAGFVWAAGQALQEEEVPTAA

SEQ ID NO: 81029 - protein, 379 aa, unidentified
MNQYSTLFVGLDVHKDSIAVAYAPEVSGSEVIFLGPIGVRQCDIDKLIRQLHSKAPRLRFVYEAGPCGYWLYRYLQKLGEECLVVAPSLIPRRSGDRVKTDRRDAQQLARLLRSGDLNPVYVPGLADESIRDLCRLREDRMNDLRAARQRVKSFLLRHDVRYGGRASWSPAHMRWLAQVASLPTPAQQIVFQEQLNEATHLAERLAAADEQLSQHISGWRLAPYVRAYQALRGVQFHVASTVAAELGDITRFDRPRQLAAYVGLHPREHSSGESRRLGGIAKTGNGHVRRVLVEAAWSYRYAARISRQIQARQEELPEQIRDIAWKAQVRLCKRFRRLSAKGKHHSIVVTAIARELVAFLWAIAKQVPAAESDQAALAS

SEQ ID NO: 81030 - protein, 337 aa, unidentified
MSDIAIIGIDLAKSVIQLHGSDKSGRCIYRKKLRRHQVLPFLAKSPQCLIGMEACSGSHYWAREIQKLGHNVKLIPPQFVKPYVKTNKTDAADAEAICEAVTRPNMRFVPIKSPDQQGILLVHRERDGLIKERTAVINRIRAVFSEFGIAIPAGPKKLKEWMLKSYGDHETELSKVMTRLIERMTERLSLIEAEIAILDKEIDNQNKVDARCKRLLEIPGVGRLAASAIVASVGNAKEFKSGRQFSAWLGLVPRQHSSGGKQNLQGISKRGDAYIRKMLIHGARAVVRHMNKNNAPVEWIEQLSMRRHNNVVIVAVANKLARIVWALLSKEQRYAIS

SEQ ID NO: 81031 - protein, 348 aa, unidentified
MDHYAGIDVSLECSSVCVVDASGKIVREGKVASEPAVLIVWFAALGFGLARIGLEAGPLSQWLYAAMRQAGLAVELIETRHVRDAFKAMPVKSDRNDARGIAQLMRLGWFKPVHCKSIPAQETRAMLTARKLVQAKLRDVENSLRGILRGFGLKVGHTTSRSFPGRLRELVAGHPALETIADALLAVHAVLLREFNGFEKRVRTMARAHGQAKLLMTTPAVGPIVALTYAAAVDDPTRFKSSKAAGPHFGLTPKKHQSGQTDRTGRISKIGDAAVREALYQAAHVMLTKPVRGCTQLKSWAMRLAKRAGMRKAKVALARKLAVILHRMLADGQAFNPAASAKTMTAAA

SEQ ID NO: 81032 - protein, 374 aa, unidentified
MENTITYVAMDTHKKQHKIALHYPFQEEIVEFTINNTARDIKKMVNKITKHAPGKVEFCYEAGVCGFTLKRRIEQFDCRCSVIAPSLVPRKPGERVKTDRRDAKKLLMMFKAGLLTEVHAPNEHQEAARELTRLRETARENLKRIRHQLLKFLTRHGYVYSNGRHWTQKHITWLRTIEFTEPMLTSVFENYFNEMIYCIGRLEALDKEVELLASSKEYKEIVGLLRCFHGIDTLTAITTLTEIFEFGRFESPRYLMSYLGLTPSEDSSGDKQKKGSITKAGNKRIRRLLNETSWHYRHRYVPSTALKKRRKGQPQWAIEIADAAGRRLSKRHRHLVNNGKMPCKANIAVARELAGFIWFVVTQYHTRKNTKDAA

SEQ ID NO: 81033 - protein, 339 aa, unidentified
MKFAGCDLHKQTITICVVDQSRRVLERRTVRCGEERTILAFFERLGEFEAVVEATASYEWFVRLIEPVAHRVLLAHPKKLRVIAESTRKSDRLDAQILAEFLALDMIPTSYRATPRQHEHRRLVRQRGGVQRRLTSVKNRLRRILCDYNADRPSLFTVEGLAYLAQVPLSGADRFAVDQMVEELHFGRRQLLAVNARLKEFAEAAPLREQEARTLLRTIPGVGFVTTEVVLAELADIDRFGSQKRVVAYAGLSPGQRESAGKSRELHLEKNGSTLLRSTLVEAAWRLVQHSLRWRRIYERLKLRVRAKKAIVAVARRLLCLMTAILKTGQPYSLSQQPT

SEQ ID NO: 81034 - protein, 344 aa, unidentified
MTKISTIGLDLAKNVFQVHGVDASGAVVLRRQLRRAAVEKFFAQLPPCTVGMEACGSAHHWARVIGRYGHQVRLMPPAYVKPYVKRNKNDGRDAEAICEAVGRPTMRFVPVKSIEQQATLAVHGTRALLVRQRTMIANALRAALSELGIVAAQGYEGLRELMAKLQEPSEEIPEMMRGALLLLAQHWQALDADERVLERQIAKAARCDGDARRLMEVPGVGPIIASTVLAKVPDAKVFRSGRDFAAWIGLTGKDHGTGGKHRPGRISKQGDRMLRALLISGASAHLRQQKARGVTDPWLRDLLARRPYKVAMVAFAAKTARIIWAMLVKGEHYRDRASAPAAAC

SEQ ID NO: 81035 - protein, 398 aa, unidentified
MSLDPHEEPAAIQTHIGAIFISLELSRSKWLITSLAPGGGQRMSRHSVEAGDLAGLLARFWAIRDKASARTGICYPIIVIQEAGLDGFWIHRALEKEGIESHVVDAASIAVSRRRRRAKTDRIDGEALLRVLLAFKRGEPRVCSMARAPTPQEEDRRRICRERKTLIVERIRHVNRIKGLLFSQGIGDYEPLRRDRRRALEAVRTGDGRALGANMKAQIGRELDRLELLLDQIAAVEAERDAMLATEAKAKAAQDAKRTPAADEMLTDLKGLGPETVAMLWTEAFYRSFDNRRQLAAFVGLAGTPWQSGSIDHEQGVSKGGNHRLRTAMIQLAWLWPSHQPGSALARWFRERTKGASKLQKKKMAVALARKLLVALWRWVDAGVVIEGAVLKSAAKAS

SEQ ID NO: 81036 - protein, 453 aa, unidentified
MARKAEKERTKDGLKLKIVNPNAAGIDIAYGEMQVCVPEDRDGENNRCFGSFTCDYDEIASWLKACGITTVAMESTGSYWVGLYFFLEEKGFDVLLANAKDVKNVSGKKTDEADAEWIMLMHSYGLLKPSFHPDAAARNIRELARHRDNMLRSAGKEIQHMQKSLVLMNIKVDTVISDILGKSGKAIIEAILAGNHDPKSLAQLADPRCKASRETIEKSLEGTWDAVHLFELKQSYDLYKYIHAQIADCEAEMDRMLSNYTDGCGTDMSGYKATGKRVAKKNAISFDAEKHAFSMWGVNAMEMPGMSLGGLSVLMGELGSGFVEKFPSAKSFCRWCNLVPNNKISGGKLLSSKVPKQKNRVGQVFRSCANSVKSAKTGLGVYFRRQKSKGGHLQAIVATANKMARMFYTMVATKKPFDETKVGLDEKTLLQKKISIAQRSLEKLNLRLSVAQG

SEQ ID NO: 81037 - protein, 332 aa, unidentified
MTKKWIYFIGIDVSKKTLDVYAYEQTQHIKIENGSKGFKALEKWFKEHNIDVSKAVVTFEFTGGYEFKLMQYLESKSIDYCRLPGLEIKNSMGMVRGKADKVDAKRIAKYSFQKKEELKASNPINTAIVELKSLMNYRKKLVRENAGYKSSISERVEMFNVKKTDLIVKSSTKKIRENEKLIKIVEAKMFEIIKADADMLLNYNLITSIKGIGKVNAIITIVFTENFTKFNDARKYAVYCGVIPFENSSGTSLNGRKKVSHLANKNIKQELNQAAKAAMTYDEETILYAERLKGKGKHYKVILNNIKFKLILRMFAVVHKKEMYVDMYKKTA

SEQ ID NO: 81038 - protein, 352 aa, unidentified
MQTAASFPKITIGVDLGDRKSHICEIDESAQIVKETSIPTTQDGVEGYFAGRESCRVVLEAGTHSPWFSRQVKALGHEDVVANPSKLYGKQRRTKRNDRSDARYLARQGRADIELLYPIQHRGAEAQEHLALIRARDQLVRARTKLINHVRGAVKSVGGRIRKCSAEAFAARARHEVPAELRIATEPVLDVITDVTRRIHEMDTRVERIAQKYPEVECLQQPKGVGALTALAYVLLVEDPKRFKASRDVGPYFGLVPQLDESSDSSPQLGITKTGDELGRRLLVSAAQYILGPFGSECDLRRFGEAISARGGKNAKKRAVVAVARKLAVLLHRLWVTGADYDPDRQLKRRSR

SEQ ID NO: 81039 - protein, 341 aa, unidentified
MVNIALFGLDIGKRTFHLVGHDAHGKPAFKRQFTRASLITFLAQHLACRIVMEACCGAHWLARKLSGFGHQVQLITPQYVRPFVTGNKNDFLDAQAICEAASRPSMRYVGVKTPDQQAISALHRLREARIAERVQTGNQIHALLLEFGIVLPLGERGIKQIPVILMSPDADLPTTVRQILSAQFDHYRYLAQLIVDLDRQISLQAKNDDLTSRLMTIPGIGPITASQLAADAGNAQSYGSARHFAASLGLVPRQHSTGGKNKLLGISKRGDKSLRRLLVQCARVIMQNAPKWQSAMAQWTVQLLTRRHSNVVACALANKLARIVWAVLVKGEAYRPHPTVV

SEQ ID NO: 81040 - protein, 340 aa, unidentified
MKKVYAGIDLHGNNNYLGIIDKQGKRMFKGKFPNIPEVILEALKPFQKEIIGIVVESTFNWYWLVDALMDEGYKVHLANPAAIQHYAGKKHVDDKHDAFWLAEMLRLGILPEGYIYPKEDRPIRDLLRKRGHLVRLRTSLILSLQNIITRNCGINLNGNKIKRLRVNEVSPILEGQEDLALSGRVSKETIDFLTGQITQVENFVQNKVKVKDQYQYLQTIYGVGKILSLTIMLETGPVERFTKVGNYVSYCRKVPTQWTSNNKTKGKGNKKNGNKYLAWAFSEAAELARRYDNPARAYYNKKSAKTNFMTAHTALAHKLARAAYFVMRDQVPFDPAKVFA

SEQ ID NO: 81041 - protein, 380 aa, unidentified
MRRVSGLDVHKDSVFLCIVDDDGVVFQSKFGVLTPELEQMAGVMVDYGVEEAAMESTSIYWMPVWRVLEPYVALRLVNPFFIKQLPGKKSDVKDAEWIATCLQKELIKGSYVPDELIQQLRQYDRRIFDLSKDIVYKLTKLDAALQRCNIRISNYVSTTRGKAYQEIVRLISEGKTDSEELVKHIHGRTVNRIGKDVLVSALSGVITAADIDTIRQLREEVELAQRHKDECQAKMDEICKQYFPKQYANLQTIPGVQARSATAIIAEVGTNMDAFQTAAHLVSWAGLKPRNEESAGKIKSRRVTHGNKYLRKTLIECSWAASKTQNCFYNRFSYIQCTVRHKNKMKVQVAIARKMLTAVWYILHDNVPYRDFTPDIVPSE

SEQ ID NO: 81042 - protein, 343 aa, unidentified
MDSFAGLDVSVKDTSVCIVDDTGKIVREVKVASEPAALLAVLKNPIYHFKRIGLEAGPLSQWLFSALAEADLPVICVETRHMRAVLKAQINKTDRNDARGIAQMMRVGLYRSVHVKTLRSQKLRMLLTHRKLLQSKAIAIENDLRSTLRNFGLKVGMVGTVKFEARIRELVEDLPDLAVLVEPLLIVRQALREQLGILHRRLLAAVRDDEVCRRLMTVPGVGPVVALTYRATVDVPARFHSSKAVGAVFGLTPAKYQSGEVDRSGAISRCGDDMMRVMLYEAAQVMLYSKKWSWLKAWAMQIARRRGMKKAIVALARRLAVIMHRIWVDGTEFCWTREQIAAA

SEQ ID NO: 81043 - protein, 388 aa, unidentified
MHVYVGVDIAKELHYAAIMDSDGVVTKPFSFENNDKGFNLLLSHLAPYNKEAILIGYESTAHYQENLAFFLKSLGYRTAEINPLQTAALRKANIRNTKTDSVDARLICLALMNHNIQGDQRDSARLDDLYQLCKMRMDILKKRTTCKIQFVAIMDRIFPELASFFDNNLHTNTIYRLIESYPLPSQIKKTRIDILTKLLHKASRGHFKKEKAQKLKDLADISVGIPSDIFAFQAQQLVHQIEFYTDQIQTIEERINTNPDVMSSPLMTIPGIGTFCVACILSAIKNINDFGAPCKILAYAGLDPVIRQSGKFNASHTRMSKRGNSLLRYALVWSAGNVVKNNNTFAEYYRHKTEDQGKSHYQALGHCAKKLVKSIYHMLKYNESFNLD

SEQ ID NO: 81044 - protein, 448 aa, unidentified
MRTRKPARAKKMKLPKDLQHINPHAAGIDVGSRSHFVAVPEGSCEQPVREFTSFTDDLHRMADWLLACGVTTVAMESTGIYWIPVFEILESRGLEVRLVNARHVKNVPGRKSDVLDCQWLQRLHSYGLLEGAFRPTEQVCTLRAYVRQRMNLVRYAAAHIQHMQKALSQMNLQLANVVADITGVTGMRIIKAVLAGERNPLVLARLRDRRCKSSESTIARSLHGNFRPEHLFSLKQAVDLYEFYQGQIVECDRQILDQLASFDGADASGNGPPESVDEALQRMAGVDLTQIDGIDTNSALKIIAEIGTDMNRWRSAKHFASWLGLCPGTKISGGKVLNARSKPVANRAAATLRMAAFALFNSKSALGAYLRRQRARLGAPKAITATAHKLARLVYSMLKHGTAYVDEGQKRYEERYRTRVVQNLKRKAKELGFALVEAVEKQPKLETT

SEQ ID NO: 81045 - protein, 320 aa, unidentified
MYSLFVGIDISKDSFSVAALDEKAKTVFSMNPLMNAEGFSDFLKMLSSHRKDFSTVVVALESTGPYHLNLYSFLLSKGITTIIVNPLIIANFNRLSLRKTKTDRKDAFTIARYLYLNRDSICNLTSSQVTTDLRDLARERESILKMVASMKNDIRRILQSTFPELEHRVDVLCVTMLRFLKGFPSARLINQATCREVAEGFSQRGSGRRISMPYTRIIELAKSSVATTSPSKELILPGKIETLFHLTKRADEITKMLVELCKSIRQEEFSILTSIKGIAAKTAAPFLAELGDHQKFQSYKKMLAFSGLDPTTHQAGQSAP

SEQ ID NO: 81046 - protein, 346 aa, unidentified
MKILAIDLGKFKSVACLLDTQTNQAQYETIAMQRGLIEGVLQRSQPQKVVIETCTNSNWVHDICQEQGYEVLVANPNQDAWQWRNVKRKTDKDDALKLAKLAALEQIPPVYVPAVEMRQYRCLVKYRKTLVWRMNQVRNSIRALLMAQGLTMPDRAKAWTLQGLAELSKHRKPLAECSLNELWRGELDVELTLLDTLEEQYDQVEKQLNQLAKQEERVQLLMTIPGVGRRTAEVIVTALDKPERFANARQVSAYAGLVPDQRQSGQTNRLGAITRRGSRLLRGALVEVGWMLVRFNPWARQTFERICGGQKTRRKTAIVALARKLLVRCWAMLRDKQPWNPDLQQS

SEQ ID NO: 81047 - protein, 412 aa, unidentified
MSIALPNQQLVGKPYKILHSSMNSLTTAVSKIKEAEELYSLESRIFLESTGIYHYPLFCYLRDKGFNCSVINPIITKNSTNMNIRKVHNDRFDSKKAALVGLKPDLKVSLMPSDLALNCRNLCREYYDLMDNRSAYVNKLQGELRMAFPQYLGIFSKVTINTSLTLLETYTSPNAFIEADKQEIIDTIKSTAHFGLTYAEKKYNAIIQAAHDANEFGYIIDSNIKRIRLYISFIRKYDEEIAGIMDALHNLVDSNEDTDFVKQIHLIETFKGAGFLSAVSLMGEIGDFSAFTKPKQLFAYFGLDPAVKQSGKFEGTKVQMSKRGSAIARRVIHVLTLQSISTSRTGEAKNPVLRDYYLKKCESKPKLVVMGAVSHKVCNMIFAILRDNKPFEIITPQEHIRQYNAAKCDEAA

SEQ ID NO: 81048 - protein, 347 aa, unidentified
MRFYTQQHGYYCGIDLHARTMFVCIISQDGTVLVEKNIRARPGPFLDLIAPYRNDLVVAVECIFTWYWLADLCHEEGISFVLGHALYMKAIHGGKAKNDRIDAGKIAALLRGGMIPRAYVYPSPMRSTRDLLRRRLHLVRHRGRLLAHIQNTNHQCNHDDFRKKLTYKANREGVAEQFDDPSTRKSVEVDLALIAQYDGIIRDLELFIVRMAKQHDIDMFHRLRSITGVGKILALTILYEVHDIMRFETVQQFASYSRLVKCSRESAGKRMGTGGAKIGNVHLKWAFSEAAVLYLRKNPAGQKYLARFTRKHGKGKALSILAHKLGRATYFVMTRSRNFDEKKFLAA

SEQ ID NO: 81049 - protein, 338 aa, unidentified
MYYSGIDQHKLFSYITTVDSDGKIVKEAKLINNNFEIVNYFDSLGKEHIATVETTGGWYWMNDLLSSLGIPLKLAHAKYLKAISYAKVKTDKVDSNILAQLLRLDFIPEAYKIPDDIRTLRDTLRARLRLSVKRTSCLNFMHRMLEKFNISDPALLNNFYGLQYQQFDIQSKLLKEQMLTLEKSIYPSLIPNEDLQRLLWIPGIGKMNAFTILLEVGDINRFQSEKNFFSYCRLVPSARNSAGKTKQRSSKDGNRYLKIVFSDAAVHALQYYPVIKRYHSSKLRKKKKQVAKAIISKEIARIVYHVLKDKTNFNNQFKGTELQHKKYVQWPRITSPDV

SEQ ID NO: 81050 - protein, 303 aa, unidentified
MDQQHYVGLDVSLETTSICVVDQNGAIIWRGKCSTEPETNSQTVRAHAPAAVRVGLETGQMSNWLTLQLRKLGLPVVCLDARHAKGALSMQLSKTDANDAHGLAQVVRTGWFREVAIKSMDAQALRMLLMARAQLVSQREAVANNIPGLLKTFGFVIARGSNGPFAVRVREVIADNATLAVIIEPLLLAWQALREQVAALDQQVNLRAKSDAAARRLMTVPGVGVIVVLAYTAVIDNPNRFKRATSVGAYLGLTPRRYQSGEVDKAGSISKCGDGLLRSYLFEAAKMRQGESDYFNLAKCFGK

SEQ ID NO: 81051 - protein, 373 aa, unidentified
MPKYSTAFGMDVHLRSTTVCALDADTGEAVTRRFPGNPWGEIAGWMDGFPGPSLAAYESGYLGFAPQRELAGLGVECVVAAVSKIPRSAADSASKNDRNDAARMAKAILAHDISPVWIPSPEVEGIRDLAGAYDGATARLATAKQRLLAFLAKRGFVYGGTTPAGNPRKYWTYDFLRWLDKVRPEDDGGVRTLAALRNEVEAAAEARADLLSEYRAAVDASPIAAEVAALQSIKGCAFALAAAFSAEVGDFTRFRSGRQVTAYFGLAPSQRSSGDSVRLGGISGAGNALVRKLAVEGSWCYAAARHQPKLMPRDTGVPLEIRVHGRKGSERLLRRREEMLARGMPAAKANAATAAELVRWLWALGMMCREGAE

SEQ ID NO: 81052 - protein, 418 aa, unidentified
MTATHSIAPTLLVAIDISKHRHEVLIGIPGKTRRRRLTVMNTLEDFQRLSTALASYGLPVRIGFEATGNYHRTLAHHLGRAGFDLKLVSSVGLARTREALHNSWDKNDPKDAQVILHMLEIGAVQFFHDPMVVGTADIQELSKTHEIVSRSKTELWHRILTHYLPLYFPEAERFHRSSRTDWFLAFLEKYPSPHMISTMSRDAFIADAWDVVGRKVSKERLLSDIYATAINSVGLPVYSDSDAVRMFRLVLAEGRSLVRQRDEIEARAVELLSDLPDYRLLTTIPGIGPINAMTILAEAGDLRRFRHHRQFLKFCGMDLATVQSGMFRGQSRISKYGNARLRRTLWMAGQTAVLKRTNSFRDKFERYISKDRHNAHLRRKAYTAIAAKMARTVHAVVNHGEPYRPFFEGVSPGGRTSL

SEQ ID NO: 81053 - protein, 481 aa, unidentified
MKKRSIYQQQSQELMRIYEEAGNSKKVLVVAIDYAKKEHTIMLCNGNGDILRKPFGVWNNPEGVNYLLEQVQKTCTYHKIKTRHAFFGGEDSGSYTENFAQCLRERGFLVAGVNAQDAKKQRENMQASTDRLDLLGIARMLISRRGNCAPSQSGAYRNLRTLVRHRRKIVALSTEERNRMHCLVDRLFPGFLEERKSGLTPFHEPSLRIMESRFSANQIKRRKQTTLVDILARAGAQKPRQKAKQLQIYAGNVLQPPKDYVATWQTSLTQHVSLYRCLLGNIASLEREMAIWLAQTQGAFLMSVKGIGLVLAAGVTAEIGDAVTQKPVGNLTSYSGVIPRVNQTGGSDSSSHTGSVAKRCNRILKDYLVQSASHQGLHGVDDLMADHKRREANGQHANFGIARRYLRMAMHMMRLSHIYLPPELRVDATSEARGEYYQMIWPYLLEKWKRYDAHDVAFDSEHSLGQWRDMVQSIYKITLKI

SEQ ID NO: 81054 - protein, 388 aa, unidentified
MTQTPVSLPYPVAPDHNNTLVLAIELSNKSWVLAAQVPGLARVKAKQTIEPTVEALLAALQGYRARATAAGRPVERVIATYEAGWSGFWLARLLATHGVETHVVQPSSVLVDRRARRAKSDGIDAELLLRTLLAWLRGEPRVCSMVPIPAEGDEDARRSVRERTELVAERVALVNRIGAVLATMGCGAYDPLLRNRRQRLGELRTALGTSLPPHAHAKINRMLDRLDLVRTQIAELEQDRDAVLEEEIPDKAGEMIQQLTKLRGIGVQSATVLVREAFVREFANGKSLGSYAGLCATPYSSGGTDREQGISKAGNRRLRTVMIELAWLWQRYQPGSAEVNWFRARVSGTGARMRKVMVVALARKLLIALWRFATQGVIPEGAVMKPAS

SEQ ID NO: 81055 - protein, 339 aa, unidentified
MREVSTVGVDIGKKLFQVHAVDRVGAVVVCRSLRRRQMLAFFGKLPPCLVGMEACATAHYWARELLRLGHTVRLIPPAYAKAYVRRNKNDPADAEAICEAVSRPSMRFVAVKSEAQQAAAGIHRVRDILKKQHTMLRNQLRGLMAEFGIVAAKGRRGASELIAVLADPEDHRIPSPLREGLLAIVDTLRSIDRKLEAIDRQLVKAGRENATYRHLITAPGYGPILASAMAAMVIEPTAFRRSSDFAASLGLVPRQEGTGGKVWLGPISKRGNRYLRRLLVNGATAVVNSKRAKEDPWLARLLAAKPRKLVAVALANKMARIGWALMTRQQDFRRLPAAA

SEQ ID NO: 81056 - protein, 311 aa, unidentified
MKEPERFVGIDISKEELVVAVRPTAELQSFPNTEEGLATLVGFLQPLGAHSIVLEATGGFARAAVNAMALAALPVVVVNPRQIRDFARSVGLLAKTDAIDARIIARFAEAVRPELRPLKDLETQKLEDLNNRRRQIVEMITAEKNRLGMAPPWSQKDIRSHIAWLEKRLKRINDDIDDLIKQSPIWRQKEKILTSVLGIGPVVTTTLLCGLPELGSLSARKLSALVGVAPFNRDSGQSRGRRSCWGGRAHVRAALYMAALTASRCNPVIREFYLRLRLAGKPAKVALVACMRKLLVILNAMVKNNTCWQQA

SEQ ID NO: 81057 - protein, 392 aa, unidentified
MYIVGIDIGKNHHEASIVSPEGKQIGHSLRFATTHKGADSLMSFIFNNIGNSSCIFGMEATGHYWYPIYSFLKARGYTIYVINPIQSDSLRKMYIRQTKNDSIDSFLIAEVIRFGQFTTTSMADENILAMRQLCRYRDSVISSRTEIKLRISTIMEQIFPEYEKQFSSLWLSTSMGILEKYLTPENIENAPIDELFEIIKDKSHNRLTRAKAISIKEAAADTFGIKIAQDAFSFQLKQLIDRMNFLDKQIEALDCQILEYYEKFDCYLHTIPGIGMIAAATILAEIGDINRFKSSSALVAFAGIDPTVRQSGEFSSTHNHMSKRGSPYLRHAIFLAATTCSFHNSPLNAYYKKKREQGKHHLTATGAVARKLTTVIYAVLRDGKPYEPKSFC

SEQ ID NO: 81058 - protein, 343 aa, unidentified
MTLKASFKWVNPQDINVLGLDVAKAKIDICFLSSNHSWFYQIANNSQAISQFSQELKALGLNATIPFVLESTGSFHLLLATLLKNDGWNVKEINPIITHQYIKHTVRGTKTDTTDAQLLAKIGLIEGDNLKSFDRDLNIIKLRMFISFLAHLETLIQQSKASFNALEKGLTTLGLWKSQELEKMKETIKILEQRAKGLEKEILNIQLSPEAQEQVDCLDSIVGISPFTAKVAYALFAHNTFSSKRAMLAYVGLDPKLKQSGTKTWALRISKRGHPYMRKRLFQSAFCSLQHSPYFKSIYDKHIQRWKHHFIAVLAVAKKMIYIMRALLKNNTQFDHNYHLLST

SEQ ID NO: 81059 - protein, 344 aa, unidentified
MSEVIIIGLDIAKHVFHAHGADGRGRAMFSKRISRGKLLDFFAAQPSCKVALEACGGAHHWARQLTQLGHEVRLIPPAYVKPFVKRQKNDAIDAEAICEAAQRPSMRFVAVKSEEQQAAGLLFRTRDLLVRQRTQLINAIRGHLTEYGWIAPKGPSHVARLAELIDEEEMASSLPEAALAMFRLMLDLLAGLNGKIADLDKEIVRGAREDEVSRRLMTIPGIGPISATAIAALAPPAETFAKGRDFAAWLGLTPLQRSTGGKQKLGATSKMGERTLRRLLIIGSSAVVQQASKRGAPKGSWLEQMLTRKPRMLVTIALANKMARIVWALLVKQENYRAPVPARA

SEQ ID NO: 81060 - protein, 411 aa, unidentified
MDVYCGIDWAEDHHDIAIVDRDGKLLARRRISDDAAGLAALLDLLAEHGDTPGDLIPVAIETPRGLLTACLRATGRQVYPVNPMAVARYRDRHSVSGGKSDHGDSFVLAGVLRTDISFHRPLPADSELAQAIAVLARAQQDAVWDRTTAHNKLRSHLREYYPAFLAAFGTARGGILRPDARTILAAAPTPGQAAALTAAQLRALLRKAGRTRSIDAEAARLREAFHAGQMRQLPLVEQAMGRQTLALLGQLNAACTAASDLEHAATESFNLHPDAGIITSFPGLGALTGARVLAEIGDDRSRFQDAKGLKAYAGAAPITRASGKTRSVTYRKIKNNRLTAAGYSWAFSALTASPGARAHYDRRREAGDRHAAAQRNLFGRLLGCLHHCLTTGQHYAEDTAFPTTTTLTAAA

SEQ ID NO: 81061 - protein, 412 aa, unidentified
MNNPQDYLFVGVDTHKAQHTAVVINCFHQKIGYAQTPNNPTDFDSFLTRLKSLIHNDEKLVFGLEDTQGLGHLLAQWLIKKDYTVKEVNPVQTKRERKESTSPDKSDKVGAKAIANVLLAEYDKLPTIKNDANFKAIRQLNNQRKSLVKEQTKVKNRLHNLIHQQYPEYKKFFSDTFGKTALAFWKKYPHPGQLKHIGEKRLNNFLKKQVKSISNDKAAHILSLVDKDKDKNISTKTRETLIPMLIKQLKLIKQNLEEINQLLKKAVDDSQYKLTTMPGIDFRLAAIFISNIKNIDRFDFADQLARYAGIAPVEYSSGKSQNTTSKKYGCRDLNHAFYILALQQIGKYKNGRIKNPVAYNYYQKKLKEGKSKKTALTCLQRRLVDIIYAMMRDRSVYELPEIPNYEILNKAV

SEQ ID NO: 81062 - protein, 398 aa, unidentified
MPGAAKQASGQKSIAASDAPRQAPRKERLSTLTAPKKAPHKGPASRSAGRFTIGLDLGDRSNAFCVLDDDGAVVAEGKVKTTRAALDQQFANLAPARVALEAGTHSGWISRLIESYGHEVIVANPREVRKIYQSDRKNDRSDAHILARLARFDPQLLEPIRHRDAQMQAALAFVRARETLVTARTKCINATRGLVKSTGTRLPKCSADSFCRRVTGDIPTELELALAPLIATIQTLNEQIRWYDKQIETLATEAYPHTTLLRQVSGVGALTALAFVLTIADGTRFAKSREIGAYLGLVPRQDDSGDRTSQLRITKAGDPYLRRLLVGSAQYIVGPFGPDTDLRRCGERLMQRGGKNGKKRAVVAVARKLAVLLHRLWTTGEVYEPLRNSNRQGSKKAA

SEQ ID NO: 81063 - protein, 367 aa, unidentified
MQESIIWVGLDVHKDSITAAMFTDDSDKGEIIRLTGEVKSVRRLFRRLEKRGAIRSCYEASSCGYSLCRALQRDGFHCEVIAPCLIPRIPGNRHKTDRIDASNLAKLLRSGHLTTVRVPDESQEAVRGLVRLRYSCSERVKATKQRICSFTLRDGLVFRETKTYWTRKHRCWLRDLHQSLSPPQSTTLGIELNHLEYLETQLRSLDLEIDRYAQRDPYRETVDALCCLKGVRTLTAMILATEIGDVSRFPSARSLMAWTGLVPRERSSGNREWRGWITKCGNRHVRRILVESAWNHTRGRRATAEIRRRRMGKDPVVVGIAVRAQHRLQRRVMALGLRKHQNVAVTAVAREMAGFVWAIMRAVPQTV

SEQ ID NO: 81064 - protein, 385 aa, unidentified
MDEEVSPTTKNGDKHMNKTDKYIGLDVHKDTTVIAVAEGGRVGEVRVYGSIPGDLRSLEKVLGKLGGENVRLHVVYEAGPTGFLVYRRLRQLGIDCIVVAPSKIPQQKGVRQKTDRRDAEQLARLHRAGELRAINVPDEVDESVRDLTRARADAVHDLTRAKQRLKSFLLRQGYRYPGSANWSEAHQRYLRKLTLPLPALRSVLEEQLLAIDQATDRVKRLDELLEVQIPQWRHYPAVQALMCLRGFQMTAAAIMVAEAGDVRRFAHPRGFMGFLGLVPKEETTGSSRKLGSITKAGNAQARWCLIEAIQSAYGPPKVSSRLSLRQEGQPKAYRDLAWKIQVRLHKRGWHLLHRGVMKAKVNVALARELAGFVWDLLRQVPAPDA

SEQ ID NO: 81065 - protein, 364 aa, unidentified
MKLVKDIVNRVVRYIGMDVHKDSTTAVVLDAQGNLVMQVTLRTEGTVLVDFVRGLSGRLHLTFEEGTYSAWLHALLSPWVEKLIVCNPRQKALLKHGNKSDPIDARKLAELLRLGSLSAVYHDAPGMRTLKELAASYATLVQDGTRVMNRLKSLYRGRGIRCGGTQVYSPRHRARWLEQLVEPGARQRAKLLYQELDLLLQLRPQARRALLAQSRQHPAQKILRTIPGLGPVRVALLLAWLQTPHRFRNKRKLCGYGGLGLLTRGSAQYRLEKGELVVSPKGVMVRGLNPAHNTHLKDIFKGAALAACQRPGPLREAYQRLLREGTQEHLARLTLARKIATLVLTLWKRGERFDAQRLRREQAA

SEQ ID NO: 81066 - protein, 457 aa, unidentified
MGLVVNVVEPTIPAEPKEYAARIGLDWADQKHYWSMRTADGNYTRGTLENTPEAVQVWAAELAQRFAGRPLAVALEQSRGSVVAMLSKYAYLYLFPVPPASLSYYRKSVYPSGAKSDPVDGDLILDYLIKHPERLVCWKPDTDETRSLQFLVEERRKLVNQQVRETQILTGWLKQVFPQILRWFDDLTTPLVGDLLLRWSLLTDLQKVSKKILRRFFYQHNCRSEERIEERLEQIRQAVAATTDAALLRTGKLRIRHSVHVLAASRTAIAEFDAEIKTIYASHPDCFITQSFPGAGPVLEPRLIAAVGSKRERFASANEMACCFGVAPVTEGSGQSRWVHWRWACSKFVRQTFHEWAACSIRTCEWAREYYDRQRDKGNGHQAAVRSLAYKWIRIYFRCWRDRVAYSEERYLEARRARASPPDPQADLVAGPKPSVGGRQRPPGRTLPAGSATGGER

SEQ ID NO: 81067 - protein, 394 aa, unidentified
MKLVGIDVGKNSHHFCVMDKETGEFNVTPSSFSNNKEGFDFLINSLKPYSKKSILIGMEDTGHYHVALLKFLLSNGYPVALINPKTTDLTRKMEGGITKNDKLDTITICDVLDTPERKKQYRITKVDRFDLYEQRQLTRHHHNLKEELNVYCNRLQKSIDLVFPEFNTLFSSKYSIVYMNLLKTFGSAEAIASTDIRTIRKCFEVKGRGGRISLTPEKLKECAKNSIGISSEVETIQIKHLVSQITLIKEQIAEIDKKIEEFSIKNNSPILSIPGISHFSGTSILAELGDIGNYSKPSQIIKFAGVAPYHYESSQYNAQHTGITKKGSKYLRKTLYQIILTVINNNPVFKKYYLLKISQGKGHRCAQGHCIRKLLRIIYHLLETGQSFDPALLR

SEQ ID NO: 81068 - protein, 424 aa, unidentified
MRFIGLDLHKRSLEVCILSEKGSVLARHSVVCERFALKRFAEKHLEETDKLAVEATTNTWAVADILRPFVAAIVVGNPLQIKAIAQAKVKTDKIDAEVLANLLRCDFLPDVWNPDPITQRLRHLTGVRSALVADRTRLKNRIHSILAGLLTVLPEAGLFTEKGLNWLRKLTLSDDARCTIDRFLRLYSAVETELESLDVVLRTLAYHDDRVRLLMTLPGVAHGVALTLIAAFGDISRFRDGDHAASYLGLTPIVRQSAGKCYRGSITKAGSSTSRAMLTQAAQHAASHPGPLGAFFRRLSKRKTRNVAIVATARKLVTIAFLMLKNNEPYRYAQPERVRAKLRHAERAAEESHPEGSGAKPEVSSESMNRLNRTYSRFGLPTAKSPEEWSPGERRILKESETLTFATQVHATPPKRGRKPKTSL

SEQ ID NO: 81069 - protein, 339 aa, unidentified
MARYIGVDLHRNQFTVCVIAENGREYLREYHLEQLPRFVARLRATDEVAVEVRGNARLFYDAVAPHVAKVVVVNPTQFRVIRDSVKKTDPHDARTLAFYLSKGMLPEVRMKDKLHAQLASLTQTRDTLVKQRTALKNKVNNILSAHGINLRKEALSSDSGLEEVLGMKFDAIVMTELRVIVGQIRACNASIAELEKTIQAEGPKLPGHENLRSIKGIGNLGATILLSVIGDIEDFAHPGKLAAYFGIVPRVRKSNEVERSGRISKRGTKLGRTTLVQCALIAMRYSPYLARFYHKIQARRGTGKAIIALAKKFLGVIYHTLKNNWIFADFPNFVLAEAS

SEQ ID NO: 81070 - protein, 338 aa, unidentified
METYAGIDLHSSNNYTAVINDQDQRLYGKRLSNRLEAIVSALTPFKEDLKGVVVESTYNWYWLVDGLQEHGYTVHLANPSAIKQYEGLKHTDDTWDSFWLAHMLRLNILPEGYIYPKEQRPVRDLLRRRLLFVKHRTSHILSLQSMINRNLGTRMSANAIKRLDQGAAETLFDSPHLVLAANSNIAVIHFLKERITLIEKAVKSQLTLREEFKYLLTVPGIGDILALTIMLEVGDIARFPQVGDYSSYCRCVKSERLSNGKKKDENNRKNGNRYLSWAYVEAANFAKRFCPHAQRFYQKKMAKTNGTVAIKALGNKLARASYYMMRDQVSYDPEKLFR

SEQ ID NO: 81071 - protein, 412 aa, unidentified
MADVVAYIGLDWADERHSVHLQTTDGRIEHLELEQKPAVLHEWVAQLQQRFGGGTIAVALEQRRGAVIHALLMYDWFVLYPINPKALARYREAFRTSGAKDDPRDSALLLDLVVRHRDQLRAWVPDTVESRKLQALCEQRRKLVNQRVALTNRITSLLKQYFPHALDWVGDLASVQACDFLVQWPTLAAVQAVRPSRVRQFYSDHNCRKRAVVDARLAAMASAQPLTTDAAVVEPLSLAVQTYATQLRTLITAIQTFDTRIAEVFAQHSDHDIFGSFPGAGDVCAPRLAAAFGTDRTRWDSAAELQSHSGIAPVTERSGKSMWVHHRLACPKFVKQTFHEFADQSIRFSRWARVYYDQQRARGNDHHAALRALAYKWIRILFRCWKERRPYDEKTYIEALRRRGSPLAKDFA

SEQ ID NO: 81072 - protein, 339 aa, unidentified
MELYAGIDLHASNNFIGVLDKNGKRIFKRKLPNIPEEILVSLGGFKEQMVGVVVESTYNWYWIVDLLGDAGYRVHLANPSAIQKYSGLKHADDQHDAFWLGEMLRLGILPEGYIYPKEERPIRDLLRKRGHLVRLRTSLVLSLQNIVARNCGVRLNVNDVKRLRENVVVPLLEENEDLAMAGMVSKEAIDFLTRKIRQVEKMVEGKLKLKEPYRYLLTIPGVGRILSLTIMLETGPVGRFPAVGDYVSYCRKVSSKWISNGKAKGKGNKKNGNKYLAWAFSEAAELARRYDSQCRNWYNRKMQKTNFMVAHQALAHKLARAAYCIMKREVPFMPEKLFA

SEQ ID NO: 81073 - protein, 428 aa, unidentified
MDEQEHSRLEDFRQLKREIRGSKEYLIVGIDIAKDRHHAFFGTATGTTLLKRLVFENTREGFDKLLIQAEAVKVQHGLQKTVFGLEPTATYHKPLGEFLIKADHRVVLVSGVAVKRNRELLDGRWDKHDTKDSANVADLISQGKCLFYDYPSLPFRELRSLVSLKRRVKKQEHGLRTRIRNHLLAQYFPELDRYYGQSESDGLAVVRWGVNPSVIAAMDYGRFAQRVAPHRRNLAQQERLTAIWQKAAHSIGCEAGEALAFEAEVLVEELHRIREVIRAIEEKIEDICVQFPEYHYLLTIPGFGPDVSSKVLAAIGDPFRFTTGAQVLKMAGLDLSAERSGDRSDAATPVLSKKGKADLRYALYQAALIASTRNRSFVLYFTNKLRGREREKGIRTKMRVKLAAKFLIIAWTLMKRKEPFNSEYLIRQ

SEQ ID NO: 81074 - protein, 376 aa, unidentified
MHSENIAAYVGLDVHKETLAVAIAAPERLGEVRYYGTINNEAQAVRRLFQKLQGLYGNILSCYEAGPCGFGLYHQLTAMNIKCQVIAPSRIPKSPTDRIKNDHRDAISLARLLRAGELTPVWIPDLTHEAMRDLIRARAAAKRDSRVARQRILSMLLRTDKHYAGKHWTGKHRTWLANQSFSQPSQIAFQHYCQSLEQIEDRILQLDQEISRLLPEWSLCNLVCQLQALKGVGQLIAITLVAELGDFSRFSNPKQLMAFLGLVPGEYSSGNSIRPRGITKVGNSELRRLLYEAAWSYRTPAKVGAWLIYYRPDSVTQYSKDIAWKAQQRLCSRYRSLTAKGKKSQVAITAVARELTGFMWDIALAAQSSFSQQKQN

SEQ ID NO: 81075 - protein, 571 aa, unidentified
MNPQNTQNHHSNVETETESARELQASPLPDSALCTPHSALSTPPSLSQFPDTVFKLNRSDSSEPGAVNKFAAAEAKTVNKSSDIAKTLRPVKAVTGRMPHDSPRSLCADPARVYRRKPAEPRGPVQKSERTSPHEGFCISVTGDRTFGGRQKPPMKNWNEITHYLGFDWAKDHHQVVIVDRQARIVAEFQFEHSLEGWNTWRERIRDYPALAVAIETNQGAAVEQLLQSSVSIYPINPRSAKAYRQRKVPTTNKTDRLDAWSLAEALRTDGQSWRPLQPLDPLIQELRLLCRDELNLIAQRTSLINQLQQALMEYYPSALEAFDDWTVPATWKFLERFPTPDALTAAGLQKWNAFLHCHKLYRQNTHERRLAAFSKASQWHIAPALQRAKSFLVLSLVQCLIVLEKQLQQYRKRIEELFASHPDHDLFGSLPGAGPKMAPRLLSELGDDRTLFPDADSLRCYAGTAPVSYQSGQVHKVYLRRQCNKPLRCAIHLWADLSRRWCQWAQTYYQQLRKRGKSHAQALRCLGHRWLKIIWKMWQTRTPYDEALHTRNQTEHGSWVLQLMDQKPRE

SEQ ID NO: 81076 - protein, 316 aa, unidentified
MTPTFTTIGIDVSKEKLDIFFLSSQKNLSVPNTTEGIARFLTQNPLETDLFVLEPSGGYERAILEALQKSGHSVARVNARQVRDFARCKGLLAKTDALDAKVLAEYGVVIRPDPTPLVSETVGKLRGLLQRRQQLSDMIAKEKTARQQATVPEVIVQMEGFLRYLQAELESMNALIAMLIHDDEALLAKHDCLSSCKGIGPVTSATLIAHMPELGTLGGKEIAALAGLAPINHDSGTMRGKRRIAGGRSLVRRVLYMAAISAVRHNPPLKTFYERLIQKGKPAKVALVAVMRKLLTILNAMVKNNAKWYYDASSPA

SEQ ID NO: 81077 - protein, 348 aa, unidentified
MNKKIVKQVAGIDVAQKELVVCLGRMYDDWAPELYSHKTFPNHEKGFMALVLWVKKLAVEEVPVRFVMEATGVYHESLAYFLEEKGYESSIVLPNKISNYSRTLEVKTVTDKTASEAIARFGLERKLDPWKRPKKLFKNLRQLTRERDQVVQMRTMAKNQLHAEQAEAEPNPGSVTRIKQQIVFLNKQELQIKKELLVLSRQDSQVEQSVKLLCSITGVGSLTATTVLAETNGFELIRNKRQLTSYAGLDVKEKQSGTSVKGKAHISKRGNRYLRKAMHLPALTAIRHDDRFKAIFARLVSKHGIKMKAAVAVQRKLLEMMYIVYKTNIPYDKKYLQRNEEQQQIING

SEQ ID NO: 81078 - protein, 376 aa, unidentified
MQEPTLCIGVDVSKAELVIAMGPERRPCSVANDAVSISNWLREIPAHALIAMESTGRYHGLLAHLASQAGLKVYVLNARDVFFYARALGTRAKTDGVDAGVIARYLVEHHGRLHPWQPGSSLQRRLQDLLARRAQVVTHRSALRQVFTGIDTNDIDTASLQDAFDSVLQSIDHQVQALIASDAQMAQGCERLRTITGIGPQTSALLATLLSRFDFANADALVAYSGLDPRPNDSGTKRGRRRLSKKGPPLLRRQMYLASFAASHSKALKPLYQSIRAKGFATTEALVILGRKLLRVAFAVWKGNEVFDPARLLPRETRRKHRTSDSCDAFPPAAALLGTARRGWKPNTARLRHCCGSSFGHCLAAEGEGASTGDGG

SEQ ID NO: 81079 - protein, 362 aa, unidentified
MEQFIGCDAHKKYSVFVAVNERGEPSQEVRVGHDREQYRRYLERLLAGSQIAVEASGHYYWMVDEMEAAGHHPRLTHPLEAKKRMGKTGKKTDKLDANGLGILLRNGTLPEVWIPPAGLRDQRELLRLRMFLVQQRTRLKNRIQGALARYNIQLGVGDVFGGEGRQCLGARLKEFPEHTRQSVELELVTLDFLEVQIEEVEKPLEAIMQVTAEADLLKTLPCVGRILSMVMTLEIGRVERFPSAAHLASYAGLVPRVHSSGGHTRLGQICREVNPYLKWAFVEAGNLVVINQRHMPGQHVVRLYQRVKRKRNHQKAVVAVARHLAEAAYWVLKKQEVYRPPQPQLKAPAKAQAAKVLSSTHG

SEQ ID NO: 81080 - protein, 405 aa, unidentified
MRYYIGVDWADAEHAIWVADEQGTRVLSRAVPHTAEGLAEWGRWLDEQRAAGGELWAAIERPDGRVVDFLLDHGVLVYPVNPKALDRARDRFRMSQAKSDPFDAQVLAEVLRTDQARLQALQPSSAAAQELKLLTRDYARCVREQTRLVNRLTATLKEYYPRALEVCEDLTTQRARAFLRAYPTPEALAALRPKQWQRFARTQRWSAAQVATLWTTLQAPQLPVPAHVVRAKARLVRILVTQLAAAVQAVAEYREAVTGFFGTLPAAEWATTLPAGHGTTVPTLCAELGDAPGRWASWQHLQGHAGTVPVTVRSGKYRSIQFRFACNKPLRTALHQFALSSLQHSEWARAYYDRQRARGHRHHAALRALGAKWLKIIFVMWRRHVPYREEYHLATMARQQLRQAA

SEQ ID NO: 81081 - protein, 343 aa, unidentified
MLTNNVIAIDLAKNVLQACHISTHGEILSNKPLSRQKMKEFLANAKPSIVAMEGCCGCHYWGQLAESFGHEVRIINPKKVKGYLEGHKTDHNDALAIANAAMQIGIKYSRPKSLEQQSMHSLETSRRFLSRSVVSLGLHIRGTILGYGIANPRGEKGLKASVQTVLDGETSIPANVVSVLSMLWEQYKELKAKLIAFEKEKNALTRQIEQCQRLMEIEGVGETTAAMLYTTLGDGKQFKNGRQASAFVGLTPKQHSSGGKVFMVGIDKCGGVKELRSLLYLGAMSYVGRLPEKPKTQKDAWLRSIIDRIGFKKACIALANKVVRTAWAMLRYESEYKPVLLTD

SEQ ID NO: 81082 - protein, 316 aa, unidentified
MSSPGVFVGIDVAQAELVIALRPTGESWTVGNDEPGIAALMRRLRPLAVTLIVLEATGGYERAAVAALATAGFPLVVANPRHVRDFARGTGQLAKTDHVDAQILALFAERVHPTPRPLPDAATQALEALLARRRQLLDMLTAERNRLAHAGPPIAQDLRRHIRWLERRLGKLDHDLDQQIQRSPVWRTQDDLLQSAPGVGPVLSRTLLAALPELGRLTHKQIAALVGVAPLARDSGSRRGHRRVWGGRAAVRAVLYMGALAAAHHNPVIRAFYQRLVRAGKPKKVALTACMHKLLTILNAMVRSNTAWRANIAQTT

SEQ ID NO: 81083 - protein, 445 aa, unidentified
MSNKVRSLTRGDRRRNEKLIRLRSIVRPELAIVGIDLASAKQAAVVADHDSITLARRMFEGDPWMIDEIVDWALPLAADAGFAGIVVGCEPTGHRWKPVLERCRARGIEVVCVNPMLVHRGREEEDFTRDRSDFKDSTIIARRVADRHCYVPYALEGHWCRLRHLGARRNDQLVEATAARQQLRDLLECVWPAVLRTAAKPLEATTWRAAMAVSCDPAEIAAMGYDAFASSVGAELARWGGKRRSHRILQAIWAAAVEPDGVERERPAALERARDAIRDWRRALDEIADVEARMLEVLDALGFTELVTSIDGLSAVGAAAILAEAGDPARFDCARTWVKHAGLCPRANESGTFAGQTKVSGRGRPGLRTAAWRAVWGALHHNAVYAARYQHLRTRTDNPLKDGQARAAIAAALLRQLFVVVTRRVAWDPAIAAGARHQEVVDQAA

SEQ ID NO: 81084 - protein, 315 aa, unidentified
MTRLKDAPDRVLGIDVGKATLTVFDSRAGTLSVIDNTAPAIKALCEDLGPDTLVVCEPTGGHEALLLAELAAAGIACHRADTLKVKAFLRSFGTLAKTDAIDARALARYAQERWQLLVPFALSQARQAELAALVARRKDLVDLKVAETNRLKAPGMAQVRASCKVVLRCLQGQIARIDAAIEAVLAKSPSLARRIAVSRSLPGVGPRTAITLAAMMPELGSLTRRQAASLAGVAPHPRDSGTLKGYRRMRGGRTTIRPVLFMAALAASRAKGELRLFYQRLVQNGKKPIVAIAALMRKIVVILNARLRDQIQQQS

SEQ ID NO: 81085 - protein, 359 aa, unidentified
MTTTTAKTTSAAGPILAIDLGKYKCVACVYHAADRYTFHAIDTSLTEVERLIRRTRPAVVVIEACSLAGWTHDLCGRLGVPCRVAHTGAEGWKYQHAKRKTDRDDALRLAQLFALGQLPEVVVPAKAVREWRALIAHRQALVTQRVAAQNRIRSILVGQGLPAPRGAKAWAAAGLAGIGQFARPLIECAPDELWRGMLDLALTAYRQAEDLVAAAEAKLDEMGKAHPRVRLLDTMPGLGPRTAEAVVAHLDDPRRFKSGKQVGAYGGLVPRQYQSGEDDRRGRITKRGPAVLRKLLVQCAWAMIRYNPWARAVYVRLSRGKARKKQAVVALARKILVRCWAMLRDNAAWRPDPVPAAAA

SEQ ID NO: 81086 - protein, 309 aa, unidentified
MKKEEVVYCGIDVAKSHLDIALCGERWRVANTQTGIGGLVERLKAAAPKKLQVICEASGGYEQALLGALAEAAVPVTLVQANRVRQFARACGILAKTDRIDAVVLASFGQALKPLPSPAPPLHLLRLRELDRQRCHLSRLLVAEQNRLAQLRCAQLRRLARSLIGKVQKQIASIDQRIASLIEQDQTLSAKAKKLTSFTGVGTRTAALLLAQMPELGRLNRRQVAALAGVAPYNRDSGSMRGKRCIFGGRRALRSGLYMAALAAARRNHILAPFYQRLLAAGKPPKLALTAVMRKLLIALNTALSPYPA

SEQ ID NO: 81087 - protein, 341 aa, unidentified
MKNLFIGIDFSKEKVDVAIIFADGLTETAARVFNEFKTTVSGYKQLVKWVEQNSYGIDTSLWLFCGENTGGYSNGLCKFLYGRGYDMWLENAKSIKDASGLRRLKSDRADASMIAEYAMRNHDKAVMYKPLNESLEQLRELFLFRQTLVRYRCSFQVRREEKRLTMDKSPVKTMISQIGRHMVTTLEKEIEKVNKRIADLIKSDDELTEVFTIVTSVPGIGTQNAVCLMVYTDNFRRFNYDSRKIACYYGIAPFGKDSGTSVHSDPHVHYMANRQIKAMLTQAALAAVNYNPVIARYYKRLVERGKKKQVALNNVKNKLVHLVSAMVRNRQLFSPEYKISA

SEQ ID NO: 81088 - protein, 345 aa, unidentified
MPEKAEVAVVGIDIGKNSFHVVGLSDRGEVVLRQKWSRPQIEVRLANMPPCLIGMEACVGAHHLSRRLRALGHNARLMPAKYVRPYSKGQKNDFRDAEAIAEAVQRPTMKFVATKTVEQLDLQALHRVRERLVGQRTGIINQIRAFLLERGIAVRQGQRFLRTELPDILGAPVDVLSPQMARLVEGLAADWRHLDERIDQLSSEIHAMARDDRNCERLMSVPGIGPIISSAMVAAIGGGEAFNRGRDFGAWLGLVPRQMSTGDRTVLGPISRRGNRYLRVLFVQAAWVVLIRPGSWERYGLKTWIESARKRLHRNVLAIALANKLARIAWSVLANGRNFEVSAMV

SEQ ID NO: 81089 - protein, 318 aa, unidentified
MNSHYKIETTEPVKYVGLDVSKARLDYVMEDGKPAAVPNTASGLARLVKRLKQCPGARVVCEATGGYERKLLNALWAANLEACRVQPGRVRHFAQAEATFAKTDRIDARLLYRYGQMMHPRLETPPSAECSELRDLVDYRRHLTEQRAVTCNRQENAGPTLLRLLAQQVVQLDETIAAVEETIQEHLRKNTALQAKADRLQQLQGVGPVLAVTLLAYLPELGTENDKRIAALVGVAPYADDSGQCERPRHAHGGRQEVRNVLYMAAVASTQHNPVLSVFYRRLRATGKPPKVCIGAVMRKMIVVLNRMLRDPNFTLAE

SEQ ID NO: 81090 - protein, 367 aa, unidentified
MIQDTLHVGLDTDKRHIDVAVAEPLPGGEVRYWGKLANEPAALDRVLKRLQRGGRRLVVCYEAGPCGYGIYRRLSGRPGVSCQVVAPSMTPRRAGVRVKTNRRDCLTLAKLLRAEELTAVWVPDAAHEAMRDLVRARGAAVEDLVRCRQRIGGFLLRQEIRYAGKPWTRKHRAWLARLELGEGAHRLMMGELIDALDQAQARRDRLADHIRELLPRWSLAWLVEALQALRGFALVNAATVVAEIGDPRRFESPRQLMAYLGLVPSEHSTGQDVRRGGITKTGNARARKALVEAAWTYTRPAKASKPRAANQPAALRAIADKARHRLTGRYRRLLTRGKCPQAAVVAIARELAGFLWAIAHAGATRPH

SEQ ID NO: 81091 - protein, 343 aa, unidentified
MQAVTTIGLDIAKSVFQVHGIDAEGKVLIRRQLKRRYVLAFFEKLQPCLVGIEACATSHHWSRELKGLGHNVRLMPPAYVKPYVKRQKNDAADAEAICEAVTRASMRFVETKTPEQQSCLMLHRTRQLFIRQQTSVIKAIRAHMAEFGVVAPVGRQGVEALLEAVADVGDNRVPEVARACLAALGAQLRMLKAQILEFDRRILAWHRSNETSRRLDAIPGIGPALATALVASVADPKAFRSGRNFSAWIGLVPKQHSSGGKDKLGSISKQGDRYLRSLFMAGALAVIRYAKINGTKHRPWLKALLARRPTKVAAIALANKIARMVWAMMARGERYKEPVALAA

SEQ ID NO: 81092 - protein, 346 aa, unidentified
MNKDIILAVDYHDENLEIRRFNTATGEERRENRPTTRDDILKVVAEAATEAAATGGQVVWIMESTTGWARVKDLIGPRADLVLSNVLQMPLPPKAHRKKTDKIDTARMLREYLNGSLPRSFQPSAGLRRVRRLADTRESLVRRQTALRNWLTRYLAHETWEDRHGLWSQRGRRRLRRLAESSAGPDRVVLTVKLAELEHLEPLRKMVEQEMIAVYQQWPEAQAVDAIRGIGVIAAVSILAHIGPVGRFRSAEALIAFAGLAPGVRQSDRTFRTGRIGGGGTDGFLRHYLIEASVWARQIPRNRKTYERVEAKRGKKIARLVVARLILRSIYKMLHDGVAFHQAPAA

SEQ ID NO: 81093 - protein, 438 aa, unidentified
MSNKFIFNLDELFISVGIDVGADFSWMSIALPNQQFVGKPYKILHNSIDSLTTAVSKIKEAEELYSLESRIFLESTGIYHYPLFCYLRDKGFNCSVINPIITKNSTNINIRKVHNDRFDSKKAALVGLKPDLKVSLMPSDLALNCRNLCREYYDLMDNRSAYVNKLQGELRMAFPQYLGIFSKVTINTSLTLLETYTSPSAFLKADKQEIIDIIKSTARFGLTYAQNKYNAIIQAATDANQFGYIIDSNIKRIRLYISFIRKYDEEINSILESLHELVDANEDSDFVKQIHLIETFKGAGFLSAVSIMGEIGDFSAFSKPKQLFAYFGLDPAVKQSGKFEGTKVQMSKRGSAIARRVIHTLTLQSISISRNREAKNPVLREYYLKKCDSKPKLVAMGAVSHKVCNMIFAILRDNKPFKIIAPQEHIKQYNSAKCDIAA

SEQ ID NO: 81094 - protein, 415 aa, unidentified
MKVVFPTCCGVDVHKTFLVATIITTPADSLQPNYQKKRFSTFNSDLNRFADWLLEHNCLDVCMESTGKYWVPVFNVLEKRGIRVVIANPKWVKAVKGNKDDTKDSKWIGDLFRIGLVKSSFIPDLNIRILREFTRYRYKLVSMKSSEKNRFQNAFTVCNVALDSVVSDMFGKSATAITDYLTSDESFDSEHCVSLLQRSLKKKAEQVLESIEGFSIASEQKARIKIIREHYDFLEKMIAKVDTCVSEMVEKHEGEINLLCTIPGIDRNSAITIISEIGTDMRQFGSSKRLCCWAGLTPGNNESAGKKKSVGISRAGVYLKPALVQVAHAAVKDKASPYYALKYERIAKRRGKKRAIIAIARMILTAVYSMFCTGEVWNPVDLYKVDMPEHLKEQQLAKAIKQATRFLEKQGLSVA

SEQ ID NO: 81095 - protein, 337 aa, unidentified
MKIVGCDLHAGQQSIAMMDSETGELTEKVLKHEGNAVREFYGWLEGPVVVGIEATGAMQWFLELLEELGIECRVGHPAKIRAAETRQQKHDRRDAEVILELLLMKNRFPDIWMPSTEQRDLRSLLRDRHQWVKMRARLQHTLQAIALNHALRKGKALWTATGRQALQDLALPDYTAQRRDELLRLYLQLERRIQQLDKQVEKEAQGRPQARRLLTHPGVGPVTALATEVFLGDPHRFRTAKEVASYIGMIPCEHSSGKRRRLGKLTKEGNSRLRYLWTEASPTEDSRYGVVIGPSHTQNEGTLPGTVCIPAVLHGVCRRATDAAFGAHVDRPRCRLC

SEQ ID NO: 81096 - protein, 415 aa, unidentified
MDVLHDRCAGLDIGKKDLKACVRTPGLTGRRSRRQEIRTFATTTNALLELREWLLDQQVTLVVMEATGDYWRGVYYLLEDTLNVILVNAAHAKGLPGRKTDVSDSAWLAQLGECGLLKASFVPPEPIRHLRDLTRYRATLTVERTREAQRLEKELEDAGIKISSVATDILGVSGRAMLAALIDGEDDAQVMAEMARGRMRTKIPALVQALTGNFGEHHSFLCRMHLTRIDELSATIEELSARIDQEMRPFAPQIERLVTIPGVKKTTAEVIIAETGADMTRFRTPANLASWAGVCPGHHESAGRQRSGKRRHGNRWLGGALGTAAMAAGRTKERTYLGARYARLVPRLGKQKTIVAVEHSILTAAWHMLTDNVDYHDLGGDYFTKQDPERAMRRIIRQANALGLTVRFDPIPDVA

SEQ ID NO: 81097 - protein, 339 aa, unidentified
MMAGEVGVVGGVDPHADTIHVAVITTTGRRVADREFATTADGYAAALAWLRAQGWPGRVGVEGSAGYGAGVTRALTAAGAEVVEVERPTRSARRRAGKSDRLDAYHAARAVLAERFSPVKNPAIDGVRALHVARRTAVQNKTQAINQIRGLLVMADDLVRARFAVRTAGRLVSAILASGDDDDTMIALRVLAERYRRLDQEVRMLTRRLGQRVRELNPRLLEVYGVGPDSAAQLLITAGMNPDRLRSEASLAALCGTAPVPASSGKTTRYRLSRGGDRAANAALHRIALVRLSHDHPATRAYAAKQQARHRSGLELIRLLKRALIRELFKVLRDPIPAI

SEQ ID NO: 81098 - protein, 340 aa, unidentified
MSLVLQPLLPFPDSCQGMSPHQQGRGTKMTEHCYGGIDVSKDRLDVMVLPDRKSFSVDNNAAGYSELVKRLRGLSIAAIGIEPSGGYERAVIRALLAADLSVRRINPNKLRQFGRARGVLAKNDRLDARLIAEYVAIMPTRVVQRDPATEQLAEVVTMRRQLCDEHVAVENQTAHLEDAMLRRLNKRRLARLAADILLLDRRMAQIVAGNANLTRRYELLTSMQGVGPTLAFTLVALLPELGQMSRKQIAALVGLAPYDFDSGRLKGHRCIYGGRLPVRNVLYMAALSACRYNPALKVFHHRLAATNKKPKVIIVAVMRKMITTLNAMLRDNVVWQPKSA

SEQ ID NO: 81099 - protein, 371 aa, unidentified
MKNNNTLSVVSNSPTPATIASGGYTLGLDLGDRSHQVCVLDAAGQIVREGTLPNTRPALAKLLAEFPRATVALEAGTHSPWISRFLQERGATVLVANPRKLHAISRNERKCDQRDAQMLARLARVDPVLLYPIQHGSAQAQHDLLGLKLRDALVRTRVNLINAIRFTLKSLGHPVRNPSSESFHKTVLADVPADCRPVIQPLLTVLVQVTEQIKGMEHDLVQRGKKAYPATQRLQQIAGVGPLTALCFVLKIGDPARFGRSRDVGAYLGLCPGRDQSGGTDKQLRISKCGDGLLRRLLVSAAHYILGPFGPPCALREHGQRLAGTGSAREKKRAVVAVARKLAVLLLSLWKHGTDYEPRATAAPALVMTPA

SEQ ID NO: 81100 - protein, 527 aa, unidentified
MTERVYEFGGWGGKSVSSAIGIDPDSTGFVCALVKDSKAQAITRRFSVSQKGLSEFLCWVKAEGKPIVGIEGSHGQSRPMEKALREAGVIFHSFKPADTDKFRKAVLGQNKNNERDAESVARYALALEAQGKLEQYRRVWSADMELQLLTRRYESLSNQLTGEVNRLWKLLRYACPDLYLLLEGKNGETAQRGKVLKNQGILSLLISKADLGEWKVLSQSDMQEAMGGGNYKGRGELIAQLQGAAASFPSISAGIALVIGNSAQQIQRFKGEQRELVRMLDNLTKENLAVQCLKSRRGIATLTAAKMIAEIIDIRRFAREDSLACYSGLGMREHTTGTTTMMVPTRLFNHRLKDAFMTAARNVVLYDCDSHLAGYYRNLVKAGMQPLEATKRVARALVRVIFRELSALNKSKANDLKQERRKEGEGDMANGVTHGDQGRKSNISPSSQRVDKSKSIKKVKNSKAQVREQTGGEKYEKRGCRHAPVNGACLQEVYKERHDSTPLSRPVREVQDGPPRPRAILYNQDRV

SEQ ID NO: 81101 - protein, 328 aa, unidentified
MFYLGVDVSKAKLDCCLLNQDTPEKRKSKVVANSATGVGDLLCWLGKHGAQADNTHVLLEATGVYHEQVATVLHDHGICVSILNPAQVRDFGKGLGLRTKTDVADSGLLARFGLLQQPAAWQPPPAHVKQLRALLRRCHALSEDLQREHNRLEKARATETPERIHRSLQDCIAFLEGQLAQLRQDIDHHIDQHPDLKRDLALLQSIPAVGPRVGSHLLCVMHSSSFRTAEQLAAYLGLVPVERQSGTSVRGRAHLSKAGSARMRALLYMSAVVGIRHNRHVKALYERLLSKGKSKMAALGAAMRKIVHLCFGVLKNQTPYRENFALGS

SEQ ID NO: 81102 - protein, 453 aa, unidentified
MGKSNKKAIKIGFHEGLPQIRANAGGMDIGASEVWVDVGGKDPEPVRRFETFTAELQEMGDWLKRCGIETVAMESTGVYWIPICQVLESKGIEVVLVNARYAKNVSGRKTDMLDCQWLRILHSYGLLEASFRPARDIGVLRAYMRHRQMLIEYAAAHVQHMQKAMTQMNLQLQHVLSDITGSTGMRIIRAIVDGERDRNRLAAMRDVRTKANETTIAKALEGDYRAEHLFALKQSLELFDSYQKQIEACHQQIADHLRSLESKADPTAGLKPARTTKKKRRNQPDFNIREEAFRISGVDLTEIDSIHESAALGLLAEIGVDLSPWKTEKHFASWLTLCPNNKISGGKVLHRSTRKSASRARDILRLCAQSLLVSRSALGAYCRRMCARLGKPKGIIAAAHKLALLVYRMLKFGRRYVDIGQEQYEEKYKERALKQLARKAQHFGFQLVPSSQQ

SEQ ID NO: 81103 - protein, 368 aa, unidentified
MNKFSKYVGLDVHQDTIAVAVADTGGDVRYVGEIENTPEAVRKLVTRLKRDGSRLSFCYEAGPAGYVLYRQLRDLNQDCEVVAPSLIPRKPGERIKTDRRDGLNLARLHRAGELTAVWVPGEAQEALRDLTRAREDMKHLQRQAKQRLLSFLSRHGYRYGGKSRWTQAHWRWLEGIKFAYPVQQVVLQEYIDTVKACSQRVASLEQEIERALQDSPVWPVIETLMALRGVSLITAVTVVAELGDLRRFTDAPQLMAYLGLVPSEHSSGKRERRGGITKAGNSHVRRVLVEAAWTYRHPARKTATLQRRAERTTPEIQEIAWEAQKRLCHRYRHLSARGKLPVQVCTAIARELAGFIWAIGQQARLAPT

SEQ ID NO: 81104 - protein, 344 aa, unidentified
MEQVYYAGLDIHKKIIAFCIKQADGTIVAEGKIDASRKALKQWAESTPGPWIGAMEATIFTGWVYDFLKPYARQLQVGNPLMMKAITAAKKKNDKLDARTIADLVRCNLLPCCHMASEEMRDLRRVLRYRNLLVRQAVRMKNRMATLLMETGQEYNKKKLHGAKYFRGLLEKIQDVPESFKEILQMSRGALELFESCQKRLLKELVNNEVLRERVQRLMSIQGVGEVTALSWALEIGDVQRFTSIRKASSYCGLCSSQVESGGKITRMPLSKQRNKHLQSVLVEAAKLAPLYNQELAAVYNKEQQRGNNHNQATITVARKLVAFLLAVDKSGKSFVKKAEQQAA

SEQ ID NO: 81105 - protein, 438 aa, unidentified
MSNKVIFNLDELFISVGIDVGADFSWMSIALPNQQFVGKPYKILHNSIDSLTTAVSKIKEAEELYSLESRIFLESTGIYHYPLFCYLRDKGFNCSVINPIITKNSTNINIRKVHNDRFDSKKAALVGLKPDLKVSLMPSDLALNCRNLCREYYDLMDNRSAYVNKLQGELRMVFPQYLGIFSKVTINTSLTLLETYTSPSAFLKADKQEIIDIIKSTARFGLTYAQNKYNAIIQAATDANQFGYIIDSNIKRIRLYISFIRKYDEEINNILESLHELVDANEDADFVKQIHLIETFKGAGFLSAVSIMGEIGDFSAFSKPKQLFAYFGLDPAVKQSGKFEGTKVQISKRGSAIARRVIHTLTLQSISISRNGEAKNPVLREYYLKKCDSKPKLVAMGAVSHKVCNMIFAILRDNKPFKIIAPQEHIKQYNAAKCDIAA

SEQ ID NO: 81106 - protein, 323 aa, unidentified
MNGVTDIQMGGTVVGIDVAKAELVIYADREKELFTAVNAAADLRQVGKRLLKLEPRLVVFEASGGYEALAARIFTALGLPVAVVNPKRIRQFVRGLGIMAKTDGIDARMIAYYARVANIQPIPPPTPELQHMQALSSRRAQLMEMRIAEQNRLETAHSSIAKDIHKHVSSLNREIDKIEKRLAALIAESDELKKLSDTLCSVPGVGPVLSSTLITELPELGRLSNREIASLVGVAPFPDDSGPRTGKRRIKGGRNSVRRVLYMATVCASQHNPVIRSYYQSLCSRGKLNKVALIAAARKLLITLNAIVKNNSSWHHEYAQSHA

SEQ ID NO: 81107 - protein, 372 aa, unidentified
MPDVISLAPADVRMFVSLDVHKLSIVAATLPPAGGQPKVERIETTEKAIRRFIKRLGGGEGLAVCYEAGAGGFALWRLLSGMGVACDVVAPSLIPVRAGDRVKTDRRDAKKLVSLYRAGLLRFVQPPTPETEGLRDLLRCRDDIRCARTAARHRVGKQLLRHGHVFREGKKSWTATHQAWVRRQRLADRLAHEALVQMLIHLDGLDRQLAALDAKLEQIAEDERWGWQVEKLRAFRGIGTLTALGLIAEIGDFARFGHPRELASWLGITPSEYSSGEQQHRGHITRAGNHHARRLLIEAAWHYRHAPRRPKSGPQPSDRAWQAQIRLFHRHRHLTAQGKRSTVVTVAVARELAGFVWAELTDQPPREEQLAA

SEQ ID NO: 81108 - protein, 325 aa, unidentified
MTYVGIDISKSSFVAAFPQEKGYNTETFANDAKGIRKFIGKLSADTHHCVMEATGNYGLLLLYLLDKAGITASLVNPKKIKNYSRMIMSVTKTDDMDARLIAEFGEKMTPAPYKLPSETLMLLKQKKTVIRQLQKQLTATRNLQSSLEPLPVKDKKCLTSLKQTIAFTEKQIRHLEEELVQTAESVFEKQLKALTSIKGIGVTLATALIIATGGFSSFDNAKQLSRYIGICPTIEQSGSSINIRGHINRNGDANLRSMLYIAAWSASQHNKACKECYQRLRQRGKSGKLAMIAVANKLVRQAFAVATSNTSYIDGFVSTKPDTAV

SEQ ID NO: 81109 - protein, 432 aa, unidentified
MTQSAFAAYVGLDWEHEKHAVCLLPAAGGLAQHGEVKQTPEAIAAWVAELRERFGGRPVAVCLEQSRGALIYALMQYDFLVLFPINPKQLSDYRQALYPSGAKSDPTDAELLACFLRDHTEKLRAWRPDDEITRGLRLMTEQRRKWVQDRVALTNELQQRLKESYVLALEFCSADLWSGPFLALLEKFPSQRELQRASPKQLENWLPRRRRAAGDPSAEEILAEQITAIRKAVPMTTDSAVLGHATLVVANLVAMIRTLNQSIAECEKKIDELFAQHPERELFASFPGAGKALAPRLAAAYGTNRDKFEAAQDMQQLSGIAPVTKASGKTKVVHMRWACPKFLRQTFHEFARCSINYSPWAKAYVTMRMAHGRHYHETVRSLAFKWQRILFQCWKTRQPYDEQRYLKRLRASGSKIIQFLPPDPAPDLAPTP

SEQ ID NO: 81110 - protein, 375 aa, unidentified
MQNKVRFLGLDVHADTIAVAIAEPDGEVRSLGTIANRAESIRKMVKKLGSIEHLRACYEAGPTGYVLYWQLAELGVNCEVIAPTLVPMKAGDRVKTDRRDAERLARSHRSGDLTAVWVPDAGSEALRDLVRAREAAKQDQLRARHRLSKFLLRSGQRPAQGMKAWTQHYMIWVKQIRFSQVAQESTRLDYLTEVEHMGERVARLEKAIEEAVKLASPEIQEVVKDLQALRGIAQISAVTIAAELGNISRFEGARQLMGYSGTVPSESSSGKRRQRGSITKTGNAHLRRIAVEAAWCYRLRPGIGPVLRKRQDGVPEEIKEIAWKAQHRLHRRYCKLAAAGKDHRKIITALGRELLGFVWAIGTKAEAAVKLQRAA

SEQ ID NO: 81111 - protein, 386 aa, unidentified
MPQLNELSRSLVVLEQDATLIAVIEMGQSNWLVAGIVPGVERSPLKKLAVDESAMLKLLNRWREEAEKAGHRIERIAIAFEAGRDGFWLARWLRARGIEAHVIHASSVAVSREHRRAKTDRLDTELLKRAFLGWLRGERDHCKMVAIPTLAQEDAKRPNRERESLVGEQSRIVNRMKAALARLGIRGFNPKLKKAVERLDGLRTPEGEPIPPNTLAELKHDMERRRLVRSQIRDIEGTRLERLKQTPGDGPHVTVRLLARVIGVGVETADMLVQEVLSRNLRDRRAVARYGGLTGSPDESGKKRREKGLARSGNARVRRGMIQLAWRFLMFQKDSALAHWFYARTKNAPQTRKTMIVALARKLLIALWRLAREGAIPEGIVLRPAL

SEQ ID NO: 81112 - protein, 347 aa, unidentified
MTLYIGVDFHPHQQRVSFCDTTDGEVHQASLAHNADQVRRFYKQFSAAVVGIEASSSALWFESMMFDLGHELKVGNPSLIRARARSRHKSDRRDAELILDLLVKDEFPELWRRSMESQSVLEQLRFRHHLVKQRTQVCNRLQALAHAAGLPKRPIQTKRARAALEEATLSDTQSFQREQLFEMLNDLSQRIKQIESWFEQKAATEQKVQLLMTHKGVGLLNALAVVHTLGDVSRFSSSKQAVAFTGLDPLERSSAGKVRFGSISKAGSSVLRHLLGQAIHSAVRYDSELKAFYKRLASRRTKSVAKVVATRKLLVRLFIMLRDEIDYREFKRRGSAVGMPAVSQGLR

SEQ ID NO: 81113 - protein, 461 aa, unidentified
MLAIGCSFFQNFIAMRKTNPKKQSVVKMPLVHPDAAGIDVGDTIHAVAVPEGRDDERVRSFGTMTCDLEEIIKWLRQCRVDTVAMESTGVYWKPLFNMLCKEGFEVYLVNSKHAKNVSGRKNDEDDACWIQKLHSCGLLKSSYLPDSEQESLRTLVRHRKTLISDRNRFILRMQKAMEMMNIKLHTVIRDITGKTGTAIVEAIIKGERNPNQFLQYVDKNIKADHETIVKSLQGNWRPEQLYLLEDCYQGYLYYGDRIAACDQAIERQLHAYQKQVFPEVVVDKSARSKKQATKNTPKFNTCSYLRSILGVDVTSIFGLSEISALEILAETGTDMSKWETSKHFVSWLNLCPNNKISGGKLISSLVMKKKPNIASQAFRNAANGVQRSDIWLGDYFRRMKSKGGNAYAMIATANKIATVYYKMVSERIEFNPPELTRYREKYKLAKIAYLERKLMDLKAVY

SEQ ID NO: 81114 - protein, 378 aa, unidentified
MKRVRFVGLDVHAETIAVAVAETDGEVRSLGVIPNRVESIRKLVKKLGPAEQLRVCYEAGPTGYVLYWQLTALGAPCEVVAPTLVPVKSGERVKTDRRDALKLARSYRSGDLTPVWVPDAAHEALRDLVRAREAAKKDQLRARNRLSKFLLRHGKRPPAGVKSSWTGNYLLWVKQEVHFEQFAQEFTLLDYLHEVEHAAGRVERLDRALEEAVKSAPPQMRAVIEGLQALRGVAQVSAVTIVAELGQISRFARPRQLMGYSGAVSSEDSSGERVRRGAITKTGNAHLRRIVMEAAWSYRHRPAMSRALRQRQEVVCEEVKEIAWKAQHRLHARYRKLTERGKNKGQVITAIGRELLGFIWAIGVKVEGAQKEPLQRAA

SEQ ID NO: 81115 - protein, 404 aa, unidentified
MKGPIVSIDVSKGKSDYQAFKDLNVKYTGSRSIKHNKEGFDEIVNLVREMEKKLETEVCVVYEATGVYHRVLKKVLEDNNIKQFIINPLLSAKTRKNDSLRSPKTDKLDPKSIAKTYYSHSLHNSHKQETIYHELRELSRYYEDILVHIRKDKVAFRAQLDIVFPGYDTLYDDLYGPVALAVIEKYPHPEMLQKKKINTVSKVIQSKTCHRQAMSDTMADKAIEYSKTIYSECDKDDIEVLILQRFIKKLNEDMAEAERTIGEMIKLAQELPDFNIIKSIPGIGDNLAARIIAELGDMTRFKKKNELVAFAGLDPRISESGQNDGDHMHITKKGNKRLRCLLYLAVTCSIRLKRDDNSIKDFYIKKKQQSNPMCSKAAKTACASKLVRIIYSMCKTGELYQYNK

SEQ ID NO: 81116 - protein, 317 aa, unidentified
MKKYIGIDVSKRDFHVCFNEHRDITKFDNSQKGIEDFLNYLLQHRFSKRNTFIGLESTGSYHLQLSFLATKAGYTVQVMNPLITRRQSKSAVRSVKTDAHDAALIRLCLINGAGHPFRDTSSSLVLKTLVRQRARFSMLRLQAKLRQEEVSLRESYLENRISDVHGELVIFLDEKILFLDRKIKTFNPQLQKLLQSIPGVGPQTASTCVAEIGDIMRFPHSKALTAYIGLDSRVYESGTSIHGKGYISKRGSKILRTRFYNAASVAVLHENIFREYFEKKRSEGKPYRVALCAVMHKMVHVVFAVWKRGTPFTNHIS

SEQ ID NO: 81117 - protein, 355 aa, unidentified
MNSEKYIGLDVHQATISVAVLDSTGKLVMESILETKAATILEFFAGLRGTLSVTFEEGTWAAWLHDLLKPHVAKLVVCNPRKNALLKDGNKSDRIDAHKLAELLYLNKLSSVYHGETGVRMLRELARSYLTIVKDLSRVMNRLKAVYRSWAIPCAGRDVYYTRHRAEWLGKIKEAGVRRRAERLYQQLDMLQYLRQQARRELLAESRKHAITSKLRQIPSLGPIRSALAVALIQTPHRFRTKRQLWAYSGLALETRTSAEYCYVKGGLRRSKKQISIRGLNKDHNHDLKGLFKGAATRASVLPGPFQDFYQRSLAKGIKPTMARLTLARKIAAITLTLWKKGENFDADKLKSQAA

SEQ ID NO: 81118 - protein, 355 aa, unidentified
MDAIKYIGMDVHVATSSIAVLDANGKLMMEVTIATQAGALLDFIRGLSGTLHVTFEEGTVAHWLYTVLEPHVAKVVVCDPRQNPRRLGEKKSDRLDARKLAELLRLGSLKPVYHGNALGPALKELVRSYLTLVSDAARVMNRLKALYRARGIRCTGTRVYSPRFRDQWLEQLHEPGVRGRAERLYKQLDLLLPLRQEARAAMLAESRKHPAHKILCSIPSLGPVRVAVLIALMQTPYRFRGKRQLWTYAGLALVTRTSADYRMVDGQVTRVRKPALVLGLNANHNHTLKGIFKDAAASALAHPGPFKDFYTTRVAQGMKPELARLTLARKIAAIALTLWKKGEGFNVEHVKAQAA

SEQ ID NO: 81119 - protein, 351 aa, unidentified
MMIIGVDYHPGFQQIAFLFKETGECGERRLNHSDGEAENFYRDLKARGISVRVGMEATGFSRWFERLLAELGFEVWIGDAAEIKTRRAKKQKTDRLDAELLLKLLLEDRFPRIWVPSPENRDVRQLLWHRHRLVQMRTRIMNQLQALAMNENRYWKGKLWSERGRAELEKLPLAPWTSRRRQELLELLDRMNPTIEELTAAATLEAKKRPEALRLMTHPGVGPLTALAFVLIIGTPERFGCAKQICNYVGLIPSEDSSGGRQRLGHISKQGSSLLRFLLVEAAQAAVRCNADWRRRYRHLAMRRQRNIAKVAMGRRMGARLYWMWRNGREYSPSLEFGSHAGKLGTGNGGQ

SEQ ID NO: 81120 - protein, 481 aa, unidentified
MRTIGIDLGVKGEHKAIITDEGGRFVSPVIKFGTEPAALERLLAEAQRGNADGQVQAVMEPTGMAWFPVAVFLIRRAATVFLVNSQQVADLRRYYRKHAKSDRIDARVLAKLPLHSVEMLHHLELPTTQALACQRGCKQLYRLMKQITATKNRLIALDRFAWPGLEEHVFAEHFEPAARWFRAHWYNDNECFAPQQVCQAGPERIRQEWLASQANAADRGDWVVALVTLAQQTLALYGEDGMYLDYDQLQDEAVREQTYLEFVEQQHHHLQIHGVRSLYRQIHPSRNLETLKGVGQDGAAVYASFIGNPERFGSLREHRGWSGMVPNSKQSSMSQTLGLKITQAGPRLIKKFAYIDAETARQRDPQLAALYYDQVVNKGKHHRQAVCACATHLLDRILVVLREDRPYELRDVDGTPVTAERALEIIRQRYTVPDEVRQRNNKRTRRQRAEQQAEKKQTRESRSTHGQPKSSHKQAGVRGKL

SEQ ID NO: 81121 - protein, 324 aa, unidentified
MIDGILGIDVCKNTLDVSISSYTKVRTKSFTNSPDGWRHLLDWLIAQKIQRVHACLESTGRYSLGIACALYEADHVVSIINPAQIRDFVRTKLGRNKTDGVDASHIREYCELFKPSPWAPPSKAHRRLGELQTIRSGIIAGLTEWKNRKNSGIVDAEAQALADATISHFTSQLGAVDKAIALTIDNDCDLQSKRDLLLSISGVGETLAGVVLAELPGPDVLRSSAEVVAYAGLNPRQHQSGTSVDRATRISKIGNAVLRAALYMPALSAMRYNSAIVALVTRLKSRGRLKPKQIVVAAMRKLLVLCFGVLKTGRPFDAAIAMGG

SEQ ID NO: 81122 - protein, 435 aa, unidentified
METKSVIGIDPDSLGFVCSMLKLNKMNFVHKKEYSTSSEGITNFIKWTKKQGECIIGIEGSNGQSRPIEQALRKLGITFYSFNAKDVANFRKTVLGENKNNEKDAEAVARYALALKSQGMLSNYQRVHMPDDQLQPLMRSYEQKSKMITKEINSLWKLIKIISTDLYLTLGGNNPDVDIKNNILSNHSILSLLSQKPDIFEWKKLSEEDFISAMGNYKYKGYKNHIHAFQKIAKTFQPISYAMILMLENSAQQILFLRKQTNEIVKLLKKITEKNELVKSLEEYKGISTLTASNLIAEIIDIRRFAKDDNLASYAGLTKKEYSTGKSEAMRYNANFNRRLKDALMTAARNFVLYNPDSHLTGYYKNLLKKGMSKTEAQKRVARALVRVIFKKLYSLVEKTDEREIIKKRSDMANGQSQRNCLNSSNISPLSINQT

SEQ ID NO: 81123 - protein, 410 aa, unidentified
MTDTTIAQAEPVLVAIDIAKARHEVLIAVPGRKRRRRLTMLNQLEDFTRLIATLSDYNRPVRAAFEATGNYHRALAYQLGAAGFEVKLVSSVALARTREALNNSWDKNDPKDAQVILHMMQIGNEQFYHDPLLCGTNDLQELSKTHDIVSRSKTELWHRILTHYLPLYFPEADRFHRSSRSDWFFAFLERYPSPHFISAMDQEAFISDAWEVVGRKVSKERLLADIYQTAKTSVGLPITPDSDAARMFRLVLGEGRSLIAQRNEIESRAVELLKDNIDYQLLTSIPGIGPVNALTILAEAGDLRRFQHHRQFLKFCGMDLATIQSGTFRGQTKLSKYGNARLRRTLWMAGQVAINQRTNSFRDKFERYVSKNRHNTHLRRKAYTAIAAKMARTVLGIIKRGEPYRPFFEG

SEQ ID NO: 81124 - protein, 416 aa, unidentified
MNDVAWFVGIDWGSESHAVCLVDATGRRREVRRIAHTAEAVETCLAWILECAEVPPTRIAVAIETPRGALIDACLVCGFRVFAVNPKQLDRFRDRHTVAGAKDDRRDAWVLADSLRTDAAAFQPVHQEDPIVVQLRELSRAEDDLDGEFRRLANQLRSQLHRLVPEILALCPGADEPWLWALLTVAPSPMEQRRLTRARVDHLLRAHRIRRWRADDVLARLQAPHFPHAPGVAEAVEAQIRLILPRLEVVHAQRLVCGRQLEQLLQQLRDRPRDADERGEHRDIAILESLPGVGRKVAVTMLAEAAGPLAHRDYDRLRAHMGTAPTTSASGKRRLVSMRRACNRKLRWAAYHWGRASVQHDPASAAYYRALRARGHRHGRALRSVVDRWLRILMAMLRHNTLYDAGRFAVAAENGA

SEQ ID NO: 81125 - protein, 328 aa, unidentified
MNNNNEVNDVLGIDISKAKFDVALIQGNAKIKSKVFANNPEGFAELQEWLNTQGVTNLHGCMEATSTYGNALARFLVQAGYKVSIVNPSPPKAFGKSELSRTKTDRADAKVIARFCVALKPALWTPPPLEIEQLQALVHRLDSLTSMQQQEQNRLATADPILVEAINAHIDFLKEQIEMTKQLIRQHFDQHPHLKSQRDLLTSIPGIAELTATVLLAEIRDISAFDTADQLAAFAGLTPREFSSGSSVHGKPRLSKIGNSRLRKALFMPAIVARRYNSPIASFCARLTAKGKSKMSVIGAVMHKLLRQVFGVLKSQRSFVPNFVQIPS

SEQ ID NO: 81126 - protein, 428 aa, unidentified
MRQNDFKTSETIQPQEASPVKHHLSGLGIDIAKRVFHVVGMDERGQIVLRKRLSRPDLMPFIATLPPVLSGMEACGGAHDWARRFRAHGHEVKLMAPQFVTPSVKSNKNDMRDAEGIGEAVTRPPRRFVPTKDVDQPDIQALHRVRERLIGARTALVNEVHGLMNAYGIVVPKGVSKFRQTVVGTLEAAKATLTPLSPEMFGKLVDEFAALEKQLAYDQEKLEALATTHPECQRLMTIPGIGPFTATARVAAVSDASACKNGRQCAAWLGLVPRQHATGGKERLLGISKRGDSSLRTLLVHGARTTIRWVGRQTDRRSQWMRPLVERRGTNRTAVAVANKHARMVWALLTSHQDDQLATGEGQPRRASGASVRMEYGNVTKEYMSNFFMAIVLDKYMEESCRTMRGGFELMTREVRPASFNPAQVQGP

SEQ ID NO: 81127 - protein, 317 aa, unidentified
MLETNTNAAGIDTSKLKLDIAVHGRTGCWQVANALPGWRSLVVNLIKAGVVRVGIEATGGYERGVVEHLRAAGFIVLVLQPSQVKAYARMHLRRAKNDALDAALIAACAATIDAPRIAPDPRLVKLAQYLTFLEQTEEDIARFKTRLEHVSEPGLRRIVTNDIVRLKARRSAQIRLIERQLRAHPDLGRRLDLVLSVPGIGKRTALALIIRMPELGQVSREEAAALAGLAPFDDDSGKHKGQRHIAGGRARLRRSLYAAALPAAFRWNKALVQLYARLLARGKAHNAILIACARKLLVYANTVVQRGTPWIESAVRV

SEQ ID NO: 81128 - protein, 431 aa, unidentified
MNYNQNKKIAQITSQTLIIGVDIAKFKHVARAQDFRGIEFGAPCYFENSKNGFQDFIRWISFLMQEQDMNKVIVGMEPTGHYWLNLAHILKENDIKFVAVNPLHVKKSKELDDNSPTKNDVKDAKVIAQLVKDGRYAEPTIPQGVYAELRVAKKIRDLLTEDLQTVQGQVHNWIDRYFPEFLTVFKKWEGKAALQFLKLYALPHELVKFSDQELLIHLRKAVKRSVGLSKIQELKQAASKSIGLRQGASMAKLELRTLIDKYELIQIKFEGLDSKIDSLIDRIPGVQQMLAIKGVGRDTVAGFFAEVGDLSEYSHPRQLIKLAGLSLKENTSGKHKGKTTITKRGRKKLRALLFRVCMILVAKNSAFKALHAYYTQRPDNPLKKMQSLIALCNKLIRILFSIGKKQFEFSEERMLKDIPHMQNVQIVKEAA

SEQ ID NO: 81129 - protein, 313 aa, unidentified
MAEIAPTVGVDVSKQRLDVALYPAEARFSVSNDSAGWRELCRRLRPIGARAIGIEPSGGYERGVIAALLDAGLPVRSVNPWKLRQFAKAAGWLAKNDRLDAQAIACFVATLPTRAVQHDPTRQHLAELVTARRQIVDLRQELSNQLEHLSDPELRRMQERRIRQLDADLVRLDRRIAEAIAAIPALAGRHDLLRSMPGVGPVLAATLLALLPELGSITNRAIGALVGVVPYDFDSGRMKGLRCIFGGRAAVRRVLFMAAQAAAMCNPVLKAFKQRLLAAGKRPKVAIVAVMRKLLTTLNAMLRDRQEWRAADA

SEQ ID NO: 81130 - protein, 454 aa, unidentified
MRHGKKKQKPGQVQEDMPVINSNAAGIDVGSAEIWVSIPPDRDEEPIRRYATFTADLYALADWLKQRGIESVAMESTGVYWIPVFEILERKGLHVVLVNAKYAKNVAGRKSDWLDCQWLRLLHTFGLLPSSFRPAAAIATLRCYLRHRQMLIEYASAHIQHMQKALTQMNLQLANVVADITGDTGMRIIRAILGGERDPQRLAQMRDYRTKNDEATIAKALQGNYEPQHVFALKQAVELWDFYQQQRTTCDQEIAQYLHNLDSAVDVDSHPIPPPRAPKKRRNSPGFNCRLETYRILGVDLTQIDGISESSALTILSEIGTDWSRWKTEKHFASWLTLCPNNKISGGRILQRRTRKSSNRVHDVLCVCAQTLFNSRSALGAFARRMRSRLGPQKAIVAIAHRLALWIYRLLRFGKTYVDIGQDAYEQQYQQRKLKTLTRQAKHFGFQLVALAES

SEQ ID NO: 81131 - protein, 520 aa, unidentified
MATPRTRRRPSRRSSVHSVGKPRGVLHPRVQFVGPEHFGIVCFDCAKTRSKFLLADFYGRVLLPPTWVAHNRPDLDAAVAHIRQAFAAHQLLDGLVAIERTGRYHRLVQRAFAAAGFETRILHPFVTKQYRQPVDPGYKTDDTDLAAIHRATVTGCALLEATRDEAWTTLQLVIRHRRDLVRKGAALNCQIRDHLEAARPGFAACFDKLWDSPIPWHLLRHFPTTEQLRAAGVTTLCQSLRQAGIRFQQRTVQAVLDWAAQAAPGDVAASQHQRIALALFDDRHRKTQEIQALERDSAARLVQTPYLLLLSFPGLNVVSAADFAGEMGPIEHYANAKSITGRAGLRPSRYQSDQVDHAKGPLVRNCNRALRAAILGIADNLVVCNHHFRALATQWAAQGKDPRHTRVKVALRFCRIAFQMVAGRQVFRHPCLQGRHYILDKLNAFHREHDTGVAEALRDLQAAIGQVPLREHTAEARPLQEELQRIQEGRRRGPQLLGDILPIVLARLGVGAVQSTESGE

SEQ ID NO: 81132 - protein, 412 aa, unidentified
METTIAGIDVHKQVLMVVILRNQGGQFSERIERRRFGAVRSELKLLRAWLLQEGVEAAVMESTAQYWKPVWLELEGSLRLELAQAYSNRARRGRKCDFKDAERLARRFWADELVLSYVPVPEQRILRTMTRAKVQLARDRNRLQNQIESLLEEMRIKLSSVLSDLLGTSGQRILWAIAKGETDPAQLAALASHRVRCGQAQLMDALDAIPAAEQRQLLKLHLRRLELLDAQIEELHQMTALAMKSHEEAVVRLAEVPGFGPDSAQQVIAEVGPDAHSFNSAAQFTSWAGTCPGKNESAEQNHSSRSAKGNKYLRRVLTEVAQAAVKVKDGHYQNVFRRLLPRLGYKQALWAVVHRLSRLVWKILHDRVHYIEQGTRRDPKAAAKRAKTLSNALRKLGYSVFMQPLQTEVVIA

SEQ ID NO: 81133 - protein, 355 aa, unidentified
MNKVNSNFNGQTIFVGMDIHKSSWNLGIHLNDMFVKNVHQKPNPHIMASYLKQHYPGAHYKAVYEAGKFGFWIQRQLTALGIECLVVNPADIPKSQKDTLQKTDPRDARNLSMRLESGVLHSIFIPGEQQEADRLFFRHRKRIWKDLCRCKNRIKGMLAFSGIDIPEQYDNASWSHNFINWLKAIDCKQHSRRRALDYMIMQVEYLRKELLSISNELRKMMREKRYNTNYYLLRTIPGIGPLTAASILVEIGDVKRFETFYHLNSFVGLLPMEHSSGQTENKLRLTVRKHRQLRSDLVESAWTARRTDPAMALYFQEQIKRKDSKIVIVKIARKLLNRIRFVLLNQQPYEMGIVK

SEQ ID NO: 81134 - protein, 352 aa, unidentified
MFYSGIDLHKNMSVITTIDEHGIIIKQEKLANDEYLILNYFFSIGKPHRAVVESTSNWYWLSDLLNNHHIEMILAHAKYLKAISYAKVKTDKIDSLTLAQLLRMNMIPVAHQISPSQRGLRDLMRTRLRFVYKKTSCLNSIHRLLDKYNLSIPDLHDMSTLDTLANFNHDPELSFQLESLKEQIRLLDKQINNLEKLLHPKLIPNPDIQRLLWIPGIGKILAFTIYLEIDGIERFPDVNKFYSYCRLVPGADNSNKKLKHKSGNKDGNKYLKMAFSEASAKAVQYYKEIKQFHQGKARKKHICVAWTLVSKEIAKICYSVLTEKKDFDNKFKNKQLSRIKSMQWPRLAGPDA

SEQ ID NO: 81135 - protein, 390 aa, unidentified
MDEAGKVLARERLPEGAAGMAQLHGLAGGFLGEDADAAEVIVGIETGRGPWVAALAAAGYLVLAVNPLQAARFRDRHGVSGAKSDSGDAHALADMVRTGSHQLRPAAGDSPEAEGIKVLARTRKTMTRERTREVQRLRHQLREYFPAALEAFAGLDAPEALELLGKAPGPARAARLTRAQVPAALKRAGRRSVTERATAILAALRSGQLARPPAPAAAYAAAVRALTAVITALNEQVKVLEQQVRDHFGRHPDAEIILSQPGTGPVPGARVLAESGDDPRRYADGKARRDYAATSPVTRAPGKRKVVAARFVRNDRLVDALHAQAFSALTASPGARAFCDQQRANGHGHNDALRRLANRLVGILHGCLKTRTLYDEDTAWGHRQQTQQAA

SEQ ID NO: 81136 - protein, 407 aa, unidentified
MISIGIDIAKEKFTVCALEQGSKIIWKPFDVHLKKTKVEEFLKKLDSLNEEVKIIMEATGKYHLPILYELKDKGYFVTVVNPLKMKQFCRVLNFRKAKNDNIDAIQIAEYGLMYWKELQEYKIDSENFRVLKELNRSYQHYMDLRINQMNFIDQTISQTFPGIKKLIPHASGDFSKDKLLDFLERWWHKNLVLEKTEEKFIEDFKNWAKEKRYHPNADKAKSIYKLAEESISTQPSNSSYIKTSIQEGIELIKHINQILHTILSQMIEIAEPLEEYQEAKKFSGISDKLAVQITAEFGDLSKFKNKKSLISFVGIDSPPYESGNFKADQRKITKRGNAILRKVGYQAMKCMMSAKDPENVIYLYMVKKEKDGKAKKVCKFAGLNKFLRIYYAKVMASKQEKMLLKVA

SEQ ID NO: 81137 - protein, 375 aa, unidentified
MSIAVKYVGLDVSKSKIAVACAEEGRQEARYWGAIEHSKAAVTKLVQQLSREDVKLNICYEAGPTGYVLYRWLLELGVFCNVVAPSLIPKKPGDRVKTDKRDALRLAQLYRAGELTAVYVPTPEDEALRDLVRAREDAKEDLCRHMQRLGKLLLRLQLSDPKGSKSGSSKYEEWLDTLRFANDCQRLAFQEYRQSIFETKERIKRYEQEMEQQAVTSTQAPLIQAFQALRGVTLVTAATLSTEVASISRFGYSTSFMSYCGLVPSEYSSGDSRWQGRITKAGNAHLRRVLVEAAWSYRYSPAIRRKMAERMTGLPAEIQAVAWTAQNRLHRKYKSMMYKGKHKGCIVTAIARELAGFVWAIAKELEKLQQQKIAG

SEQ ID NO: 81138 - protein, 345 aa, unidentified
MTYYAGLDVSLEETAICVVDGNGRIVKEMRALSEPGPVALALRSTGLPLERVGLEACSLTAWLHDGLRDAGLPTICIETRQANAAMKTMPNKTDRNDARALAQIMRTGWFRQVHVKSRQCRLWRSLLVGRRTVLNEMRTIENVVRAVLREGGVKLGTPSRAGFADRVRERAGEDDGMMAIIEPMLVILATMLAELDRLTRQVLAIVRDEAVCRRLMSVPGVGPITALTFRATVDRPDRFKHSRDVGAHLGLTPARYQSGETDIQGKVSRCGDELARTALYEAAHTLLVRSKTWSALRAWGMTVAKARGMARARVAVARKLAVILHRMWSDGTTFRFGRDPEAVAA

SEQ ID NO: 81139 - protein, 414 aa, unidentified
MKVFCGIDWSERHHDVALVDQDGTLIAKRRIGESVEGFAELLTLLAEAGDSPEEPIPVAIETSRGLLVAALRATGRPIYAINPMAVARYRERHCVSRKKSDHVDAMTLANILRTDAHAHRRLPADSELAQAITVLARAAQDAIWRRTKAIQELRALLREFYPGFLAAFADGTVTNLASPQARAILAIAPTPAAGARLSQARIATALRRAGRQRGITTLAAHLHHTLRIPQLRQPALVENAMGCQVNALLATLATECANADQLTAAATEAFTQHPDHQIITSFPGLADLTGARVLAEIGDDPTRFTDARALKAYAGSAPITRASGRSLSITRRRIKNDRLNAVGFLWAFATLPRPGPPKDHYDRRRAHGDRHAAALRHLFNRMLGQLYHCLHTRQTYDPIKAFGQPTTTTNQATT

SEQ ID NO: 81140 - protein, 349 aa, unidentified
MNHYAGLDVSLEETTICVVDETGRIIREVRAASEPQALMAALQEVGVPLARIGLEACSLTAWLHDELHLAGLPAICIETRQANAAMKTMPNKTDRNDARALAQIMRTGWYRQVHVKSRQCRLWRSLLVARRTVLNEMRSIENVVRAVLREAGLKLGTPSRAAFAARVRDLAERDPLVMALVEPLLAILATMLDQLAHLTKQVLGITREEAVCRRLMSVPGVGPITALTFRATIDRPDRFRHSRDVGAHLGLTPSRYQSGETDLQGKISRCGDELARTALYEAAHTLLVRSRKWSSLRAWGLKIAKHRGMARARVAVARKLSVILHRMWSDATEFRYGRDPSAKGAAVVA

SEQ ID NO: 81141 - protein, 342 aa, unidentified
MSTIKTIGVDLAKNVFSIHGVDAYGKCVLRKTVKRNKLLDTFAKLPPCLIGMEACSGAHHWARELLKLGHNPKIMASKFVIPYRQNEKNDANDAEAICEAVSRPKTRFVSIKSEEQQAVLCLHRIRQGLIKTRTATINQLRGLLSEFGIVMPQGRYSAQNTIGSVLEDAENGLPILARELLQDLSNKIQNLNLEVLHYDRRVSALVHEMASAKALMDIPGVGEHSASAIIATVNDAKQFGSSRQFSAWIGLVPRQYSTGGHVHLGRISKRGEKHIRTLLIHGARAVIARCKEKTDRNSIWLNQLVERRGYKRATVALAAKNARIIWALLTTGKEYKINYVNG

SEQ ID NO: 81142 - protein, 343 aa, unidentified
MKASIIGLDIAKSVFQAHGADANGKCVFKRKLGRSEISAFFAKLDPCEVVLEACGSAHYWARVISRIGHDVRLVPPDRVKSFVKKGKKNDAVDAAAICMAATHPDTMCVPIKSEEQQGVLSLHSTRALLVKQQTMLSNALRALASEFGLIAPLGTRHLPELMAKIETSADLPATMKQSAMLLFEHYEKVAQSIDTLEVQIRARAKSDEDARRLMTIPGVGPITASLIVASVADIGSFASARHFAAWLGLVPRQHSTGGKTRLGRITKTGNRQIRTLLVLGATAMLHRAHKWDSAAGQWLCELMARRPRRLATVALANKMARIIWALLSRKEIYRPAGVSVSAG

SEQ ID NO: 81143 - protein, 369 aa, unidentified
MTFFIGVDLHKTQFTVHVRTEEKVESLDQIKQYPTTVAGYAEFLSRIETYRATGAAVKIGVESTGNTRFFKNQVEKAGAEVTVINTLKFKVINESTKKTDKHDASTISEFLSKDMLPESYLCGKETENIRRLLKSRERLVRSTVGQKNEIHALLVSLGLSDELRSLQSKKGRQKILDTLESNNDYVLEAQSVKLMFEIIERIEESVKTIEKQISELTKDDEMVNRLMTIRGCGKITAWTIRAYTEDISRFATAKKYAAFCGLVPWVQDSNETIHHGKITKRGPQELRTCFVQLVLGIRRCKDTSEWRMMQRYEYMKKNKGSGKSIVAAARKMAEIVWAMLSDKQDFNAGRMKGVYKPMLLADEALSAIN

SEQ ID NO: 81144 - protein, 340 aa, unidentified
MEIDHVVSQCVGIDVSKKKLVATMCMFSQAEQAVYSKATEFDNNKTGFNQLVKWSRKEAMKELPLRYVLEATGVYHEHLANHLVRIGCTAVVMMPAKAREFACWEGMISKNDTIDSRVLALVGCVKRNLRPWKPTSPLYRELRTMTRFSQDAKKLRTELKNHLEALEHSHEAERSVVRHYESLVASLDRRIEKNLEDMRKKVDSDEELSKKVANIMTAPSLGFLSAVTVIAETDGFALIQNRKQLTSYAGLDVRDSQSGTVNGVSRISKRGNSRIRAILYMPAVQCRLHNKHLKKAYDRIVAKHPDKKMIAVTAMERRLLLLIYALWKSDRPYSEDYDKE

SEQ ID NO: 81145 - protein, 503 aa, unidentified
MLRPGGVSLAHHGILILDELPEFRRHVLDALRPPAQDGGVCIIRPEGMLPLPCPRAPDSICTTQTRSEPSRRLPNERSEHLLRRGDVAMLDGAQCALDLVYFNTTVRPRHDLRNRRQTGFARSATLRFSYRHSARWDEEAALRRPDYPVASGGKERAAMVGPNVFVGCDLSDKRASLCVVDARGRVIGRADLRLREPELSAWFSRQPRARVVLEVGSHSAWVSRLLRRLGHEAIVANPRQVELIARSQRKTDERDAELLARLGRADVTLLAPVQHRSEQVQLDLVTIRSRDMLVKTRAKLVSHLRGIVKPFGARIPRATPPVLPDRAEAAIEGPLQQALQPILECLRLMNEKVKLYDRMVEQRARDAYPEAERLSRTLPGIGPVTSLAYVLTIEDPTRFKKSRAVGPYLGLTPRRRQSGQRDPEGHISKAGDPLLRRLLLQCAKCVLRRCPDSDLQRWGRGLAARGRKAAANRAAVAVARKLAVLMHKLWVSGEEYRPLRAAA

SEQ ID NO: 81146 - protein, 386 aa, unidentified
MQKLNDLSRSLTALEPGGTLIAVIEMSLSSWLVAGIVPGVERQPLKKLAVDESALLKLLHRWREEAKKVGRRIERIAVAFEAGRDGFWLARWLKAHGIEAYVIHASSVAVSREHRRAKTDRLDTELLKRSFLGWLRGERDHCKMVEIPTMKDEDAKRPNREHDSLIGERSRIVNRMKAALVRLGIRGFNPKLKRATTRLDGLRTPEGEPIPPNALAELRRDMERRRLVNNQIRQIEEERLERIEQAPCDGPHVMVRLLARVMGIGIETADMLVHEVLSRNMRDRRAVARYAGLTGSPDESGRRRREKGLARSGNVRVRRGMIQLAWRFLLHQKNSALTKWFRSRTGNARGTRKPMIVALARKLLIALWRLVREGIVPDGVVLRAAQ

SEQ ID NO: 81147 - protein, 341 aa, unidentified
MEEVSTIGLDLAKHVFQAHGASASGAVLFRKKLRREQVLTFFAGQPRCRVAMEACAGAHHWARAIGELGHEVRLIPPAYVKPFVKRQKSDMADAEAICEAAQRPTMRFVAVKSEAKQAAAAIFRIRDLLVGQRTQIINALRGHLGEYGLIAPQGPSHVERLIVHVENPASGLPEAARSGLAQLVELLRHLQGEIAELDQEIAARAKADEVARRLMTVPGIGPLIATAIEALAPPAQTFRSGRDFAAWIGLTPVQRSTGGKERLGRTSRMGERTLRRLLVFAAGAVVRWAKRKGVPAGSWLGRMLARKPPMLVIVALANKNARIAWALLAKGGIYRAPAVTA

SEQ ID NO: 81148 - protein, 345 aa, unidentified
MNNNRLISIDLAKNTFQVCGLNQANKVNFNRKITRAKLTAFIQQQESTLIAMEACGSSNYWGRRFQSMGHQVKLVPAQHVKPFVKGNKNDHNDALAIAEAALRPNIKFVPIKSTQQQDLQMVHRIRQHYVKQKNAVANQLRAYLLEYGIVIPKQIHYLIKKVPELCALESNNFSSLAKELIQELYSELLELQDKITELNQQIAHQNSQNEICKQLQKLPGIGPLIASALYSAVGNGSQFTKGRQMSAWIGLTPAHFGTGGKNTNVDTTKKGDQYLRTLIIHGARTVVTWTANKTDPLSLWIQRLVAKRGKRKTYVALANKLTRAAWHVLRGESFNMEKITAKQSI

SEQ ID NO: 81149 - protein, 359 aa, unidentified
MMSMNHDQSPCRVVIGVDTHKYVHVAVALDELGTVRGDTAVPADRSGYERLLAWAGGMGKIAAFGIEGTGSYGAGLASLVRRRGHKVIEVARMDRRDRRLRGKNDLLDAHNAARVVLAGTATAIPKAADGVVEMLRQVKVAKDTAVKARTAAMITLRALIVNVAPELRESLQGLPKMALIERCAGLRPGQVDTPLAASKHALRSLARRWRELSAEVKEHEALLERLTREVAPQLVDAFGIGPDTAAEVLIVAGDNPQRIRSEAAWAKLCGVAPLPASSGTTTRHRLNRGGHRQANAALYRTVIVRMQHHEATLAYVARRTTEGRTKAEIIRCLKRFLAREIWALMRPLREGSTALSEAA

SEQ ID NO: 81150 - protein, 388 aa, unidentified
MFYLGIDIGKNFHVASLLDEHKNIIFQGFEFKNTTDDAKRLLEKLAPYSELEIGMEATGHYWLALYSFLVKNHFIVHVVNPIQTDSWRNSTRIRPHKTDKIDSLIIADFIRYGDFSDTELASEEIIELRNLSRFRFSLVSQIGDLKRQTICVLDKVFPEYESVFSDVFGKTSREILTLFRSPADFEDIGADKLQKLLERVTLKKFARKKLNELSLKAKNSFGITFGIQSLTLQLQLLIAQISFIEEQIYQLDTKIADLLKQINSPITTIPGVGVVIGATILSEIGDIKRFATPAKLVAFAGLDSKIDQSGTSQDSTGKMTKRGSPYLRTALFRAALVASNIDPVFKAFYQKKRAESKHHFTCIGAVARKLCYTVHAILSKNSPYEIFS

SEQ ID NO: 81151 - protein, 393 aa, unidentified
MEAMAAKKKGTVESAEKRVAVGIDPSKSALQVSLLTPLTHKPCRQRLSLEPQAVNKLEELLQRHEAVIAIEGSHSVGQLFLLQLQERGHDVREVHPLLSKRFREAISEDHSDQKDADGLALLASWKDDLPMVSFSQEQAIYKRLSRLRTQLVRERSRYLNQLHACLVETYGISYKPLFGDLSAKKALRFFHEYPTINDALADATDIQQRVGPSAWEQLQEAGIWSESIYLRTEVRVLASQILSLKDRVAEVEREMAKLAEAPEVAELLKLPRVGLPTALAIAGNTGDIRRFEGDVNRYVAYAGLAPALYQSGAGGTSGRRRRRYNRYLQHAFMFLAFNMVYAQPLAREYYDRKRLEGKRHWAAIRALARHPCRIVFRALTKLKPPQEVVTSLT

SEQ ID NO: 81152 - protein, 350 aa, unidentified
MDHIGIDVHKRESQICILAEGGELIEQRIRSEPERFAAGLGQRPRARILIEASTDSEWVARGLEGLGHEVIVADPNFAPMYATRTRKIKTDRRDARALADANLLGAYRPAHRLSDVQRQVRGRLGVREALVRTRTRYISLLRALLRQHGYRVPSGSAEGFVARVAALPLPGELRSLIAPLLAVMLPLNRQLAYSDGVIERLAAHDPRLPRLRTVPSIGPVTAAAFVATLDDVQRFRHAHQVEAYLGLVPREFSSGDTQRRGPITKAGPGRARWLLIQAAVSLLRRHPPEAEALCTWALRIAARRGKHVAVVALARRLAGILYALLRDDSVYRPRRAVGIPAAVGASNGRQ

SEQ ID NO: 81153 - protein, 364 aa, unidentified
MVISTIRNNDSGEGPEMKVKAIGIDLAKDVFGVHGIDARGKALVHRRVTRRQLLGLLAKLEPCLVGMEACGSAHHWAREIEQLGHSVKLMSPQFVKPYRKGNKNDPNDAEAICEAVTRPSMRFVPIKSAAQQDVQALHRVREQLLKSRTALVNQVRGLLGEHGIVAPRGIAHLRGLLIELLAEPASYGLSGLLGETLAEIAGRLRFFDERIGAYDLRIERVFADDERCQRLAKVEGVGPLVATALVSAVGNASEFKSGRELSAWLGLVPRQHSSGNRNLLLGISKRGDRYLRTLLIHGARSALCRAERRSDRRSLWASRLKLKRGFNVAAVALANKNARIIWALLTRGDNYRPASGTGPDNIAA

SEQ ID NO: 81154 - protein, 359 aa, unidentified
MIVIGIDPHMKTHTAVALDAASGRSLGAKTVNCAEAGRDALVTWARRLCAERRFAIEDCRHVSGRLERHLLARGERVVREPPKLMARSRSSARSYGKSDPIDATAVARAALREPGLPAASLAGPEQDLRLLVDYRDDLLGERARLQRRLRWSVHDLEVGLKLPPRVLDRFCWLDRLERCLLALPVSTRSRIALDQLRHCRELTGEIHALERELSALTRTLAPDLLAFPGCSFVGAAHLLGETAGASRFSGEGAFAMHVGTAPLPVSSGKTQRHRLNRSGNRRLNATIHMIALTQARMHPPAIAFMERKQSEGMSHREALRCLKRHISRALFKTMLRAERAQLAQVVEADFRAGAVAIAV

SEQ ID NO: 81155 - protein, 403 aa, unidentified
MRGFFMFYAGIDIAKNKHEASVIDADGKALFDSISFSNTKSGCEKLLALFERLGITKDDVLIGMEATGHYWLSVHAFFTELGYELKVINPIQSEAFRKMYIRQTKTDSKDSFIIAQIMRFGQFSTTNLSEESIIALRQLSRYRLALVDSCGDCKRRVIALLDQVFPEYDRLFSDTFGVASKEILLKYPTPEDMLMVSTRKLTTLLAKASHGHFGEDKAKQLKTVAESSFGVGFAKDAFAFQIRQLTEQIIFLEKQIDELEKEISILLKQTDSFITTIPGVGDTLGAIILSEIGDIHRFDAPGKLVAFAGLDVKVNQSGEFTGTKNRISKRGSPYLRRAIWLAAGRAAFCDPILSVYYQSLRGRGKHHLTAVGAVARKLCNIIFAILTDNRPYEPLPPKAKPLS

SEQ ID NO: 81156 - protein, 320 aa, unidentified
MQSVCGIDVSKDRLDIMVLPEQQCFSVRNDAAGWAELVERLRGLSISAIGLEASGGYERGAMRALLAAGMPARQVNPFKLRQFARASGVLAKNDPLDARMIASFVAIMPTQPAQLRAPAIERLAEMLAVRRQLSAEKVAAENASRLLEDPMLQRLSRRRIARLAADIDMLDRHLAEIVGADAALAHRYQLLTSMPGVGPVLACTLIALLPELGRMSRKQVAALVGVAPYAFESGKFKGRRCIWGGRAPVRNVLYMAAMSASNWNPVFKAFHDRLKAAGKMPKVVIVAIMRKMITALNAMVRDDVVWADHLSGRHSVPTAR

SEQ ID NO: 81157 - protein, 417 aa, unidentified
MNSFCGIDWAEGHHDIAIVDGEGKLVAKKRISDDSAGFTVLTEMLAAAGDSFDDAIPIAIETPRGLLVAALRATGRPVFAINPLAVARYRERHSVAGAKSDHADAMTLANILRVDSHLHRRMPADSELARAIAVLARAQQDAVWRRSKASNELRSMLREYYPAFLDTFAGKSATNLAKPEARAVLAIAPTPAHAAKLIKTRVAAALRRAGRKRGIDGLAVNILEHLQAPQLRQPELVEKAMGRQALALLAMLDAACTGADELAQTAAEEFRKHPDYAVITSFPGLADLTGARVLAEIGDDRDRFADDRALKAYAGSAPITRASGKVTSITHRRIKNDRLAAVGWVWATYAYINPGPAQDHYRRRRDHGDRHAAALRHLFNKMLGQLHHCLQTRQTFDPIKAFGQPRTAPREPAAADS

SEQ ID NO: 81158 - protein, 410 aa, unidentified
MKTIVPRCAALDVHKDSVVATVRTPRRGGGRKQEQQTFGATTAALLGLRDWLAAHKVTQVAMEATGIYWRPVWAVLEDEFELLLVNARHVKQVPGRKTDLSDSAWLCHLLEAGLLRASFVPPQQIRELRNLTRYRKTQIAERQREANRLHKMLQDAGIKLDSVASDILGVSGRAMIRALCEGTRDPELLAELARGQLRRKIPALREALAGRFRADHALVVGHILAHLEFLDETIATLSGAIEEAMAPFAAARELLQTIPGVGRRTAEVILAECGADMSKFQSAGHLVSWAGLCPGHDESAGKRRSGRTRKGSKWLRTALVEAASAAVRASNTYLAAQYRRLKARRGHGRAIIAVAHSILASAWHMLSSGETYRELGPDYFLRRDPQAAVRRLVRQLEALGQQVSLEPLAA

SEQ ID NO: 81159 - protein, 354 aa, unidentified
MSATVIGVDPHKRSHTAVVLDDCEQVASEIRVTASGGQVEELLAWAPAGQRVWAIENANGLGRVLAQQLVARGEVVVDVPAALACRARKLSGNSGRKTDEFDARAVAIAATYNRGLRRVQPDNISAVLGLLVERRWQLVSQRQRTICQLHALLTDMIAAGAKGHLTSKKAAALLRTIPAGDVVTLERKLLARELIDDVRRLDRRIPPARRRLTEALTAYDTTLTDIHGIGDVGAATIIGIVDDPTRFPTSGHFAAFTGTAPLQASSGDVERHRLSRRGNRQLNKVLHTAAKTQIRRGGPGRDYYQRKLAEGKSPMEALRALKRQLSDVVYRRLLADHQKRAARGGQMRTSPKAA

SEQ ID NO: 81160 - protein, 362 aa, unidentified
MEYIAFDAHKHYTLASVERQAGGIVREERIPHERGALRQFLRRCDLGSPVAVETTGNWYWIVDEIEAAGDVPKLVHARKAKLMLGMVNKTDKLDARGLNRLQRTGTLPTVWIPPGALRDERDLPRTRMVLVRQRTQLKNRIHATLAKYALTVPEVSDLFGRQGRELLRQRLAELPPQTTFATGRLLEQVEGLDDQVHRFERRMQEVFKPTREIELLMTLPGVGFILAIVIHLEVGDVTRFASNEKFAAYAGTTPRVHASGGRTRFGPLRPDVNHYLKWAFVEAATVICRHRRRHPKRHGSQLYERVARRKGHAKAIGAVARHLAEATYWMLTKREPYQEPRLLQGGARKPGLVHGGVSASSH

SEQ ID NO: 81161 - protein, 344 aa, unidentified
MDYYSGIDVSLERSSVCVVDGSGKIARETKVASEPEALINWFGSLGFGLARIGLEAGPLSQWLYAAMKQAGLAVELLETRHVSDAFKAMPVKSDRNDARNIAQLMRLGWFRPVHCKSITAQEIRAMLTARKLVQSKLLDFENSLRGILRGFGLKVGKTTRTHFAGRIEELVKGHPNLQTITEALLRARAVLLAEFNGFEKRVRAMSRLHEKARLLISTPAVGPIVSLTFACAIDDPSRFTSSKQAGPHFGLTPKKYQSGETDYTGRISKHGDASVREALYEAAHIMLTKPVRGCSKLKSWARRIARRAGTNKAKVALARKLAVIMLRMLKDNVPFNPAAKAATA

SEQ ID NO: 81162 - protein, 346 aa, unidentified
MNNSNSTFDPCGIEVSARTLLVALGAQGRAASLREFPNTPPGHQALLGFLSRSSPRVRVVLESTGLYGLDLALCLHQAGLALMVANPRAVRHFAHALMQRSKTDRLDAEVLRQFAARMPFVAWRPPSAATLQLVAVARRLEALTDMLTAEKNRLHAASLSQALPAIVRRDVARSIQNQQRAIERLTSAAQEFVLSDPELARRFQLLLSIPGFGVTSALHVLAELALLPAALEVRQWVASAGLDPRQHSSGSSVEKKTRISKTGNKHLRRALSMPALVAVRHQDHLRAFYDHLLARGKSKLQALVASMRKLLHAIFGMFKHDQPFDGAKVYALLHIPTPIPQEVACT

SEQ ID NO: 81163 - protein, 394 aa, unidentified
MKLVGIDVGKNSHHFCVMDKETGEFNVAPSSFSNNKEGFDFLINSLKPYSKKSILLGMEDTGHYHVALLKFLLSNGYTVALINPKTTDLTRKMEGGITKNDKLDTITICDVLDTPERKKQYRITKVDRFDLYEQRQLTRHHHNLKEELNVYCNRLQKSIDLVFPEFNTLFSSKYSIVYMNLLKTFGSAEAIASTDIRTIRKCFEIKGRGNRISLTPEKLKECAKNSIGISSEVETIQIKHLVSQITLIKEQIAEIDKKIEEFSIPNNSPILSIPGISHFSGTSILAELGDIGNYSKPSQIIKFAGVAPYHYESSQYNAQHIGITKKGSKYLRKTLYQIILTVINNNPVFKKYYRLKISQGKGHRCAQGHCIRKLLRIIYHLLETGQSFDPALLR

SEQ ID NO: 81164 - protein, 338 aa, unidentified
MLHVGLDLHKRFSTVTVMDDNGTVLEQDKLYHDDRARLTEFFRRLAGKAVVTVEATRNWYWLYELLEELGLTVKLANARKVRLIAEARLKSDKVDPGSLAQLERTGFLPEAYIPPRAIRDNREYLRYRLTLVRLRTGLKNKVHALLDKLGVSHQFADLFGPAGRRFLSQLALRPVYQEELTNYLALADDIERRIVAATKEIKQQLKPDTRAELLMTIPGIGHLTAYLLLNEIGDVQRFPTPGKLCAYGGLVPIVKQSADHRWQGHLTSDGNHYIRWALAESACKAPSKDYQFGTFYRRLAARRGPLKARMALARKLMVIVWHVLTNGESYKVKEVPTV

SEQ ID NO: 81165 - protein, 403 aa, unidentified
MKQQLQHATNDILYIGFDVHKNSIAIACALSCESDDPQFYGSCGGSNLAVERALNRICKKFNVTKKQIRIAYEAGPTGFVLVRRLLQLGYDTIVVAPSKMERAAGEKVKTDRKDAIKIARQLRGKMLTGIYIPEAKTEAVRDLCRARTDASEDLRRDKQRLCAFLLRQGMRYDGKTNWTEAHMRYLRKMKLADPILDQILEDYLRTIDEGIKRVQMLEEKLEQVLLEWKEGAPFVNALKAFRGFQTVAAMTIASELGSMRRFKHPRQLMGYLGLVTGENSTGDRRRQGSITKCGNSHVRWILVESAQHYRLDPKVSPQLSKRQEGQSKEVKEISWRAQNRLNYRYKRLSARKLNRNKVIVAMARELCAFIWELFTTLPQPELQAPPEAIAITAVGDDPAAQPA

SEQ ID NO: 81166 - protein, 311 aa, unidentified
MTDHTIGVDISKSHLDVFRLEDGAAQRFDNSAAGFRALTKWLGKAPVARIVFEPTGPYHKAFEAALGEKFPLVKVNPLQARRFAEAHGTRAKTDAVDARMLARMGVAFDLVPQVPCSKEILVLRDLHVARAGLIKDRTRLRNRAQTQDIAVLKRQTKARLAQVERHVVELDAEIAALIAAGQTTARNCDILCSMPGIGTVTAAAMLTLMPEIGTLERKQVASLAGLAPITRQSGQWQGKAFIGGGRKPLRDALYMPALVAMRFNPDLKAKYEGLRAAGKPAKVAIVAVMRKLIETANALVKADRTWTEKTA

SEQ ID NO: 81167 - protein, 308 aa, unidentified
MTIHHSYIGCDIAKAMIDVFDPVSNRLSRVANEAAALADFAGSLAPHSFVVFEATGHHDKALRHALARAGIACARLNPTMVRRFAQARGRLAKTDRIDARILSEMGAMFRPVADKPPCPGRERLTALARRRDQLVEARALELRHLGETTDVTVIADIEAAIASLSIRIVALETEISHHIETLDELAAQAERLTSAPGIGPVTALTLVAHMPELGTISPKAIASLAGLAPCNNDSGAKTGRRSIRGGRPRVRKALYMAALGAVRANQRFKAFYDAIAIRSGSKKSALIAVARKLLTVLNAMQRDQKPFA

SEQ ID NO: 81168 - protein, 378 aa, unidentified
MNRKTGMNAGQIIGTIDGMQVVGLDIAKLVFQMHTVNMATGEIVNVQIRRAKVLERFANRVPCLIGIEACGGAHHWARALRALGHEVRLLHAQAVRPFVSGNKTDAADARAIWLAVQQPGTKCVGVKSLAQQATLTLHRQRELLMKMHTMQTNALRGLLYEFGAVFAQGSRALLGAVEAALESLSNKLPQMVADSLHEQVLRIKALGVDIAAIEKRLALQLRQDADMRRIAEIPGVGVLTATAAIATMGDPRAFGSAREFCAWLGLVPKQWGTGGRVRLQGISKRGDAYVRTLLIHGARSVLTHAKEPGPWLEQIQARRPANVVIVAQAAKMARAIWAVTARQQDYQRGYRSVRPQAACTIGSHSLINPTYRKEWTAL

SEQ ID NO: 81169 - protein, 385 aa, unidentified
MTEQSVPTATAFDHNSTLVLALELSGKGWQVGAVLPGVARRPRRSVAPRDVAGLLAQIERWKAEAQRAGRTVLRTVLAYEAGRDGFWIARCLLAHGIEVQIMHPASIPVERRGRRAKTDRIDLDMLLRTLLAWLRGEPRVCSMVRIPSETEEDMRRPERERERLVSERIALENRIENLLCLHGIAGFKPRLKKAAERLDGLRSFAGAPLPPMLLEELNRLMTRHRMLSEQLKEIEAAREQAAMAAEPDCAVQQIQMLARLVGLGLATASGLTREVFCRSFADRRAIAGFVGLTGTPFNSGGSEREQGISKNGNPRVRRILLQLAWRWLRFQPDSALSCWFVERTGGAKGRIRKIMVVALARKLLVALWRYVETGEVPAGARLAAA

SEQ ID NO: 81170 - protein, 401 aa, unidentified
MQENQQHNSVDVFIGVDVGKGHHHAVALDRTGKRLYNKALPNDETKLRALITELKAYGQLLFVVDQPATIGALPLAVARDEGVLVAYLPGLAMRRIADLHAGEAKTDARDAAIIAEAARSMPHTLRSLRLADEQLAELTMLCGFDDDLAAQITQTSNRIRGLLTQIHPALERVLGPRLDHPAVLDLLERYPSPAELAATSEKTLANRLTKLAPRMGRSLAAEIVQALSEQAVIVPGTQAATIVMPRLAKQLASLRMQRDEVASEVERLVHAHPLWPVLTSMPGVGVRTAARLLTEVAHKAFASAAHLAAYAGLAPVTRRSGSSIRGEHPSRRGNKVLKRALFLSAFAALRDPVSRDYYARKVQQGKRHNQALIALARRRCDVLFAMLRDGTLYQPKSAPNA

SEQ ID NO: 81171 - protein, 338 aa, unidentified
MVIIGIDPHKGSHTAVAIDESETQLAEVRVRADRRQLEGLLKWAIEFPERYWAIESAEGLGGLLSQQLLEVGEEVFDVPPTLSARVRVLATDKSQKNDPNDAYSVAVAALRSPRLRTAGAEEHVAVLRLLWNRHKNLTSAHTQAMGRLHALLVGILPGGARRRLSATKAAAMLAGVRTPTAVERARKAQAQLLIADVRRLGAELKASKMRIAEFVDSVPTTLGELSGVGPIATAIILAHTKDVGRFPTADHYASYNGSAPIDASSGPRKRHRLNPRGNRQLNHALHIISMSQLSHPGPGRDYYERKLAEGKTHKEALRSLKRQISDVVYRQLRIDAGR

SEQ ID NO: 81172 - protein, 353 aa, unidentified
MMIIGCDFHPSFQQIAYVDRETGEYGERRLRHQEEAVRFYRSLAGRQVRVGMEATGNDRWFRQLLSELGEELLIGDASAIHAAAPREQRTDKRDARHILRLLVEDRFPSVWQPPTGNEERRQLLLHRCRLVRMRTRIKNQLDSIAKSEGLTGTRSWSSQRRQQIEALPLTGWYAQRRADLLLLLDGLEQRIKPLDAAVEAAARQDAEARLLMTHPGVGPVISLAYVLVLGDWQRFPRGKQVGSYLGLIPSEASSGKRQQQMGHITKQGNGLLRWLLVEAATTAQRYDASWHRQYVRLSMTKHHGVAKVAIAHKLAVRLYWMLRSGQDYGQMMERGSHARQSECPVGRSQRPIE

SEQ ID NO: 81173 - protein, 286 aa, unidentified
MSASTQQVIERYIAIDAHKHYIAVGGLNVQMETVLPLRRIDIGGFSEWAQKHLGLTDAVVIEATVNTWTLYDIVEPLVGRAVVANAYQVKLIAAARVKTDKRDVWALARLLVADLIPEVWVPPVRVRELRALISHRRRLIQIRTRARNRLHSLSHRHNLTPPQGSLFAPKHRDWWLSQDLSPTESLRLRQDLETLDHVDKQLETVDDELNRLTTVEPWSKFDPYLVQLPGFGQVVSMTVLAAIGDVTRFPTAKHLVGYAGLGASVHDSGKTYRTGRITKQGRRELR

SEQ ID NO: 81174 - protein, 391 aa, unidentified
MVCVGIDVAKDKHDCCILDSEGTTLVDCFTIPNNMDGFKSLLQTIQDCSQKSDKIKVGLEATGHYSYNILGFLLDNDLPVYVMNPLHTNLYRKSLSLRKTKTDRVDAKTIATMLLSDVDLKSYTDTAYHNEELKSLTRYRFDKVQERAKLKQSVSRLVTILFPELEQLVSSIHGTSIYALLSEYPGAKQISEAHLTRLANILVKTSRGHYRKDKATHIRDAARTSIGSVMPAKSLELKHTIKLIQELTSEINEIEDAIRKIMDELKPPILSIPGMGFHSAAMILAEVGDFSNFNSPDKVLAYAGCSPSTYQSGKLTNCYAHMEKRGSRYLRYALYTATKYVCYWNPVFTEYLTKKQAEGKHYNVALSHAPKKLVRLIYALQKSGKAYLAVT

SEQ ID NO: 81175 - protein, 347 aa, unidentified
MKFYTKQHAFYCGVDLHADAMYVCILDSTGEVVLHKNIPTKPKVFLKLIKPYRDGLVVGCECMFSWYWLADLCADESIDFVLGHALYMKAIHGGKAKNDKIDSYKIASLLRGGNFPIAYTYPKKMRATRDLLRRRNHLNRKRAELVAHIQNTATQYNLPEALGRIAKPSERSELTKKFRDPIVRAIVEVDLTMIEHYEELLGTLERHLEKIAFEHDPISLALLKSIPGVGRILALVMLYEIENISRFPRVQDFVSYGRLVKPEKSSNGKSYGHSGKKIGNAHLRWAFGEAVVMMLKGNKPAQEVKNRLASKHGKGKAMAILSHRLGRAVYFMLKNQVPFDPDRFLRP

SEQ ID NO: 81176 - protein, 339 aa, unidentified
MNEITTVGVDLAKRVFQVHAVDRQGAVVVRKPLKRAKFLAWFAKLPPCLVGMEACATAHYWARELTKLGHQVRLIPPAYAKAYVRRNKNDPADAAAICEAVSRPSMRFVAIKSEPQQAMAGLHRVRDLLMKQHTMLINQMRGLMAEFGIVVPKGVPHVSELVAVLADPDDRRIPVPLRDALRATAELLGGIDRKLEGIDRQLVALGRDDATYRHLITAPGYGPIVASAMSAMVVDPTAFRSARDFAASLGLVPRQDGTGGKVKLGPISKRGNGYLRRLLVNGAMAVLRGKRAKHDPWLVKLLASKPRKLVAVALANKMARIGWALMMRQEDFRRLPVAA

SEQ ID NO: 81177 - protein, 429 aa, unidentified
MRTESTPGARGPVFCGVDTHADSHWLCVLDWRGRRVLSRRFPADAAGYEALAGAIAAAGEPACVAMEGTSPYGAGLTRHLASLGMPVREALSPARTQRRRPGQGKCDESDAERSARAAMSGSKLGTPKSQDGWVDGVRCMLAARSGAVKARTSAINTARSLLTTAPEGLRSRFRGMGGPRLMEELPSVRSEGALGAALGALADLWAAARDAALDMERAIEASLEENCPALLAMYGCGPVSAAKLAVAAGDNPGRLRSEASFAAICGACPIPASSGKTVRHRLNRGGDRQANSALHEIARQRVMRDPETAEYAERARARGKSDREVMRCLKRYVAREAYRALMRPHEIRRPADASELVAARRAAKVSQVRAASILGTSEKYISMLERGQRELKPIRRAYEAWVEAGLPLNWDRQAFEAERKMDSKKHLAK

SEQ ID NO: 81178 - protein, 377 aa, unidentified
MGDYSEAFVGFDTSKSRNSVAIADGGRGGEVRFLGEIDNTPAATAKLVRKLASRYKRLTFCYEAGPTGYGLHRQIKGLGFECVVVAPSLIPKRPGDKVKTNRRDALSLAKLLRADELTAVWVPDGCHEAMRDLTRARETAMLDLRTKRQHVSAFLLRLGRPYSESRKTWTRAHVSWIASQKLEHPQQRLVLEEMMLAIRQAQERLARLEQAIAAAVPEWSLAPVVTALMAMRGVDLVSATTLLAEIGDLSRFRTPTELMAYLGLVPSENSTGDTVKRGPITKAGNRRARRMLVECSWSYQHPPRVGQAKQAKVDAAPPAVREIAWKAQCRLYRRYRTLIRKGKLKTVAIVAIARELAGFIWAVARAVTTACVAAAPA

SEQ ID NO: 81179 - protein, 388 aa, unidentified
MPAEEMSVAYLGIDVGKSSHSACALDVGGRVAFRAELANRPDDIDRLLERAGSGALVVVDQKRNIGALVLARAHVHGNPCAYLPGYAEKQARGMFPGIAKTDAIDAEVIARTALGVPRALRPAPEEPEGTASLRILSSQREFASSARTRAKNRLRATLLEADPALEGAVDPSSRWQVSMLAKFGGAAGCSAAGWRRFSSAARRAGAPVAGARRLWEALLASSRSGRRLPAGEDVAVRILAREIASLDADIEELDSLVADSLAGDEVYECLLTVPGIGPKTAAALVTSIDISAFRGHDELASYCGVAPRDRRSGSSIRSTSPQHGGNRQLKNLLIFSCNSLIGTDNRFGRYYEECRARGMRHSKALKAVARKRLKVIYAIMRDAVPYAA

SEQ ID NO: 81180 - protein, 359 aa, unidentified
MQLVKQNVGLEVDAKKVKVSYQCMWNDWTTKIIGSRTFNNGPQGFKELKNWIEKKRKPGSDVHLTMEATGVYYERLAYYFHAQGAFIIHVLLPNISKGYRKSLNLKSKTDEIDAGMLAQLGLERQLSPWEPMSDQMRGLKKLNRQRLQLVKDKTMVFNQLHAEQASYKPTQKAIKRYKKHIQFIENQIQEIDRELKQKVKEDPDLSQRIENVCTAKGLGFTTVCGVVAELNGFALFKNRNQLVSYAGYDVVKNESGTSVKGPTKISKKGNSNIRQMMFMAAMTAAVHDDHHKVYYQRIVDKTDIKMKANVAIQRKLLLLIYALFTKNEPYDPSYHLELKKRLEPKKGRKIVRQPEVLGV

SEQ ID NO: 81181 - protein, 430 aa, unidentified
MKSNTQNAKIEAITEKTLVLGIDVGSETHYARAFDYRGIEYSKKPFKFSNTEAGFVTFKEWILDIKERHEKDKVVLGMEPTGHYWFNLGKFLQDNEMKPVLVNPHHVKKSKELDDNNPTKNDRKDPKVIAGLVREGRYMIPYLPDGVYADLRTASNIRFQLQAELTRIQNRISRWFNIYFPEYKTVYGKPDAKSGILILKTAPLPEDILTLGIDGVNQIWRDAKLRAVGKARAKTLIEAAEHSVGSKEGAVAARMEIRMLLEDYESRNTRLQEVMVLIEELVRKIPMAEKLLEIKGVGIRTVSGFLAEVGDISRFNNPKELQKLAGLALVENSSGKHKGETTISRRGRKRLRYLLFEVAMSLVAKNPEFRELHNYYTTRRLNPLKKMQSLMAIAAKLIRVFYVMLTKGVNYDPKKMVNDIKRPAVYLQTA

SEQ ID NO: 81182 - protein, 405 aa, unidentified
MKKRNIFQNRSQQLLQLFEKVGNRFKMMCVPIDYAKKDHIVMFCNGHGDILRKPFSVKNTLEGVKYLIEQVMRSCRQRHIKKEHVFFGGEDTNSYAENFANALRAKDWLVANVNAHDAKKQRDNLQASTDRIDLMGIATMLLNLRAKCSPAQDGIYRNLRTLVRHRKKLVVMKTEVKNRVHTLVDRLFPGFLNEKNTGINSFSKSSLYLMEDRFSAQQIRRRQKSTLIKILKRYATPDAESVAVKLHSYAAQVITTPDEYVATLQLSLEHHIKHYRCLQENIDQLLFEIGLLLAQTQGAFLTSIKGVGIVLAAGVSSEIGNPFEQKPLNNLTSYCGIIPRVNQSGGIEGHTHTGRVSKRSNHILKDYVVQSALQMGLRGPEPLLQGNKRREAAGQHGDLGIARRF

SEQ ID NO: 81183 - protein, 415 aa, unidentified
MSLTDLPMSPRLAPTAGVDWATSNHVICVVDADGEPIDRATFVHTKAGIERLVARLARHGVHSVAIERPDGPVVDAISAAGLVIYVIPPAQIKALRRRYGSAGNKDDRFDAYVLADTLRTDRRRLTPLEQDSDATIALRQLCRARKDLVAYRIAVANQLRAHLSIALPAAVDLFAAIDSPISRKFLTRFTTQNALDWLTPTRLAAWLKANRYSGRVDPCLLHQRIVEAARGATGVHGQTLAAITRAYVSTLATIMAQIDELEEQITTALNAHADKELFTTLPRGGTLRAARLIGEIGDARGRYPTAASLACLAGVAPSTRESGNHRVVSFRWAVDKQLRDAIYDFAGDSRRANPWAANLYNRARARGHDHPHAVRILGRAWIDIIWKCWTQRTPYDPAKHNALQLLLTQDQRTGG

SEQ ID NO: 81184 - protein, 418 aa, unidentified
MKNPVLYVGIDVSNAKLDVAFLGADERPLRRPDVYANDPDGWTALEKAIIETASSIGPAARVVCGMESTANMHKRLAQRLRRVQGLEIEVHVLNPFAVKHFGKAMLKDSKTDRIDSHLIAQFVLRMKQVPTRAPSELIEELRSGTRTRRSLVEERTRQLNRLHGQLRYYLPGYKKALEIKEIPKRLLVLLVAMPSPHEILCRSLQDLATIRYGKSNRRVGVVFAEKLLTLAARAPSLELPILTRTLIRTTAQRILDLDDLLLEIEREIAKLIDVVFPDQLLTTIPGVGKVTAASVLAEVGDLSRFKNKKAFIGYCGLYPIVWESGDAKRRYRMTRKGNRMLKMCLLLASGSARQYNPAIAAFYARLKARGKTKRAAGGAAARKLAEIVFAVLVSGEPWSAEKATASIQKAEAMAEVAA

SEQ ID NO: 81185 - protein, 310 aa, unidentified
MEITVGIDVSKARLDVHLHPSGEHFALDNDEAGVAALVARLGRLEGLRTIGVEASGRYERLAVAALAEVGLPVVVLNPAQVRHYAHAIGLRAKTDPIDARLIALFVQAVNPEPRPLADAQTTELSALMARRRQLVLMLAAERMRRQQAPKGPVRLSLARVVTSLEEALRELDGHIDTTVRGTPVWRDKQDLLASVPGVGKTIARTLLAELPELGRLSPRQIGALAGLAPFTRQSGKWRGRSFIGGGRTHVRTALFMGALSAARYNPALKAFRDRLVNNGKPKLVALIATARKLLTILNAILRDNKPWRPA

SEQ ID NO: 81186 - protein, 419 aa, unidentified
MKHTQNTRGYKRYFAIDTHREYHLVGGQNEDQEWVVNPRQISIEKFPEWAQKNLCAGDIVVLETTTNVWDTYDIVAPLAGRVLVANAAAVGEIAGSRVKTDTKDIERLLKLLFGGIVPEVWVPPAHVRELRAFISYRNRLVKMATMIRNRLQSLLHKHSLTAKGVPKEGILNQAWWDAQSSISTLEKMQIRQELHLLEEIKQLQCVVNEELEKQSTGEMWGKQALQLMQLPGVGVIVAMTVLSAIGDITRFEDAKHLVGYSGLGAGVHDSGKTHKEKHITKKGRKELRWIMVEAAWRAVRMSPYWKEQYEKHLKRMRKPNQAIVVIARKLLVAIWHVLSKEELDVHASEEDLAYKMLLLSWSLNENVRMGLTYKQFAKYALMKLGVENDITRFVRKEVPRRLSPREEVLERMAELGIAQ

SEQ ID NO: 81187 - protein, 337 aa, unidentified
MNKFIGIDLHSNNSVVVVSDEADRIVYQRRLPNDPVQIRAALAPHREDLVGVVIEATFNWYWLVDELIEDGYRVHLANPAAIRQYEGLKYSGDFSDAAHLAQLLRLGLLPEGYIYPPQGRQVRDLSRKRMQLVQCRTAQILAIENLFSRHTGGQMQGERVKRLDEAQVSGFGFAPDVTLAMQANLAVMQTLQEEIRIIEKRLMERVKLHPDYALLNSVPGIGPILATTIMLETGSISRFAEVGNFSSYCRCVESRRESNSRKKGEGNTKNGNKYLAWAFVEAANFAIRSCPEARRFYERKKRARNRIDWQDTEAAALPAGRDPAVRPVVRGVLAEPT

SEQ ID NO: 81188 - protein, 400 aa, unidentified
MRVVFGIDVSKVSSEVAILVNGEKVHGYTMSNDAIGFSRLLGDLKTVHKPEIIFEATGVYSRRLQAFLEDNGYAYTRLNPLEAKKQLDSLRVRKTDKIDAEKLAQSQFVLNRKPTYVQEEVYQHLRDLSRFYQNLTEDIVRAKNRLHKVLQVTFPEMETILSTPTGEQYWNLVIAFPCKDFVLELSKDKLSESIRQSTSKRISDKRVAYLAEKLIALANQSYCAVKKTSPMLEEVRYYTKELLRLSEQRQAVLDEMVELAQPLPEYDILLSIPGIAETTATSIIGELGDIRRFQSANQINAFIGIDLRHYESGNFLAKEYITKRGNPYARKILFKCIHNIASASHTNPCHIADFYEKRKRQSQTTSTKPHTIASIHRLIRTMYYLITHNKLYDYTSTQNQ

SEQ ID NO: 81189 - protein, 385 aa, unidentified
MPTTDAAAQNCPAIPVDRATLFVSLELSRSRWLVTSLSPGSAKLSNHTVAGGDGSALLDLLAHLRSKAARRVGVPVKIVVIQEAGLDGFWIHRLLVANGIESHVVEGASIAVPRRRRRTKTDMVDGEMLVRTLAAFKRDEPRVCSMVAPPSPAEEDRRRLSRERRTLIKERVEHSNRIKGLLASQGIRGYQPLRQDCRERLAALQTGDGRPLPPRLKAEIIRELDRLELVRQQITEVEAARDALLQSQEAKAPAKLLLRLMSIGPEFATVLWLEGLFRSFSNRRQVAAYAGLTPSPWRSGRIDREQGISKAGNPRLRSTMIELAWLWLRHQPDSALSRWFHARVQANRGRVRRIAIVALARKLLIALWRYVSQGEVPEGARLKTT

SEQ ID NO: 81190 - protein, 359 aa, unidentified
MASTMMIGCDLHDKSMLLKGAVDRGKPWLKSYGTKAASRRRVIKDLESRADQAGATRIVFAYEACGFGFLLHDELVAAGIECYVLAPSKILRSAHGRSRKTDERDAQAILDAVRAFVLAGVALPSIWVPDVQTRDDRELLRRRLAIGEDITRAKTRIHWLLKQHGMEGAPGKPWTETYWDWLDGLGNGRLGAGAGAGLASLVRQVKWLEQEQVRLDEQVMALAAARRYDALVTVLCRRQGVGLLTAMVFLTEMGDLRRFDNRQQVGSFLGLTPASHESGDSADHKGHITHQGPRRVRKVLCQAVWSRVRVNAGEQKAYERLVARNPTKKKIAVVARMRVLAIGMWHDGLEALAAMEAAA

SEQ ID NO: 81191 - protein, 399 aa, unidentified
MRNAGIHANSLLEVRRMYNAVGIDVSKGKSTIAVLQPGGTVIRKPFDVSHTSQNLNELADYLSSLDGTTKIVMECTGRYHEPMVKALSEAGLFVSIVNPHLIKNFGNNSLRKVKSDPADARKIARYTLDNWTELRQYSGMDNTRTQLKTLNSQFGFFMKQKVAAKANLIALLDNTYPGVNKLFDSPTREDGSEKWVDYAYSFWHADCVRKIGLKAFTERYKSFCKKHHYIFQQDKPEKLFNASKELVAVFPKEKTYKLLIQQSIQQLNLASEHVERLRREMNELASTLPEYSTVMGIYGVGKTYGPQLIAEIGDVSRFTHREALTAFAGVDPGVDESGQHKSKSNRASKVGSVRLRKTLFQIMTTLLQNAPEADPVYRFLDKKRSQGKPYYVYMTPRSE

SEQ ID NO: 81192 - protein, 355 aa, unidentified
MERYIGMDVHAASCTLAVISEKGRRLRDFPVETNGQALVEAVRMIPGHKHLVFEEGLQSAWLYETLNPHVDEIVVAGVTESRGPKSDKRDAYGLAEKLRVANLDKVIFKSPRQFTRLRELSRIHITLVKDAVRVKARIKSLYRSRGILVSGENVYGVRLRKDWQKQLCSSAQTRATRLYDHLDFLLEQKKQAEVDLLREGKNHSIVRILETAPGFGSIRAARLVPIVVTPHRFRTKRQFWSYCGLGIVTRSSSDWIQTADGGWIKARVPQTRGLSRQFNHVLKSIFKGAATTVITQSNKDPIYARYERLLDGGTKPTLAKLSLARMIAATVLRMWKDEEEYDPGRAGPPTETREG

SEQ ID NO: 81193 - protein, 399 aa, unidentified
MEQFIGCDAHKKYSVFVAVNERGEASPAIRVGHDREQYRQFLEQLAAGSEIALEASGHYYWMVDDMEAAGHHPRLAHPLEAKKRMGKTSKKTDKVDANGLGILLRNGTLPEVWIPPAELRDQRESLRLRMFLVQQRTRLKNRIQGTLARYNVQIAGVSDLFGVEGRLRLGKRLGELPEHTRQSVEVELATLDFLEVQLGDIEKRLEALMKVTPEADLLKTLPYVGRILSMVMTLEIGKVERFPSAAHLASYAGLVPRVHSSGGHTRLGQICGDVNQYLKWAFIEAGNLVVLHQKHLAGQHVVRLYQRIKRKKNHQKAVVAVARHLAEAAYWILKKQEVYRDPQPQPKIPVKARAAHSMGGARVSAEPALVPAGQSAATAASVAAIGAEIQPGAGGKRCA

SEQ ID NO: 81194 - protein, 388 aa, unidentified
MTPTSGSLSHPITLDYENTLVLAIELSKASWVLAAQVPGLPRIKAQQTVEPRTEALLAAIDGYRARSRAAGRTIERVVAIYEAGWSGFWLARWLVRHGVETHVVQPSSVPVDRRARRAKSDGIDAELLLRTLLAWFRGEPRVCSMVPIPDEADEDERRRVREREDLVAERVSLVNRIGAVLATLGVRDYNPLRRDRRARLEALRTALGDPLPPHARARILRMLDRLELVCAQIAELERMRDAVLEEEAPDKAEGMIQQLAGLRGIGVQSATVLVREAFVREFANGKTLGSYAGLTPTPFSSGTTEREQGIGKAGNRRLRTVMIELAWLWQRYQPGSAQASWFRERVGGTGRRMRKVMVVAMARRLLIALWRFATQGVVPEGAVLNPAP

SEQ ID NO: 81195 - protein, 412 aa, unidentified
MHYKMRHVYVGLDLHKAHHTAVIINCWHERLGEIQIENKPSAFDDLMKFVKKHTSKEMTPVYGLEDTGGNGRALAVHLVEKNQIVKEVNSALSYNERMSNATTQKSDSWDAFCIAKVLFARLDDLPDANPQDMYWTIGQLVARRNSIVKHAATLKNQLHQQLSYHYPSYKKFFCDIDGKAALAFWEKYPAPHHLESVGAEELAVYLRKASHNTCSTRKAEEILELVKKDGETKRNYQASRDFLVVNMVQDMKRSRELIKQTEEQLRQVLSETDYKLDSMDGISTVTAAELIAEIGDIRRFSNADKLARFAGVAPIRFSSGGKGKDQASGQGNRVLNAIFHNLAVQQIQVAKGDNKKQRNPAFYEYYQRKLAEGKTKKQALICVMRRLVNIIYSMVKHKTEYRAATLTERQAS

SEQ ID NO: 81196 - protein, 357 aa, unidentified
MKERRDYILRNENVFVGLEDSKKTWSLCVRSSGMVVHETSMPARYEVLRNYFNNKFPECHIRVMYEAGFRGFELLDQLAADGWECVVTPPHTVTDEKCQRKKNDRTDCRRLARNLENGDYRKCFVPDKTLREDRQVSRTCGQVQADIKRVLNRIRRMLEFHGLDNGLPAGRWSGAAYSRLRQHLAEIEISDSLRLSFEVMFRELEQVRQLKRELLLRLRKLARSDRYKESVRLLMSAPGIGMLTAIRLALEWGDMSRFGRKEEFASFLGLVPSDYSSGDREHRGHITKQGNRSVRGWLTESAWVAIRYDPVLLDKFRQVLRNCGSKKKAIVAVARKLALRLRMVLLSGEPYVLGVVE

SEQ ID NO: 81197 - protein, 390 aa, unidentified
MQTFDVIVGMDVGKSFHWLHAITNTGDVIASHKIDQDEHQLEAAFTALRAGGKQVLGVVDQPKNIGALTLDCATRAGCEVSYLPGLAMRRAAGILPGDAKTDQRDAQVIAYTARVMPESLRAVGASHDRAQMEALVAYDHDCMVDKVRELNRLHALLAEVNPRFEKAIYDNIGSVFILNLLQRFGGPWSLRAAGKAKVTRWAATQKRVPAGLLDTALQAAWSMDHKPAGADIHEQYAIPAAARRIAELAAARKANETRIDTMLAANPTYQALRTMPGVGHCTAAALVTIVDITRFPNHEKLASYAGIAARTQQSGTSIKGETASRSGNKTLKNALYMSAFASLQKDPIGRAFYDAKISAGKKHNTALIALARKRLKIMYAIMRDNTPYQT

SEQ ID NO: 81198 - protein, 321 aa, unidentified
MTKNTTILGIDISKDSFDVYDDLKGHRQFSNDLKGFNSFYKSLKENTWVIMEATGSYHHRLVLYLFENGIVVSVVNPLVVKRFIQMKLNRVKTDKSDAQMICRYGQEQTLEPWEPDPEYVKQCKEVQSVVQLYFKQRTALKNKLHSLQSKGLTKGKAITSLKRQLRGLDKEIAFLEDEMESLIKANEPDLYTRIKSIPGLGKKTAILLIVATNGFKDFASSKQISSYFGMAPHERSSGSSVKGKTRIGKNGHPIIRNHLFLCSFTACMYNPQCKALYDRIVAKGKSKKLALIAVSNKLIKQAYGIAKSGLYYDENYRSKLA

SEQ ID NO: 81199 - protein, 394 aa, unidentified
MILVGIDIGKNKHTFSIIDKNSGEILLSPSDFSNNLKGFLFLIQKLSSYTKSELLIGMEDTGHYHFALLKYLLDRRYTVVLINPTTTDLTRKLQGGITKNDPLDSLTICDVISSNHRNKPYRVTTLNRFDLYEQKQLTRHHHNLKEELNTYKNRLQKCIDIVFPEFNSLFRSKYGIVYMNILKTFSSAKAIANADIRSIRKCFEFKGQGKRISLSAEQLKLTAKSSIGIPSVAEEIQIRHLVSQIELLEKQLSEIDKRIEEFSLKNNSPILTIPGISHFSGTSIISELGDICNYTKASQIIKFAGVAPYHYESSQFTAQHTAITKKGSKYLRKTLYQIILPVISNNEVFYAYYTKKLNEGKGHRCAQGHCIRKLLRVIYHLLSTRQPFNPKLLV

SEQ ID NO: 81200 - protein, 419 aa, unidentified
MSFKILKNNCCGLDVHKTWIYACIGITDSNKRTEYKQARFSSFTKGLNELCDWLAKYNCNDVCMESTGKYWIPVFNILEKNNIWVTLSHPKYTKPQKGNKTDRKDAKWICDLYMCGMVKPSFIPPADIRELRDLVRYRFKLTCMITGEKNRAHNSLTVSNLKLDDVFSDVFGKSSRSITEQILQHHGETFDVAPFVDGRCKTPIEEIQAAVDGAISTEQAVKLKQCLTHIDELEMHKAEIEREIFRLSDKYESVLNLIRTVPGFDKNPLTAIQVLSEIGGDMSVFPTAKNLVSWAGCCPRNDQSNHKIKSTRISRAGSYFKPVLVQVANALIKSRKHPEFTTRYRRIKARRGHKKAIIAICRMILTAIWHILTDLKPYTPEGFLESRPVNKEKVLTISQALNLIKQRGYIIKDDVGPVT

SEQ ID NO: 81201 - protein, 443 aa, unidentified
MTRKNQKRFEVVHPDCAAVDVGGSEHLAAVDPAKCTDPVQRFSAFTDDLHAMADWFSSMGVKVVAMEATGVYWIPLFEILDRRGFEVYLVNSRATRQITGRKSDVLDCQWILQLMTHGLLRGAFRPSDEVCSLRSLVRQRANKVRDQAKSLNRMQKALVQMNIQLAQVISNIAGVTGMSILRAIVEGERSPDVLARLRDKRVKADEATVARSLRGNWRAEHLHALSQELAAYDFLEKQIGECDQAIADALDRLPVLQSDVTTPTKTLRSTHRSNEQQLALHQALSKVMGVDLTAIPTIGIDTALVLASELGADLSRFPTSQHFCSWLGLAPPTRISGGKPLPGKSAKVINRSAQALKQAASIARNDKSFIGASHRARLTRMDTCCAIKATAHQLARLIYAMLTKGQPYVEKGIEEFEERSRDRQLRALERKARKLGLQLVKAA

SEQ ID NO: 81202 - protein, 314 aa, unidentified
MKMAMLSFCGIDVSKDRLDVVVLPEGWFFSVSNDTAGWTELVARLRPLAVCAIGLEPSGGYERGIIRALLAARLSVRRINPNKLRQFARARGVLAKNDRLDARLMAEYVAIMPTRAVQRDDAVDRLAEVVTMRRQLCDEHVTVENQTAHLEDAMLRRLSKRRLVRLEADIRLLDKRLAEMVATNAAFARLYELLTSMPGVGPVLAFTLIALLPELGKMGRKQIAALVGLAPYDFDSGKLRGHRSIYGGRMPIRNVLYMAALSASRYNPALKTFSNRLAHANKKSKVIIVAVMRKMITTLNAMLRDNAAWQPQSN

SEQ ID NO: 81203 - protein, 418 aa, unidentified
MGKRKNRVCGADVHKDIIVATILNSDDTEFQEKFGTTTVELGRFRDWLIAHNCEQVAFEATGVYWFPVYDALSPTIDTIVANPWMIKGIPRNKSDTLDSKWIAGNCLDGKIKRSRVLPKDCRDLRTLTRARSAYTKTRTQLRNRIHKYLALCGITLSSYISDIFGKSGRHILDGLIESKDIDTILDSIPSGKVKKKRELINASLGKGLDGVSRMLVKDTLELLDHLEEKVNDTSLEILGRLQERAKDLAIVMSVPGIGFVSASIILAEIGDYHDFQTSEQLVKWCGLAPGLNESAGKKSPCGITKQGSKSLRTILVEIAQVVAKMSKNKLSRFFHRLRTRKNYNVAITALARKLISIIFHLLVNQELYQENNYTQAKTKPIKKDLLCLSKEEQLKDGVAAIVDAFYHLKKKSSLEGGG

SEQ ID NO: 81204 - protein, 477 aa, unidentified
MNQKQGDNLQPPKAKSKRRRRNKGMCLEDRPVLEPNAAGIDVGAREMFVAVPPGRDENPVRVFATFTEDLERLTDWLEQCGVTTVALESTGVYWVPLFEILEQRGIRPCLVNARHMKNVPGRRTDWHECQWLQFLHSVGLLRAAFRPGQDVCAVRTILRHRNELVAAASQHVQHMHKALTQMNLQIHHVISDITGLTGRAIVDAILAGQRDGAELAKLRDPHIKADTETIRKSLEGNWRPEHLFTLGQSRDLYRIYQQQIVNCDLEIEKMLQGFAPRIDPGERPLPPDRKRNRAGSKRRRTNGHPHPEFDLRTEAYKLFGVDVSQIPGLEENALPLFSEVGRDMSRWPSAAHFVSWLALCPDNDISGGKLLWRGARRVKNRAGHLFRMAAYALHRSLTPLGNYLRRMKAKLGPQAATMATAHKIAVIFYTMIKNQVEYDETIWDARDAQREKKLQAKLKRQAKQLGYELVPIEPQAA

SEQ ID NO: 81205 - protein, 372 aa, unidentified
MRSPINNGLEAQRRLAVNEISMRKGSWTIGLDLGDRFSQACVLDAAGEVAARFRVATTRKGLERGLARYPGARVVLEVGTHSPWVSHQLEEAGFEAIVANPRRLRSITQSDRKDDRADAEQLARLGRVDPRLLSPIRHRGLSVQRERARLAVRDGLVRSRVLLVNQARGLAKPLGLRLPKCTTEGFASRMRREGLVESFPGMAALVAMVEQLTQSIRALDREIEAVGRERYPETELLRQVAGVGPLTSLAYVLTLEDPQRFRRSRSVGAYLGLRPRRRQSGEQDPLLRITKAGDPYLRRLLVQSAHYILGPFGPDTDLRRFGLRLIARGGRAGRKKALVAVARKLAVLLHRLWVTGEAYEALRGGVAPAAAA

SEQ ID NO: 81206 - protein, 345 aa, unidentified
MKKITIGIDFAKEKFDVTVKNVLEGTSCYGQYPNTPAGGRSMVRMVKKFAKGTASEDWLFCGEDTGYYSQTISRYLTEKGYFMWLQNPYAIKHSEGDIRRGKNDKADSAAIADYAHRYEDKARKYELPSEASEQLHMLLTRRDALVRAKKVVQTGVGEIPKREKQGETITLIKASNKRVVKAIDDEIALLEEQMEEIVGKEEEMQKNYEILRSFKGIGIVNSMCFIAYTDNFKKFDLNARSIATYWGVAPFGEDSGKTVYKKPHVSHMCNHWLKAILSNAANSAIKYNSVIIAYYARLEKAGKLEGIRRNNVKNKIIHIITAMIRKGEKFNPEFKFTMEKDTQKR

SEQ ID NO: 81207 - protein, 364 aa, unidentified
MFIERTSVGLDVHARSIAAAAIDGVTGELVKRRLAPAHDAVLEWMTRLPGPVAATYEAGPTGFGLARAIRASGVRCEVAAPSKIRRAAGERVKTDARDAVLLARLLRMDEIVSVRVPTVTQEAARDLVRAREDTRLDLMRVRHRISKLLLRHGHVYYGGKAWTGAHERWLRGIRFDPAGEGGGTRAAFDADLEAVDFAVARRDRLERAIGQLAADSEFTPVVARLCCLRGVSTLTGLALAVEIGDWTRFTGAGIGAYLGLVPSEHSSGEARRQGGITKTGNPHARRLLIEAAWHHKPRYVVGATMRRRWDAAPPAARTRGHEGNQRLHHRWTRLAARNKTHTVANTAIARELAGWCWSLATLTD

SEQ ID NO: 81208 - protein, 418 aa, unidentified
MDTLYPKVAGLDVHRKTIQCAVRCQQEESGRLFRQVRPFGTMTRDLRALADYVGALGVTHVAMEATGVLWKPVWNVLEGRFELVLVNPRHLKKVPGRKTDISDAEWIAQLLQYGLLRGSFVPPRPVRELRELTRHRAQLRGESTRVVNRLHKVLEDANIQLGAVASDILGKSGRAMLRALERGQKDVTQMAELARGSLRKKIPQLKLALEGHVTEHHRYMLGRLMRQLDLLECEIEELSHRIATMLGGLLPAEDFARLDAIPGVNRITIENVVAEIGTDMSVFPDAHHLASWAGICPGNEESAGHRLRSRTRKGNRWLRRALSEAGWAAAHTKDSYFWAQFRRLVRRRGKKRALVAVAHSLLVVVYHVLKDKVEYRELGADYFDRLEPERLRRYLVKRLQGLGYDVALSPKGPEPTAA

SEQ ID NO: 81209 - protein, 409 aa, unidentified
METVVERPAALDVHKEQVTACVRVPGRGKREEHVAEFKTTVQGLLALRDWLKAQGVTRVAMEASGVYWKPPWAILEDEFECLLVNARHVKQVPGRKTDVSDAAWLCQLLEAGLLRASFVPPKPIRTLRNLTRYRKAQIGERQREANRLHKILEDTGIKLDCVAADILGASGRAMLEALVAGTTDPAVLADLAKGKLRQKLPALREALEGRFDVEHGIVVGAILAHIDFLDEQISLLSVAIEEQIRPFAPAVELLCTIPGVQQRTAEVIIAEIGADMSVFPSAGHLASWAGLCPGNDESAGKRRSGHSRKGSRWLGIALTEAAQANTRSRDTYLSAQYRRLKPRRGHRKAIGAVRHSIIVACWHMLTTGEIYRDAGSDYYTRLDPAKQTRHLVAQLERLGHTVTLQEAVA

SEQ ID NO: 81210 - protein, 367 aa, unidentified
MIVNEVAKNVEKIISIDTAKNSFQVLVVNQKTGKKKNTKVQRSKFVEYILKQGPCLIFMESCSASQHWARLFESFGFTVKLIAAQHVKAFLRNRRVKNDERDAEAIYKCGIQPDTKFVRIKTVEEQTVALLHTLRKAAVSQRVELSNRIRGILAEFGIVVARGRGSFNSEIEALFNECEKIHDVNLRVAISSLFEDYHRLEQREKELSEKIESLNKDNELVKIALTCPGVGPLTASAIVAEVGDASQFRNGREMAAWNGVVPSQHSTGGRSTLGGITKTGNRYLRTLLAQCACAVIQNASRHLEQGKDTHLDRFALRLKLNGKPVKKIMIAIANKIIRILWAMLTQRKTFENKANEISDTSAELQLA

SEQ ID NO: 81211 - protein, 315 aa, unidentified
MGKQSSQINVGIDVGKAQLDVHIHERDIHLTVENSAEGIRVLLARLNRYRLTRIVVEATGRYERLLADAALAKDLPVIIVNPLVVRRYAGAVGQLAKTDKIDARIIAEYAAVIQPEVRPDSNHNVRVIKDLLARRRQLLTMSTMEKNRAHIMPKAFRADIQRHLRHLEKQVEKLDKRLDQKIEAESQWRDKRAVMLSMPGIGPTVVNTLLGDLPELGNLTNKQVAALTGVAPYNRDSGSLRGKRRIRGGRHSVRTILFMATLTSVQHNPVIKRFYQRLVSLGKHKKVALTACIRKMVIMLNAMVRDGKMWNEKLA

SEQ ID NO: 81212 - protein, 352 aa, unidentified
MAKTDFDELMSIGIDIGKDTFHLVGFDHDGQRVLRKQIKRLALVATFEKLPRCIVGMEACLSAHFVSRTLRQMGFEPRIIPAIYVKPFTKGQKNDYNDAEAIAEAALRPNPQTVSEKSKDQLDLQALHRVRSRLVSRRTATINQIRAFLIEQGITVRKGLRALRNSFEAILEERKGEISPRMRSILIGLYGDWVWMDDRIDKVSAEIEEISRTEENCVNVMSVPGIGPMISTAMVAAIGEGEAFDRGRDFAAWVGLVPRQYSTGGRMVLGRISKRGSRYLRMLFVQAAKIIMMRPHRWPDFSFGAWLARACERMHRNKAAVALANKLARMAWSILRHKTVFDASRDEVAIGI

SEQ ID NO: 81213 - protein, 431 aa, unidentified
MSFAHRFSPVVDDEEERVRAVALDVHRDFCEVAIVEEGRLRSAGRIKTRPQELELFAQSLGPRDWVALEVTGNAWSIARILEAHVARVIVVSPNDTGIRQARAKTDRLDARALAKLLWAGELDGVWNPDERIRGMRRRLARRTQLVRARTRAKNEIHAVLLRCLKDRPTASDLFGKKGRRWLEAQQLPLTERETVDSALRQVDFLDSELAAVEQLIAAEALSWPEVKRLMTVPGVNVTVAATFMAAVGDIRRFGDRRKLTAYLGLDPRVRQSGAAPAARGHISKQGSNSARHALVEACWSTVRQPGPIAAFYQRIRAKRGHSIAIVASARKLACLFWCLLTRGEDYAYAQPSLTKKKMRRLEIAAGAPRWQGGRDIWSTNLAMRQAERDLALQAQHAYERTIKDRQQKSGASATPGRASSGSSKEQVARQT

SEQ ID NO: 81214 - protein, 426 aa, unidentified
MNCTQNQKINQVTEQTLVVGIDIAKRTHYACFVDDRGRVLRKSFPIFQSKEGFRQLYEAIQEAMQAFGKPQVIVAVEPTGHYWLNLAYFLEEHGIPLVMVNPAHVCRSKELDDNLPTKHDAKDALVIARLAKDGRFLVPRLLHEIEADLRVGSTLKEKLRKEQTAVKNAIVRWTDRYFPEFWTVFRDLGKTALSVLEWTPLPADMAGRSAEELIEVYRQSEGLKCPQKAKIQALIDAAKDSIGVTEGTTMARFEIAALVRRYRQLEAEIAALDAELKALVQTTMEYQWLKTVDGLGDATIIDLLAEIGSFAHYRDPRQLVKLAGLTLKENSSGQRKGQKHISKRGRKRLRSVLFRAMIPLIRHNEAFRELHDYYTTRPVNPLTGKQSIVALCRKLLNVLFAICTKKQAFDAERMKQDVLSQVQRAA

SEQ ID NO: 81215 - protein, 313 aa, unidentified
MLVPVPPLITETGQFIRLKACVTMMVASDEFLLNYIHHKISKIMQAQSHIYVGIDVSKDELVISYRDEKGWAKARVPNTLTDINNWINTFGIQDKHFILEATGPYSERLIHVLNAADALFSLVNPGQSRAMAKVLLKSNKNDDQDAQTLSILGQKLELKAYKMPSAEQKKRLQAFSALASLQKQERQLKNQLHAFSYHVLPNNVVVQALEQVLLSVQQAIHDLENELKPQQSQQETHQLIQYITSINSVGLKTAQAIIVLFDNFKHFKSAKSFAKFIGLSPSEFTSGSSVRGRRSITKNGSSKIRALLFNCAR

SEQ ID NO: 81216 - protein, 351 aa, unidentified
MASSTIAEPTVAVTGGVDTHSDVNVAVALDQRGVLLGTASFPTTAAGHERLEAWLAGFGPIDAVGIEGTGAWGAGIARHLTAAGHRVVEVDRPDRKTRYRKGKSDTIDAEAAARAVQAGTATGTPKTRTGLVESIRALRVARRSAVKDRSAAAHQIHSLVSTAPDELRSQLRSLPLCKLVAVCAALRPGDLTDPTQATKAALRSIARRHQRLADDIAELDAQLEPLVRKAAPPSLLERSGVGIDVAGQLLVTAGDNPDRLRSPAAFAHLCGVAPIPIASGRSSAYRLNRGGDRAANAALYRIVLCRLRWDPNSRAFIDKKIKEGKTKKGAIRCLKHYIAREIYNDLRQLTP

SEQ ID NO: 81217 - protein, 481 aa, unidentified
MKAKPQEKIQKATDPSTRGHWNEMNRKQRREIMRKIQSEDLSLEVVHPHAAGIDIGNESHYVAVPSTRDSQPVRRFGCTTVELKVMAEWLKQCGIRTVAMQSTGVYWIAVYDILEAAGLDVYLVNARDTKNLPGRKSDVQEGQWLMKLHTYGLLRNSFRPSQEIRTIRTYWRQRNDLIRAAVSHIQRIQKVLTQMNIQLANVLSDVSGVTGQAILKAILAGERDPHKLAALRDPRVKASEEQIARYLEGNWQEDLLFVLKQEQEGYEFCQQQMAECDRQLEQYLQRRDDRTQGASLPKEMRKGRLVRKKGNKPAFDMRAALFRITGTDLTQVDGIDVTTAATILSEAGWDMSKWEDEDHFVSWLRLCPDNRISGNKVLGKGRLPTNNRASIALRMAASTLRVSNTYLGAQFRRFRSKLGAPVAIKAMGAKLARLVYRMLRYGMKYVDQGAKFYEAQHRERQIGQLKWKAAKLGFRVVEAAA

SEQ ID NO: 81218 - protein, 403 aa, unidentified
MNAVGIDVSKGKSTVAIIRPFGEIVSSPFDINHTPKELAELANFILSLEGESRVVLENTGKYSDPVIKVLSEAGVFVCPVNAKLIHDYGGDTIRRARTDKIDSLKIAGFCLDKWVKLERYSPVDELRKTLKTFNRQLDEYMKVKVMLKNNLISLTDQTFPEINTVFTSQARESDGHEKWIDFLARFWHCDCVTSLSEEAFAERYKKWCKSHGYNFTSAKAVQVYEAANNQQATLSKNDFTKTLILQAVEQMNSLCTSIAKLKAEMTKISKTLPEYETVLSMHGVGKTLAPQLIAEIGDIRRYPKRASLARFAGIEPPENQSGTYNQHSRRISKQGSPQLRKALFQVMRCVLQSSNPDEDVFRFINRKRSEGKPFKVYMIAGANKFLRIYYARVKECFDSLTTA

SEQ ID NO: 81219 - protein, 349 aa, unidentified
MTIVENQTITVTGGVDTHLDFHVAAAIDQNGGVLGVETFDTTTGGYRNLVRWFCGFGTISLIGVEGTGSYGAGLTRHLTGKGVRVVEVDRPNRQARHRAGKTDAIDAIAAARAALTGTASGTPKSRTGSIEAIRVIMVARRSAGDEWISIINQMRHIVFCAPDEIRARFLDLSPIRLAKTSAVLRPRRSDDDIVRFTTLSTLRELGRRALFVREQKDRLSAEMKPLIEGFAPALMQIHGVGYDTAAKLLIAAGDNPHRIRSEAAWAHLCGVAPIPASSGKTQRHRLNRGGNRQANSAIYRIMLTRMSNEQRTRDYIARRSADGKTMGEIARMLKRYIAREIYKTLPTTI

SEQ ID NO: 81220 - protein, 475 aa, unidentified
MTQPDPSLGAADAPAAAARARQGRRKPTPIVHRVLHPDAGGVDVGATHVYAAVPPDRTEQSVRRFATFTEDLRALAAWLQEHRVTSVAMESTGVFWIPVCSILEAAGIEVILVNAQHVKNVPGRKTDVQDCQWLQYLHSVGLLRGSFQPPPEIVGLRAVLRHRANVVTDGARHIQHMQKSLTQMNLHLHHVLTDLSGVSGLAIVDAILAGERDPKELAALREPGVKAAEETVRKALVGDYRAEHLFTLRQARQAYRFCRRQLAACDRVIAEHLAQLPSQADPQEPPPSPPSGARRRPRKGEIDLPSTDLRTELYRVVGTDVTQTPGLGASSVCALLAEMGPTLSAFPSDDNFVSWLGLCPNPKVSGGRVLKRGTRGVKHRVATIFRIGAQTLARSNNALGDFYRRMRSKLGAPAAVTATAHKLARIYYHLVTTKAAYDESVFAAHEELHQRRRLNRLHREAAALGLTIVASSEST

SEQ ID NO: 81221 - protein, 424 aa, unidentified
MKVTYQTCCGVDVHKSFLVATIIKTTGGIEPLYQKKRFSTFNNSILEFKQWLLDNDCHDVCMESTGKYWVPVFNLLEDEINVTIANPKWVKAVKGNKDDTKDSKWIGDLFRLGLVKGSYIPCKAIRILREYTRYRYKLVSCRSSEKNRYQNALTVCNVALDSVVSDIFGKSSTSIIDYLLEQSGTSVNHEEIASKLLKTLKSKEDTVIESIEGYQMTDSQKYRMRLVRAHMDYITAEINDVDSMIESLISSDPDYENAIQFLITIPGVKRDSAITIISEIGIDMSQFCNSKRLCCWAGLTPGSNASAGKKKSVQITRAGVYLKPALVQCAHAAVKSDKSPYYKKKYEFLVKRRGKKRAIVAIARMILTAIYQMLSTGEVWNPSDLYKIDMPAPLIEKQKAKAIKQAMKLLQKEGLLPPNSSLAS

SEQ ID NO: 81222 - protein, 370 aa, unidentified
MENRSMFVGLDVHKETIDVSIAEGHRNGEVRHYGVIASDLEPLDKVVRALRAPNRRLHFVYEAGPCGFGIYRHLTKRGEACVVVSPSMVPKRSGDRVKTDRRDSVTLARLHRAGELRAIYVPNDVDEAMRDLVRAREDAVVLGTQAKYRLKAFLLRQGRRYPGREGWTQPYRRWLTDLSFPTAPQHITLQEYRDTIDETERRIARLTEQLRQLAPTWRWAPVVAALQALRGVAFITAVALVAELGDLTRFGHPRELMAYLGLVPSEYSSGPSVRRGAITKAGNPHVRRLLAEAAWAYQGIPRVGRQHAYRQEALPKVVCDIAWKAQLRLTTRFRRLVARGKAKPKVATAIARELTGFIWAIAQEVSPASP

SEQ ID NO: 81223 - protein, 347 aa, unidentified
MRFYTNQHRYYCGIDLHARSMYLCILDSQGEILLHKNMSCTPELFLKAIAPYREDLVVAVECIFTWYWLADLCSKQNIPFVLGHALYMKAIHGGKAKNDKIDAHKIAVLLRGGMLPMAYVYPAVMRSTRDLLRRRMHLMRKRSELLTHIQNTNSQYCLPQFGKKIAYKRNRQDLPEHFTDLTVRRSIEMDLSLIDHYDKLLTEVELYITKNAKVHDVNAFQRLRSVHGIGRILALVMLYEIHDIKRFPTVQDFVSYARLVKCSKESAGKRHGSSGAKIGNVHLKWAFSEASVLFLRANPAGQKFLDKLSSKHGKAKALSILAHKLGRAVYYMLQRDKAFDMNKFLNS

SEQ ID NO: 81224 - protein, 340 aa, unidentified
MTVIIGIDPHKLSHTAVAIGCDEQALGQIKVRATCNQTTRLLSWAEPLGPRTWAIESAGGLGYLLAQQLVGAGEHVLDVPATLASRVPVLGSGTSNKNDPNDALSVAIAALRAPGLRTVEIADHGEVLRLLAKRNHDIGRLRNKLVSRLHAALANLSPGGIAKELNVSDADRLLGHIDPVTAVEHARYDLALELLDDVRRLDVQLKASHKRIKVAVRASGTTLIELYGVGPILACELIGYTGDVRRFASRDQFASYAGVAPVELSSGGRTVHRLSRRGNRQLNHAIHMVAICQIRQTDSEGRIYFEKKVAEGKTKREAIRALKRHVANAVYRQLLVDAHN

SEQ ID NO: 81225 - protein, 461 aa, unidentified
MAKKAKKVKTAKGAELRIVNPDAAGIDIAGGIMQVCVPADRSKDNNRAFGAYTSDLHAISAWLRECGIKTVAMESTGVYWIPLFCRLQEDGLDVVLTNARDVKNITERKTDESDAEWLMLLHQYGLLKASFQPHNDAKRMRTLTRHRDTLSREASSIVLRMQKAMQQMNIKLTLVLSDITGKSGIRIIEAILAGERDPKRLADLADIQCKTPKEEIAKALEGNWEEDLMFVLRQNYDTFKHYCTQLGECDAELEKLMENYRAEVAKVEDTSYSPAKKRRDYKKTRHTVGFDVERKAYEMWGVNVFEIPGISHLTALELMSELGHDFTRKFPSSKQFCCWCNISPNTKISGGKRISSHVPHRRNNVGLIFRSIASSLANAKNQLGNFYRRIRSRAGGKAAVIATAHKVAEIFFAMVANQTTYNPERVGIDEKVLLEKRITRYKRELERITGTHIEIGNACVP

SEQ ID NO: 81226 - protein, 339 aa, unidentified
MKITTIGLDLAKNVFHVVCFNDHGKEIKKRMLRRNQVLEFFTQLPPCQVSMEACAGSHYWGRQLRALGHNVKLISPQHVKPYLRGNKNDYNDARAIAEAAMRPDMPIVGIKTVEEQDMQALHRMRSQCLRDRTALSNSIRGLLGEYGIVFTKGVATLRRKIPEVLEDADNGLSLRFRHCLARRYEQLVELEGHIAFYTKELNRLSEQDEACQRLQTVPGFGPIVASAFRSVIGDGRAYARGRDAAASIGLVPRQYSSGGKNVLLGISKRGNKYLRKQLIHGARSVVLQAANKEDSLSCWINRIRKERGWNKAVVALANKMARIGWAVLRDETSYHPATR

SEQ ID NO: 81227 - protein, 416 aa, unidentified
MSVALPQALFFTGIDWASAEHAVCVLDAAGKITARFTIKHSAEGIASLVRRLARYGDPAGLPVAIERPSGRLAGLLLEAGHPVVPVSPNAIKTWREGEVLSGAKSDAGDAAVIAGYLRLRYHRLAPAAPYCDETRALRAAVRTREDLVQMRVAATNQLSALLEAHWPGARAVFADVESPISLEFLTRYPTPAAARHLGHKRMAAFLVKHGYSGRRPAAQLLARLHGAPAGTAGRALTEALQDAVLAVVAVLRALNGAVKDLDRSVAAHLGEHPDGPVFTSLPRSGQINAAQMLAEWGDCRPAYDGPDSVAALAGVTPVTKQSGKYRGVEFRWACNKRFRRAVTTFAGNSRHASPWAAQIYAEARAAGKDHPHATRILARAWIRVIWPCWVNGVPYDPARHRAAAALAGQTPSQPAA

SEQ ID NO: 81228 - protein, 395 aa, unidentified
MVVACVMVSGEQPGEPDKETRTFKTMSDDLGALAAWLKAKGVTHVAMESTGVYWKPVYNLLEGQFEILVVNAERIKALRGKKTDSADAEWIADLLRHGLLSGSFIPTAQQRALRDLTRFRSSLVEDRARAVNRLQKVLEDANIKLASVATDVTGVSGRAILEALLAGQTDPQVLAELALRKKIDLLQKALSGRLKPHHRVMVTELLGQIDHLDETIERLNAEITEQMRPFEAEIERLDSIPGVSQRVAEVLVAEVGVDMQPFERAENLASWAGMCPGNNESAGKRKSGKTRKGSRWLRAALTEAAHGAARSKHTYLKAQYHRIARRRGVKRALVAVGHSILIIAYHLLTRQQTYRDLGENYFDERDHEGVKRCAVRRLEQLGYQVTLAPLMAVAA

SEQ ID NO: 81229 - protein, 387 aa, unidentified
MPLAADLPAQTQPVPRPAQVLYVSLELSPSKWLVTSLLSGTGRMSKHLVIGGDGNALLRLLAALRTRAEQRAGAPVVIVAIQEAGLDGFSVHRLLEANGVESWVVDPASVAVPRRMRRAKSDAIDGETLLRTLLAFRRGEPRVCSMVHPPSVEEEDRRRITRERRTLLRERIEHTNRIKGLLMSQGVTGYDPLGKDRWARLESLETRDGHALPPRLKAEIGREIERLELLARQIRQVEAERDALAATVPEVAASPAALLLRLKGVGPEAATLLWLEGLFRTFANRRQLAAYAGLAPTPWLSGRIRREQGISKAGNPRLRTAMIELAWLWLRHQPESALSRWFGERVRAGGGRNRRTTIVALARKLLVALWRYLVHGQVPDGAVLKPS

SEQ ID NO: 81230 - protein, 335 aa, unidentified
MKHYAGLDLSMESTQVCIVDDNGRKVVSEKVESSPEAIAMMLERYGPIERAVIETGRMSPAICLGLRELGVPVVCIDARQAHQSLKAMKANQTDPHDAAGLAQLARTGFYKEVHVKSPAAHGVRSVITARSHLVEARVRLDNTIRGLCATFGYRPGAGQGKAFLERIMQAAHIPGLGDAIASLLSVRAELVEQIKEMDRRLRVIASQSQACEILMTIPGVGVQTSAAFAAAVDEAGRFRQSRNAGAYFGLVPRRHQSGELDWTGRITKQGDGTVRKLLYEAANSILTRSRETFALKTWAMKIAKRRGLKKARVALARRLAVIMHAMLRDGTLFQA

SEQ ID NO: 81231 - protein, 344 aa, unidentified
MDIAVLGIDLGKNSCSVAGLDSSGAVIKRRRMRPESIVAFTEKLPACIVAMEACCGAHHLGRLMVGQGHNVRLMSPEYVRPYVKAQKNDDRDAEAIAEAATRPTMRFVELKSEEQLDVQTLHRVRDRLVGERTALINQLRAVLLERGITIPQGRRKLEEQLAEVLAVGGGASLSSRMLRLIDDMRTEWLELDRRIAAFDSEFAALARSDADARRLATIPGIGVLNATALLAAIGNGQSFTRGRDLAAWLGLVPRQITTGGKPRLVGITKRGNKYLRKLIIHGARSALPSLATSSTPLGGWLRGLMQRVHKNAVVVALANKLARIVWVVLRRGEEFDAAAIKTAV

SEQ ID NO: 81232 - protein, 426 aa, unidentified
MEDEYRIYVGIDWATEAHQACVLNNAGRMLAERSFAHTGEAVAAFAQWLHELAGGEPAQVAIAIEVPRGAVVETLIEHGFHLYAINPKQLDRFRDRHSAAGAKDDRRDAFVLGDSLRTDRARFRRIRLDDPLVIQLRELSRVDEDLGREAVRLTNHLREQLHRFYVQALKLCPSADEPWLWALLELAPSPVRGCRLQRKTIERLLRQHRIRRLNAQAVLAALRAPALHVAPGVVEAATEHIALLLPRLRLVHTQRQRCGVRLDALLDKLAVVEGNDDSQQREHRDVEILRSLPGVGRVVAATVLAEASGPLAERDYQALRAHAGIAPVTKQSGKRRTVVMRYACNGRMRNALYHWARVAATCDPASKTYYAALRQRGHSYARALRSVADRLLRILIAMLKSDSLFDSTRLRHSVDAAINEEVPCAS

SEQ ID NO: 81233 - protein, 351 aa, unidentified
MITQITAIPKLYIGIDIHKRSWKVHCATDLFAGKSFSMSADPKQLQTYVSKHFREYEVTTAYEAGCCGYHAHRCFEGYGWRSLVVNPADIHRKGKEKHTKTDKIDAQLIARELKDGRLESIIIPNKKREELRSLFRRRNDLVKDFRRVKSYIKMQLLYFGIKEPEEFDNDHWSHKYRNWLDDMVFEYPTAKSTLDSRLRFFRFVDQELRDVSTELRRYCKTHYKKDYMLLRSIPGIGGIVACGILCELGDLRRFNNIKHLAGYVGLAPSIYQSGNSQRTMGMTPRANRLLRSYFVEASWQAIRADPVMQAYYRKHQGKNVKSIIVKVARKLLSRTLAVIKTEVPYTIGVIE

SEQ ID NO: 81234 - protein, 328 aa, unidentified
MLNYIGIDVSMQSLKLFDGKKEYEVPNERGLKNLEESLKVIYGKDWNNVLFIYEPTGPYSNFLKEFSLKHRIEVYEINPKKSSNFAKAIGNRSKTDSIDAKMLYSYHLLIREDKFKVPLIDPITEKLASFLRSYKLIQKMKTMLSNHIHSQKFVDKDNSVTNLSKFIEKELERFSETEAKLEKKIENWVRNTDEIKEDFNNLLSIKGIGVISAIVLLYMFRKYPDTNRAQITALCGLDPVKKESGNSVKGEKRISKAGNPLLRKILYFACMNAIKHNDRINLYYNRLINNRKPGKVALIACMRKLVLIAHQIYVKKEKYRPLVINENI

SEQ ID NO: 81235 - protein, 357 aa, unidentified
MVDRECLGFSSPYFSVGRHDASPISPDSCLGPDRIPYFSQGRVKEIMNTPEEFIGIDVSKDTLDVGVWPTEKRMTFANSEDGVAMVMDFIRPFAPLRVVLEGTGGWETLAALTLSTQGFPVVVVNPKRVRDFAKSIGILAKTDALDALVLARFAAFTRPEVRPLKGEETQQLEALVTRRRQLTQMLAAEKNRLSRAPKWTRKNIEVHIKWLEKQIAQVHTELHALIKKSPLWREKDEILQSAKGVGPVLSSTLLCGVPELGTLNRRQVAALIGVAPFNRDSGKYRGRRMIWGGRASVRNALYMGTRAAIRFNPLIRAFAERLLKSGKKRKVVVTACMRKLLTILNTMIKNRSRWQTT

SEQ ID NO: 81236 - protein, 389 aa, unidentified
MSQAFDASRSLTALEQHNTIITVIEMGQSKWLVAAVVPGIKRQPLKKLDADEASLLKLLHRWRKEADQTGHPIKRLVVAYEAGRDGFWLARWLRMHDVEAYVIHPASIAVSREHRRAKTDRLDTELLLRALLGWLRGEKRHCSMVAIPTAEEEDAKRPNRERDSLVTEQTRIVNQIKAILIRFGIRSFRPKLRKAEQLLKDLRTAEGSPLPDNTRAEMYRHLVRLRMVREQIRAVETERLQKLKAEHGRKKGPHAMVRLIARVVGIGVETADMLVNEVFSRQFRDRRAVARYAGLTGSPDESGKRRREKGLARAGNARVRTGMIQLAWRFLRFQEDSALAQWFQTRAADGRGSTRKTMIVALARKLLIALWRLVTTGELSDGIVLRPAS

SEQ ID NO: 81237 - protein, 336 aa, unidentified
MIAVGVDTHKHEHLARALDGLGQLLGGLTVDASLAGYTQLVQWLRTLEGEVVVGIEGAGSYGAGLCEYLLAEGITVVEVERPRREDRRRGKSDEIDAILAAKKVLAKDGLSTPRAGGTRQALAALLIARRTCISERTRLLNQLQALHTTGPVALRERVGEGDGRKLATRLVKMRARGDRPASEQLIFTVLRDLARRAQELAAQASAYEHELALLISSLDAALLQEQGVGPISAAKLLVSDPKRLKSEAAFARCNGTAPKPASSGQTIRYRLSRGGDRQANNAIHTIALHRARRDTQTRAYLDRRISEGKTHREAMRCLKRHLSRRLYKQLITIPLT

SEQ ID NO: 81238 - protein, 417 aa, unidentified
MDDNIQWFVGVDWAFEIHQAVLVDAQGTVLGERAFPHGGEGLGAMCDWILTTTGALAETIGVAIEVPHGPVVETLLERGFLVHSVNPKQLDRFRDRFTVAGAKDDRLDSRVLGDSLRTDRHCFRLLHPADPIAVELREWSRMTEDLQQERTRLSNRVREQLWRYYPQMLQLTDDAGADWFLALWALAPTPARAVRIHKATIDRLLKAYRIRRIDADKAIAILRQKPIQVGPGTTAAATAHIRAIAVRLKVVNRQIKEAHRQLDVLCTKLADPEEPGPGQNHEQRDVTILQSLPGVGRIVLATLLAEAWEPLRLRDYHALRSLCGVAPVTRRSGKRCVVVMRQACHMRLRTAVYHWARVAIQHDELSKRRYRELRKRGHSHGRALRTVADRLLAVACAMLRARTTFDPTRAGVLKEAA

SEQ ID NO: 81239 - protein, 373 aa, unidentified
MPKYSTAFGMDVHLRSTTVCALDADTGEAVTRRFPGNPWGEIAGWMDGFPGPSLAAYESGYLGFAPQRELAGLGVECVVAAVSKIPRSAADSASKNDRNDAARMAKAILAHDISPAWVPSPEVEGIRDLAGAYDGATARLATAKQRLLAFLAKRGFVYGGTTPAGNPRKYWTYDFLRWLDKVRPEDDGGVRALAALRNEVEAAAEARADLLSEYRAAVDASPIAAEVAALQSIKGCAFALAAAFSAEVGDFTRFRSGRQVTAYFGLAPSQRSSGDSVRLGGISGAGNALVRKLAVEGSWCYAAARHQPKLMPRDTGVPLEIRMHGRKGSERLLRRREEMLARGVPAAKANAATAAELVRWLWALGMMCREGAE

SEQ ID NO: 81240 - protein, 340 aa, unidentified
MKLYGAIDLHSSNNVAVVIDEQDQVIYQKRLPNDLSKIVEQLSPYRSSLEGMVVESTYNWYWLVDGLMEHGYRVHLANTAAIQQYEGLKYTDDHSDARWLAHILRLGVLPQGYIYPKQERAVRDLLRKRSQLVHYRTANLLSIQNLFTRNTGSSINANRIKALDGQQIDELVSDVDLALAVKANLSVMQSADEQVEILERTVTERVELRAEFCFLKTVPGVGQILALTIMLESGDIERFRSVGNYASYCRCVGSQKLSNGKRKGSGNTKNGNKYLAWAFVEAANFAVRYQPRIRRFYQKKKAKSHGVLAIKAVAYKLCRACYYIMKDRVAFDLNKAFAPK

SEQ ID NO: 81241 - protein, 331 aa, unidentified
MKKVLLCGVDVGSKELAVAIDADSGRVWEGVFANNPAGHRKLIRRLTRSKTTARVCVEATGIYHLDLSLALEQTKGIEVMVANPRVTKDFARAQLRRSKTDRTDALSLLEFVRRMDFDLWVPPSSSILALRALSRRIQALLVTRAQEKNRLHADESVEATPLAIRESIERHIDAINAEIEALSTSALEEVHTNTVLDRRFTHLVSVKGVAQATAITLLAELSVLPADMTARQWVAHSGLDPKHNESGISVKGRVRISKVGNRHLRAALFLPAMVASQHEPRVRAYYEKLLAKGKKPMQALVAVMRKLLHAIHGMFQYDADFDGTKFFAERT

SEQ ID NO: 81242 - protein, 441 aa, unidentified
MSKETVVAGEWAAFVALDWGDREHSWALQAAGMQKRETGKLAQSPEAIESWAASLAARFGEGLIAVALEQSRGALFCALSRYQNLILHPVPPAASARFRAFAAPSGSKSDDADASMLLDILLWHRDKLRALHPDDEPTREQRALVEQRRQLVDQKTATTNQMTALLKLSFPQVLEWFDETDSPLLAGFLRRWPTLPQLQAEQPESILQFLHSHNCRSQVRNRQRIEQIASARPLTTDPAVIDPSVLMVRTLLDIIEVLRAGIRTMEQRIEQLFAAHPDAAIFGSFPGAGPALAPRLLVAFGSDRSRFASAAEVQTFSGIAPVVSQSGQSKWTHFRWACPKFLRQTFHEFAALSIQQCAWARAFYALQRGRAKGHHAAVRSLAYKWIRILYACWRDRTPYQESRYTERTQARSAQRPKEIAKAVQFQFKNVAGFAKLSGSAS

SEQ ID NO: 81243 - protein, 449 aa, unidentified
MREPQEIQDEEYEQVWERVAAVDVAKASGMVCTRVPHSSRPGKRVTKVWEVDATTGAITELGDHLMRHGIEKVTVESTSDYWRPFLYLLQAAGLSVQLVNAREVKNVPGRPKTDKLDAVWLAKLTERGMLRPSFVPPAEIRQLRDYTRLRVDLTHERTRYWQRLEKLLEDALIKVSSVASTLDTASTRDMLEALIAGERDPGVLAGLARGRMKAKHAALAQALTGRFDAHHAELARMLLDQIDALSAQIGTLTARIQELLAAIPAAQGVDADGTTGPGAGSGADAAVLPAAARLDEIAGIGPGAAQVILAEVGLDMGVFPSPGHLVSWAKLCPRTIQSGAKHRAGTTGKGNPYLRGVLGEAAAAAAKTDTFLGERYRRLVKRRGKLKALVAVARSILVIVWHLLADPAARYHDLGAGYWADRIDKGKKARNHIRQLEALGFTVSLAPAA

SEQ ID NO: 81244 - protein, 390 aa, unidentified
MPKFNDLSRSLVAFEQDSTLVAAIEMSSTSWLVGGFVPSRSRDPQKKLPAKAQALLDLLSGWCEEARAAGQVIKRICVAFEAGRDGFWLARWLQERGIEAYVIHPTGIPVSREHRRAKSDRLDLGLLKRSFLGWLRGERKHCSMVAIPTREEEDGKRLLREREALTADKTRLVNRMKSLLVLHGIHGFKLKQRKAEEQLARLVTAEDKPLPPDALAELHRLVERLRLAKQQMAEIDKTQRERLAKAPEAGPNPLILILARVTGVGLMTAETLVREVLTRSMRDRRAISRYAGLTGSPDESGKKRREQGLAKAGNGRIRRALIQLAWRLLRHQPQSGLVQWYRARTADGRRDTRKVMIVALARKLLVAFWELVTTGKVPEGMKLHPAPVAG

SEQ ID NO: 81245 - protein, 351 aa, unidentified
MTTMTSVDVVVTGGVDTHQDLHVAAALDQLGRVLGTESFPTTIAGYRKLLAWLRRHGQLDKVGVEGTGSYGAALARHLTANGVEVIEVSRPNRQVRRRFGKTDVVDAIAAARAVLSGEATGAPKSHDGPVEALRTLKVVQRSGNKARTQALNQIHQLLVTAPQDLRARLQPLRRAELLATCAEFRIKPDDDSLQAITRLALRELAQRVRHLDEQLSLIGKRLRRITTAVAPDLLAIKGVGPEVASTLLVTAGDNPQRMHSEAAFAALCGSNPIPASSGKTQRHRLNRAGDRQANSALWRIVIVRLSCDQRTRDYLAKRTEEGKSKTEAIRCLKRYVAREIYNAIPVPKAAA

SEQ ID NO: 81246 - protein, 417 aa, unidentified
MALKIVYPICCGIDVHKSFVVACIAATDDKGVTTYKRRRFSTFTRDLRLLAQWLADHGCRDVCMESTGKYWIPVYNMLESTCKVVLAHPKYVKAIRGKKTDTRDAQWISDIFKHDLVVGSFIPPVMIRQLRDLMRYRVKLTNSTVGEKNRAQNCLTVSNIKLDDVFSDVFGKSASAITEQLLAHPDGSFDVTPFIDPRCKALPAKIQAAVDGLMCSEQAEKLKIIRSHMESLKLCKANLESAILVLAEQFRSQFELVMTVPGIQLFSAISIISEIGVDMSVFPTAKHLCSWAGLTPQSNESAGKKKTTRINRAGAYIKPLLVQCALTVCKSDKHPEIKNRYFALKKRRGHKKAIIAICRMLLTAIYAILKKSEAYNPNLYRKVVSLPANRTFTIEQAVAFVQRHGFLVVDSDGVIAS

SEQ ID NO: 81247 - protein, 408 aa, unidentified
MAGKVAGIDVHKKVLMVVVIDADAPAAKPERLRFTTMPSELCRLSRWLKEHGVEEAVMESTAQYWRPVWLELEPHIRLHLAQAFSNRAPRGRKHDFKDAERLVRRLIAQELILSFVPDGEQRIWRNLTRMKLQLVRDRVRLQSQIECLLEEMRIKLSVVVTDLLGLSGLRILYALANGETNAKNLALLGDHRLKCSEEQLIEALTGSSHPMHRQMLALQLERLQLIDEQIAKLNSLIAQAMNPHQDTVIRLAEVPGLGIDSAQQIIAEVGVTAGTFPSAAEFTSWVGTCPGKQESAEENSSSRSAKGNKYMHRVLNQASNAAARSKGTHFQAVFRRLLPRLGYQSAVWAIAHRLCRLVWKILHEGIRYIEQGIESEPKLLIYRTRSLAKQLRKFGYNVQITPVDGAPA

SEQ ID NO: 81248 - protein, 356 aa, unidentified
MREITTVGIDLAKDVIAACVLDAHGAVVERRVFKRDAFERWAAQLPPSNVAMEACGSAHHWGRWFAARGHTARLMAAEFVVPFRKGGKNDAADAEAIAIAARQPTMRFVPIKTVEQQAILVWHSMREGWKEERTALLNRTRGLLAEFGVVMSRSSDRLINALPKLTEDPRLPDPVHALLLETREQLTALHTRLARCDAQIAAHARSSDSAQRVRELLGIGPLTSSALAATVPDAKVFKSGRQFGAWLGLTPRQHSSGGKVRLGRISLRGNVYLRTLLIQGARSTLQAALKAEPSRASRLQRWIINLYGRTGYHKTLVAIANKHARMLWAMLTKGERYDPCAWQRHPMNQVLLASTV

SEQ ID NO: 81249 - protein, 375 aa, unidentified
MSDHSEAFVGFDTSKLRNAVAIAEGGRDGEVRFVGEIENSAAATAKLVRKLAAKYDRLTFCYEAGPTGYGLHRQIENLGHACVVAAPSLIPKKPGDRVKTNRRDAVSLAKLLRANELTAVWVPDRGHEAMRDLTRARETAMLDLRTKRQQVSAFLLRQGRHYPEAKKTWTKAHMGWLASQKFDHPEQRLVFEETMLAMRQVQERQARLAQAIRDAVPEWSLAELVTALMAMRGMDLIAAATFLAEIGDLSRFASPSELMAYLGLVPSEASTGDTIRRGPITKAGNRRARRILVECSWSYQHPPRVGRDKQQKVEAAPPAVREIAWKAQCRLYKRYRALIRNGKLKTIAITAVAREFAGFIWAVSREIATARAAAR

SEQ ID NO: 81250 - protein, 346 aa, unidentified
MNSMNYIGLDIHKKSISCCVRQADGTIIQESTIAATRHALDEWMRQLPQPWIAGMEATLFTGWIYDHLGSGGALVKVAHPAMLQAIAAGKKKNDRVDARKIADLLRCDYFPECHMAPREIRDRRRVLRYRNLLVRQAVQMKNKVSGLLMEAGVPYNQQKVHQKKYFAELLQTQKKEMPPSMPELLRLSRSTVEALTGMQRQLIRALERDALLAARVERLASIPGVGRVVALTWALEMGDISRFASVKKAVSYCGLCGAEKSSGGKTERTPISKQRNKHLQTILVEAAKLAPRWSTELALVYEREKQRGNRNRATLAVARKLVAYLMAVDREQRPFDTQLRVAGNAA

SEQ ID NO: 81251 - protein, 402 aa, unidentified
MFFVGIDIGKRNHEAAIIDEQGKPVGKPIRFSNSKAGSEKLLQCINDHDLLPDDSLIGLEATGHYWLSVFSFLTALGFNVVPFNPIQSDTLRNFYIRKTKTDTIDAVLIAQVVRMDLPDQTYLPSEDIVRLKQLSRFRYSIVDQTSDLKRKVIASLDQVFPEYETLFSDMFGKSSTQLLLQSPLPEDLLEIDAQKLIELLNEASNGRLTIEKSTEKVHQLRELAQDSFGIRVATDVYKLQIQLLLQQILLLEEQLKTIEEEMAELVATQDQYLTTITGVGPVTAAVILSEVGDIHRFERPNQLLAFAGLDASVHQSGDFTGTRNKISKRGSPYLRRAIWQAAFIASNHDPALSLYYQNLRKRGKHHGTAVGAVCRKLVNIIFAVWTKGKPYEVHINPDLKDN

SEQ ID NO: 81252 - protein, 349 aa, unidentified
MNTTPIGLDIAKSYFQVHGVDAHGKPTLQRQLRRAQVVTFFANLPACLIGIEACGGAHHWARKLAELGHQVKLMPPQFVKAYVKTNKNDARDAEAICEAVTRPNMRFVAVKTVAQQELLMLHRVRQHLVVERTAKANQLRGLLAEFGIVLPQGLHRLRGVMPEILGDAENGLSCLLRERFSHLFSHLRELDATVIEWQRQIVLWHRENPLSRELEKIPGIGPLGASALVASIGDVRTFKSGRQLAAWLGLVPRQESSGGKTRLLGISKRGERYLRTLFILGARSVLRQSKRNPAQAASSWLGKLSARRHPHIAAVALANKNARIAWALLTHGREYRANYRSTRPAMAAG

SEQ ID NO: 81253 - protein, 412 aa, unidentified
MEGETVIAGVDTHKDVHVLCLLDGLGRKIWSGSFRADPEGYDRLAETISAPGSCAVGGVEGTASYGAGLTRRLAELGYNVVEVLRPKRDKARPGEGKSDPLDAERAARKAASGRGCSVPKSQDGWVEAVRQLYVARRLAVATSTSCVACAKSMLTTAPGALRERFRGCERPKDLMPLLARRRKAGDALEESVLASLRSVATVWKEARSQVESCDARIRALLEANAPALLGIEGCGTTTAAALVVAAGDNPGRLKGEAAFSMLCGVSPIPASSGKTERHRLNRGGNRQANWALYEIAIKRMAYDERTKRYVAKRTSEGKSRREAIRCLKRYIAREVYRVLMDPNPDGAAPEGPELAKMRKAMRVTQKQAAAGLGMSAASLGHLEHGRRRSTKLERRYYELLCELKGALPQTAY

SEQ ID NO: 81254 - protein, 391 aa, unidentified
MFYIGIDIAKHNHEVSIIDDNGKALGKSFSISNSQKGVDKFNTYLDSFNITSENCVIGMESTGHYWINLFSFLVNLKFNVFVINPIQSDAFRKMYIRKTKNDSKDSYIIAQIMRFGEYSSSNISDENIFALRQLSRYRTSLVDECSSWKRKIISILDQVFPEYSNLFSDTFGVTSKELLSKYPLPENMLELSTEELTNLLNKASKGRLGNEKAQEIKESAKNSFGVSFAKQTFSFQIKQIINQISFIESQLKELDNEISNMLKELNSEITTITGIGDVLGACILSEIGDISRFEKASQLVAFAGLDVAVKQSGEFTGTEMKITKRGSPYLRRAIWLAATVASFKDPALSTYYKSLIARGKKHLTAIGAISRKMCNIIFSVLKNKKVYTPNI

SEQ ID NO: 81255 - protein, 408 aa, unidentified
MKRYYIGVDWGDRLHQVYVGDDEGKKVREIKVPETVEGLAEIGRWLDEKRAEGFELWAAIEKPAGRIVDFLLDHGVEVYPVNPKAVDRVRDRYRMSGSKSDAFDAYVLAEFLRTDHAHLKALRPSSEKAQELKLLSRDQRRVVRHKTRFLNQLTTTLKEYYVRPLEAFENLETEVALDFLQQYPTPAHLSALKRKQFNRFATKQHHLSKQRCEELWEKLNKPQLGVPEHVVRAKAQLLEVLIEQLRASIKAVKIYHHKVESFFASSPAAEFAQTLPGGKSGTLVAVIWAELGDAQGRWESSRHLQAEAGAVPVTKASGKSRVVHFRFACNKHLRYAMYWFSFVSLNHSEWAKLYYRGQRDKGHSHPQALRALGAKWLKIIFVMWRDHKPYDENYHLANIALQKMRQAA

SEQ ID NO: 81256 - protein, 360 aa, unidentified
MRRLYAGCDLHSNSNFIGVIDGEGKRVFKKKVRNDIFEVRGVLRPFREELVGVVVESTYNWYWLVDGLMEDGYRVHLANPSAMQQYVGLKHVDDRDDAFWLVEMLRLGILPEGYIYPREERAVRDLLRKRGHLVRLRSSLVISLQNILSRNLGRKVRVSEVKALREDRVSPLLEGNEELVLAGQVSKESIDHLTRQIQKIERVVLQRVGLKDSYRFLLTLPGVGKILALTIMLETGPVSRFATVGDYVSYCRKVPSEWRSNGKRKGAGNRKNGNRYLSWAYAEASELARRFHPEARAYFNRKMEQTNVVVAHSALAHKLARAGYYVMRDRVPFDPEKLFGGKGCGWSGEPGVGLVVSHGA

SEQ ID NO: 81257 - protein, 430 aa, unidentified
MKSNTQNAKIEAITEKTLVLGIDVGSEMHYARAFDYRGIEYSKKPFKFSNTEAGFATFKEWILDLKERHEKDKVVPGMEPTGHYWFNLGKFLQDNEMKPVLVNPHHVKKSKELDDNNPTKNDRKDPKVIAGLVREGRYMIPYLPEGVYADLRTASNIRFQLQAELTRIQNRISRWFNIYFPEYKTVYGKPDAKSGMLILKAAPLPEDILTLGIDGVNQIWRDAKLRAVGKARAKTLIEAAEHSVGSKEGAVSARMEIRMLLEDYESRNIRLQEVMALIEGLVKQIPMAEKLLEIKGVGIRTVSGFLAEVGDISRFNNPKELQKLAGLALVENSSGKHKGETTISRRGRKRLRYLLFEVAMSLVAKNPEFRELHNYYTTRRLNPLKKMQSLMAIAAKLIRVFYAMLTKGVDYDPKKMVSDIKRPAVYLQAA

SEQ ID NO: 81258 - protein, 391 aa, unidentified
MIFVGIDVAKDTHYAAVSDDSGAVLVKPFAFQNNAEGFCLLLKKLSEFDRSKLLIGLESTGIYSENLICFLYESGFRLAVINPIQTATLRKTAIRKTKTDKVDTMLIIKSLMVNSYRLYSQRDADSLKLRTLCRFRQNLKNSKARLKIQLAGYVNLVFPEFGKFFKSGIHIAASYALLKKYSSPKEIAALRTSTLCTLLSKASHGRFGKDTAEALKSLALSSVGVKNPYISIQIAQTIAQIELLEQQIKDLNSAIEEAMESINSVLMTVPGIGAVNAACILGEIGDIKRFSKPCKLLAYAGLDPTVRQSGQFTAKSTRMSKRGSALLRFALINSAWQLTLNDTTFKAYYDLKRSQGLNHYGALGHVAHKLTRVIFKLLTSDTPFNPAKLLA

SEQ ID NO: 81259 - protein, 397 aa, unidentified
MSALYIGIDVSKDFSTAQAIEGNGNKCFYLELAMTADGFDNLLKKITSHCKDIAQVTVAMESTGCYHINLFSFLTHKGIRCIIINPLLTANFARLSLRKTKTDKKDALTIAQFLRVHKDTLLKTDLSPDRQDLKDLARVHESLPNFIAGMKNDIRRMLQITFPELKSLGNIFSETILDLLRQFPSARLIKIAKPNTIAKALLHEDKRKKTSVSAEDIIRAAKTSVASHGAAKEIILPEKISTLQHLIEKKVRMKKVLVEACEGMMIEDIEIITSIGGISNITASRLLAEIGDHRAFSTYKHLIAFAGLDPSVHQSGKFEGISRISKRGNRHLRYIIYLMTTCVVRGNNIFRTYYQKRRAEGQPFKKAIMATAHKLIRVLFTMLSKRTTYKSKEVNAI

SEQ ID NO: 81260 - protein, 394 aa, unidentified
MKLIGIDIGKNKHFFCIMDKDSGEIVSQPASFSNDKEGFDFLLQKIKSYPKDSVIIGMEDTGHYHFALLKYLLDLQYTVALINPKTTDFNRKMQGGITKNDKLDTINICDVLDTPERKKQYRITKVNKFDLYEQKQLTRQHHNLKEELNVYKNRLQKSIDIVFPEFNSLFKSKYGTVYINILKTFGSAENIANTDIRTIRKCFEIDGRGNRISLTPERLKECARSSIGISSSAEVIQIKHLTAQIELIEEQLTEIDKKIEEFSIQNNSPILSIPGISHFSGTSILAELGDISNYSKPSQIIKFAGVAPLHYESSQFNAQHTAITKKGSKYLRKTLYQIILPVIRHNPVFNKDYQLKISQGKGHRCAQGHCVRKLLRIIYHLLKTNQQFDPQLLR

SEQ ID NO: 81261 - protein, 354 aa, unidentified
MFEHPTKRKRASTQKVSIIGLDLAKRAFQAHRAHADGSVSFRKKLSRERLLAFLKEQPRCVVAMEACGSAHHWGRAIRDLGHEARLIPPIYVKPFVKRQKNDAADAEAIAEAAIRPTMRFVAIKTEEQQARAMLFRTRDLLVRQRTQLINALRGHLAEHGIVAPQGPTNVKVLEQAIEDEATSLPLLITELARVYLEQIDQLSERIGALEKTVAHEAKCGATTRRLRTMPGVGPITAMAIETFAPPMGVFRRGRDFAAWLGLVPVQHSTGGKQVLGRTSKMGQRDIRRLLISGAMVIVRWACRKGTPEGSWLHRMLARKPRMLVAIAIANKMARSIWAMLTKGEDYRVPVAVAA

SEQ ID NO: 81262 - protein, 346 aa, unidentified
MNRNSQLPVIGMDIAKNVFQLHIVDPDTGEIERVKLKRERVTTFFANRQPSLVAMEACGGAHHWGRTLKAQGHTVKLLPAKQVRPFVLRDKTDARDAQAIWVAAQQFHIREVPVKSEQQQACLALHRMRAMLMKMRIMQTNALRGLLYEFGIVLPEGHRVLLQRIKGELAQAQDKLSWVITESVQEQLSRIDKLQEDIDHLDKRLLALGKQNPQMLSLQTIPGIGPLTATALAATATDMSGFTSGRQFAAWLGLTPRQTGTGGKIRQLGISKRGDAYVRTLLMHGARAIMARSTKSTWITALLARRPYNVVVAALANKLARTAWAVLIKGKAFDQVRWNPTELAGT

SEQ ID NO: 81263 - protein, 319 aa, unidentified
MMMQSVLNVGVDVAKDAVVVACADRSFPVKRVPHQRAPLRAWLKTLSQGSRIGLESTGASHELLADLAQAQGLTVFLLNPVETRHYAKAMGTRAKTDRGDAALIARLIAQEHTRLRAYTPPTANQRKLDRLIRRRAKIVSLKGTLKLTLRHLGGLAADLKAVVGKLDAVLAKIESTMAAMAACSPQHQEAQQRVETIVGVGPLVGISLTNTLERVPFRKADAFVAFIGFDPRANDSGRKPGRRRLSKRGPAELRRLLYNAAMSAIKTTVWKPSYEHYRTQGWSTTASVVISARKIARAAWSIHHYCTTVNPERITKCLT

SEQ ID NO: 81264 - protein, 427 aa, unidentified
MAESVIDLYSRAAGIDIHQSLAVVSAIIPIGDDPFKCKFVRGEFDTFSDKGLKDLVEFLRPLGVEMVLMESTGVYWMAPYDALLEAGINVAIGNAHEIRGMRGRKTDRNDADWLARVAKHGTFHPSYVPGREYRGLRALARYATSLRGTLSSAKNRLGKLFNAAGYRLNSVFSDIFGTGGMICVRGVLNGEKPEEILGNVPSPGRYKHTREEMLLALGGRFEEGDLFAAKSVLETIDHLEAKISECVGELERIVREKEERKLELLQTIPGIDVLAACLILAELGGGALKAFESAEALCAWAGLCPSQNESGGRSRPAKSRKGNKYLRRDVCECAQAAVKTKNTTMRSKFLNFMQRGKGYKKSIMAMGRKLLTYVCYVLKKDQPYVDPHIDYQKRHAEKNFQRFVAQLRRCTAKYDIQIVNRETGEAV

SEQ ID NO: 81265 - protein, 358 aa, unidentified
MKERLSCILTKEKVFVGLDDSKKTWSLCVRSGGVVVHETSMPASYEVLRNYFHKKFPECQIVVIYEAGFRGFGLHDQLVADGWDCVVTPPHTVTEEKSQRTKNDRTDCRRLAKNLENGDYHTCFVPDKGLREDRQISRTYGQVQADIVRVYNRIRRMLEFHGLDEGLPAGRWRSKSAYARLRQYLSELEISDSLRFSFEVMFRELENLQELKEELLRQLKKLARSNRYRENVKLLMSAPGIGILTAIRLALEWGDVSRFARKEEFASFLGLIPSDHSTGDQERRGHITRQGNRLVRRCLVESAWLAIKYDPVLLEKFRRVLSHCGSKKKAIVAVARKLALRVRRVLLTGEPYAVGVVQ

SEQ ID NO: 81266 - protein, 348 aa, unidentified
MDNATRWVGIDLHRRRSHIAVIDEQGELKTSRRIVNDREAFLELLGDAGETHVALEATYGWEWLAELLEEAGYDLHLAHPLRTRAIASARVKTDAIDAKTLAHLLRAGLLPEAYIAPRELRDLRELLRHRATLTRMRSAVKNRVHAILAKHGIAREHSDLFGKGGREFLAGLQLRDAPRRRLDSLMALICDFDREIEQTTREIDERAKTDDRVDVLTQIRGVGRYTAMLIIAEVGDVTRFPSARHLCSWAGLAPTVRSSDGKARIGHISRQGSPALRWALVEAAQKITTGSGPLREQFERIAKRRGRKIAKVAVARQILTLSYYGLRDGEIRCLARRDRASAKEKLAA

SEQ ID NO: 81267 - protein, 340 aa, unidentified
MITIIGLDIAKNVFQVHGVDETGQPALRRKLRRAEVLRLFCHLEPALVGIEACHTAHHWARQIAALGHEVRLMPPQFVRPYVKSQKNDAADAEAICEAVQRPTMRFVPVKSADQQAVLLLHRTRDLLIRQRSSLISAIRAHFAEFGVVVGQRMRNIDRLLELLVAEGAALPELARRMLAVLADQLRDVAARVAVVEGELMAWHRANDVSRRLATIPGVGPITASAIVATVGDATQFKSGRQFAAWLGLVPQQRSSGGKERLGRISKRGDGYIRRLMIHGARAVVGWRKRRPMAGDPWLGGLLARRHVNVATVAFANKSARIAWALMVRGRSYTTVRARAA

SEQ ID NO: 81268 - protein, 426 aa, unidentified
MKVMHDRAAAIDVHKDMVKVAVRVPGERRGTRKTDVLEFRTFYGVLEEMGRELRRRGVTHVVMEASGVYTEPVYYALAGLGFTEVMVINPAHAKALKGHKTDARDAIRLLDLYECGLLSGSYIPAPDLKEVRDLARYRMKTVQARASEIQRLQKTLETAGVKLSSVVSDVTGVSATAMIEALIDGERRGAVLADLAQGRLRTAGKMADLSMALAGRFTDHHALMCRLHLDRIGALGEAVAGLDATIAPLAGRHAREAALLKTLPGFGDVIVAGWLGAIGPAPHRHFATAQRLASWATVCPGNYMSAKKSKGGRTGDGGNYIKPLLVQAAWAAVRVPGRLQARFHRMVRRFGGARNKGAIKRAIMAIAHTLLKIAYQVLKTGTPYTDLGAGFYASRETPQARQDYLIRQLQKLNPGCVITITPAEAA

SEQ ID NO: 81269 - protein, 358 aa, unidentified
MTSLTKLAELVDVVIGVDTHVSTHSAAMVAAGTGGVIEDVTIAATGQGYTELGDWADDLAEEHGGLRAWAIEGTGSHGAGLARHLRERGEFVIELDRPERAKRRNGAKSDPLDAVRAAREALSRTRLGTPRQGQDRQALSVLLAARRSAVNAAGVAQRQVFSLVIAAPEPVRARFRGQKLTKMVATAAALRVRASWDLETTTTVTVLRNLARRAQTLQAEADSYEKQLKAIIKTWRPDLLDQVGVGPIVAAVVLCAWSHPGRVHSEAGFAMLAGVAPIEATSGQVTNRHRLNRYGDRQLNRALHTIAITRQRRHQPTRDYIDKRTQQGKNPREIRRCLKRYIARDIYRLLEHRPLDAT

SEQ ID NO: 81270 - protein, 348 aa, unidentified
MLIIGCDYHPGFQQIAFVDTETGEFGERRLTHREEAEQFYGTLKERSVRVGMEASGHARWFERLLKDLQFELWIGDAAEIRTKRVRKQKTDRQDAQLLLRLMVEDRFPRIWVADAANRDLRQLLWHRHRLVEMRTRIMNQLHVVALNEGVRRKKALWRPAGRNQLESLILAPWASRRRQDLLDLLDQLTPKIHELTRALEEEAEKRPVARRLMTHPGVGVLTALTFELVIGTSERFHCGKQIASYVGLVPSEESSGDRRRLGHISKQGNSLLRFLLVEAAQVTVRSQPQWRSKFFHLAMRRGRKIAKVAMARKLAVHLYWMWRKGLDYGEFVKLGSHAGAPGNRHGVQ

SEQ ID NO: 81271 - protein, 316 aa, unidentified
MTDQTTEVFVGIDISKQSLDVHIAPPGQSLKVAYDEAGVGQLVERIEAARPRLVVMEATGGYEARLASELAAKGLPVAVINPRQVRDYAKATGQLAKTDRVDAIVLCGFGRAIRPEVRPLKDEDTEELDALVSRRRQLVEMRVQERLRIASTASKKIRKGINDHILWIEQCIGEVDSELKGRLRRSNMWRPKVELLESIPGVGAVTTTTLLAKCPELGTLNRRQIAKLVGLAPLANDSGQHRGRRHVWGGRAEIRSVLYMATITAIRYNPTIRAFAERLKQVHKPPKVVIVACMRKLLTIMNVMIKTGTAWNPQNA

SEQ ID NO: 81272 - protein, 321 aa, unidentified
MAMLSFCGVDVSKERLDVMVLPEQQRFSVRNDASGWAELVARLRSFAIAAIGLEASGGYERGAMRALLAAGLPACRVNPFKLRQFARASGVLAKNDPLDTRMIASFVAIMPTRPARPRPPAIERLTEMLAIRRQLNAEKIAAENASRLLEDTMLQRLSRRRIARLAADIDMLDRRLVEITASDAALAHRYRLLTSMPGVGLVLACTLIALLPELGTISRKQVAALVGVAPYAFDSGKFKGRRCIWGGRAPVRKVLYMAAMSASNWNPVFKAFHKRLKAAGKLPKVAIVAVMRKIITTLNAMVRDDVVWADHLHGRHIVPAA

SEQ ID NO: 81273 - protein, 411 aa, unidentified
MERLIERCCGLDVHKATVTACVRLPDRQGNRTELLAEFSTMTSDLLALSDWLSGLGVTHVAMEATGVYWKPVYYLLEDDFELLLVNAAHIKHVPGRKTDVQDAQWIAQLLEHGLLRGSFVPPREIRELRDLTRYRKSLIRERQREANRLHKLLEDANIKLASVATDVLGVSGRLMLKALLEGESDPEALAELARGRLRKKLPALRQALRGRFSGHHALLLSHILSHLDYLEEAVGELSEEIERRLAPFGRELELLRSIPGVERRTAEAMLAELGPDMARFPSHRHAASWAGICPGSEESAGKRKSGRTRKSNRWLREVLIESGLAASRTKDTYLRAHYVRVKRRRGHKRATVSTGHSILVSAYHVLKQGVPYHELGADYFDRRDDPERLVRRLVGQLERLGQSVTLEPTVA

SEQ ID NO: 81274 - protein, 438 aa, unidentified
MKTLGVLDPRAAFVDVGSEHMHVSVAGDEPAVFGTVTSQLHALRDWLKSEGVRSVAMEATGVYWLPLYSVLEAAGFEVLMVNGRQTRNVPGRKTDMKDCQWGATLHMHGLLKAGFVPPADIRRLQDYLRLRADHVASAAGHVQHMQKALERMNIKLHDVIASLAGMSGLAVVRAIINGERSPEALLALCDQQIRRAKAEQVKEALRGTWEAEHIFALRQALQSWDHYQQQIVECDRQIQSVLPPLDPDRPALPRPKTPKRGGVNSPDIPKLREILAQMCGGRDLTQLPAHTHYSVLQVVGEVGTDLTKWATEKRFTAWTGLAPGNHDSGKRKARGHKRGRNRTGQLFCMMAQSLARSKDIALGGFYRRMAARRGGLIATMALARKLAAWYWRVMVKGDDFVEQGLAHYDAQVLKTKQRALKRLAKELGQQLVPIAQPA

SEQ ID NO: 81275 - protein, 438 aa, unidentified
MKVLHERVAGIDVHKKMIKVAVRSPGDKPWTRKTEILTFRTFYGVLTAMARELRRRGVTHVALEASGVYTEPVYYALCEEDFTEVLVVNPAHVKGLKGHKTDARDCARLAELLECGLLRGSYIPAAELKEVRDLTRYRIKTVQARTSEIQRLGKALESAGIKLGSVASDITGKGATAMIEALIDGERRGAVMADLAIGHMRTAGKLADLSMALEGRFTGHHALMCRLHLDRIKVLDAAVTDLETRTAAKAAPWQLETGLLKTIPGFGDTVAWAWIAEIGPAPHRWFASHGELASWVSLAPGNYISAGKRRHGRTGDASTPIKPMLVQAAWAAIRAKGRLQARYNRLVRRMGGPKNPAAKKKAIVAIAHTLLKIAYQVLKTRTPYQDLGDDFYIRRESPQQRQAWLERQIQKLHPGYTVTITISPPPSHAPDAALTPSA

SEQ ID NO: 81276 - protein, 375 aa, unidentified
MVVFEVINLKQGKGKSMGEITRGAIVRVGVDLAKLVIQVHAVSALGRLVTSRALSREKFMAWCAQLPPGCIVAMEASSGAHHWCRKLIALGLDARIMAAHLVSPYRSQGASGKNDANDAAAICEAASRPTMRFVPVKSVEQQSMLCVHRLREGLKEDRTECINRIRGLLGEFGVVVPQGSRELQLRLGDLLEDASNELGTLARLTIQRAQQQWRDLDAHLEWCDERIAAHRRSNAAVAQAATLQGIGPVTASAAVATVGDFGQFKNGAQFGAWIGLTPRQHSSGGKANLGGITKRGDTYLRMLLIQGAKSAVLTAHRRSDPISQWVLALRERSGWQKAAVALANKNARILWAMFTKGVAFDPRHVSVKPEAATAA

SEQ ID NO: 81277 - protein, 339 aa, unidentified
MDTIRFLAIDLAKNVFQVHGVDAAGKLVLRRRVGRAQLTELVLRLAPCTIGMEACSSAHHWARQFLQQGHTVKLISPQFVKPFVKGNKTDGNDAEAICEALQRPSMRFVPIKSVEQQDVQSLHRARSRLVSNRTGLVSQMRGILAERGIVFAQSITRARREIPVIVADTSNALTPLAREMLADLMDQLRELDRRIAGFDRRIDLVFKASETCQRIAQIEGVGPKTATAIVAAVSDPKGFRNGRHFAAWLGLVPRQSSSGDRTHLLGISKRGDRHLRTLLILGARAVLRTALTKHDKKHAWALALKARRGANRAIVAIANKMARVIWSMLATGQSYQKAG

SEQ ID NO: 81278 - protein, 368 aa, unidentified
MSVYVGIDVHRKRSQVAVIDPGGQVLANRNVPNGAEPILKVIGGLPPGTPAAFEACYGTSWLVELLEDYGFDPHLVHPSRCKAIASARLKNDKVDAAILAQLLRADLLPEAWIAPPAIRQLRALLRHRVALVRLRTRLRNRIHAIVADYGHDRSGGGYWTGPGRAWLASLSLPAVSRELVEDDLGLIDALQGRIDRLDWEIRQRARSDPRVKVLTELPGVGPFTALVILAEVGDISRFASARKLASWAGLTPTVRGSDRVAHYGHISKQGSVWLRWVLCEAAQTAKRSPEFAGTFQRIAQRRGKKIATTAIARKLATRAWHLLADAEHAAAATRRAPGHGTVTDPGGGRMAPGELADQPEPAPPRSNN

SEQ ID NO: 81279 - protein, 401 aa, unidentified
MNAVGIDVSKGKSMVCVMRPFGEVVLEPFEVLHTAQNLHDLAEKLKALDGETRVVLEATGNYHKPVAFVLHDAGLFVSVVNPVLIHDYDNNSLRRVKTDRKDAVKIANYTLDKWTRLRPYLPEDDTRLALKNCYRQYQQAVAIRTMLKNNLISSLDLTFPDANKLFSSPVKNNGCEKWVDFIGDFWHSECVSILSVDNFAKKYLKWCQKNRYQFTRSKSDEIYACAVNAASLPKSPTSKLLIQQQVAQLKAVSQSVAAFRQEMLRLSQQLPEFDTVMEMYGVGPSLGPQLMAEIGDVRRFSSKKSLIAFAGIEPQPNDSGKVVGNDKGISKVGSAVLRRTLFLIMTVILQTQPQDEPVFQFMNKKRSEGKPYKVYMMASANKFLRIYYAKVKAVMDSERSQ

SEQ ID NO: 81280 - protein, 350 aa, unidentified
MQGNGRWIGLDLSKKTYEMCYFDQKGKVGRSGGETTKAGRSKLYAKLKAEDIVAMEVNSLAFVMEKEMRVIGCTVVILDASQLSVIYASTKKTDKEDALKLARLVKIYEKEDLPTVDVPTDKEYYRRKLIKEYKTLKGDRTQELNRLHALFVQCGITTIKRSNVQTEVKRQKVLPQLFGYEAEQAKRLCERLTMLEAQIEELEQLIKKECKEDKDIQRLQTIPGVGDKTALAFAAYVGDGKRFDNGDEVANYVGLVPRVDCSGTINKYGHITKKGNKVVRALLYQAAWAIVRSKHGGALKAKYFYLTEHGKGKKISITAIARKMAKLMYLIMKNKEEEYQEVPVSALKAG

SEQ ID NO: 81281 - protein, 338 aa, unidentified
MKLYGGIDLHSNNSVIHLIDESGSNVLKKRLSNNLPMILALLEPYSDAIEGLVVESTYNWYWLVDGLMEAGYKVHLANTAAIQQYSGLKYGDDDSDANWLANMLRLNILPEGYIYPKEARMIRDLLRKRLQLVQQRTLNLISIQGLYTRHLNKRLNSSKVKQLTPQIIAQDFYDPNVQLAVNGNLAVQQCLTQQIKNIEKSLNQQLKLNDEFIQLTSIDGIGLILALTIMLETGCITRFERVGNYASYCRCVSGARYSNGKKKGTTNAKNGNKYLAWAFVEAANFAIRHNEIIKKFYQRKLAKTHMMVARKAVAHKLARACFYVLRDHVEFDAKKAFG

SEQ ID NO: 81282 - protein, 340 aa, unidentified
MNEITRVAIDTSKSVFTLHGVDGGGRAVLRRNLRRKDVLAFFEKLPPAEVVLEACGGSHYWGRSLAALGHRVRLIPAQYVKPFVKRGKNDRNDAEAICEAASRPGMHDVGIKSAESQGRAMLLSVRELLVRQRTQMVNALRGHAAEMGLVAAQGDKGLAALRAAIAGDASLPEPARETLRLLGSEVDRIEARLAEADKRLMAQLKVDAGARRLAEIPGAGPMIALSFALRVDATQFASGRHFAAWLGLVPRENSTGGKQRLGGISRAGDERLRQLLVLGATSVIRYAKPGRPGVSAWLLALLERKPRKLAAVALANKMARVIWAMLTSGEAYRRKTPVAA

SEQ ID NO: 81283 - protein, 341 aa, unidentified
MTIFVLGIDLGKNVCSLVGLDEAGVVVLRRRLRRDSVAGFIGKLPACIVAMEACCGAHHLGRVLGGMGHTIRLMSPEYVRPYVKANKNDDRDAEAIAEAATRPTMRFVPVKSQVQSDIQALHRARWRLVAERTALINHLRALLLERGIVVAQGRRKLEDALSVFADENDPRLSSRIRTLVEDLRAEWRSLDKRIAAFDAEFVHMAREDEAARRLSTIPGIGVINATALTAAIGNAASFGRGRDLAAWLGLTPRQATTGGKPRLLGISKRGNRYLRTNLIHGARAVLPHIMGQDTPLGRWVRGLSERTHKNAVVVALAAKLARIVWAVLRKQRGFDPAIAAA

SEQ ID NO: 81284 - protein, 455 aa, unidentified
MPKRKPSRKPHWSPSARRLEPHAAGVDIGATEIYVAVPADRDPHPVRRFGTFTRELEQLADWLKPCGIETVAMESTGVFWIPLFQILEDRGFRVGLVNARHVKNVPGRKTDVADCQWLQDLHAVGLLRASHRPPQTIGALRSLWRHRESLVQMAAVHIQHVQKALDQMNIQLHHVISDITGTTGLAIVEAVLAGERNPKQLARLRDPRIVASEETVAEALIGNYRPEHLFVLRQSLQAYRQYQGWMADWDREIERLLGKLESRLEPDQKLLSPPKDRHKPRRNEPRFDLRTYLYRIFGVDLTEVPGVNSLTAHTLLTEVGPDLHKFPPAAAFASWLGLCPDNRISGGQILSVRTRKVVNRLAGALRMAAQSLHRSQSYLGQYFRRLRTRLGTPAAITAAAHKLARVLYHIVTTRQPYDQSVFAVMEARARHRQFIRLKKQAVAFGFQLMPLARVP

SEQ ID NO: 81285 - protein, 320 aa, unidentified
MEQEPIYIGIDVAKAQVDVAIHPTGLRWQAPYTEEGMQELVSRVQALQPTLVLLEASGGLEIPLVAALANAHLPVVVVNPRQVRDFAKATGKLAKTDSLDAQVLAHFAEAVRPEPRPLPDAEAKALAALLARRHQLVAMLVAEKNRLGKALPSVRSRIQTHITWLERELKDTDDDLQTMLRQSPLWCEKENLLRSVPGVGPQLALSLLAYLPELGTLDRKRIAALVGVAPFNRDSGPFRGRRKVWGGRTRVRTALYMATLVASRHNPVIQAFYQRLLAAGKPKKVALTACMRKLLTILNAILKNSTPWQAAIPQITAPCS

SEQ ID NO: 81286 - protein, 407 aa, unidentified
MPDYDWYVGVDWGGERHQVAILDATGARVAEHQVAHSGAGLESLVEHLARLGADPGRVAVAIEVPRGPVVDTLLMRGYHVFALNPKQLDRFRDRYSVAGAKDDRRDALVAASALRTDQLAFRQLQPDDPQVIRLRELSRTYDELLGEERRLANQLREQLWRYYPQALTHCPGADESWLWELLHEAPTPAHAQRFTRPALRALLARYRLRRITGDMLYETLQARSVTLTPGAAEAAAEHVELLLPRLRLVHEQRQQWERRMDALLDALGTPVEGRQEHRDVTILRSLPGVGRVVAATMLAEAWGLLAARDYQSLRAQSGVAPITKQSGKQRLVLMRRSCNHRLRTAVFHWARNSVRLDPRCRAQYQRLRQRHSQARALRSVADRLLSVLVAMLCSGTTYDVTRCPNAA

SEQ ID NO: 81287 - protein, 408 aa, unidentified
MEIIHKRCAGLDVHKETVVGCVRVRERGDVRHEVRHFVTTTAGLLELGEWLRAAGCTHVAMEATGVYWKPVWHILEGEFELILANPLHIRTVPGRKTDVNDATWIADLLAHGLIRSSMVPPGPIQELPDLTRTRRQLMREVVQHKQRIQKVLEDANVKLASVVSDMFGQSGRQMLKALIAGQTDAQKLAALGSERRSASRATLAGALHGKVTAHHRFLLKQHLQMIERLEQTVSEFEAQIEAALQPFRVAVERLITIPGVSATAASVIIAEIGVDMSRFATVAHLRSWAGLCPQLKESAGKVMSRRLRHGAPWLKTVLVQCAWAAIRNKSNYLHAQFLRLRARRGPKKAILAVAASILTAAYYVLRRQVPYRDLGALYFARLDQDRTAQRLARRIKELGYEVEIRKAA

SEQ ID NO: 81288 - protein, 366 aa, unidentified
MPSVTPAAGPIHLGMDTSKNTIVVGILMPGDEVPVIDRIWNEEGSVRHLVSRLGDPAALRACYEAGPCGFELYRLLASMGVACDVVAPSLIPRRAGDRVKTDRRDASRLARLHRAGELTPVRVPSAAEEAVRDLVRVRAALLADRKRAQQRLTAMLLRHGRVWRSGSSWTQAHEQWIAGQRFEEPALAAALAHYRAGLDTRRAELDAIEAELAPWAGREPLAGTVAQLGCYRGIAELHSLALAAEVVDWRRFPSARAFTGFTGLVPGEYSSGDKTRRGSITKAGSEPVRTALVEAAWAYRFKPAIGVTLRRRQRDAGPGTLARSWTAQRHLHSKYKAMTARGKPPAVAVTAVARELAGFVWAEMTS

SEQ ID NO: 81289 - protein, 402 aa, unidentified
MNAVGIDVSKGKSMVAIMRPFGEIVSAPFEIKHTASDINSLVELINSVEGESRIVMEHTGRYYEALAHQLSEANLFVSAINPKLIKDFDNDSLRKVKSDKADAVKIARYALDKWQNLKQYNVMDELRNQLKTMNRQFGFYMKHKTAMKNNLIGILDQTYPGVNTYFDSPARSDGSQKWVDFASTYWHVDCVRKMSLNAFIDHYQNWCKRKKYNFSQSKAEEIYGKAKELVPVLPKDAITKLIIKQAVDQLNSASTTVESLRTLMNETASKLPEYPVVMAMKGVGTSLGSQLMAEIGDVSRFTHKSAITAFAGVDPGVNESGSYEQKSVPTSKRGSSDLRKTLFQVMDVLIKTHPQDDPVYQFLDKKRAQGKPYYVYMTAGANKFLRIYYGRVKEYLSSLPES

SEQ ID NO: 81290 - protein, 358 aa, unidentified
MENYDKKFNGENFYTGIDVHKTSWRVTVLNEELLLRSFSQDPDPAILVSTLQKEFPGGSFHLVYEAGFCGFEPCRYFLEAGMDAIVVNPLDVPTSGKQTVQKTDKVDSKKLAEALRARMLCGIDIPTRKLEADCDLVKQRQRFSKSMRAVKNRIKSLLMKLSISIPEEISDSSSKNWGKQYVEWLKDLSFPQKSHRLILDSYMEDTEHLKSKIAKVEKQLRELAKTPDYSCKMEILQSVPGFGFITSINLCLHLGDINRFSTLDMLCNYVGLAPTMHSSGEKNRVGSLTKRGRSQLREYLVEAAWIAVKTDPALLKKHQGLCKRMDKNKAIIRIAKSLLNRARHLLKNGEMYQLSVYP

SEQ ID NO: 81291 - protein, 304 aa, unidentified
MYGIGIDVRQATLDVAVHEQAFDQFSNDKRGFVRLIQWLKQWPITQVVLEASGGYERAALEALHEAGLPMVRINPARARRFAQATGRAAKTDRLDAAVLAQMAHLLPLTRYVPPAPWQRRLAEFAQCRRHLVQMRVSEMQRLRQLTDPVLITIKQRPLAQLSEDLKQLDKAMAEQLAAQPGWKNIGMLKGAGPILVSTLACEMPGLGILGSKAIASLVGLAPMNRESGTWQGKRSITGGRAVVREALYMAALTAIRYEPKLRDFYATLKAKGKASKVALVAVMRKMLVILNARMRDAQSESIPA

SEQ ID NO: 81292 - protein, 345 aa, unidentified
MKRRTKKTLYCGIDLHSNNAMCVVTDQTDKVVFKKRLPNQLPAIVSALTPFKSKLATVAVESTYNWYWLVDGLMEQGYPVVLANPAAIDQYDGIKEANDLTDAAFLAHLARLDILPTGYIYPKEERPARDLLRRRTLLVRQRTATILSLQNMFMRQAALNLSWRKIRNLTPAQCIAMLGDNEFLLFVTESQIELIEVFNKKILQFEKKVLEQAKLKPEYELLLSIPGVGLILGLTIMLETGAIDRFKKVGDFTSYCRCVRANKQSNGKSKGSNNSKNGNPHLAWAFVEVVHHAIRTSPQAKKFYDRKKSKRNGALATKALAAKWSKGAYYVMKRQEPFDLKRLFS

SEQ ID NO: 81293 - protein, 309 aa, unidentified
MDASYVGIDVSKDRLDVHVLPSGEAFAVARDGAGLGALNERLRQLSAAVIAVEATGGFEAVVAASLASAGLPVVVINPAQVRAFAVALGQRAKTDPIDAAVIARFAAATKPPVRALPDTDTQRLADLIARRRQIIEMIVAERQREKRATAKARKSIARLLKALQKELSSLDADIDDAVRSSPAWRNKEDLLKSVPGVGGITARTLIAELPELGRLDRRQIAALAGLAPWTRQSGKWRGKSFIGGGRAAVRTAIFMATMVARKHNPALSLFHQRLITAGKPKMVALIATARKLLTILNAIIRDQKPWQTA

SEQ ID NO: 81294 - protein, 407 aa, unidentified
MTLTCGVDWAEAHHDIALVDDDGALVASARIDSGAAGFNAMLTLIAEHGGSAEDTPIAIETDKNLLVVAAAEAGFTVYPINPRAVARYRERYGQAGRKSDAGDAVVLAHILRTDRQMHRPLPALSEHARAIKALARQHQEAVWALHQTVSRLRSVLLEFYPQALHAFPNLKHKAALAVLAAAPSPEDAQRLTRRRVLSLLKQCGRRNDPAVVEQILNDLTAPALRQPARIESALAAAVAGLLNIVVSMQNAVEHLEAQLAAEFDTHPQAVILRSAPGLGPILAARILAEIGDDPTRFDDVSGLRAFAGTAPVTIASGRSHYVKARKVRNKRLGDACHWWAFATLTKSPGARAYYDKRRAAGDHHNAALRNLANKLLGRLWWCLATNQPWDERAAWPDPTDTCKQVAA

SEQ ID NO: 81295 - protein, 347 aa, unidentified
MLIICCDFHPGFQQVAIFDNRTGEIQEKRLQHRAEAEQFYRGLAGQEVLVGMEACGHYPWFEGLLQELGMELWFGDAAKVRASVVRKQKTDRRDAEHLLDLLRENRFPRIWVPSLEVRDVRQLLVHRHKQVQARTRTKNQLQAMALSHGVQKKRKLWTKAGRAELEQLPLLAYAAQRRKKLLEALDELDVEISELDRRVAEEARERPEAVRLMTHPGVGSVTALAMVLTLGPAERFGSGKQVGSYFGLIPSEESSGGKQRLGKISKQGSSFLRFLLVEAGQTAARYDPQLKRFYRRLAVRKNRSVAKVAVARKLATRLYLMLREQWTYAQLSQAVMQVSPSHSVAGE

SEQ ID NO: 81296 - protein, 294 aa, unidentified
MAEATMPKNSMLLKPVRSVVEVTGGVDTHGDTHAVAALDQVGGLLGTVIVPATGAGYRQALDWLSGFGPVGRVGVEGTGSYGAGLTRVLLDAGVGVVEVNRPNRAVRRGRGKSDPIDAEQAARAVLAGTATAPPKSRDGVVESIRLIHGVRRGAVKAKTAAINEFHAVLVTAPDRLRAALAGRSWVEQLATAAGYRPGEVSDSGQAVKCVLRRLARRIEALQAEIDEADVELAGLTAQAAPTLLAERGVGADSAAQLLITAGDNPERLGSEASFAALCGVSPIPASSGKRVGIG

SEQ ID NO: 81297 - protein, 438 aa, unidentified
MSNKVIFNLDDLFISVGIDVGADFSWMSIALPNQQFVGKPYKILHNSIDSLTTAVSKIKEAEELYSLESRIFLESTGIYHYPLFCYLRDKGFNCSVINPIITKNSTNINIRKVHNDRFDSKKAALVGLKPDLKVSLIPSDLALNCRNLCREYYDLMDNRSAYVNKLQGELRMAFPQYLGIFSKVTINTSLTLLETYASPSAFLEADKQEIIDIIRSTARFGLTYAQNKYNAIIQAATDANQFGYIIDSNIKRIRLYISFIRKYDEEINSILESLHELVDANEDADFVKQIHLIETIKGAGFLSAVSIMGEIGDFSAFSKPKQLFAYFGLDPAVKQSGKFEGTKVQMSKRGSAIARRVIHTLTLQSISISRNGEAKNPVLREYYLKKCDSKPKLVAMGAVSHKVCNMIFAILRDNKPFEIITPQEHIKQYNASKCDMAA

SEQ ID NO: 81298 - protein, 453 aa, unidentified
MAKVQKKNGITKDREFKVVNFNAAGIDISPKELQVCVPSDRDERCNRTFGVYTKDLHEISSWLGKCGIDTVVMESTGVYWLPLFRVLKDDGFEVLLVNPKEAKNYAGKKTDEADAHWLMVLHTYGLLKPCFQPENITRRIRNLSRHRDNLIRSSSREVLHLQKEMEQMNLKLDNVFSDILGKSGQAIIKAILEGERDPEKLAALADRRCKKSKAEIMESLRATWDEDHLFVMKQSNDLYEFYQKKILETEAEIERLVSQYTSEVDAGQAEELVRSNKQRQQHTELSFDIEQYAFGLWGVNVMRIPSVSKNAVMRLVAELGADFTEKFPDARHFAAWANLVPNNKISGGKLLSSKVPKRNNPVGQVFRQCANSLFKSKEPLGDYFRHIKARSGHKQAMVATGKKLAVMFYTMVKTKKEYDATIYTSHRKNQLDRKIQRLQATILRLQNESARCA

SEQ ID NO: 81299 - protein, 415 aa, unidentified
MALKIVYKICCGIDVHKTFVVACIASTNDKGVTSYESHRFSTYTSGLKTLLQWLIDRNCKDVCMESTGKYWIPVYNILEKGCSIVLAHPKYVKAIRGKKTDKKDAKWIADLFKHNLVAGSFMPPSDIRQLRDLMRYRFKLTCFKSSEKNRLQNCLTVSNIQLGNVVSDTFGKSAQAILDKILENPADTSFDLEPLVFKSLKKKLPELRDAIDGYITPEQAGKLKVIKTHYEDLESRKAELEELILALAAPYQQELAILQTSPGISSDFTAIGIISEIGTNMEAFPSAKHLCSWAGLTPTNNESAGKKKSVRVSKAGCYIKPLLVQCANAVVKSKKHPEIRNRYLRLKKRRGHKKAIIAIARMLLTALYHMLKNGENYNAELYRKSDLPPIDCEITVEQALIIARNQGYRIKSATA

SEQ ID NO: 81300 - protein, 362 aa, unidentified
MEFFCGLDVAMDETAICVVDDRGVVHLETSAVSDPVAIRDALKPYHGRLRRVGHEAGSLSPWLHPEMLKLGLPAVCLETQHVRAALSAQRNKTDRADALGIAHIMRTGWFRQAHIKSESCYRIRLLLTQRRNLKAKFLDLENTIRHSLKAFGIKLGGTSRGTFDQAVREAVAQDALTAELMDAMLTARAMLWKQYCRLHDLVVRFVAGNELCRRFMQIPGVGPVTALSFMTAIDDPSRFRRSRDVAAYFGLTSRRWQSSTSIDVQGRISKAGDPDVRRALYEAASALLTRFKRKDKVKTWGMSIAKRSCHRKACVAVARKLAVIMHAMWIDGTFYIGDPALSEQDVAARAAVKDRKLLGAYR

SEQ ID NO: 81301 - protein, 333 aa, unidentified
MGEVSTIGVDIAKSVFQIHGVDADGTVVIRKRVGRAKVLEFFAKLPRCLVGMEACATAHQWARELRKLGHDTRLMPPTYVKAYVKRGKNDAADAAAICEAVTRPSMRFVPIKSVEQQSALMLHRTRDLLIRQRTQLINALRAHLAELGLVAAKGHEGLQQLVMAVTESSDERLPGNARFACQSIVAQLHAVQTQINGLDKRVTQAHRANADSKRLEAIPGFGVILSTAVVATMTDPKAFRTGREFAAWIGLVPRQNSTGGKERLGSISKQGDRYLRRLFVLGAISIVRTARTRPDKYPWVTELLGRRPAKVVAVALANKMARVAWAVLARSET

SEQ ID NO: 81302 - protein, 464 aa, unidentified
MAASKRLWGNRKERKEWARRLQSEDPGLEVVHPHAAGIDVGNSAHYAAVRPDRDVAPVRRFECFTADLYRLADWLRSCGVKTVAMQSTGVYWIPLYEILEERGFEVYLVNARHTKNLPGRKSDVQESQWLLKLHTYGLLSNSFQPSAEIRMLRTYWRQRGTHVAGASICIQRMQKALTQMNVQLANVISDISGLTGQAIIRAIIAGERDPHKLAALCHPRIQASQDQIASSLEGNWRPELLFILEQEVEMYDTYQRRVAECDERLQKHLASFADTLSQRATTDKPKRKKAAKNAPHFDLSSELQRVTGVDLTRIDGIDVMVSQTILSEVGLDMSRWKTEAHFASWLGLCPDNRISGDKVLGKGTRRVVNRAATALRQAANTLIRSRSYLGAQYRRLRTKLGAPKAITAMAHRLARLVYRMLKYGQTYVDKGTEYYEERLRQQQIQLLRKRAAKLGLHVVMETQA

SEQ ID NO: 81303 - protein, 342 aa, unidentified
MQIAILGIDLGKNSCSVVGLDVAGRVVLRRRLRRDGVIKLAAGMPGCVMAMEACCGAHHLGRLLRDHGHQVRLMSPEYVRPYVKAQKNDDRDAEAIAEAATRPTMRFVELKSEAQLDMQSLHRARDRLVGERTALINQLRAVLLERGIVVPQGRRKLERYVDALLAEEEIRFSPRTRLLVEDLRAEWRELDRRISAFDDEFAAQARTDETARLLTSIPGIGPLNATALTAAIGNAQTFGRGRDLAAWLGLVPKQVTTGGKPKLLGISKRGNGYLRKMLIHGARAALPTLSKGETPLGAWLRGLLGRAHVNTVVVALAAKLARIAWAVIRRGEKFDMKAATAS

SEQ ID NO: 81304 - protein, 409 aa, unidentified
MERQLERCCGLDVHKATIAACVRLGGRTGKAEQHVQTFGTTVGDLLVLHDWLAAHGVTHVAMESTGVYWKPVFYALESDFTCLLVNAAHIKQVPGRKTDVKDCVWIAQLLEHGLLRGSFVPPAPIRDLRDLTRYRKALIHDRTRVANRLHKALEEAGIKLASVASDILGVSGRAMLTALVQGTTDPAVLADLARGCLRRKLPALRQALVSRFRPHHAFVLGQLLAHLDYLDEAIATLSTEIERVMTPFAEPLRRLDTIPGINQRTAEVILAEVGTDMRVFPSARHLASWAALCPGQHESAGKHKSGKTRKGNRWLRTALIEAAAGASRAKNSALQARFRRVLRHRGPKKAVVAVAHALLRMVYHVLADGTVYREAGADYYDRHHSQRITRRALQTLERQGYRVTLEPAA

SEQ ID NO: 81305 - protein, 416 aa, unidentified
MTEQWAWFVGVDWGSEEHAICVVDAAGTVRGERRVVHSAVAVADAIAWLRTLTGVAPPALAVAIETPRGVLVDTFLEQGFPVFAINPKQLDRLRDRLTPAGAKDDRRDAHVLGDGLRTDARAFRPVTPDDPQIIHLRELCRIEEELQAQHRRLANRLREQLVRIDAPWLTLSPGADDPWLWTVLRDAPDPAAWARLKRRALVAVLRQHRIRRWTADDVIAALQQPRLAGAAGVADAVALRIASLVPQLLLVHEQHTATHRRLERALEGLAEGADDKPREHRDVEILRSLPGAGRMVTATMLTEAAAAIGTRDYSMLRTQSGTAPVTKRSGKRLYTVQMRYACKPRLRNALYYWALASLTLDAAARVYYDGLRRRGATHARALRSVADRWLRILVAMLKSGRVYNPLQPRAAQAATA

SEQ ID NO: 81306 - protein, 329 aa, unidentified
MNVHQQDRDAAAASRINAGIDVSKGALDVCWGDQARRFVHDADGIKQIVASLRQAQVDLIVIEASGGYEVAVAAGLQAEGFAVAVLNPRQTRDFAKSMGVLAKTDRVDARVLRDFANVIAGHPKRHRYLRALPDEQRALLAALVMRRRQLLDMRVAEANRLALAHQSARKSVAAVLKTLDKQLMNVDADIDGCVRQQFKETLALLETVKGVGPVVKSTLLALLPELGRLSGRAIGALVGVAPMARESGRWQGKRHTCGGRHEVRTVLYMATLSAVRHNPVLKQFHQRLRAAGKPPKVALVACMRKLLVILNAMLRDQSVWNPVIAGQPA

SEQ ID NO: 81307 - protein, 472 aa, unidentified
MDHIIRIGMDTSKHVFQLHGVNAAEEPVLRRKLRRNDMVVFFERLAPTIIAIEAAGASHHWARLLRSFGHEVKLIAPQLVKPYVKRGKNDAADAEALCEAMSRPTMRFVPVKTAERQAALMLLGLRDRLVRNRTQLANAIRGYAAEFGLAAAKGIAHLAPLLARIQSDESLPGLARELFATHAQEYAQLQAQIDEVEGKLIARHKTNPGSRRLAQIPGIGPIGAAMLIMKTPAPEMFRSGRQFAAWIGLTPKDHSTAGKVRLGVITRAGDEGLRSALVVGATAVIRHLRNGKGRSMLSAWVEQLLKRKPPKLAAVALANKLARIAWKLIVTAETYAAKPRPVASGRAPGIGVQSAIVLVREAFVREFANGKALGSYAGLTPTPFSSGATEREQGIGKAGNRRLRTVMVELAWLWQRYQPGSAEAGWFRQRVGGTGRRMRKVMVVAMARRLLIALWRFATQGVVPEGAIMKPA

SEQ ID NO: 81308 - protein, 387 aa, unidentified
MAQVEDLSRSLVTFDQQSTLVVIVEMSQTRWLVAGTVPGLDRRPLKKLEPNAPTLLRLVKRWVDEATKAGRTITRIVLAYEAGRDGFWLARWLRARGIEAYVIHSTSVAVSREHRRAKTDRLDTEMLMRVFLGWLRGERRHCSMVAIPTLEEEDAKRPSRERESLVGECTRIINRMKATLARLGIRGFKPDLRQAPLRLDALRTPEGVPVPPNTCDEIRRAMARLAWIREQISAIELARVKRLEQAPAQGPDAMVRLLARVIGVGLETADMLVREVLSRNLRDRRAIARYAGLTGSPTESGSKRRERGLAKTGNARVRRGLIQLAWRFLRFQKGSAVVQWYRARTQAPEGARKTTMITALARKLLIALWRMVITGTVPEGIVLRSAA

SEQ ID NO: 81309 - protein, 350 aa, unidentified
MDGSYAGEQYVGIDLHRRRTVLVRMAADGQRLGSMERFPSAPAALRIAMAEAGTAPKVVLEATYGWYWAVETLQELGAEVHLAHPLGVKGFAYRRVKNDERDAADLADLLRMGRLPEAHIAPAPTRALRELVRHRVKLSRWRASAKTSVHAVLAKRGVVVPMSDLFGVEGTMLLDQLRLEPAYAARVSSLRDLITLLSTEITGFDFLIAQVLAGHPGYRAIQRISGVGPVFASVFVAEIGDPARFSSADKLTSWAGLTPRHRESDTTVHRGRITKQGNKLVRWAAIEAVQRSAEPAVTTHRANIAERRGRSGRNIAKVAAARVLLKLVYYGLRDGYIRALDHQTTDPLAA

SEQ ID NO: 81310 - protein, 399 aa, unidentified
MIENYDSVDVFIGVDVGKGEHHAVALDRAGKQLFDKALPNDEAKLRELIGQLKRHGQVLFVVDQPATIGALPIAVTQAEDVLVGYLPGLAMRRIADLHAGEAKTDARDAAIIAQAARSLPHALRSLQLADEQVAELSMLCGFDDDVVGQITATSNRIRGLLTQIHPALERVLGPHLDHPAVLDLLQRYPTPAAMKTAGPTRLGNRLLKLAPRMGRRLADEITRALGEQTVVVTGTNATSIVLPKLAEQLAALRRQRDEIAVEVERLVEAHPLHPVLISMPGVGIRTAARLLTEVSGKDFATAGHLAAYAGLAPVTRRSGSSIRGEHPSRRGNKILKRALFLSAFAALRDPVSRAYYDRKIAQGKRHNQALIALARRRCDVLYAMLRDGTLYQTDHQLAA

SEQ ID NO: 81311 - protein, 344 aa, unidentified
MNYCGIDLGKKSSCFHIVDGERKTVTAGKLANNTLAIRKVFGNRDRLKIVVEASCKAFWMADRLRELGHEVVVVDPGRTKAIGAARIKHDKLDARILAEFCQTGLLAAVDIPTQAQRMARLPFTSRDTLVRSRIVMTNSVQSILDGEGVELPTKWVGGFSSVIRSAIPRMPPAMVALVERLLRGIDELSKLIDECDKEIEQVAENDPDIKLLRTVPGVGPLCAAAFVHVIRDPGRFKSSRVVGAYLGLVPSLYESGQTSVKGGITKHGNCQLRSLLHICATALMRTKRDTALKRWAVGLSTRIGRKKAKSAIARKLASVLWAIWRRRRPFEARLPIPQLAAQSS

SEQ ID NO: 81312 - protein, 377 aa, unidentified
MSSILAGKVEFVVGVDTHRDSHTAAIVSAATGGVVDQLTVATDASGYRELQDFADRHAPGRRVWAIEGTGSYGSGLTTALLEHGQWVVEIDRPTRPARRDRAKSDDLDAVRAAREALGRDHLALPRARGDREALRVLTTARAGAVVAGTKAINQLKALIVNAPQPLREQLRHATSDQQLRRCARLRTQPTHSIEHRATIRAIRGTARRALALAAEAAEYETELKQLVVAICPALLERPGIGTITAAQFLISWSHPGRIRNEAAFAALAGAAPIPASSGTITRHRLNRAGDRQLNRALHTVAMTRLRIHEPTQAYTARRTAEGKTPREIRRCRETGHRPGSLPNHDPPRQGPRGGLTDRTRAGVKARAQPDRAAAAGP

SEQ ID NO: 81313 - protein, 418 aa, unidentified
MSKTLYVGIDAHAKDNVCCFLDQEGSKVINVFSVNNNLTGAKELEERIDLVMKEHMFGELKIATEAVSFLDLHIVDYLASSEILAKYSPSIYQFNPKITHGFKRAYPDKDKTDADDAFVIADRLRFGRLPEPYEDSQPYFPLKRLTRYRYHLVRTIGREKNYFLTHLFLKYSSFNDIKPFSNVFGKAGIATITEFFSSDELASISIEELTEFLIQEGKNRFKDVKAVAEKVKQVARESYRIRPTLVNSVNLILASTIENIRALTSALKEVDEAIANEFKAFPNTLESVKGLGPVYSAGIFAEIGNIQRFSSQAKLAKFAGLTWRKTSSGNFEAEETHMTKTGNQYLRYYLIEAANSLKVHNEEYRLYYQSKYKEVSKHQHKRALVLTARKLVRLVFALLTKNQLYQEKTEFSKSEINF

SEQ ID NO: 81314 - protein, 428 aa, unidentified
MRDVIRYDLFCQFRKTIRGSTEHLLVGIDIAKDKHHAFFGTATGKTLWRRLLFTNDLYGYQRLIEQVDLLMKQHQLKKIAFGLEPTGNYHKPLAHWLITKGHMVVLVSGKAVSDNRQLLDGRWDKNDSKDSANVADLISQGKCQFYEQPDEQIVTVRNLLSVRKRLKKQEHSLRMQMRNGLLAKYFPEMDRYWRQSIEENLAILRWYLDPHKIAATDFKQFVLDVTSTSRGGRQLQRLQSIYDAAKHSVGLPVDCSATFEAKLLVENFNSVREQIAHTMKQISERCRSLYGYKLLQTIPGFGPYIAALVLAAVGNPHRFSSHGKVLRLAGLDLNAKRSGKTSDAGVPKISKKGDADLRYGLYQAALIASFHNKHFARLYSRILENRYAERGIKTKARVKLAAKMMTIAWAMLKNNEPFNPNALVSRVR

SEQ ID NO: 81315 - protein, 483 aa, unidentified
MKSKPEEQNKRATNHPTQHHWHEMNRKQRREMTRKIQTEDLSLEVIHPDAGGIDIGNESHYVAVPPGRDSQSVRRFGCTTAELKAMAAWLKQCRIRTVAMQSTGVYWVAVYDILEQGGLEVYLVNARDTKNLPGRKSDVQESQWLMKLHTYGLLRNSFRPSQEIRTMRTYWRQRNDLVQSAGRHIQRMQKALTQMNIQLANVLSDISGATGQAIIKAILGGERNPHKLAEFRDPRVEASEEQIAQSLEGNWQEDLLFVLKQEHKGYEFCQKQMAECDRQLEQYLQQREDRSHGAPLPEERRKGRLKKKKGNAPQFDLREGLFRMTGTDLTRIDGIDVMTAMTILSEAGWDMSKWPDEDHFVSWLRLCPDNRISGDRVIGKGRLPTNNPINIALKMAASTLRQSKTYLGAQFRRLRSKLDALIAIKAMAAKLARLVYRMLRYGMKYVDQGAVVYEIQHRQRQIQHLKFNAAKLGYQVSPIPAAA

SEQ ID NO: 81316 - protein, 341 aa, unidentified
MKYKTITIDLAKNVFQVCGVNEHIKPQFNKKLKRTELLDFMRQQLPTVVVMEACYSSHYWGREIAKLGHDTKLIPAQHVTPFVRGNKNDHNDAFAIAEASQRANIRFVPVKSEHQQEISCLHRIRERLVKNKTAMSNQARGLLSEFGVVFPCGHKALLNGLNSVIDNPQYSHRLQDMVIDMLSEYDTTIERLKSIKNQLDEFVDESESGKILRSIPGIGVINASALLAAIDKGQAFNNPKEFAVWLGLTPKQHASGNISKMGGITKRGDRYLRKQLIHGARAFVCRAAKSTDPLALWATKLRLTKPFNKVAVAVAHRLARLIWILLTRQEYYRATPVSMSA

SEQ ID NO: 81317 - protein, 322 aa, unidentified
MSQPGSLCVDIDVSKAILDIAASSAIEQFSVGNDSDGFDAIIAELRMYAIALVLMKATGGLETAIVCALQAEGFELAVVNPRQARDFARAMGYLAKTDSIDARVLSQMAEVLNRHPERERFIRALPDTECQVLTAMVVRRRQLITMLVAERNRLHPAHPLNRKSINIIIKALEDELARLDADMNSHIHSHFKELAKRLSSIKGVGTMTAAALLAEVPEQGNLSRREISVLVGMVPVNRDSGTMRGRRTIFGGRAGVRTALYMTALVATRFNPVIKVFYMRLLAAGKPKKVALVTCIRKLLTILNAMLRKNEEWNESYHHVAP

SEQ ID NO: 81318 - protein, 421 aa, unidentified
MNMTSKSAQFAALIGIDWASQRHALCLYDCATAKRESSILEHTPEAIAQWARGLQERFKGKKIALCLEQSKGPLIYALLEYPFFVLYPINPATAARYRMAFKTSRAKDDPSDAQVCLELVLHHREKLNPWLPNDAPTRELSCLLQHRRAAVDLRTLLTNMLRDALKSYYPQALELAGQDLFAPLSCQFLLKWPSLQELQKARKESVRKFYYAHNCRRMDVIEKRLDAIAQMTPLCRDRALLEPAMVQVRMLARQLLQLGGALKEYHSKIEQLFAQHSDALIWESFPGAGPTLAPRLACAFGTQRSRYQSAVAIQQYSGTAPVTEKSGKNQHWVHRRWARPHFTHQSFFEYASQSVLHCSWAKLYLKEQMARGKAYPTAIRALAFKWQRIMFVCWRDRVPYDETIYRQSLQRRGSHLARKLN

SEQ ID NO: 81319 - protein, 366 aa, unidentified
MKKLSTVAIDIIEIFKGHQLTMGLDLGDRTSHYCILNEAGEVILEQKLPTTPEAMKQTFKKIPRSLIALETGTHSPWVSRLLRELGHQVLVAHAQKVQLITKSNRKDDRHDARTLARLARIDPELLGPVRHRSAKAQIHLMVIRARAELVSARTALVNAARGLAKSYGERLRKCGTQQVNRELAGELSTELRDVLEPLLKEVESLNERIQEYDERMEKIARESYPQVELLKQVKGVGTQIALTYVLTLEDPHRFPKSREVGCFLGLRPGRRDSGESQPQRHISKEGDRYLRTMLVQGAHYILGPFGEDSDLRRWGLKLAARGGKNAKKRAVVAVARKLAVLLHRLWVNGEVYEPLHNSHKEMRAVA

SEQ ID NO: 81320 - protein, 386 aa, unidentified
MQDHEPEGQTAIRTDLGAIFVSLELSRSSWLITSLSPGGGEKMSKHSVPSGDISGLSLLFLRFRERARKRTGKDFPIIVIQEAGLDGFWVHRVLEQEGIESHVVDAASVMTSRRRRRAKTDRIDGEALLRALMAYKRGEPRVCAMVRVPTAEEEDRRRISRERKILTAERVAHVNRIKGLLFSQGIAYEPLHGNRRARLEQLRTGDGRALPEHMKRQISRELDRLELLLEQIKAVEAERNTMLAVSEGEKIPTPAKMLMQLRGIGSESAMVLWSEGLFRHFDNRRQVAAYAGLAPTPWQSGTIDREQGIGKSGNHRLRTTMIQLAWLWLRHQPDSALTRWFHERVARSGGRFRKTMITALARKLLVALWKYATAGVVIEQATMKTA

SEQ ID NO: 81321 - protein, 354 aa, unidentified
MQRTTQYVALDVHQATTVAAVRAASGRVIARAVLPTEEPAIVEFFRGMRGAVHVAVEEGTQAQWLHDVLVPLVDQVVVCDRRGEPQQGNKADQVDAEQLAERLRQGSLRAVYHGSPHRAVLKELTRSYTNLVEDSTRVMLRLKALFRARGIRAPGKRVYHPRERAPWLARLPDTGARSRAAVLYAELDVLRALRPKAKAAMLTEARRDPAWAVLQTIPFYGPVRVALVLATMRTPWRFRTKRNLWAYAGLAVVTKTSAEYVWVSGRPVRRRRAPLTRGLNRNHNRVLKDVFKGAATAATTRPGPLQDWYHGVLARGVREELARVTLARKLAALTLRVWKDGEPFDPTKLTTQAR

SEQ ID NO: 81322 - protein, 403 aa, unidentified
MNAVGIDVSKGKSMVTILRPFGEIVSSPFEIKHTSSDIHSLIKLIHSIEGESRVVMEHTGRYYEALAHQLSAADLFVSAVNPKLVKDFNNDSLRKIKSDKADSVKIARYALDKWQSLEPYSITDELRAQLKVMNRQFHFYVKQKTAMKNNLIGLIDQTYPNANTYFNSPTRSDGSQKWVDFVSTYWHVDCIRKMSLNAFVEHYQNWCKRKKYAFNKSKAEEIYTKTKELVPVFPKNEITKHIIRQAIDQLNSTSVTVETIRTLMNETASKLPEYSIVMQFKGIGPSLGPQLMAEIGDVTRFTHKGALTAFAGIDPGVNESGSYAQKSVPTSKRGSSNLRKTLFQVMDVLIKTMPQDDPVYQFMDRKRTQGKPYYVYMTAGANKFLRIYYGRVKEYLSVLPDPS

SEQ ID NO: 81323 - protein, 390 aa, unidentified
MFYLGIDIGKFHHATALLTHEGKVVATLSSFPNTHDGFQELLTLITCHLPAGEELRIGMEATGPYWIPLAEWLKTKGCPPVVLNPIKTSSLRNYGVRGSKTDNIDSVLIANALRFEGSQPQKASPKHSEELRHLTRLRADMVKDRTRLVLRVTSQLDRLFPELLCSFSKTISPSCLALLAEAPTPDRVLALGEEKLTALLRKASGGKLGVARAKEILGKAASSIGVSSPALEEALALLLERIMLLDRQLRTLDRRIADLYDQVGLFFTTIGGVGILTAATILGEFGSVDRFTKATQMVAFAGVDPKLRNSGQHQGQVHISKRGSPYLRRALYLACQGAVRNDGHFKSIFQRHRDNGKSYKEAIVAVMNRFIHVLYAIWRDNRPYSPLTPA

SEQ ID NO: 81324 - protein, 336 aa, unidentified
MYVGLDVHRDTSFCVILDQDGEIVAERNLNNNPFEFADFFDSFNGPMEAAMEATTDAYFVQVMLDDLGIPVRLANPRKLRLIAESNSMTDRDAAFVLAFVLRMGGLPEAYLAPAEVMQLREITRGRKSLVTSRTRYKNKVSAMLRRHGCACPVKDKFTKAGREWLAGLQLPMLSAMMLRIYLTVIDMLSGFIAECDAKLCEISDHDERIQRLQQIPGIAEVFGPMIVAEIGEIERFWSKTKFVAYCGLAPTVHQSAKTTHRGSLRKDCNHWLRFAFIEAAQSCGRTPGPYRDYYQRKLEERDSKVAKVATARKLCRLVFAMLRSGEDYRADHNQAA

SEQ ID NO: 81325 - protein, 354 aa, unidentified
MNTTQNSTKSKIVKVIGVDLAKDHCDVIGYDENGKICLRLDGCSYAKLREILANLPQAVVLMEACKGSMFHARSIADLGHEVRLVKGTDVKALRNVNHKNDLRDAAYIAKLYFVPGTTYVYIKSQQQQSLQFLQNEYKSLQELRIQVGNQIHAGLEEFGCPVRKSSKFIKTRMVAHLEKHAELIPEDVMASFKRRREIWLNLLQQEEEAKRRLEQVAATDANAKRIMTVPCVGPQTAVGLLVHVGVDFGRFKNSRQFAASLGLVPKQNSTGGNNTLNHITKCGPKRLRSNLVQCAQLVLMYAEKWKGNFGDWVRKMRDSGKKHGVIVCAIAAKLARIIYRLMKDKVDYTPVLSC

SEQ ID NO: 81326 - protein, 434 aa, unidentified
MLHPHAAGIDVGNSAHYVAVRPDRDSQPVRRFECFTAELHRLADWLQSCGVKTVALQSTGVYWIPLYDILEERGFEVYLVNAQHTKNLPGRKSDVQESQWLLKLHTYGLLNNSFQPPAKIRTLRTYWRQRLQHVTGAATCVQRMQKALTQMNIQLANVISDLSGVTGQLIMRAIISGERDSWRLAELSHPRIQASRAEIAKSLEGTWRPELIFVLQQELEMYDTYQRRIAECDQQLQKHLAAFAGTITPPAKEELPPKKKKKQNKNNPHFHLADELQRISGVDLTRIDGVDVFVAQTVISEVGLDMGRWKTEAHFASWLGLCPDNRISGDKVLARGTRHVLNRAATALRLGASTLLKSQTYLGAQYRRLRSKLGAPKAITAMAHRLARLVYRMLKYGHQYVDKGAEYYERRNRQQQVEFLRKKAARLGLQIIPA

SEQ ID NO: 81327 - protein, 374 aa, unidentified
MLYLGIDQHARQITISLRDEQGEVLQARQVSTQPEKVRAFFQQLTRERQPAGGSFVAVLEVCGFNDWLIRMLHEYRCHRVILIQPEERKLRKTDRRDATALSELLWVNRDRLLQGKPVRGLRQVDIARDADQEDRRLTTLRKDAGQARTRLVNRVRHILRRHNLQWEMPTKKFPSKSGLAWLKQLALPAIDRLEMNHLLADLEQVQGRRKELEQVIAQRCGVSAEAVLLSSMPGVSYFTAVALACRVGRVGRFPRAASLANYWGLTPGCRNSGEHSQRLGSITKAGSSMARWLLAQVTIKVLRRGARLREWFKRLKRRRGASIARVAVMRKLATVIWHMLSKRMTYAECRAAGEAGTKVAEKRGRATGKEAEGI

SEQ ID NO: 81328 - protein, 367 aa, unidentified
MMGWMAPLRHLSAKLLSVRISSEWELSMGEVTTIGLDLAKHVFQVHGVDADGATVLRKQLRRGQVLAFFGRLPSCLVGLEACATAHYWARELGALGHKVRLMPAQYVKAYVKRNKNDAADAAAICEAVRRPTMRFVPTKTADQQAAVLLHRGRERLVRQRTALVNALRAHLAEFGVIAPQGLRNVGKLIAIVRDEDDARLPDLARQVLQVLATQIEQLETAVAAIEKQLMAWHKSNPVSQRLATIPGIGPIIATAIAATVVEPTAFRSGREFAAWLGLVPRQNSTGGKTRLGRISKRGNQYLRRLMINGASANLLRSKATNADPWVIGLRRRRPSLVVAVALANKTARIAWAVMHRHENYQRMAAAA

SEQ ID NO: 81329 - protein, 374 aa, unidentified
MNERAIGWDIHRKFSMVSVREITPEGEVVVVERRRLEHADRAAMHSFLSTQHPQTPVAMEGAFGWPWIADLVEACGLDPHLGHPPALRVLAKHQAKSDRRDADRLGEFYLLGIFPESYLAPPEVRQLRERIRHRMALSHLRQILKNRMHALLHRLGILHDFSDVFGVEGRQFLDALELPAASRAVLSSDCRLLDAVTEHMQEIEQWMTQNLEEDETVRLLQSIPGIGLILAHVLKAEIGEIERFPSRRHLCGYVGLAPISDDSADRHGPRHCSVACNHTLRWALIEAAGVVVNRVRHKAPRLFKLYLRLSHGGQSDKNSAKVAVARELAEIVHLVWKKQQPYSADPPPRSGSVPVTRYRRKQGNNKRSRSRCAG

SEQ ID NO: 81330 - protein, 315 aa, unidentified
MTTNGVAGIDVSKARLDVFVLPQRAAMGFANAAQGIGALRRRLQRCGVTRVALEATGGLEYPVARALADAGMAVARIQPGRMRAFRTYLGRRAKTDALDAELIARFAQEMTDGDIRPLPSQQAEAIRSLSARRRQLVDLLVQEKTRLKMTRDPFVLQSLQGVIASLKAERVRIERALASAIEQDEAIARKVALLRSIPGFGSVVATVLTTDLPELGTLNRHQVASIAGLAPHPNRSGTSQRGDHISGGRACVRTALYMAAVAAIRCNHTFKAFYRRLIEEGKPRKVAIVAVARKLIVLANAILKSGQPWNPLSAS

SEQ ID NO: 81331 - protein, 340 aa, unidentified
MALYGGFDLHSSNNYLAIIDENDKRILKKKLDNDPDLIISTLKPYQNELKGVVVESTFNWYWLIDILMDNDFKTHLANPSAVKKYEGLKHSDDNDDAYWLAHLLRLNILPEGYIYPKKQRPIRDLLRKRGHLVQLRTSLILSLQNIIQRNCGTKLGANIIKQTKEDNPLFEMLNSDDSLSLSGVISKESIDHLSNQIRQIEKKVENSMELHSSFSKLQSIPGVGKTLALTIMLETGTIERFNKVGNFASYCRKVPTKWTSNDKTKGSGNQKNGNKYLAWAFSEAAEFIKKFDPAAKSYYQRKMSKGNKMIAHSAVAHKLSRAAFYIMRDDVAYDSQKLFG

SEQ ID NO: 81332 - protein, 381 aa, unidentified
MNAIADVQVSVPPVAANAGNVIGVDLAKNVFQLCIADSAWRVLETRRLTRRQFESFFLDRAVALVVMEACGSAHHWARWLNRLGIEVSMLPPAYVRAYVRRNKTDAADAAALLQAARDSDIKPVRVKSVEQQALQGLHRTRSLWKANRTQRINTLRGFCREFGIVIAQGSRLGVEQIGRVLAEPHSAVPELLRPTAHLLVEEIRLLEARMAQLERELSSLVRHSAACTTLLSIPGIGLLTSTAMVAATSGDVAHFKDARHFASWFGLTPREHSSGNSRRLGRISKQGDTYLRMLLIHGARSVLRAAAVATAQGKQLDGLKAWALDVQRRTNHNKAACALANKLARIAYACLRDHAPFGQPIRINKKIDRQSFSSPDGIQAV

SEQ ID NO: 81333 - protein, 337 aa, unidentified
MSYLGVDLHTNSFTVCYRTCQGKQRIRTFQTRRIGQFRQSLRKADKVAVEATGNTAWFVEQICDRVSKVVVVDPHQFEVIRRSVKKTDKHDARTLAYFLSKDMLPEARMKSKANAQLHSLSGTRDKLVKQRTALVNKIYNVLNRHGLTWKKETLTTEKGLKSIMAFDWEPIVRIELEVLTEQIRSLTRSIKRLDDRISQEGKKLNGHKNLTSIKGIGERSATVLLSIIGDVNDFADENKLAAYFGIVPRVSDSNEKVYHGRITKNGSKLGRTTLVQCTLVAKRYNPYLGGYYERIKSHRGSGKAIIATARKLLGIIYQTLKNDWIFEDFPNFVIANT

SEQ ID NO: 81334 - protein, 413 aa, unidentified
MKDIMAGIDLHSNNLMLALVDRKGQRLFHKKVDCDLNGVEQALSPYRKRIDTIAVESTFNWYWLVDGLQDCGYKTVLANPAGIQQYEGIKHTDDKHDAYWIAEMLRLKILPTGYICERTLRPVRDLLRRRMGLVQKRTALILSLKSLHQRMHGTSLSLGEIKRMEVDEVWRLFHSPSDQLLSREELRLIQELDVSIQRIEEHVLKRTRKLPEYECLLSIPGIGQILGMTIALETGDAARFPSAGDFASYCRTVRSERTSNHKKKGENNSKCGNKYLAWAFVEAANFAQHYDVQAQAFYQRKKAQTNTMVATKALACKLAKAAWHIMTKKTSYDGKRVFGAGSDAATKAEGCTAGVRKVSFPQGTEVERGGKKQAGGNAASPVENSQLSGQTALGLRSRRVLSSAGKRKVKVAA

SEQ ID NO: 81335 - protein, 392 aa, unidentified
MEVQDETGRRLAKARLPEGISGIARLHALVGRFLPEDGDAAGVKIGIETDRGPWVGALVASGYQVYAVNPLQSARARQGNGVSGAKSDAGDAHVLADLVRTGCHQLRTVAGDSEQAGAVKVLTRMHQTLIWDRTRQVLRLRSSLREFFPAALEAYENLASPDALELLTKAPEPSRAAALTRAQITAALKRAGRRDRDAKATAIMAALRSEHLTQPPLITAAYGATVRALAAMITTSNEQITAMEGPVEACFGQHLDAEIYLSQPGLGPILGARVLAEFGDDPNRYEGARARKNYAGTSPITRASGKKKVVLARYVRNKHLADALHQQAFCSLKRSPGARAYYDALRDRDISYNAALRQLGNRLVGILHGCLKTHTLYDEAVAWNEPAQQVAA

SEQ ID NO: 81336 - protein, 452 aa, unidentified
MSRRRKTKVQKVRPTINPFAAAADIGSREIYVAVPVELTDTPVRRFLTFTEDLKQLVAWLVSLKITTVALESTSVYWIPLAELLEEAKIEVCVVNPSHVQGIAGRKSDVMDCQWLQYLHSVGLLRGAFRPPAQVRSIRVLWRQRANLVRQTGTHVLHMHKALDQMNLQVHHVLADITGVTGTAIIEAILAGKRDPKELASCRDKRVKASEQTLAAALTGDYRSEHLFCLKQAHAAYNFIVGQIREIDELLATEMAKLDPTPTSFEPTTPMPERSKVSTKHPPDYPAHSILAALCGVDLLSIPSIHVLTAHTLWAELGSDLSAFPTSKHFCSWLSLCPDNRTSAGKCLSTKTRPSANRVAHALRLAAQSCHHAKHEFGDYYRRMRAKLGAAAGLVATAHKIARVVYAVLTTRRPYDSSLHEYAIAQTKQRRLSKLHSVAKNLGFQLVPLQAQN

SEQ ID NO: 81337 - protein, 392 aa, unidentified
MSQHCHFDASRSLTTLEQDSTIIAVIEMSQTKWLVAALIPGVERQPLKKFDAHEETLLKLLHRWRREAGQAGRNIKRIVVAFEAGRDGFWLARWLRARDIEVYVIHPTSIAVSREHRRAKTDRLDTELLMRVFLGWLRGERRHCSMVAIPTIEEEDARRPNRERQTLVTEQTRIINQMKAIFARFGIRTLRPTMRKVAEKLEDLRTAEGTPLPQNTLAELRRHLARLRIVRDQIRAVEQERLRKLAVAPAAEKKSPHAMVRLIARVLGVGVETADMLVNEIFSRHWRDRKAVARYAGLTGSPDESGSRRRERGLARAGNVRVRSGMIQLAWRFVRFQKNSALAQWFAARTADGRASTRKTMIVALARKLLIALWRLVTRGEVPQGVALRPAS

SEQ ID NO: 81338 - protein, 476 aa, unidentified
MKVTYQTCCGVDVHKSFLVATIVKTTGGIEPSYQKKRFSTFNNSILEFKQWLLDNHCHDVCMESTGKYWVPVFNLLEDKINVVIANPKWVKAVKGNKDDTKDSKWIGDLFRLGLVKGSYIPCKKVRILREYTRYRYKLVSCRSSEKNRYQNALTVCNVALDSIVSDIFGKSSTSIIDYLLEQSGTSINHEEIASKLLRSLKSKEDAVIESVEGYQMTDAQKYRMRLVRAHMDYITAEINDVDIMIENMISSNPDFENAVQFLCTIPGVKRDSAITIISETGTDMSQFSSSKRLCCWAGLTPGSNESAGKKKSVRITRAGVYLKPALVQCAHAAVKSDKSPYYKKKYESLVKRRGKKRAIIAIARMILTAIYQMLSTGEQWNPSDLYKIDMPVALVEKQKAKAIKQAKKLLQREGLLPPDEPISFLIQFFNSITLQKVACLRQLIQVRQFMAFLYFLSHYILWDFSEIPMVKSQGIL

SEQ ID NO: 81339 - protein, 427 aa, unidentified
MRVLYDRVAAIDVHKDMIKVAVRVPGKKRGSRTTDVLEFRTFYGVLQAMARELRRRGVTHVVMEASGVYTEPVYYALTELDFTEVLVINPAHAKALRGHKTDARDAVRMLDLYECGALLRGSYIPSPDLKEVRDLVRYRVKTVQARTSEIQRLQKTLESAGIKLDSVVSDITGMSSTAMIEALIDGERRGEVLADLALGRMRAAGKLADLSMALTGRFTDHHALMCRLHRDRIGMFDDAVGGLDAKISPLVARYAREAELLKTLPGFGEVVAAGWLGAIGPAPHQHFGTAERLASWVTLCPGNYISARKSRSGRTGDGGNYIKPLLVQAAWAAIRTPGRLQARFHRLVRKFGGPKNKGARKRAIIAIAHTLLKIAYAVLKSGKPYQEPGADFYTRRESAQAREEYLLRQLQKLNPGCVITITPAEAA

SEQ ID NO: 81340 - protein, 374 aa, unidentified
MNKFSRYVGLDTHKATIAVAVAGARGGKPCYYGEIANTPDEVRKLVKKLCPDGELLSFCYEAGPCGYEIYRQISQLGHLCSVVAPSLIPSKPGDRVKTDRRDSEKLCRLDRAGELTPVWVPDQEQEAMRDLTRAREDMKGLERVTKQRLNAFLLRYARIYETGKSRWTQTHFRWLEGLKFDIAVQQIVFQEYADAVKQAEARVVGLEKEMQRALENWILAPVVEALMALRGVKLITAMTIMAELGDITRFDSPRQLMSFLGLVPSETSSGATRRRGGITKTGNGHVRRVLIESAWSYRFPARKTAHLQRQAEQCSSEVQTIAWKAQKRLCGRYTHLLKRGKLKVQVCPAIARELVGFIWAIACEVMNKHVVSAR

SEQ ID NO: 81341 - protein, 341 aa, unidentified
MKPEMNVLGIDIAKHVFHAVGMDDRGNVVSRKRLSRHDLMPFLAKLPPVRIGIEACGGAHYWARRFREHGHEVKLMAPQFVKPYVKSNKNDSRDAEAIAEAVTRPTMRFVPIKDVDQQDIQALHRVRERLIGERTALVNEVHGLLHEYGMVMPKGVAKFRQAVVGKLEAEKDKLTPLSQEMFWKLVEEFAALEAQLAYYQEKLEALAQTHPECQRLMTIPGIGPLTATALVAAVSDASAFKNGRQFAAWLGLVPRQYSTGGKERLLGISKRGDSYLRKLLIHGARATIRWVGRKTDRRSQWIRQLVERRGTNRTAVAVANKNARIVWALLTSHQAYELAKG

SEQ ID NO: 81342 - protein, 388 aa, unidentified
MFHVGIDISKFKHDCFIATNADDKIGSFTFNNDHDGFQTLKVELESLGDANQIKIGFESTGHYGINLKSFLSKLGYTYLEFNPQLTSKFSKATSLRKAKTDKIDAKLIASMLSHFDYKSLHTSFYHENDLKELVRLRDNYLESRSKELVNLTNALDKVFPEFKPFFDGKFGKTQFYILKRYKTKEKIANLNNSHYETLRKMSRGRFTYARFSNLRHLAKTSIGVSSSIYESIIPMIIDNYNHFNELIDQLDEQITNLYNESESFIHTIPGIGIVTAASIYAEIGNINRFTNSAQLIAYSGLDVSVSQSGIKEHRGRIVRRGSPLIRKKLFNYAFNTLRFIPQFHDYYHKKKSLGKHHKVVLIHICRKLLRIIFHIESTKTSFDINKVK

SEQ ID NO: 81343 - protein, 363 aa, unidentified
MIYSLGVDISKDDFSACLQSYRLESQSHQVISRKTFKNKPSGFKACLSWLARHTRKNPAPVRMTMEATGVYYEPLALFVREHHEHIHLSVVLPSQSKRYIESRGLRSKTDKIDAYGLALMGAERKLDAWKGLDPFWRTLRVYTRTRADLLEQRTQLRNQLHALDHSGMEILEAEQALRECIQTINVQIDELTKLIEQQLRSRNDLRTQIACLRSIPGIGMLSIACILAETNGFAEFHKVSQLISFSGYDVKIKESGKWAGKPKISKQGSKHIRRAMYMPATAITRRNSGAIYEFYQRLLATHNIKMKAHVAVQKKLLTYMYILWNRKEYFDPDIIRKQRKEHQKRVAPLESEATVDTPLVLSQ

SEQ ID NO: 81344 - protein, 419 aa, unidentified
MKIVHPICCGVDVHKKMIVATIATTDKSGVTHYTVETFSTLNHGLFSFRTWLTDHNCFDVCMESTGKYWIPVFNILEQGGIRVLLTHPMYVRAIKGKKTDKKDSKWIADLFKHDLVRSSFIPRQEIRALRELGRYRYKLVCMRSSERNRYQDCMTISNIGLASVLTDPFGKTATDIMKHVLSSEVFDVNHCEKLIYKSAKKKTELILESIRDCRIESDQRFKMNEVNSHMEYLDHSILRTEAELYTRMTPFMHIVEHLANQLPGISKLSASLIIAEIGDDMSIFESAKHLVSWAGLAPTNNQSAGKKKSVRISKAGQFLKPLLVQCALAAVKSKKEPYFAVKYQRIKKRRGHKKAIIAIARMMLTCIYHLIETGESFNPSDYEQTHKPTPRKQVLTDETAIAFLAAQGYDVSSLEKLSA

SEQ ID NO: 81345 - protein, 353 aa, unidentified
MKLDKYMGMDVHQATTVVVVLDANGKVALETIVTTDAAPIIRLMQSLNGPLHVTFEETTQAGWLYDVIRAYAHEVVVCDPRRNRLLSEGSKADKPDARKLAELLRAGLLRSVYHGHEATRRLKELVRAYETLSTDTMRTMFRIKALYRGRGIRTPGSGVYQLKQREQWLHRLMEPGLRQRVEWLYEELDHLRSLRKRAKLAMLTESREHRAFTLLRTIPQLGPIRCALIVATLDTPHRFRTKHQLWAYSGLAVVTHTSSEYEIKAGRVVRSRKPISTRGLNRNGNRRLKDVFVAAAAGGTQAEPYRTYLRGLEQKGMRAEMARLTLARKIAAITLSIWKKGDTFDPKRLNWTT

SEQ ID NO: 81346 - protein, 501 aa, unidentified
MKTKRSKAKIQAERKSRAVPYSEPAQELQVLRPDAGGIDCGAQEHYVAVPPDRVKAGQPTVRSFSAFTEGLDAAVEWLKACRVSTVAMESTGVYWIPLYQKLEAAGIEVYLVNAGHVRHVPGRKSDVQDPQWLRQLHRCGLLNASFRPEGIICQLRSLNRHRDNLVKSSASEIQHMQKALQQMNLHLHHVVSDITGLTGLRIIDAILAGQRDPEQLVKLRDKRVHKSTPQQMQAALVGDYRAEHLFVLNQSLQAYRFYQARIEECDRETEPLLEKLAQQVEAASARLKLDALKAADAQHGVRLPESPHESKASASSLKAKRHRKPRANEPKMELAGLLERICGVDLTRVVGLNVLSVLLIVSEIGVDMSKWRSAKAFCSWLGLCPGNKISGGKVLDSRTRQVVNRVANALRMAAQSAGRTETCLGIFYRRKQAHLGAPKATTATARKLACLVYHLLKYKQPYQEPDLALYQLRLQKAALTKLQRQATALGYTLLATAPAAA

SEQ ID NO: 81347 - protein, 368 aa, unidentified
MLYLGIDQHARQITISLRDESGDVVQARQVSTQPDKVHAFFQQLTRERLHDGESFVAVLEVCGFNDWLIRMLHEYRCHKVILIQPDERKKCKTDRRDAAALSELLWVNRDRLLQGKPVHGLRQVDIARSTDQENRRLTTLRKDAGQARTRLVNKVRHILRRHNLQWQMPTKKFPTKSGIAWLKQVALPEIDRLEMNHLLADLEQVQGRRQELEQVIARRCGVSAEAVLLSSMPGVSYFTAVALACRVGRVERFPRAHSLANYWGLTPGCRNSGESNQRLGSITKAGSSMARWLLAEVTIKVLRRDARLREWFKRLKRRRGASIARVAVMRKLATVIWHMLSRRMTYAACRAVGEAGTKTREQQECVRE

SEQ ID NO: 81348 - protein, 346 aa, unidentified
MEHYVGLDVSLKLTAICIVDRTGKIEREGVVASDPETIVAFIKSHAPHVARVGLETGATSTWLWTELNKMGLPAICIDARHAKAALKLQINKSDRNDAVGIARIMQCGWYKEVRVKELDSHATKALLVSRALLVKIKRDIENQIRGLLKNLGLVIGQAKMNVFAVRAAELADNRPSLAAAIEPLLKAREAVERQIADLDRKVLRLARNNAQVRRFMTAPGVGPITALCFLATIDDPTRFKRSRSVGAYAGLTTRRYASGETDWTGRISKCGDKMLRSYLYEAANVLLTRVARWSALKAWGVRLAKRSGLRKAKVAVARKLAVILHRMWTEGTEFKWSSKEATRQPA

SEQ ID NO: 81349 - protein, 404 aa, unidentified
MIFVGIDWSERHHDVCVLDAEGTVLAKGRVPEGIEGVAKLHETLAEHAEQPQEVIVGIETDRGLLVGALVAAGYQVFAINPLSVDRYRDRHSTSGAKSDPGDAKVLADTVRTDRHNHRPVAGDSELASSIKLLARTHQSFIWERQRHVNRLRSALREFYPQALQALGTELASRDAIAVLLIAPTPELGRRLSRSKIAAALRRAGRQRNVRPRAAQIQRALRSDQLGVSASLEETYGVIASSLVGLIAGLNDQIAGLEQGLHRAFEQHPDAEIILSLPGLGSTLGARVLGEFGDDRTRYADARARRNYAGTSPITKASGTHRVVLARFARNERLYDACHMWAFASLTASPGSRRCYDAQRERGKTHNQALRALGNRLVGILHGCLKRGELYREDIAWRVREAEAA

SEQ ID NO: 81350 - protein, 410 aa, unidentified
MEVLVDRVAGLDVHKKTVTACVRVPGGGGERVEHKLTFPTFRADLEGLRDWLAELEVTLVVMEATGVFWKPVWMVLEDVEGFELKLVNARHVKQVPGRKTDVGDAAWLARLAECGLLRGSFIPSREIRELRDLTRYKKRLIQDRTREGQRVEKVLEDTGIKMQAVASKTLGVSGRAMLDAIIDGERDPEVLADLAKGRLRERIDDLVRALQGELRDHHIDMLRFHLGHIDYLTAAIAELDTRIEEVTAPFAAARDRLVSIPGIGSQVAETVLAECGADMSVFPTAAHLASWAGLCPGNDESGGKHRSGKTRPGNLWLCDALTQAAWSAARTDTFMAARFRRLSRRLGKKKAIVAVAHTILIAIWHVLHNDEDYHDLGAGWYDAWDPKARTRSLIRQLEALGNKVTIEPAA

SEQ ID NO: 81351 - protein, 408 aa, unidentified
MKKLSSEPPAQPIVAFVGIDWADQKHDIVWSAATSAAATEHQVVANRPEALSQWVTEMRQRFGPHGRIAIFLEQSRGALIHHLMNYEGLVLYPINPLQMAHYRKAIKVSGDKYDRLDATLLCQFGRLHLDGLKPWQPDDALTRKLALLNEDRRQAIEKRSALANELKSALKIYYPLALELLDNDTSTLLAADLVLHWPTLEVLQKQSQSKLRRFFYAHNCRREQKMLQRLELIQQAQPMIRDSAIIEAAALKVQLLAQQLNILLPYIALYEKQIAQLFDSHPDGFLFSDLPGAGPALGPRLLTAFGSNRDRFGSSTEAATTFGIAPIRDSSGKRTPKQPGTVCYRHACPKFLRQSWHEFAACSIRSCPWADAYYDAQRAKGKSHHTAVRALAFKWIRIAYACWKNRTP

SEQ ID NO: 81352 - protein, 253 aa, unidentified
MNTKVLGIDVGKRELYYSDITGNVQGKVANDGRGFKKIKRIISENNIELVVLEASGGYEQKVLLDLAGNKIKVAIVEPTRVRNHARAAGQLAKTDRIDAKVIAHFGFCHQPRRFVLQSERKRQLRQLGKRRRQLIRNRVQEKCRLEKSSDGFSTSSINRMIGFFDEELERIDALMDSLIESDRELLHRSELLESCPSLGRGTARVILAECPELGSMNRKQIASLAGLAPMNRDSGDYQGSRYIQRGRKHLRNA

SEQ ID NO: 81353 - protein, 323 aa, unidentified
MQGQKSPERSAQPGVYVGVDVCKDWLDVYLHPIGQQVRVANTPEGLKALKRRIAELPIALIVMEATGKFHRQAHRTLHAAGLAVAVVNPLRARLFAEAVGQLAKTDRLDARMLALMGQTLEPSALAPAPEALEALQELARARSAAKAEETALSNRRGASQAAFLKAELGRRLKTLAGHVERLDAEIERRIGANPALKRRYDILITIPGVGPVAAVALAIGLPELGACSGKAASLLAGLAPLARDSGAKAGERHIRGGRAFVRTSLYLAALSAATHNPQLRDDYKRFRDAGKKAKVAITAIMRKLVVLANVLIKEDRPWRPVQP

SEQ ID NO: 81354 - protein, 533 aa, unidentified
MATKRKSRKSRKIGIVALGKPRGMIQSRVQKVGPERFGIVAVDCAKARSKWMLCDFYGKVLIPPSPVEHRRAELGLAVAQLREAIELHGLQDHIVAVEMTGTYHRPVQRAFRKGGSETRLVHPFASRHYRLTSHGDDKTDDNDLEGIFRAAVNGFGLLEPEWDETYRQLQILARHRRDLVNKRAKLQCQIRQLLERCLPGYAALFPADDLWSRPVAMAIARRAVRPENVLAAGVGGVLDWLKEEHVRAQARTVERLVAWAGNAAETDPMCEHLTRVWLTLYEDWQTKTKHIRRLEQDLAGILVTTPYLLLLSHPGINVVSASELAGEMGPIEHYAHAKAISGRAGLFPSRYQSDEVDRADGPLARFRNARLRAAWMRIADCLVKSNAYYRGKAALWKQRGINPRDTRCRVANRATRTVFQMVSGRRLYQHPSRLDRQYVLDKLLTFHREHGTLPVEILRDLRQAAAQIPQGDRAAEARPLQEIYRKSRRSRRAGPQAIGDILLPVLAKLGVDQVQSETEAPPPDAPVSGTGTR

SEQ ID NO: 81355 - protein, 379 aa, unidentified
MYRILKIGMDVHTTNYTLCALESKFGQSDAVLANITVSPELRNVVDFIKRIKQKMDPYGRDEIDVECGYEAGCLGYSLYHALTGCKVKCTILAPTTMSVEKGPRIKTDKRDARNIADCLSTGKYSAVHIPTEQDNAIKEYIRMRDDHVIALKKIKQQMNALCIRSGFIYDGNKWTEKHLHWLCGLNLPELVRETLNEYLVTYDEQTAKIERYDKRIAELASQSEYQENVRRLECFLGIKTNTAMSLIVETGDFTRFAKGNLYASYLGLTPGEHTSSENGGKLGITKAGNKHLRTMLIEAAGTICKGAVGYKSKKLRVRQDGNMPEVIAYADKANMRLRGKYYRLIRHGKKRNIAVTAVARELACFVWGMMTDNISKTAV

SEQ ID NO: 81356 - protein, 324 aa, unidentified
MTDAVLGIDVSKNTFDTNLGAGTKARSKSFANSPAGWHHLIAWLGEHKIGQVHACLEATGRHGLGIALALHEAGHVVSIVNPAQIRDFARTKLGRNKTDQVDAVHIREYAELFKPRPWTPPSPAMRRLCELQTIRAGTVAGLTEWKNRRRSGIMDDLALSLAKTTIQHFTSQLEAVDQAIAETIDNDVELSAKRDLLVSVNGVGEALAGIVLAELPGPDILGSSAAVTAYAGLNPQQHQSGISVNRPVRISKIGNAVLRTALYMPALSAMRYNPAVAALVDRLKAQGRLKGKQIVIAAMRKLVVLCLGLLKTGKEFDPAMAMGK

SEQ ID NO: 81357 - protein, 352 aa, unidentified
MAEDPSSVIAVIGIDIGKNAFHVVGLEGRGAIVLRQKWSRGQVEARFANMPPCLIGMEACVGAHHLSRQLRALGHDARLMPAKYVRPYSKGQKNDFRDAEAIAEAVQRPTMKFVATKSADQLDLQALHRVRERLVRQRTGVSNQIRAFLLERGVAVRQGLRVLRAELPGILARRCDVLSPRMVRLIEDLAGDWRRLDERIESLSGEINALARQDAGCERLMSVPGIGPIISSAMVAAVGAGDAFEKGRDFAAWLGLVPKQISTGDRTILGKISKRGNRYLRVLFVQAAWVVLIKPKSWERYGLKAWIEAARKRLHHNVLAIALANKLARIAWSVLARGRGFEARSIATAQPV

SEQ ID NO: 81358 - protein, 395 aa, unidentified
MFIVGIDIAKRNHEAIILDDQGNILQKAFSFANSFSGYEELLARLLRITNLKSQVCFGMESTSHYWLPIYSRLLADGYTVHVINPLQTHALREMYLRKNKSDARDAFIIAEVIRFGRFSAAQAPPDRLLALRELCRNRFGIVDSVSDLKRKVTALIDRLFPEYESLFSSIFVASSIAVLSKYPTPERLRKANLNALTNILLKASGGRFGRAKAMEMKNLAAHSFGMPDCDGVYAELVGDYLAQIQFIREQVEKLDARIEALMRECCPVITTIPGIGPILGAVVISELGDLSRFPSLDKLAAFAGIDPTVKQSGEMKQPASRMSKRGSPYLRRAIWMASTIAVTCDPMFQAYFEKKKSSGKCYQCAIGHVTKKMISVIYAVLRDNQPYRPVLPEAA

SEQ ID NO: 81359 - protein, 349 aa, unidentified
MEGVYLGVDFHARTQTVSWCDTANGVIERRTLDHRTDDVRAFYQQFHVPAVVGLEATGYARWFHRLVEETGHRLVIGDALRIRQFAARRQKNDRRDSELLLDLLLRGDFPAIHIPSIASQEVLRLLRYRHRLVGMRTMLKNGLQAVMLSNRVLRTSRMRTLLWRHQLENLPLTGADAIRREHSLPLMDELSARIGALENELHRRSQGDSAVGLLQTHPGVGLLTALAVAHTLQPLSRFRRARCVAAYCGLDPVERSSGDTVRFGHISKQGNRLLRFLLIEAGRSAVRPEGDPDLRRFYYQLALKRNGSIAAVAVARKLLLRLSCMLRDQIDYEEFRRRGRDARRARGES

SEQ ID NO: 81360 - protein, 391 aa, unidentified
MVCVGIDVAKDKHDCCILDSDGMVRADCFTIPNNMDGFKQLLQTIRNCTKKSDKIKVGLEATGHYSYNILGFLLDNGLPTYVINPLHTNLYRKSLSLRKTKTDRVDARTIATMLLSDVDLKSYTDIAYHNEELKSLTRYRFDKVQERAKLKQSVSRLATILFPELEGLVSSIHGTSIYALLSEYPGAKQISEVHLTKLTNLLTTASKGRYGKEKAIQIREAARASIGSVMPAKSLELKHTIKLIQELASEIDEIEDSIQKIIDELNPPILSIPGMGVNSAAVILAEIGDFSNFSSPDKILAYAGCSPSTYQSGKLTNCYAHMEKRGSRYLRHALYNATKYVCYWNPVFAEYLAKKRAEGKHYNVALSHAMKKLVRLIYALQKSGKAYLAAA

SEQ ID NO: 81361 - protein, 327 aa, unidentified
MSQAIYVGVDVAKARFDVAVVTQGDVAVSSSVQQFANDPQGIRRLVKHLAPVQPALIVMEATGGYEFALACALAEADLPVVIANPRQVRDFAKSMGRLAKTDAIDARVLARFAQSVQPPVRPLPDAELVALRALVDRREQLLEMRQMELNRLPMTTPAMQKSIRHVVRCLDHQIAALRDELDDHIRRSPLWHERLELLKTVAGVGNVVAYTLTAHLPELGELNAKQIAALVGVAPLNCDSGKSRGRRRTWGGRAKVRRVLYMAALSAIKHNDRIRAFSQRLRAQGKPGKVRVVACMRKLLVILNAMVATNTPYHKALPHTTDTATAA

SEQ ID NO: 81362 - protein, 351 aa, unidentified
MLIIGVDYHPSFQQMAFLDQETGEYGERQLNHSDGEAEKYFRDLKQRGVSVRVGLEATGYSRWFERLLVELGFEVWIGDAAEIKKKRVRKQKTDREDARLLLKLLLENRFPRIWVPSPENRDVRQLLWHRHRLVQMRTRIMNQLQAVAMNEGYRWKKKLFSKQGRALLEKLSLAPWANRRRKELLELLDQLNPKIAELTAAVEQEANQRPDVLRLMTHPGVGAITGLAYVQVIGTPDRFPCGKQIGSYIGLIPCEDSSAGKQRLGHLSKQGNALLRYLLGEAAQAAARCNPDWRRRYVHLAMRRHKNIAKAAMARKLAVRLYWMWRNGWDYSQLVSFGSNAGKLATVHGVK

SEQ ID NO: 81363 - protein, 425 aa, unidentified
MQFKWNEKINQVTENTLVVGMDIAKRVHYACFVDERGRVIEKAFAVHQSKEGFEHLYEKIRQTMKEAKKTEVIVGIEPTGHYWMNLANFLDHYGIPLVMVNPMHVKRSKELDDNLPTKNDKKDALVIARLLKDGRFSYPRLLKEVEAELRIGSTLRSKLTEDLASIKNRIIRWLDRYFPEFTQVFPAFGKMALATLEMTPLPQDIDGKSAEELVFLYRKVKGMRAPQLPKAKLLIEAATNSIGLTEGTQMARHEIATLLRQYRLLENEIESVNSQLSEMAQSTMEYELLASVPGLGDATIVDLLSEVGSFSLYENPRQLIKLAGLTLRENSSGQHKGQKHISKRGRKRLRYILFKVIVPLIRHNEGFKQLHEYYTTRQQNPLRGKQSMVVLCGKLLKVLHGICKKKVHFNEQNMMKDLYCLSEAV

SEQ ID NO: 81364 - protein, 345 aa, unidentified
MDEQQPADRQIVGMDLHRRRSVLVRMNQDGERLETVRIVNDVDRLADVIARAGESPEVVLEATYGWYWAADALAELGANVHLAHPLGVKGFSYRRVKNDERDAADLADLLRMNRLPEGWIAPPATRELRELVRHRAKLVHLRTSLRQQVHALLAARGVAIPVSDLFGVAGNQLLDRVSLSPAARTRVVSLRSLLDALDVEIDAFTKLTVKRLRGDPRYKAVQTIPGIGPVLGAVFLAEIGDITRFPGPTQLASWAGLTPKHHESDTTVHRGRITKQGSVLVRWAAIEAAQCAGKYTRTGQRRERIAQRRGRNIGVTAAARDLLQLVYYALRDGHVRCLEPAAQSA

SEQ ID NO: 81365 - protein, 414 aa, unidentified
MEVIHSRCAGMDVSKRDAKVCVRIAGSGRRKTVETVRTWAATTNSILALREHLVAEQVSLVVMEATGDYWKPFYYLLEEAGFEVMLVNARQVKNLPGRKTDVSDAAWLAQLGAHGLVRGSLVPPAPIRELRDLTRARTMMARERGREIQRLEKLLEDAGIKLSSVASDITGVSGRLMLQALIDGQRNPAALADLAKRRLRAKIPELTEALTGRFNDHHAFLAQMYLDAIDQRSQAIAELTVRIEVVIEPFRAFYHLIGTIPGVGVRTAEVIVAETGADMSVFPTAGHFASWAGTCPGSHESAGRVKSTKTRPGNPYLKAALGTAALSIANTHSTYLAAKYRRIATRRGPMKAIVAVEHAILIAIWNMGHTGAEYFDPGADYYTRRDPERLRLHAIRQLQRLGYDVTLSPTAASA

SEQ ID NO: 81366 - protein, 366 aa, unidentified
MKMSIGVDLHKSQFTVYWKPEGKEGWYVKYPTNERGYRGFEHQVLETKGAGYRVSIAVETTGNAHYFRNRAETLGVKVVVVNSLKFKVVNESVKKTDRHDASTLAEFLEKEMLPEARLCSRGSEELRRLLKVRKRLVESVVVVKNQIHGILLSYGIESVRGELQSKKERQRVKSVLEAHQLTDAAVEPLFEIIDKLTEEVKKLEKLIAEKAEGDTMIELLCTIPGAGLITAATIRAYIDDIKRFESPKQLAAYAGLVPWVQISNNTEHYGRITKRGPKELRTALVQVFLGMVRTKKKTQGYRILYRYERMKKEKGSGKSIIASARLLSEVIWHMLTKQEPFSPLRMKDPKLFQKSMEMHAAAFSAA

SEQ ID NO: 81367 - protein, 336 aa, unidentified
MKEQQIKHNEVQIKKFIKKLKTEWNEIYCCYEAGVTGYPLYRYLKSLGVNCILVAPGKIPRQNTDKIKTDKRDAIKLARLMRSGELESIHVPSEEDEAVRDYLRSRDSLRLDLGRNRQRLMKFLLRKDIKYSTTKYWTVSHYKWLNNLHFNNEILQETFNDYYSRVRVQEENLKSMDKKIQEIAESEPYREKVGILRCFRGVDYLTAMFLLCEVNDFKRFKTAGSFMSFLGLVPGEYSSGSKRKQTGITKTGSPRLRRILTEAAWQHRFPGTGSKIITARRSGQPALVVALSEKASPRLHKKFRNLQLRGKTPQVMITAVSRELSGFLWAAMNLVA

SEQ ID NO: 81368 - protein, 353 aa, unidentified
MQKPIEGQVVVGVDTHKEIHVAAAVDWRGTLVDEKSFATTRQGYRQLESWARSLGDVLRVGVECSGSYGSGLTRHLAKNGFTVLEVTFPDKTVRRKRGKDDFIDAEMAAEAAFTGTRTVTPKARDGMVESLRMLQKTRSTAVAARRSALQMIRAIIISAPEELRDQLRGMTRMQLIRHLVATRPDSTDFKSPTGSARIALKRLAKRYVDLDDEIDELDDMIKALLEECAPLLVRCSCVGAQSATQLMVTVGDNPERLKSEAAFAMLCGVAPVPVSSGMTYRHRLNRGGDRQANSAIHIIAIGRLRTDQRTQDYVAKKLAEGHTKMEALRCLKRYIAREMYYVIKRQYELVNCS

SEQ ID NO: 81369 - protein, 358 aa, unidentified
MNHVKSSRLDFKGQPIYIGLDVHKKSWSVSIFSNYGEYKTFSQPPEVDKLLHYLRHHFPGGDYRSVYEAGYCGFWIHDQLREKGVQCLVANPADIPTKNKERRTKRDRIDCRKLGRTLRNGEIKGIYVPSRSRLEDRTLIRTRLSMGRKQTRCKNQIKGMLLFYGVVIPEESEMGHWSRRFIQWIEGIRMERASGDIALRAHLEELSHLRQLIASLNRAILRLARTEEYRPLVRLLKTVPGISTLTAMILLTELGEITRFPSLDELSCYVGLIPDTQESGEKEYVGSMTQRRHSQLRWLLIEASWVAIRKDPALLMAFQEYCKRMRKTKAIVKVARKLLNRIRYVLKNQAEYVPCVIQ

SEQ ID NO: 81370 - protein, 349 aa, unidentified
MDATTVAVDLAKSVFQLAEADDQWRIVRTHRLTRGQFERFFTNRQVRVVIMEACGSAHHWARWLASLGIQAVLLPPRHVRPYVLGNKTDAADCAALLQAARNLQIRPVRIKSLEQQSLQAMHRMRSQWMATRTQRINALRGFCREFGLTVPRGARTGLRLLAQLVGDDASAIPAMLRCQLPSLLEEIRVLEARVALLERELVQLARRVPACQLLMTIPGIGLLTSTALVAAVGTDVSQFHNARQFANWFGITPTEHSSGQVRRLGRISKAGPRYLRMLLTHGARSVLQAAARARSRGRDCQGLQRWALSLAERTHHNKATCAVANKLARICFATLRARQPFDAQRACAE

SEQ ID NO: 81371 - protein, 336 aa, unidentified
MSRYLGVDLHRNCFTVCTIVEGERSYLREWRLKDLERFVSQLRGTDEVAVEVTGNTRLFYDAVVGKVSRVVVVNPNEFKVISQSVNKTDCNDARRLAIFLSKGLLPEVRMKDKGHAQLASVTQTRDKLVKLRTVLKNKINNITSAHGINLKKEELSSEKGLEKVLGMMFDPLVDLEVEVLVKQIRSLNKSISELEKAIKDEGSKLKGHKNLKSIKGIGDLGAGILLSVIGDVEDFANEGKLASYFGIVPRVSNSNGTERSGRITKRGSKLGRTTLVQCSLIAKRYSPYLNRYYERIKARRGGGKAIIALARKFLSIIYKTLKNDWVWEDFPNGVLA

SEQ ID NO: 81372 - protein, 317 aa, unidentified
MRASAAFFVGIDVSKQQLDIAVRPSGESWTVAHEEASLSALVARLRGLAPTLIVLEATGGWEVTVTGALAAAALPVAVVNPRQVRDFARSTGLLAKTDRLDAQLLAQFAEVLRPAPRPLPDAQAQELTALLQRRRQLVEMLTAEKNRLPLAARRIRPQLQAHIAWLHQQIAQFDEDLRQLIRSSPLWREKDDLLRSTPGVGPVLATTLVAALPELGTLSRRQIAALVGVAPLNRDSGTLRGRRTVWGGRAQVRAVLYMSTVVAVRHNPVLIAFYQRLRAAGKAPKLALTACMRKLLTMLNAMLKHHRRWAPVRAQHA

SEQ ID NO: 81373 - protein, 412 aa, unidentified
MQTLVERGCGLDVHQATVVACLLIVRKDGRVQKQMRTFGTTTRELVTLREWLLSENCTHVAMESTGVYWKPVYAILEGALEIVVANAQHVKKVPGRKTDVKDAEWIADLLCHGLLRSSFVSPKPIRELRDLTRYRRKLVESRSAERNRVLKLLESANIKLASVASDVFGVSGLLMLQALVEGKATPQEMAELAKQKLRKKIPELELALEGKVEEHHRFLLKLQLDRLQAVEKDLALLEQRLEEKLQPYEAQVNLLDEIPGVDWTLAAAIIAELGVDMSVFGSVSQLASWAGLCPGNNESAGKRKSSRIPKGNIYLKAALVEAANAAAKAKGTYLRDKFYRLKARRGYKRAAVAVAHKILVATYHMFSHQVCYNELGDAYLDKRNKHHLTRNLVHRLERLGYAVTLTPQEKAA

SEQ ID NO: 81374 - protein, 400 aa, unidentified
MLSIGIDVSKGKSTVCGMKPGGEIVYTPFEVQHTREGMSELVSLLRGSGEEVRAVLESTGSYHCPVVTALLENGIFVSVVNSLRMKRFCSQSIRKVKTDRIDAMQIALYGLAYWQELQPTRPPEDTYRELQLLARQYYQMTSLLIKAKVDFNALCDQVLPGMQELMSDHAGRHKLSDFVLRYCHTTHILEMGETRFRKDYCKWAEKKGYRNCERMAALIFATAQNGIPVLPNAPSTQIVITEAIRVLHTVEASRDAILTQMQALAKTLPEYSLVREMPCIGDTLAPRLIAEIGDVRRFHSKRALIAYAGIDAPPYQSGKFRANNRHISKRGNRYLRKTGYEVMQSYVMHKPANDPIFTFIEKKLGEGKSGKLAMVAGLNKFLRVYYGKVTELYRSLPAIE

SEQ ID NO: 81375 - protein, 366 aa, unidentified
MKKNITVATRRKQIFKGKKLTIGMDLGDRFTYYCVLDEAGEVMVEQKLPTTKQGMQQVFGRIPRSRVALETGTHSPWVSRQLAQLGHEVIVAHARNVRLIGESSRKDDQLDARTLARLARIDPDLLGPVRHRSAQAQIHLTVIRARAALVGTRTALVNAARGLTKSYGERLKKCGTEQMNRESSQGLSQELRDALDPLLGEIASLNERITEYDRRIEQIAKEVHPEVALLKQVKGVGTLIALTYVLTLDDPHRFRRSRDAGCFLGLRPGRRNSGNSEPQLHISKEGDRYLRTLMVQGAHYILGPFGSDSDLRRWGLKLAERGGKNAKKRAVVAVARKLAVLLHKLWVSGEVYEPLRNNHKVVSAVA

SEQ ID NO: 81376 - protein, 361 aa, unidentified
MELQPITRSRRSQRRSAVNHVAIDLGSKESQVCMRDKDGKILVEKKYPTRKLGAWMSEWSSSRVILETSSEAFKIADQARAAGHEVRVVPATLARQLGVGERGIKTDERDARKLSEVSCRIELPSVHIPSPAARELRSLVRSRELLISMRTMSINHVRGWLRTQLGKLRKGSTGTFPDRVRARATENKQLIPSHIEQVLVAIDALNVQLRAAQCRVNELAKANPVCVRLMSLPGVGPVTALTFVAAIDDISRFEHAYQLTSYLGLTPGENSSSERERRTGITKAGSTSVRRTLVQAAWAAIRTRPNEPMVRWANQIADRRGKFIAVVALARKMAGIMFALWRDSTTYRRSQAALVPTEALA

SEQ ID NO: 81377 - protein, 353 aa, unidentified
MVELSLTTWLVGGMIPGIARDPLKKLVPDQDGLLKLLYRWKAGYKFTRMVVAFRDGFWLARWLRAHGIEVYVIHPTSVAVSREHRRAKTDRLDIALLKRSFLGWLRGEKKHCSMAAIPTLEEEDAKRPNREQLVGKRTAVVNRMKAALVRLGIRGFNPKLRKAPQQLAELRTPEGGAIPPNTLAELQREMVHLSFINEQIKQIEDARLTQLKRAPTHGSNATVAQLGRINGIGIETADMLANEMFARDLRDQRAVARYAGLTGSPDESGRRRREKGLAKAGNARVRRGMIQLAWRFLFHQKNSALAQWYRQNIAAGKKRKTMIVALARELLIALWRFVTTGDVPQGVILRRAS

SEQ ID NO: 81378 - protein, 326 aa, unidentified
MQGKEAPEQDAKAKCSVGIDVSKEKLDVCVLPSGEYLTVANSREGIRRLKRWLAHFDLALTVVEATGKWHRQLWRSLHSSAIPVAMVDPFKVRMFAKATGILAKTDRLDAAVLARFAAVMTPAIRPPPPQALEELAELVTARDAAIAEQTSLKNQLSVAKVAMLQRQLGKRIDRIAKDIATLEREILARIMANQSLARRYQILTSIPSIGPAVAATLIARLAELGALTDKQVAMLAGLAPIADQSGSHDGRRVVFGGRAGVRRMLYLAAVAAIRWNPQMSVFYRRLRQAGKPAKTAIVAVARKLVILANKLIADNRTWSPNAPTPA

SEQ ID NO: 81379 - protein, 325 aa, unidentified
MFYLGIDVSKAKLDCLLLDTTSNKRKSKSIPNTPAGYSTLLTWLDKQQASNVHVIMEPTGPYHEPAALALTDGGVTLSLVNPAQVRQFAQGIGVKSKTDAADSAVLAQYGAARQPAPWQPPSLSVRQLRALLARRDAVADDLQREKNRAEKALATETPPLVQASIEQSIAFLSNELNQLQQAIAQHIDDDPDLRGKKELLLTIPGVGQRVSDHLTALLAARDFHAAEQLAAYLGLTPVEWQSGSSVRGRPRLSKAGPAHLRKLLYLPAVAATKCNPHIKATYERLIARGKPKMAAIGAAMRKLAHLCFGVVKTGQPYNPHWLVET

SEQ ID NO: 81380 - protein, 349 aa, unidentified
MRFYTQQHPFYCGIGLHARLLAICIVDQAGSIVLQTQIPADKQLLLQTLAPFRPDVVVAVECLFAWYWVADLCRDEKIPFVLGHAPYMKAIHGGKAKNDDIDAEKIARLLKGGNIPVAYVYSKGLRETRDLLRRRMYFVQQRAALITHLQILNHQYNLPEFSKKRIYARNRAELKIAERFDNPQLRKSVEVDLALIDAFDERIAEVELHLERTAKVEDPQTFHLLKTIGGVGKILGLTLLYEIHDIRRFPDVGEFLSYARLVRCRHESAGKKLGSGGHKIGNAHLKWAFSEAVCLLVRHFPAVKIWQARHEKKHGKKKTLGILAARLGRTVYHMWRKREAFDVKRFLGQ

SEQ ID NO: 81381 - protein, 363 aa, unidentified
MMTSPVGGIDPHQDSFTIGIVDANGVELTHDSFPNTAVGFFDSIELLTAHGVERVGVEGSASWGSHIAIALVAAGFDAREVPPQRSAAQRRARRLDKTDVIDAVSAARALLAEPTLGPVQALEIYDPLVAKIEAVLEHRRMLVEVRTLVLHYAFDQISKLPTEIRDQLVAAGKIESRLRRLEQLDITTVSTEAGAYRLSWLIPLIDQDRTARRQIRQLERDLDRLLDEHGTTLRDEPGVGPIAAATLIAEVGDPFRFARESKFARWCGTGAVALSSAEGAGVPVRHRLDFGGNRRINSVLYIASVVQHRDIDDARTYIDRKIGEGKTRREARRAHKRHLANRVIRRMWNDESRRREQPINIAA

SEQ ID NO: 81382 - protein, 419 aa, unidentified
MSFKILKNNCCGLDVHKTWIYACIGITDSFKRTEYKQARFSSFTKGLQELCLWLAKYNCIDVCMESTGKYWIPVFNVLEKNNIFVTLSHPKYTKPQKGNKTDHKDAKWICDLYMCGMVKPSFIPPADIRQLRDLVRYRFKLTCMITGEKNRAHNCLTVSNLKLDDVFSDIFGKSSRSITEQILQHPGEVFDVAPFVDSRCKTPIEEIQAAVDGAISHEQAVKLRQCLKHIDELEMHKAEIEREIFRLSQKYESVLDLIRTIPGFDKNPLTAIQVLSEIGADMSVFPTAKNLVSWAGCCPRNDQSSRKIKSTRISRAGSYFKPVLVQIANALIKSKKHPEFTTRYRRIKARRGHKKAIIAICHMILTAVWHILTDLKPYTPEGFLESRPVNKEKVLTISQALNLIKQRGYIIKDDVGPVT

SEQ ID NO: 81383 - protein, 425 aa, unidentified
MSEKIVVGIDVSKAFSDICILSPNNDIIKRLKISNDINGMKSLIYVLEKVEDEYEDRAIIIMEATAHYHQILANFFRKHNYEVIVINPIQSGALKNINIRKIKSDKTDAYNIALLYRIKNYNETITHSDTVNSIKKLCRQHKELTDEIVEHINRLIAFLDISFPDFKKVFADLQGKTPLSLLEKYPTIQEVLSPENKQDIIQLIKENSHKSSSYAEVKYEKLLKAAEKSIEVCIVSLSSAVLIQTTVRVIFSLQEALKAIDDEIKRLSLLDEKFHKEIVLLQSIPGVGEYTACVVLSELGDISNFSKPKELVAFFGLDPGVTQSGTYNRKNNKISKRGSPHVRSILHMLAKSNVYPNRNREYLNPVMRAYFEKKIAEKPYKVVMCAIMRKMVQIIFAVLRNQKSFELRTPEEHQKLIREKSKLVA

SEQ ID NO: 81384 - protein, 314 aa, unidentified
MASIGTVVTIGVDPHPGSHTACALEANGLELGRVSVTNDADGLGQLYQWAQRFRCRRWAIEGAGNRFANALVGQLLVVQEEVFSIPPSMTSQYRSRRGRAKDDAIDAANVARALQANPNLPPYDPTPYESRLKELSRTYARVSEQLTANRMALESIDVPTAHQAMTEVIAALQRAAKTLKREMQAAVQATAPQLLDLCGVGPVVAATVLAETGRIRRFPNHDHFAAYAGCAPVRWQSGAHSTLRVNTGGNRTLNWAIYIMVINRLRVDPRTQIFHQRKLAQGKTQREVLRALKTYVARELYHTLRLIAPHPNPG

SEQ ID NO: 81385 - protein, 410 aa, unidentified
MDVVYSRCAGLDIHKKTIMACVIVPGPKGKPQKTIQAFGTMTDDIVALGDWLAARQVTHVAMESTGVYWQPLWNLLEERFTLLLVNAHHIKQVPGRKTDVGDSEWIADLLRHGLLRASFVPDRAQRELRELTRYRTALLQERAAEVNRLQKTLEGANIKLAAVASDVLGKSGRQILQALVAGGSEAAELAQLAKGRMRDKIPQLERALTGSFRPHQQFLVARHLALIDAIDETVAQVSAEIEERLRPVEADVELLDAITGIGRRTAEVWLAEVGTDLERFPTHSHLASWAGMCPGNNESAGKRKSGKTHKGNPNLRTALVEAAQAAARKRDSYLSAQYRRLAARRGKKKAIVALGHSLLIMAYHVLKRRVDFQDLGPTYFDERDRTNVERRLVRRLERLGYKVALEPAAA

SEQ ID NO: 81386 - protein, 333 aa, unidentified
MNQVRVHIGVDVGKEWLDICYPDGEKETVRNIKSCRTKVIKRAARANAIVCFEATGPYEEPLADECLAKGVRAVRLDAWGARRFAESQGRIEKTDRIDCEMIRDYAASLKDEKLHFIKPRSEAQKRLKKSVSVRRNLMKARAIVYNQLEHIRDRDSRRHLESSIARLDREIARIEAGCDKAIADDERMKHLSDRFLKVKSVGPCLVRAVLACCPDIGDFNSKSIAKMCGNAPIDHESCTVRHKARPRRGRPDLKKALYMAAVSASRCNHVLREFYQRLVAKGKARKLALTAVARRIAILLNCIARYPDFVPAQDPKDIARAESRKRRRHSENA

SEQ ID NO: 81387 - protein, 405 aa, unidentified
MNAVGIDVSKGKSTVTIRRPGDVVLMPPCDIPHTQSGINDLIVYLQNLDGETKVCMEHTGRYYEPVASWLSDAGIFVSAVNPILIRDFGDDSLRTPKTDKADSKKIARYTLDRWAKLKQYGSMDKTRNQLKTMNRQSAFYMAQKTAMKNNLISLLDQTYPGANDFFNSPARSNGSQKWVDFVHTYWHVDCVRSKSLNAFTEHYQSWCRRRGYNFSADKAEKIHHLSSDLIAVFPKDDITKMLIRQAVALLNTASETEKSLRLKMNELASTLPEYPIVMDMDGVGPTLGPQLIAEIGDVTRFTHREALTAFAGVDPGRNDSGQHVQKSVRTSKKGSPYLRKALFQVMDSLIKRSPVDDPVYAFMDKKRAQGKPYYVYMTAGANKFLRIYYGRVKEYLTTLPENEGV

SEQ ID NO: 81388 - protein, 342 aa, unidentified
MAIVAGFDVHRAQITFDALDTETGEVMRGRIDATPAAVTRWTERFQGAAIEVAVEACTGWLFVCDALVAAGGRPHLAEPVETRALRGRKRRAKTDREDARWLRQLLAEGRLPEAWIPPEHVRQWRSRARLRHTLIDERTQWMQRIQATLYHHGVSGSPEKLRTRAGRAFLEALEVPADALERIEIALAMVDAIEAQLAPLERELRQLARRQTGCKALMGLYGMGELTSLVTLCELGDVTRLSASRKAVRMAGIDIGVHRSDRRARVGKLNRQGSPQLRWALYEAALSACRPSSPDHADYLALKARGLSHTRASLTIARKLARRSYHVLRELGPAALEPIPTS

SEQ ID NO: 81389 - protein, 351 aa, unidentified
MLICIGMDVHAKKLTCYGIPFDEGDVEAEEFCTEFNREFKVMSGEKKDMIRLSKWLKDVDHSILIESGSKTHEVFWTLTDNGCTVVVANANDLFRITMSVKKTDFHDCRELASYMRRRMLGEKEFSVCLMVDSVWLNRRQMCRLYAAAASDLSDLRRRIRSYMLVRGITIEDLGRDIVSEASLKKLEEVADVPMGFLIEEARWKTAEQKRILKAIEKEFADVPYYNLLKSIRGFGPVTSSYLTAMIIDIKRFDSPAAFAAYFGIVPKQRESAGHSKHCGITRRGDDVARQMLLTATMVHVGNDRDRVSSITNMYYRLRARGMPNKKAMTACTNKMTRIIYAILKDGREYRE

SEQ ID NO: 81390 - protein, 320 aa, unidentified
MSATSRVVGIDVAKAHVDVWVLGAKLEVQRFDNDADAHSALAAALKPLGVALVVMEATGGYEATLACALQAAGLPVAVVNPRQARDFAKSMGRLAKTDRIDARMLAEFAQVLVRRDDLSSLIRPLTDQQQQTLAAMVTRRRQLVAMMLSERQRLQLAIAVVRPSIEALIDAIRKQLDDVEAQMTGHVQAHYTELDKLLRSARGIGPVASATLIAELPELGKLNRREIAALVGVAPMANDSGNTRGRRRVQGGRFDIRRVLYMATLTAARYNPVIKCFYERLLAAGKLPKVALVACMRKLLTTLNAMVKTNQPWDNSLHGA

SEQ ID NO: 81391 - protein, 458 aa, unidentified
MQQYFLGGDVSKGYSDFVILDSQKKRIEENFQLDDTVAGHSSLYDRLSGFFKKHPDAELFGAVESTGGYENNWHNSLIKFQGSLNIKTARLNPEGVSYNNKADLKRIITDKISAQGVAEYLIAHPEKVIYQQQDYWGSLRKQWSFVKMLTKQSTQLLNQLESLVYSANPEILKYCRDGVPEWVLKLLTQYPTAANLAKAKASSVARIPYITSSRAQELIASAKTSVASSTDSITGQLISATVGQILQIKKTIKSQIKIIAEDCTIQELELLKTFTGIGDYSAIGLMLEIQAIERFPTVKKLASFFGIHPVFKLSGDGGTGSYRMSKKGRKEPRAILYMVAMSAIGSNPLIRDLYTKHVVNGMEKMTAIGLCMHKILRIIYGMLKNNTPFDPAIDLKNKEKASGNLQKEKKDKSRRYQDFDTNAPISGRQKKKREERKLTQNAVSVECGIGAPAPESSS

SEQ ID NO: 81392 - protein, 419 aa, unidentified
MTRKDDSKIIEIVHPICCGLDIHKKKISACIISPQKSKPDHCEVKEFGTFTDELQRLRSWLLENDCPVVAMESTGIYWRPVHNVLEGAVQVVLVNARDIKNVPGRKTDIGDSKWLAGLLQHGLLRGSFIPPKAVRQWRDLTRLRRKYVQTLADYKKRTQKLFESCNIKIDSVVSDLFGVTGRNLMNLLLTDSQQLSLSDIEGCVRGKLKGKEHELCRSIQGFFTDHHRFILKRLLKTVSMLEKEIVGFDQQIQHLMADQKELLGRMKKAPGISDVSARDILAEIGSDMSSFPTDTAIVSWSGLCPGNNESAGKRKNGRSPVRKHYLKTIMVEVAWAAIKKKDSYFKDKYYRLKTRRGAKRAIVAVAHRILLGIYHVINDGVEFRDLGGDYLTERNKTQKISYLRKQAQLMGYKLIDQTT

SEQ ID NO: 81393 - protein, 269 aa, unidentified
MFTVSDKSGKALLCTKFTRTKLIEFLAGCTPATVVMEACGGARFMARRIADLGHEPKLIYPQFVRPFVKSNKNDFVDAEAICEAASRPSMRFVQPRTEVQQAMRALHRVRESLVRDKVKTTNQMHAFLLEFGISMPIGVTVIKRLSTVLAENELPPYLAQLLMRLHAHYLYLVEQITELETALEQELSRDETGQRLQTIPGVGPITANVLSSQLGDGKQYSCSRDFAASTGLVPRQYSMGGKNTLLGISKRGDKNLRRRLLTNLDDSIL

SEQ ID NO: 81394 - protein, 451 aa, unidentified
MAHPKTRKTKKKHTRPTPGKTNPDAAGIDLGSTVHYVAVPAERDEHPVRHYGTLTEDLVELADWLKQCRISTVAMEATGVYWIPLFQILEDRGFEVCLVNARHVKNVPGRKSDVQDCQWLQYLHSVGLLNASFRPPAQICAVRSLMRHRESLMRTACQHLLRVQKALDQMNVQLHHAVTDITGYTGLAILDAIIAGERDPVALARLRDYRCKKSEATIAKALRGDWREEHLFTLRQSLEAWRFHQNLMADCDQQIASLMAELEDRPVEPVPETKGKPKKTHNEPLRLELCQKFGVDLTAVEGVSIQTCLTFLSEVGTDVDKFASAEHFASWMGLCPDNRITGGRTHAAHTRKVQNRLATALRMAAQSLHRSKAGLGDWFRRIKSKLGTKAAVTAAAHKLARILWAMVKYRCPYEPSRLGNPELARAKKEAYLRRQAKQLGFALTPADGAVS

SEQ ID NO: 81395 - protein, 410 aa, unidentified
MELISLHRRVIGLDVHQAQITACGLIEGEDGVHIERRSFETFKRGLRALTDWCLELKAEVVVMESTGIYWKSPHAWLERAGLNCLVVNAHHVKNVPGRKTDIADPEWLAMLARAGLLRPSFIPPEKLRRLRLVSRQRQKMVGTLAAEKNRLGKVLSDAGVRLGVVVSDLNGKSARAMIAALIAGATPEQALGYASPRLKAPREEIAAALEGEISAEHSFVLQQILSHIAFLEESIGKFDAHLLAGLDSPEEKNALALLRTVPGIDLIGAAMLLVEIGTNMVLFAGSDHLASWAGMCPGNNRSAGKRKNERQRKANSYVRRLLCEFVQAARKTPCAFQAKHNAVAIRRGFKRAIMACAHKMLRVIWAMLLRNEPYRDSTVDYEALSVRRNAPRWIRALKRFGYLRPSAATR

SEQ ID NO: 81396 - protein, 310 aa, unidentified
MENITVGIDVSKDRLDVAVRPSGEVFAVERNAAGLEQLTIRLRGLAPQVIALEATGGFETIAAAALAAASLPVVVVNPAQIRAFAKAIGQRAKTDPIDAATIAHFAEATKPEPRPLPDEATRLLGDLVARRRQIIEMIGAERQREQRVTIPHLRRSITRLLKALEKELASLNTDIDDAVRGSPAWREKEDLLTSVPGVGRVISSIMIAELPELGQLGRREIAALAGLAPFTRRSGKWRGKSFIGGGRTVVRTALFMGAFVAKRHNPVLKAFFDRLVAAGKPKMVALIAVARKLLTILNAIIRDNRPWQTA

SEQ ID NO: 81397 - protein, 407 aa, unidentified
MIFVGVDWAEAHHDVHVADEEGRRLSKARLPEGVEGIARFHELVGAHVEEAQEVVIGIETDRGLFVSALVATGYQVYAVNPMSTSRYRDRHSTSGAKSDAGDAEVLCDMVRTDRHHHRLVAADSAEVEALKVLARAHQSMVWSKGRQSNMLRSTLREFHPAALLAFDDMSSADALEVLRIAPTPTLGASLSRSKIGAALRRGGRQRRVEERAVEIQAALRSEQLAAPPAIEAAMGISVAASVAVLAEMVAQIGHLAEELSSNFEAHPDAEVVRSLPGLGTILGARVLGEFGDEPNRYANAKSRKNYAGTSPITRASGTKKTILARHVRNRRLADAIYLWAFASLGASPGARAYYDARREAGDGHHQALRALGNRLVGILHGCLTHHLAYDESIAWGYRPDNELAKAA

SEQ ID NO: 81398 - protein, 401 aa, unidentified
MKEDSKGQRRGKARKAGNGSGKQAQEIQTMLKALEQRFAGSENGAKGRRASTGWFVGIDLGDKKSVCCVLDREGQIVAEGKFSTTREEFAELFSKIPKSRIALEVGTHSPWVSEQLESYGQEVKVANPRKMESIHKNKRKNDKVDARTLARLVRADPELLYPIRHRGAEARNDLVMIRARDALVSVRTKLITCVRGLVKSSGSRLPTCSAESFHKKAKDMLPEVLRAALAPLLIQIGSLTTRIDKYDQAVSRLAQKKYPETRSLQQVKGVGDLTSVAYVLTLEKPERFAKSRDVGPYVGLIPKQDDSGDSSKQLGITKTGDRMLRRLMVGSAQYILGPFGEDCDLRQFGLKLAARGGKNAKKRAVVAVARKLAVLLHRLWLTGEVYEPLRQKTPETIGLSK

SEQ ID NO: 81399 - protein, 322 aa, unidentified
MINKNNTKQNTIWIGIDISKRELEIHTYESSLKLPKSISNTKSSISNLIKKLSKNELIHCVFEATGGYEKLLLSMLQNEGIKASRVTPSLPRNFAKAQGILSKTDAIDAKVLTDYGMKFTPRETAKIDPVIEEIQALQKYRRHLNDELHRERMQLEHTLPKSIQTMVKTRIKTLQKQVEKVTEMMIQLKVKSPEINEAVKLLTATKGVGDKSALSLLAAMPELGELTNNQASSLAGLAPFNRDSGKYRGRRMIYGGRKEVRQALYMAALSASRYNPILKEFYQRLQANGKPKKLALIAVMRKLLSHLNLLMKRHLQETEAVK

SEQ ID NO: 81400 - protein, 465 aa, unidentified
MKPHPPLPRKKPVAGPSLLERMNPNAAGIDCGAETHYVAVPPDRDATPVRAFTTFTTDLHRLADWLAACGVTTVAMESTGVYWIPLYEILEARDLEVVLVNARHVKNVPGRKTDVVDCQWLQELHSVGLLRGSFRPTAAIAALRAYLRHRETLVQSATTHVQRMQKALVQMNLQLPIVISDITGVTGLRILRDIIAGQTDPHALAQHRDHRCQASEAEITAALTGHYRPEHVFVLHQNLALFDAYQAQLATCDAAIEAHLLTLTAQAPAPRSPVPAPRTRKKPRNNEPRFEIRRSLHHLTGVDLTQIDAIGPYSALRLLAEIGTDMSRWPTDKHFTSWLTLAPRNKISGGRLLSSRTQPSANRAAIILRMAAMNLGRTDTALGAFYRRLAYRVGKAKAITATARKLAILVYRTLKDGLVYEDPGAAAYDAQHRLRVLRRLRQRAATLGFALLNRETGELLEDAVS

SEQ ID NO: 81401 - protein, 337 aa, unidentified
MIVIGVDVHKQSLTAVAVDEAGRALAELTVAAAPELLAWSASLAPERLWALEDCRQLTRALEQTLLAEGERLVRVPPKLMAPERRAGRMRGKSDPIDALAVARAALREPRLDHPRPAERRLRELKLLVDHRDDLIDERRRAQQRLRWHLHDLDPALAVPLGALDRGVWLDRLGRRLARLEQTAQVRIARELVGRCRSLTRTILELDRELQAAAAQTAPALLALPGCGAVSAAKLLGEIGPIERFDSDAQLARHAGVAPLEASSGKQRRHRLDRGGNRQLNCALHRIAITQGRVHPPARAYLERKQAEGKSRREAVRCLKRQLARTVYTRLKNEPLLT

SEQ ID NO: 81402 - protein, 399 aa, unidentified
MKKNPPLELRVGVDVGCHSHNVAIGLSTGEILEEFSIAHEPEGFRQFFSRIEKNERNYGCPVAVAMEGYNGYARPLDTLVRTRNYRLFNINNLKLARFKEIFPGAAKTDDIDARKALELFQLRDHLPIAKDVLQEVKTTPQENDILKRISRRRRRLVYERVRVLNNLQADLQSVCPGLLEITGEAGNLWFLRFITSTDDLRKLTRLRETTIRKIPGIGAKYTSIILKWQKAAEFSHETEWVSDMIQQDAERVLALHDQIETLETQMAEMAANSNIAQLLTTMPGFGPITTAELAGEIGTIERFESESSLALYLGMSNLDNSSGKHKGSKAPKQVNERAKAAMMIAVDRHRKSVAQSQKYYENKRAEGKKHNQAVRALGRHLCRVIFKMLKENRGYFFTQ

SEQ ID NO: 81403 - protein, 363 aa, unidentified
MENVRFVGLDVHADSIAIAVAEPGRGEPEVLATIPNDTRKLLKRLRALGKVKCCYEAGPTGYGLHRDLTAAGIDCMVVAPSLVPRKGGERVKTDRRDAVRLARFLRSGDLTEVHVPDVDTEAMRDLERARDAAKRAERVARQQLTKFLLRHGRRFPEKKWSRAHLRWLHAQTFDHPAQQTVLEDYMNTAEALTARVNALTKRIAELVEGWHLGPLVKAFQAMRGISLVSAVTLAAEVCDFARFDSAPKFMSFVGLVPSEHSSGEGRHQGRVTRAGNGFVRRILVEAGWAYRHKARMSEAIRERNKGLPPEIQQIAWRAQERLCARYRKLTGRGKNRNKTVVAIARELAAYAWSMARHPALAAA

SEQ ID NO: 81404 - protein, 355 aa, unidentified
MSIVGGLDIHRKQLTFDWVDEQNGKWERGRITPADREHLADWLTRFDGVGTVAFAMEGCTGWRYIAEEMAKVGVTAHLAEPADTSALRGPKRRAKTDKADAKLLRELLAAGRLPECYIPPAQVLEWRALLELYQDLRTQHTGWAQRIQSVCFHQGTTAPGQAGIVRGDRARLRAIVDEQLSISGRLQVNTALALMDTLAEHLDRLRRRLLSTARGVKGARALMHDIYGVGPLSSLALCAWLGGPDRFTSSRKAVRFVGLDITVHSSDGKRSPGRLSRQGPEVLRWLLLEAAKTSARACAPGYNYYTQVKDRYDANRACLSQARRIVRQATHVLTGLGDDAFTVVAQPAAPTTIAR

SEQ ID NO: 81405 - protein, 344 aa, unidentified
MKNSNVIGIDLAKNVIQVCRINKHGELLSNKAVSPNKLKVLLAKATPSLVAMEGCGACHYWARLAQTYGHDVRIISPRRVKAFLQGHKTDANDALAVAIASTQFGMVFSQIKEEEQQSLQTLETSRKFLDKELTALNNHLRAYLYEYGITMNKGQKSMRAIMPLVLDAQDTRLPTCLKNTLKLLWERYQLTMVQLKETEKYRAALVKQLEPCKRLMALEGIGEVCASMLYASMGDGKEFKNGRQASVYIGLTPKQYSSGGKVIMLGIDKKGGDKALRAALYQGALSVISRLPSEPRTVKEAWLLKLLARAGIKRTCIALANKTVRTAWALLATGKSYQPVLLSR

SEQ ID NO: 81406 - protein, 347 aa, unidentified
MSEYIGIDLHKAKSFVTRVDQRGRVLEQVELRHATGEMQRYLEKVPGDTRIVVEATGNWMWLYELIEARHPDLILAHPLKTKAIASARIKTDKIDATTLAHLLRADLVPAAYIPPRAVRDTREILRFRASLVRLRTQVKNKIAAILSKNGIVTPTKTAFGVKSRQFLATVAVRPCYRLALDGYLRQLAHLTDEITQAAQTIEAQAQADPQAQLLCTMPGIGAYSALLILSEIGNVHRFPDSRHLCSYAGLVPSVHASGGKTRLGRLTKQGSTWLRWILIELSMHAIKGAPQFRQLYHRVARKHGRNAGRTAVARAMLKTIYAMLKHQEAFRPIEQGSTGQRLGAMAG

SEQ ID NO: 81407 - protein, 365 aa, unidentified
MAIELSKKSWVVAINTPLADKISRHTLPGCDWKGLLELLQRVRARVARAVGRPVEMIACYEAGYDGFWLHRLLEDHGVHCLVIDPASVQVDRRARRAKTDRIDAERLLRSLMAYLRGEPKVWSVVRVPSVAEEDDRRLHRERGRLIVERIQHVNRIKGLCAIHGIYDYKPMRPDRTRRLDELRTGDGRALPPRLKAEIARELQRLELVLQMLKEIDAERNAIASARVSAHTNAKKIQDLVKLKAIGPEFATVLTGEVFYRPFNNRRELASYVGLTPSHLQSGSTCRDQGISKAGNPKARTTMIELAWLWLRHQPGSAFSVWFRERVGNLRGRIRRITIVAMARKLLIGLWRYLETGMIPTGAVLN

SEQ ID NO: 81408 - protein, 411 aa, unidentified
MSVHDVARPVEMVVVAIDVGKNTVALSVTDDQRRRLLGPVDFAMTRAGLAATVAKIEAVVPSQARVRVGVEAAGHYHQPLLVPSSWPAGWELRELNPGHVSEQRRVQGRRRVKTDAVDLEAITELVLSGQGSPVTARAEVLGELGVWVTHRRRRVETRTATKNQLLAQLDLAFPGLTLALPDVLGTRVGRLVAEHFADPARLAGLGESRFVRFAAHRGLRVRGSVAARLVAAARDALPTRDAAVARTMLAEDLVLLSVLEEQVTAAEEHLAQVLPLTPFAVLTSVPGWAVVRAAGYGAAVGDPARWPGPRQVYRASGLSPAQYESAGKRRDGAISREGRVDLRRALIDLGIGLWLNEPSAKAYAAGLRARGKKGGVIGCAMANRANRIAYAMVRDQTTYDARYWATNTEEG

SEQ ID NO: 81409 - protein, 346 aa, unidentified
MMIVGCDFHPSWQQVAIFEAATGEIVERKLVNGNGEAEEFYRHLPAGSLVGMESCGNSQWFVELMEQLGHEVWIGDAAQIRASYVRRQKTDRRDAGHILKLLMEGRFPRLWRPDGEERDLRQLLIHRHRLVQIRTRVKNGLQHLAMNRGMQKKSKLWSAAGQRAFLQLPLPGWAGCRRQDLLALLGQLDERIKPLDAAVEKAALAHPQARLLMTQPGVGPVTALAFVVTIGDAHRFRRGKQVASYLGLIPREHSSGGKQRLGAISKQGNGFVRLLLVEAAQSVTRLDAGFRKQYQHRCHRKPKGVAKVAAARKLAVRLYWMLRSNIGYPEIVHNESSSRCPVAGAS

SEQ ID NO: 81410 - protein, 415 aa, unidentified
MAMSVLYTRCAGLDVHKETVVACLMLTASSGKITREVRTFATTTLGLQTMAQWLASQQVTHIAMESTGIYWRPVFNILEGRFEVILVNAQHMKAVPGHKTDVKDSEWLADLLRHGLLSASFIPPKPIRDLRDLVRHRKTLVRQRAPAINRVQKVLETANIKLSSVASDVLGKSGRDMLDAMLAGLGDAEALAGLARGRLRAKLPALREALSGRVEATHRLLLRQLLDVIDFLQGQIDAISTDIDALLLPHKQQLSRLMQIPGSGPLAAAAILAEMGTDMTCFPSAKHLASWAGVAPGNKQSGGKRLKAHTNKGNTHLRAVLAEVVWVISHTRDNYLSAQYHRLAHRLGKKRAIVAVSHSLVTIIYHMLQENEDYHELGFHYFQTLDTTRQRDTAVRRLQALGYKVSLEEITEVRA

SEQ ID NO: 81411 - protein, 477 aa, unidentified
MAAKKDGKTGTDPEGAGAAPEHGGDGAEVAEDRVQVVEYAAAIDVAKGSGMVCTRVPGSRPDRRRQKVWRVEATYAQVIALMDHLRCEGIQRLVLESTSDYWRIWYYLAEAAGLEAWLVNARDVKHLPGRGKSDKADCVWHCKLNERGMLRRSFVPPEPVRDLRALTRTRARLAQDQARHQARVEKILEDALLKISVVISDLFGASGRRFLDALVAGERSPKALAALGDPRLKATRRELEDALTGRFRDIHAFEISTHLRIIDAINEEITRLDDKIEEQLALVPRTAPACTACGLAGGGHAPGCADEQVPLLGLAARLDEITGVGECNARAIIAELGTDPSQFPTPGHAAAWARLTPRTRQSGETARPGRTGKGNRYIRGALGQAAMTAAKTDTRLGAMYRRIARKRGKQKAIVAVSRIICEIAWILICDPAARYHELGPDYYTPRSPARQTRDKIREIERLNPGKKVILADAAAAA

SEQ ID NO: 81412 - protein, 412 aa, unidentified
MNQDKLYVGIDVSSKNNVCYLMYSDGSKHSSFSVPNNRNGAKLIVDRVISVLLSQDIPQVVIGMEATSVYGDNLMRFLRESGSLGRFERSLHMLNPKQVKKFRDAYSDLPKNDYVDSYVIADHLRFGRINKEVYMDDYKYQALKMYTRARHQLVQELTREKQRLLNTVFISFSGLTQEKIFSDKFGATSMALIEEFSSLDELAYMSTDELVDFIRKKGKNHFDDPEEIAEAVQRAAKNSYRPPQVIADAAKQMLAISMNTIRLLQKQIKEYDKAIEKMLEAFPQTLTSIKGIGNIYAAGIIAEIGDINRFPSQAGLAKYAGLVWTQHQSSDFEAEDKRMIQGGNHHLKYYLCEAANALRRCDPEFKRFYALKYKEANKHNHKRALALTARKLVRLVYTLLKTNRLYIPPEEY

SEQ ID NO: 81413 - protein, 397 aa, unidentified
MGKPEHIRLEEFRQFRKEIRGSKEYLIVGIDVAKEKHHAFFGTATGHTLWKRLLFDNSQEGFEKLLLQIEALQVRHGLPQVVFGLEPTANYHKPLGEYLIRCEHQVVFVSGVAVKRNRELLDGRWDKHDTKDAVNVADLISQGKCLYYEHPDPRIRDLRLLLSLKKRLKRQEQGIRVRIRNGLVAQYCPELDPSFSRLIVPGKEGGLLFAMQQTSSIGCAVHPEVAFAAQVMMEELERIRKVLKAVQERIQKLCSQFPEYPYLLSIPGFGPQVSSQVLAAIGDPSRFQNGKQVLKMAGLDLSSDRSGKRSPAATPVLSKRGKADLRYALYQAALIASTRNMAFLAYYTQKLRGRAKEPGIRTKMRVKLAAKLLLIAWTLMKRKEAFNPQRLIPSALL

SEQ ID NO: 81414 - protein, 330 aa, unidentified
MSVQKSVKENHSSAEPRWWGVDVASQKLDLGCCGVDEVETFENSPEGIERLLWRVAAAPIALLVVEATGGYETALVIRLHEAGVPVVVINPRQLRAFAAAVGELAKTDKIDARMIARFGRDVRPEIRAIPAEKQRLLADLSARRQQLLELRTAETNRRKQAGRRELRDSIDAVLKVLDEQLADVDRQAAELVQTDPAWQERDRVLQSVKGLGPVTSLVLLAELPELGRLAHKQIAKLVGVAPLNRDSGKLRGRRIIVGGRSAVRSALYMAVFNGLRCNAQMREFYDRLRQAGKPFKVAITACMRKLLTILNAMIRDQTTWKNPTLNPKVD

SEQ ID NO: 81415 - protein, 404 aa, unidentified
MIFVGVDWAEAHHDLAVKDAAGKTLAKRRITDDLEGVRHLHEVLACYTDDPSEVLIGIETDRGLFVSALRSVGYRVFAVNPFSASRYRDRHSSSGAKSDPGDAEVLADLVRTDSHNHREIAGDSELVEAVKILARAHKALIWTRQRQTNSLRSILREYYPGALAAFADGLNAKQAIEVLLIAPTPELGRGLSRSRIASALRRGGRKRSIEERSTEIQQALRAPQLEAPALISNAFGETVKALASVIAELSRQIESLEAELASHFDKHPDAKIVLSLPGLGTVLGARVLGEFGDDPDRFASAKCRKNYAGSSPITRASGTKRVVLARYARNRRLADALYLWAFASLTASPGARALYDRHRDAGDSHHQALRALANRFVGILHGCLVSGTLYDETVAWETRAEIAA

SEQ ID NO: 81416 - protein, 410 aa, unidentified
MEVIVERPAALDVHKAQVTACVRFAGEGAQRAQEVAQFRTTVQGLLVMRDWLKAHRVTQVAMEATGVYWKPVWHVLEDDFELLLVNARHVKQVPGRKTDVSDAAWLCQLLEAGLLKASFVPPKPIRDLRQLTRYRKAQIKERQREANRLHKALEDTGIKLDCVATDILGKSGRAMLDALCQGTTDPEVLADLARGKLRKKIPALKEALEGRFEPLHALLIGSILAHLDFLDEQIQRLSDAIEEQLRPFAPAVELLRTLDGIETRTAQNILAEIGVDMSIFPSDRQLASWAGQCPGNDQSAGKRRSGRTRKGSKWLNDALKDAAMAAIRTNDSYLQAQYQRLRPRIGHGRALGAVKHSIICACWHMLSTGELYRDLGGDYYRRLDPERQTRRLVAQLERLGHTVTLQKAAA

SEQ ID NO: 81417 - protein, 343 aa, unidentified
MKVTTIGFDLAKNVFQVHGVDERGHVVVRKQLRRDQVASFFANLPPCLVGMEACGSAHHWARKLQGFGHRVRLMSPQFVKPYVKSNKNDAADAEAICEAVARPNMRFVPTKTMEQQAVLSVHRVRQGFVKARTAQANQIRGLLTEFGLVLPQGISNVMRGVPQLIDVATDLPASMRQLIARLLENMKVLDRQVKELEAQIKAWHQGSELSRKLEKIPGIGPLTASALVASIADARSFKNGRQLAAWLGLVPKQDSSGGKAKLLGMSKRGDTYLRTLLIHGARSAIVAAQRKGKPNVWLSGLLARRHPNVAAVALANKNARTIWALLAHECEFRPDYLPRPATA

SEQ ID NO: 81418 - protein, 312 aa, unidentified
MESAVIGIDVSKSELTIAVYPSGTTWTSATTPAALDGLVTRLTALTPTLVVLEATGGYETATAAACAGAGLRVAVVNPRQVRAFAQARNRLAKTDALDARLLAEFGALVQPPARALPDAATQALAALVARRRQLLDMLGAEQRRLLQATTTPVRRDLRTHIRWLERRLRDVDDDLTGAIQASPIWRVQEDLLQSVPGIGPTTARTLLAELPELGHLDRRRIAALVGVAPFNCDSGTRRGHRAIWGGRASVRSSLYMAALVASRHNPLLRPFYQRLRAAGKPPKVALVALMRKLLTILNAIARDQQPWKPTPA

SEQ ID NO: 81419 - protein, 408 aa, unidentified
MQVTFGIDVSKSTSTVCELIGESKNELTITNNRPGFIQLLHELTAFSKHPQIIFEATGVYSRRLQAFLEDYGYEYVVINPLKAKKEMNMGLRYNKTDKTDAYHLALIQRLYHHPINQLQSQTYKQLNALSRFYDQLTSDLVIAKNRLHQALQSTFPEIENLFSSAKGKNYWQIVVRYPHCDLVRREDKKQLINWLMSLKGIAFKHALRTADKLIELAYQAYPVVSCSSIEVEQVQYYAHRLLNLSDQRENLIARMVKLAKSLPNHDLENLESIPGFAQTTAVRVLAELGDLRRFSNPNKINAFIGIDPGRYQSGEMDSNLSITKHGNAVARKLLYRAIGQIDNAAKTNPCHIADYYESKKLSSQTKGFKKIAIASIHKLIRTIYALIINDQPYDYNVATHNQKDFSRN

SEQ ID NO: 81420 - protein, 436 aa, unidentified
MDEVEDEPLFAERVAGIDIGKAVVMVTIRVPSDTRKGRRQQETREFRAVRRDLLALADWLRCWQVTKIGMEATGDYWKPVYFLLEQQGFDCVLYHAAQVKALPGRPKTDKLDSAWLAKITERGALAGSFVPPADIRRLRTHTRYRRHLVQACTAEKARCEKLLEDAHLKLSSVISNIHGVAGREMLTSIIAGQRNPKVLAQMARTRMRGKIAQLEEALDCSFFTEEHAFILAMMLGNIDHLTAQVKELSDKIAVLCEPYARQIAQLDAVPGFGIITAQDIIGEIGTDMRVFPTAGHLCSWARRAPQVASSAGKRKGKNATGSGNPYLGGALGEAAATAGRTQTFLGTKYRRLIRRMPKKKAQGAISRTQLVITHALLSDPEAEYTDLGTDYYEQRANIRREVRSHARAIERRGYRVILEPIQPGLDPDIFPVTKAS

SEQ ID NO: 81421 - protein, 348 aa, unidentified
MRFYTKAHKHYCGIDLHARKMFLCILDASGGMLLHRNIATSPEAFLKAVAPFRDDLVVGVECMFAWYWLADLCARERIEFVLGHALFMKAIHGGKAKNDKIDSQKIAVLLRGGSFPVAYVYPPEMRATRDLLRRRNHLVHKRAELLTHIQNLAIQYNLPDIGVNLTCRGNRKEVDQHFPDPQVRKIVQVDLAMIDAYDDVLKVLEPDIEQTAKRQDWHSLMLLRSIHGIGQILGLVMLYEIHDIKRFQTVQDFASYCRLVKCVHESAGKKKGAGGAKIGNAHLKWAFSEAAVLFVRHNPSAKKLMDDLTKLHGKGKALTILAHKLARAIYHMLKKNVPFDLEKFLATA

SEQ ID NO: 81422 - protein, 326 aa, unidentified
MLEGVNGKEDWIVEESVFVGIDVSKGTLDIVMRPGGSRESIPNQEAQIGELVRRLSTLRVTLLVVEATGGVERRIVRALAAAELPVIVVNPRQVRDFAKATGRLAKTDKIDAEVLAHFGEAVRPALRTLPAPASEELRAQIARRRQVTEMLTAETNRLAHSAKAVRKRIEAHIRWLEAELDRVDNELDQSIQQSPIWREQEALLKSVPGIGAVISRTLLAELPELGKLNRKQIAALVGVAPLNWDSGMMRGRRAIWGGRATVRAALYMAALVASRCNPNIREFHRRLRAGGKAPKVALVACMRKLLTILNAMIKHRTRWSVIVEAQ

SEQ ID NO: 81423 - protein, 403 aa, unidentified
MNSVGIDISKGRSTIAVMRPFGEVVISPFEVRHTGSELSKLAKQLKSLDGETRVVMEATGNYHASVAKLLHDAGLYVSVVNAKLVHDYGNNELRRVKTDRKDAVKLANYGLDRWLTLPRYIPEEDTRLLLKNCYRQYRQYSKVQTVLKNNLISLLDTVCPNANRLFSSPIRGDGSEKWVDFVAEFWHCRCVSEKSERAFTSKYLRWCRKHGYNFREAKAHTIYAEASGHIGVMPKSETTKLLVEQAVAQLRATSAALAALKHEMQSLATQLPEYPVVMDLFGVGPTLGPQLIAEIGDVRRFYSKKALVAYAGLDAPPNDSGDVTGRHKSMSKIGASSLRRTLFLVMSVYLQTAPLDEPVCQFMDRKRAEGKLYRVYMMASANKFLRIYYATVKAYLESLEHTA

SEQ ID NO: 81424 - protein, 368 aa, unidentified
MQEICAFVGLDVHKETISVAVADAGRAGEVRHVGTIKNDPTAIGKLARSLARRHRGIEFVYEAGSCGYNVQRQLSAMGMICRVCAPSLTPRKLGERIKNDWRDAIALARLHRAGELTYVWVPDALHEALRDLVRARHAACQDVRRDRIRIQAFMLRCDLRFEGKAWSRRHRMWLCNRMFAHPAQQIAFQTYLNALEHNEARKAGIEQQIREVITDSPWAKQMQALQALKGVGPIVAATVLAEVGDFSRFAHPRQLVAYFGLAPGEHSSGGTVRRRGITKAGSSIARAVLCEAAWSYRTTPKVGQWMKERCPPVSQDIAALAWKAQLRLHKTYRKLTARGKRSVVATAAVARELLGFIWSIGQRVPLGA

SEQ ID NO: 81425 - protein, 471 aa, unidentified
MSTTPTRTLRRREVPIVSKRKVALPPQLKRVNLNAAGIDIGAEEHWTAVPPGRDPEGQDVRRFGAFTGDLCALADWLKRCEIETVAMESTGVYWISLYELLVERGFEVLLVDARQAKNVPGRKSDVLDCQWLQELHTYGLLRGAFRPVDQVCILRNYLRQRSMLVAYASHHIQHMQKALEQMNLKLAHVVSDITGLTGMGIIKAILSGERDPVKLAKLRDPRCKSSEATVARALEGHYREEHLFALQQAVELVDFYQRQISACDRQIEACLQQFEEKSTETPLTTRSRKRRRSGMAFDARSYLYRMTGVDLTQIDSIEANTALTVIGEIGLDMSRWPTEKHFGSWLGLAPGSKISGGKRLSSRTKPSANRAAAALRLAAQSLNQSQSALGAYFRRLKARLGAPKALTAAAYKLARIFYRMLKYGAGYVDQGEAAYEERYRDRLLRNLKRRAAELGFQLTTINSSTGRPALT

SEQ ID NO: 81426 - protein, 430 aa, unidentified
MKSNTQNAKIEAITEKTLVLGIDVGSETHYARAFDYRGIEYSKKPFKFSNTEAGFVTLKEWILDLKERHEKDKVVPGMEPTGHYWFNLGKFLQDNEMKPVLVNPHHVKKSKELDDNNPTKNDRKDPKVIAGLVREGRYRIPYLPDGVYADLRTASNIRFQLQAELTRIQNRISRWFNVYFPEYKTVYGKPDAKSGMLILKAAPLPEDILTLGIDGVNQIWRDAKLRAVGKARAKILIEAAEHSVGSKEGAVSARMEIRMLLEDYESRNICLQEVMTLIEGLVKQIPMAEKLLEIKGVGIKTVSGFLAEVGDISRFNTPKELQKLAGLALVESSSGKHKGETTISRRGRKRLRYLLFEVAMSLVAKNPEFRELHNYYTTRRLNPLKKMQSLMAIAAKLIRVFYAMLTKGVDYDPKKMASDIKRPAVYLQAA

SEQ ID NO: 81427 - protein, 339 aa, unidentified
MNLTPVGIDIAKSVFQLHYVDAETGEIVNRPIKRARFLEHFANRAPCLIGMEACGGAQHWARELIKMGHQVKLMPAEFAKAFNIRNKNDAADARAVWLAVQQPSKAVAIKTEAQQAVLALHRMRQQLVKFRTMQINSLRGLLTEYGEVMGRGRAALDKAIPAVLARISDRLPMVLIDTLREQWDGLTKLDEQIAVIERRLRQWMLEDKAVKAITAIPGVGVLTATAAVATMGDAKSFRSGREFAAWVGLVPKQTGSGGKVTLLGISKRGDTYLRTLLIHGARSVLHHVKEPGPWVEQISKRRPPNVVIVALANKMARTIWAILAHDRPYQKGYVSAKPA

SEQ ID NO: 81428 - protein, 343 aa, unidentified
MVSTRAITGGVDTHADTHVAAALDPIGGLLGVSEFPATPAGYGQLIGWLRSFGTVCLVGIEGTGSYGAGLARHISAAGIRVVEVDRADRQDRHRQGKSDPLDAVSAARAALSGRAAGAPRGRDGQVEAIRALMVAKRTARAQRTQTINQARALIITGPDDVRTRFTGQTPAELVAELAGLRPQPGSMVRYHTLLALRELGRRAQYLDAQLERLDELIVPLVTARAPSLLRLHGVGPDTAAVLLIAAGDHPDRLRSEAAWAHLCAVAPIPASSGKTQNRHRLNRGGDRQANHALWRIVITRMSSHPPTRAYVTRRSREGLSKPEIIRCLKRYAARETYRYLRAG

SEQ ID NO: 81429 - protein, 435 aa, unidentified
MSVPMIYPNCAGLDVHKKFVTACRMTVDEHGQTHQELCEFSTMTDELEALAAWLLEGGVTHVAMESTGVYWQPIYNILEGRFELYLVNAQAIKRMPGRKTDMKDAEWIATLMQHGLLQRSYIPARDQRELRDLTRYRLSLVDERNRFANRLQKVLEATNIKLASVATDIQGVSAQAILRALLAGQTDTQALTELARGRLRQKQDELARALKGNLTEHHRWLLTELLVQMDFLEEQIEKVEQRIEDKLAQMPPFLEAVRLLDTIPGVDRHLSIMIVAEIGVDMGRFPSDRHIAAWAGVAPGNNRTGGKQRSSKARQGNKYLKRCLALAAHGASRKKDSYLRSLYYRLAAHRGKARASVAVGHSILQMAYHMLRRGEPFREMGANYLDQLDRTRTARRLVKRLEALGFLVIVKDQPTVIASSSDVQSPSISALPLVT

SEQ ID NO: 81430 - protein, 414 aa, unidentified
MEKSYRIAGIDVHKKMLAVVVAEGLSEGQMWFERARFGTMESELGRLANWLKERNVGEVVMESTAQYWKPIWQKLEGQCQLYLAQAQSNRGPRGRKRDFVDAERLVRRHMSGELILSFVPDAEQRLWRIMSRTKYQLRRDRVRLQNQLEALLEEAHIKLSSCVSDLLGMSSRRILEALSKGESDLQRLVAMVDPNLRATEEQLQDALQQAPYLSEPHRQILGLFLARLQLIEEQIEALNSNLGQALRQYNDAVLRLAEIPGFGVDSAQQVIAEVGPTAATFPSPQELSSWVGTCPGKEESAEVSKNNRSPKGNRMMRRLLNQAANAAVKTKGSVFENLYRRWVCRLGHNKTIWAIANRLCRLAWKILHQGVRYIEYGNCPNPKAVKARAKRMIRELQALGYQVQLLSPPEPLAS

SEQ ID NO: 81431 - protein, 377 aa, unidentified
MKAPSTRPAAVLGLDVGKSSHWACLIDRDGEVLASAPVRNREAELDALFASAPAGTLVVVDQFRNIGSLAVRRARAAGLGVAYLPGLAASRAAGLFAGEAKTDERDAAVIARTALGVPDSLSGVPGRGEALEAARALSSQRDHVVACATRDKNRLRAVLLESCPALEAAVDLSDRRWLELLAGFGGAWGIARSGAEGPRAEAAGEAAAASTAPPPALVEAENRQVRFLAARISEALDEAGALEAETAALLEGDETYACLLTVPGIGPRTAAQLAVSVDIGRFPDHDHLASYCGIAPRVRNSGTSVRSVRASRRGDARLKSLLIFSCNSLVRSSGRYGEYYRACRARGMVHGRALKAVARKRLRAIYAVMRDRVPYRE

SEQ ID NO: 81432 - protein, 420 aa, unidentified
MSFKIFRKNCCGLDVHKTWIYACIGITDANGRTDYKQARFSSFSKGLKELCDWLAKYNCSEVCMESTGKYWIPVFNILEKADNSIILAHPKYTKPQKGNKTDRKDAKWICDLFMCDMIKPSFIPPADIRHLRDLVRYRFKLTCMVTGEKNRAQNCLTISNLKLDDVFSDVFGKSSRSITEHMLTHPGELFDVKPFVDGRCKTPVEEIQAAVDGAISPEQAIKLRQCLDHIDELDKHLEQIEREILRLSDKYQAALDLIRTVPGFDKNPITAIQILSEIGGDMSVFPTAKHLVSWAGCCPRNDQSNKKIKSTRISRAGTYFKPILVQVANALLRSKKHPEITIRYKRIKAHRGHKKAIIAICRMLLTAIWHILSDLKPYTAEGFLESRPVNESKVLTTSQALNLLKQRGYIIKDDVIPTMN

SEQ ID NO: 81433 - protein, 343 aa, unidentified
MAEYAALDVSLQSTSVHIVDQQGCCIWRGKCPTDIAALSSTIRKHAPEVERVGLETGMLATWLYHGLAKAGLPVVCMDARQAKAALSCRVNKTDANDAEGLAQLLRTGFFRQVRVKAEATMLVRTLLSARRQLVRTGLDLANQIRGLLKIFGLLLPRGGGRLFEAAVRERLAGQQQLTAVIMPLLEVWRTVREQVLVLDRIAYAVAKRDARCRLLLTAPGVGTITALAYVAAVERPGEFKNGRAVSAWVGLTPARYQSGQIDYSGRISRQGDVHLRTYLYEAANTLLTRSRADSALKRWGLGLRARLGHKRAVVAVARKLAVVLHAMWAKEETFKTDAGVAAT

SEQ ID NO: 81434 - protein, 424 aa, unidentified
MSYRIAGIDVHKKMLAVVVSDVEVDGEYQFERIRYGSSPEHLRLLAEWLIAQQVEEVVMESTAQYWKPVWGALERYWKPICRERESAGPMSGTLHLAQAQSNRGRRGRKKDFPDAERLVKRLVANELTLSFVPDTEQRLWRTVTGRKYQLTRNHVRLQNQLEGLLEECHIKLSSLVSDLLGASARRMLQALAEGETNPAAVAALADKNLRATQAQLCDALGACTELKPIYRRLLKMFLEELQLIDQQISQLDQEMASLLSQHQDSVKRLAEVPGLGVDSAQQIIAEVGAKAATFPSAKQLSSWVGACPGDEESAEVSKSHRSPKGNRHMRRILNQAANAAAKSKGTIFEIVYRRLISRLGHNQTIGAIAHRLCRLIWIILHRGVRYEERGPSVSAKSRRHRTNRMIRELRSLGYQVEPVVTTTV

SEQ ID NO: 81435 - protein, 338 aa, unidentified
MDKYAMCGIDVSAKQLVVVVQREGRNQPARSFANSRQGHKELKRYLAGAGSRLRVCLESTGLYGLDVALFLHADTRFEVMVANPRAVKNFAQALLERSKRDPIDARVLAEYAARMPFQAWQPPSPAALSVTALARRMHALTESATREKNRLHALSATATTLKVLVADLKRSLQSMAQAQARLAREARKIIAADALLERRFRLLLSLPGVGQTSALQLLGELALVPVDAEVRQWVAYAGLDPCECTSGSSLAKRPRISKVGNRHLRRALYMPALTAAHHHPAFGSYYRALQERGKCKMVALVAVMRKLLHAVFGMFKHDALFDGARVCPSLAVPTSVAA

SEQ ID NO: 81436 - protein, 397 aa, unidentified
MYIVGIDIAKRKHEAAVIDGEGAVIIKPFSFTNNCSGYNRLLAMLAKAKLPLDEVSFAMEATGHYWLALFTRLQKEGFRVQVINPVQTNSIRSFYIRQAKTDPRDALLIAEVIRFGHFSESTLHPENIYELRELCRGRHAIVSMQADVKRKVVALLDQVFPEYETAFTNMFSDTSMAILQTCPTPKELSEMPLEELCHLIEVSSHKRFRMAKAQELQALARNSFGFAMAGDVFSTMIRLYAKHLDFLKQQVREMDRKIAEIMETLDTPITTITGIGPTLGAYILSEIGDISRFSSAAKLAAYAGIDPTMRQSGEYNGVRNRMSKRGSPYLRHAIWLAASSAVLHDPALKLYFQKKRDEGKPYMASVGHACRKMVSIIYAVMRDNKAYTPCIPNEISA

SEQ ID NO: 81437 - protein, 418 aa, unidentified
MKRIKAKGRQVVNEKTLIVTVDIGKTMNMGYCRCPDKTEVKPFEFQNGYQGFEKFLDVIGTTKQAKSLEHVVVGFESTGAYAEPLIHFLKTREIQIVQVNPLHTRKLKELQGNSPNKTDKKDPKVIADIIELGHALTVVVPEGAAADLRRLTNARERVLQRRTVLLNQLQDIVFICFPEFLEIMKGVNTQTAHYLLRRYPRPPDILEHGLDALVCEFRKISRGRLGTDRAKSLHEAAKTSVGIQEGSLGLMMDIQECLASIEQCTLFVKQLEKEMFRCLQEIPYSALLLSMRGIGKVTVAGLIGEVGDFRNFKNISDVLKYAGLNFYEISSGQRKGNRHITKRGRALMRKLLFLAAVRTVRKGGIMHDHYQRYLQNGMKKVKALVAVSRKLLGIMLALVRDSSLYEEDHSQAGYRKAA

SEQ ID NO: 81438 - protein, 348 aa, unidentified
MRVYNTQHSHYCGVDLHARSLFVNVLDHTGATRLEQDIPASPQAFLDAVRPYRDGLVVGCECMLAWYWLADLCERESIPFVLGHALAMRAIHGGKAKNDRLDAQKIAGLLRGGFFPMAYVYPKARRETRDLLRRRSFFVRQRAQLIAHVQNTNSQYNLPPFDKNLTYRGNRSAGIADRFEHPSTRLSITSDLNLIESYDTQIAALETHLVKSAKVDDPATFGFLRTVPGIGPILGLVLLYEIDTIRRFAEVGNFLSYARLVACTHESAGKVKGVGGRKIGNAHLKWAFSEAASLMLRSFPAAKSWMQRRSKKRGAKKAHAILEAKIGRAVYHLWRKQVAFDGKTFLAS

SEQ ID NO: 81439 - protein, 360 aa, unidentified
MLTERTSVGLDVHARSVVAAAIDGVTGELIQSRLTPSHDHIRSWLSNLPGPVAVAYEAGPTGFGLSRALTAAGIRCEVVAPSKLQRPSGDRVKTDAKDAVHLARLLRLDEFTAVSIPTVDQEAARDLVRSREDARGDLMRARHRLSKLLLRQGIVYSGGQAWTGVHEAWLRRQRFNSPALQMTFESDFDAVLTVKARRDRLDEAIAVMAAGSEFTSLVRRLGCLRGVSNLTALALAVEIGDWHRFTGNTIGSFVGLVPSEYSSGASRVQGSITKTGNTHVRRLLVEAAWHHRARYVVGKTMRDRWELASPAARTRGDAGNRRLNARWNSFRERRKRHVVANVAIARELAGWCWSLAVLEE

SEQ ID NO: 81440 - protein, 403 aa, unidentified
MNSVGIDISKGRSTIAVMRSFGEVVISPFEVRHTGSELSKLAKQLKSLDGETRVVMEATGNYHASVAKLLHNAGLYVSVINAKLVHGYGNNELRRVKTDRKDAVKLANYGLDRWLTLPRYIPEEDTRLLLKNCYRQYRQYSKVQTVLKNNLISLLDTVFPNANRLFSSPIRGDGSEKWVDFVAEFWHCRCASEKSERAFTSKYLRWCRKHGYNFREAKAHTIYAEASGHIGVMPKSETTKLLVKQAVSQLRATSTALAALKQEMQSLASVLPEYPVVMDLFGVGPTLGPQLIAEIGDVRRFYSKKALVAYAGLDAPPNDSGDVTGRHKSMSKIGASSLRRTLFLVMSVYLQTAPLDEPVCQFMDRKRAEGKPYRVYMMAFANKFLRIYYATVKAYLESLEHTA

SEQ ID NO: 81441 - protein, 352 aa, unidentified
MLYTGIDYHKKYSVVSTQDATGARIREARIDENEPAAFAAYFQSLPEPSRVVVEACWNWGWLYDELGEIDAVEDVVLAHPFKTRLIADAQIKTDRLDARALATLLRGNLVATVHAPTPANRARKHVIRQRLFLVRGRTMLRNRMHTVIARQRQLARPVFSDQFGKKGLHWLRTVTLPAPDDTLLKQDLATLEQLGTVIKELETHIAAANADDPAAVRLQTLPGVGPILAAVMAAEIDGIARFPRADKLCCYAGLVPTTHSSGGKTAHGRMLPHANRWLKWAFVEAAWVAVGCSPYFGTIYRRHRDRGKKANTAITIIARRMCAIAWHLLHDGRDFAPNPPKLPLSPVAPLKD

SEQ ID NO: 81442 - protein, 391 aa, unidentified
MIYVGIDVSKDKHDCYIVNSDGVVLADVFSVENNLDGFDLLLQRLKSVAPDLLNVKVGLEATGHYSYNILGFLLDKGLATFVLNPLHTNLFRKSTSLRRTKTDRVDARTIAAMMSSGIVLKSYTAISYHNEELKSLSRYRFDKVRQRAKLKQAVSRLVTILFPELEKLVPSLHIASVYALLAELPGAKQVASCQLTHLTNLLSAASKGHYDRSKAVELRNAARRSIGSTMPAKSLELQHTIRLIRELDAEINEIEAAIKQFMDQIASPILTIPGISYRMGAMILAEIGDFSRFDSPDKILAYAGLSPSTYQSGKLDNAYAHMEKRGSRYLRYALYNAAKYVCHWDASFCAYLAKKRAEGKHYNVALSHAAKKLVRLIFALQRSGQPYCPTA

SEQ ID NO: 81443 - protein, 344 aa, unidentified
MDHFAGLDVSVKETSVCIVDDSGKIVREVKVASEPEDLLQILSNPAYHFKRIGLEAGPLSQWLFSALVEAGLPVICVETRHMRAVLKAQINKTDRNDARGMAQMMRAGLYRPVHVKTLRSQKLRMLLTHRKLLQSKAIAIDNDLRGTLRNFGLKVGVVRTVKFEVRIRELVENLPDLAAMVEPLLIVRRTLREQFCVLHRRLLAIVRDDEVCRRLMTTPGVGPVVSLTYRATVDVPARFHKSKSVGAVFGLTCAKYQSGEVEWSGRISRCGDEMMRVMLYEAAQAMMRSKKWSWLKAWAMQIARRRGMKKAIVALARRLAVIMHRIWVDGTEFRWTREQAAAAA

SEQ ID NO: 81444 - protein, 346 aa, unidentified
MMIIGCDYHPSWQQVAWLNLQTGETGEQKLVHAEGQAKAFYQQLTAPVLIGMEATGNSQWFIELVQDLGHVIWIGDAAQIRASYVRKQKTDKRDAAHILKLLLEKRFPTLWTPDREQRDLRQLVLHRHKLVEIRSRVKNELQHLSMNKGVQRKAKLWSQAGQQMLRELPLKPWAACRREDLLGLLAMLNQQIGKLDEAVEHAAEENPQAKLLMTQPGVGPNTALAFVLTIGDVSRFPRGKQVASYLGLIPREESSGGRQKLGAITKQGNRLVRSLLVEAAQIAVRFDPGFRKQYLHRCHQKPKGVAKVAAARKLAVRLYWMLRTQVRYPEIVRIESSPRVPLVGAS

SEQ ID NO: 81445 - protein, 337 aa, unidentified
MEKGITYVGLDAHKVAINVAMLLPGQTRPVEWQTSNGQAAVRRMVRKVQRTAQGEVRFCYEAGPCGYALQRWIGAIGLVCVVVAPSLIPRKSGERVKTDRRDARKLGELFRAGLLTEVHPPTEEDEAVRDLCRAREDAHADLVRGRHRLSKLLLRRGWAWTGGKKMWGQGHRLWLRSLRFEHREGQWVLDDYLLAIENLEERLRGLDTQIEQVSQDPRFARVVGALRCFRGIDTLTAMCLVAELHDFMRFDSARGLMAYLGLVPSEHSSGGKEHRGEITKTGNHHVRRLLIEASWHYRHRPSTLSLTKRRKGQPARVVAIARELTGFVWAAMRQQAA

SEQ ID NO: 81446 - protein, 465 aa, unidentified
MARKRNKMKSKATKKSVQMFKTVHPYAAGIDLGSREHWVAAPPLDDGHPNVQCFGTTTPELVRLADWLTQEHVVTVAMESTGVYWIPLFEVLDSRGFEVHLVNARQLSHVPGRKTDMIDCQWLQLLHACGLLRGSFRPSDDICRLRALIRERSMMVDQRSDWVRRMQKSLDQMNVCVHHAVSDITGVTGMAILHAIVGGERDPRVLAGLRDPRCRKSEEQIVEELTGNWRPEHLFNLRQSLKIYDQLCSAIDDYDREILSTIEQIQPSDNNGTSAPPPASKSKAAAIAKRGQEPLRQSLYSLTGIDLTTIDGIGVDTASVITSELGLDFSPFPDENHFVSYLRLAPNMSISAGKKVPSKIKATTCTRVSNALRMAALTLRNSKIALGAYYRRISRRKGASVAVFATARKLAQLIYRLVRYGQAYFDEGARAYEARFAKRRLDSYTRILREMGYKVELLETQESFG

SEQ ID NO: 81447 - protein, 426 aa, unidentified
MNCSQNKKLNQVTEETLVIGIDIAHETQWARAFDWRGVEFGKVFRFENSKEGFEAFGRWVEKLKHSTGKTAIMVGAEPTGHYWFNLASYLKESGMKLVLVNPHHVKKSKEMDDNHPSKSDRKDPKTIAKLVCEGRYNEPYIPEGVYADLRSMMECRRRVCKELNQIKNRIQRWLSLYFPEFVKMYCKIDTVSGLIVLENAPLPEDILALGAASLNELWRKSKVKAVGMKKAMSLYEAAKNSVGCSGGNGARLELRLLLADYRIKMEQYAQIMAEVEKLVEQVPNANKLMEIDGVGLVTIAGFVAEIGDIGRFQSSKQVQKLAGLALRENSSGQNKGQTTISRRGRARLRAVLFQAVMPLVSKNQEFMEIHRYYTTRSKNPLKKKQSLIVLCCKLIRVFYALLTKGSAYDPIKLATDIRRTAQPLAA

SEQ ID NO: 81448 - protein, 422 aa, unidentified
MKFKSQAKQNQLIEKITTHHLVVGIDIAQQLHVARAVNFRGIVIGNPLSFSNDEEGFQQLLQWIQRLQTDHKLTAAIVGMEPTGHYWLNISRWLAERQFEVVLVNPHLVKKNKENRDNTPSKSDKKDALVIADMVKNGYYSFTRSTPEAFEELRVLVSNRDFVVKRMVSAKNQIHRWVDVVFPELRQVFKKLMCAGSLTTLRLFPTPEELSKLQPKELIQGWKSLMKRHCGERKARALISLAGSSVGSKQAAHAYKLHLKQLLAEYDLALSQLQDVEQEMVSVLERIPFAKFMLAIKGVSAISVAGIIGEAGDLSGFIHGNTLLRHAGLNLAEASSGKWVGQMKISKRGRSRLRRFIFMMTLSLVRNNPEFRSIHAHNVHVKKMKKMRSIMKLCGKLARILVGMARTGQAYIPHKALPLKAA

SEQ ID NO: 81449 - protein, 405 aa, unidentified
MCIPDDSAPLRYIGLDIHKAYFVAIGVNRDKEQVFGPQRVANGQLAAWIGRELTGRDAVVLEMTTNTWTMVDALEPHVHSVMVTHPPHVHLITRAQVMTDRKAALILAQLHAAGLLPAVWIPPAEVRSLRALVAQRWKMTRLATQAKCRLQSLLHRYHFDPPPKRDPYTPHMRPWWEALPVEPLEQFRLQSDLDTVAFAQAQKARIETCLAQFAARDDRVPLLAQIPGIGFINAMTILAAIGDISRFPTADQLVGYAGLGTKVHDSGQVQWRGRITKMGRRDLRRAMVEAAQSAVRYHAHWRAVYSRLCQQTAPKKAKVAVARKLLITVWHVLTHGEADRFASDEQVACSFFALAYKLQVRNLPDGMSALQFTRHHLDRLGIGQHLTHIRWGSKTYKLPPSGLPD

SEQ ID NO: 81450 - protein, 400 aa, unidentified
MGMNEVWVGIDAGKGHHWACAVDATGKTLLSKKIINGEDEILAGLGEILGLAPKVNWAIDISSSPSSLLVALLIAHGQNPRYISGTLVKQMSRALGSENKTDANDAHVIARTSVFAADRLSDLKIPAQIMSDLTLLTSHRTDLVRDRTRAYNRMRDTLTGVFPALERAFNFSAHKGAMVLLTGFQTPAALRRMGHSRLTAWLAKRGVRLPHGVAELAIEAAKAQQTSLPGEDAAAQIIEDLANSILNLTERIARAEKQMEKMLNEHPQGPILLSMPGMGHILAAELLVAAGDFSAYATEGHFASAAGMVPVSRDSGTRTGVNVRPKRYSRPLQRALFLTAQAACFHHQRDRDYYNRKRAQGMRHSAAVICVARRQIRMLWTLLREDRKYQLEPPERRSNA

SEQ ID NO: 81451 - protein, 309 aa, unidentified
MDAQYVGIDVSKARLDVHVRPSGDAFVVARDDKGLAELVERLRAIAPRLIAVEATGGYETVVAAAIGGAGLPLAVVNPAQVRHYAQALGKRAKTDPVDAEVIARFAEATHPEPRALPDEASQALAELVTRRRQIITMMVAERQRATRLPKRLRKSCERVVRMLEKELAALDIDIDTTVRGSPAWRATEDLLASVPGVGSITARALIAELPELGRLDRRCIASLVGVAPFTRQSGQWRGKSFIAGGRRSVRAALFVATMAAVRHNSIIRDFRQRLLAAGKPKMVAMIACMRKLLTILNAIARDQKPWQPA

SEQ ID NO: 81452 - protein, 455 aa, unidentified
MPKRRKKVLPRGLAPVPVLEPNAAGVDIGATEIYIAVPVDRDSEPVRRFATFTEDLIAAADWLERCGIKTVAMESTGVYWIPLFQMLEGRGLKVCLVNARHVKNVPGRKTDVSDCQWLQYLHAVGLLRASFRPEQQVCAVRSLMRYRESLVAMATVHLQHMQKALDQMNLQLHHVISDLSGTTGMAILDAILAGERDPRRLARLRDGRIKATEATIARSLVGDYRREHLFTLRQSVIAYRHYQEQMAACDVEIEQMLGEFSCAAEGGAGPLPPNAKHRQKPRRNEMRFDLRGHLYRIFGVDLTGVPGINALTAHTLLSEVGRDLSAFRSAAAFASWMGLCPDNRVSGGKVLSSRTRGVNNRLARALRLAAQSLFRSQSWLGQYYRRMRAKLGAPKAITAAAHKLARILFHLLSTRTSYDESVFAQQEIQNNQRMQRKLQQQAKSYGFQLIEITPS

SEQ ID NO: 81453 - protein, 335 aa, unidentified
MLYAAIDIHKRRFQAAVFDSESGAVSEQRFDASGEELRDWAMPLRGRVVAVAVEATTGWGWVWRELRVLGFDVRLADPSEVKALRGTAKRAKTDRLDARWLVVLLAKELLPESWLPPAEIQRLRDKTRLRKAIAEDRTRWAQRLQAFLQHEGWPCARGRLLTAEGRRWVSGLALAPVARAQVETLLRLIDLLEDEQRELESELRRFARSDRRCQALETIYGIGPILACHILAELGEASRFRRARSAVRAAGLDPVVADSGETRRRGHLAKHGSPELRWALVQAAHQARYRRSPDRALYGSIKARRKAAQPAVLTVARKIARRSYHALHALEQQAA

SEQ ID NO: 81454 - protein, 362 aa, unidentified
MDKVIKDGTDMTIGVDLGDKWSRLCVLDEHGEVCEEGRIATTTDAMRKRFSTEAPCRIVIEVGTHSPWVQRLFQELGHEVITAHTQSVRLIYGGTNKDDRLDAERLARLGRLDPKLLHPIRHREGSTQADRAVIRSRYVLVGCRTKLINHARGMVKSMGGRLPTCTADCFPKRVREALPKELKPALRPVLETIGALTTRIRRFDRLIEELASKRYPETDVLRQVSGVGPVTSLSFVLTIEDPARFRRSRALGAYLGLSPRRSQSGDVDPELRITKAGDNDLRRLLVGSAQYILGPFGPDTDLRRWGLALAARGRKNAKKRAVVAVARKLAVLLHRLWVTAEVYEPLRNPADKPDSIAQAVSA

SEQ ID NO: 81455 - protein, 369 aa, unidentified
MLRFRLMVNEVRGYGLKHQKEKRSMDHFAGLDVSVKQTSVCIVDDTGRMVREVKVASEPEALLPVLTNALYRFKRIGLEAGPLSQWLFSALAEAGLPVICVETRHMRAVLQAQINKTDRNDARGIAQMMRAGLYRPVHVKTLRSQKLRMLLTHRKLLQSKAIAIDNDLRGTLRNFGLKVGVVGALKFEARIRELVENLPDLAELVEPLLIVRRTLREQIGILHGRLLAIVRNDDVCRRLMTVPGVGAVVALTYRATVDVPARFRTSKAVGAVFGLTPSRYQSGEINRSGAISKCGDEMMRAMLYEAAHIMLVRLAKWSWLKAWAMKIARHRGMKKAIVALARRLAVIMHRIWVDGTEFRWTREQAAAAA

SEQ ID NO: 81456 - protein, 373 aa, unidentified
MAFKNWMSGIAEKHGKEVVLPGMEPTGHYWFGLGMFLQNLGMRPVHVNPHHVKKSKELDDNNPNKNDKKDPKTIAALVNEGRFSYPYIPSGIYAEIRNLSNLRFQTQEQITRIKNRIARWFSIYFPEYKDVYGKLDALSGMMILKEAPLPGDIVKLGVDGVNKVWRNAKLRAVGLKRARTLVNKAEHSIGSQAAPEAARMELEILIHDYEMYNQRMEELMQTIEEKLYEIPYIDKLMEIKGIGMITICGFIAEVGDIRRFDNPKQLQKLAGYAIVSNNSGKHNGESRISYRGRKRLRYVLYEAAISLIGKNAEFKEIHHYYRTRERNPLKKMQSVIAVACKVIRIFYAILTKGVAYDGGKMLEDIKRSVVAMN

SEQ ID NO: 81457 - protein, 407 aa, unidentified
MLFVGDDWAEDHHDVELQDVSGRVLARAKLPEGVAGIARLHAMIAEHLGDDVDEAEVVVGIETERGPWVHALIAAGYQVFAINPLQVARFRQRLSVSGAKSDPADAHAIADMVRNERHQLRPVAGDSTQAEAVKVLTRSHKTLIWERTRHLLRLRSALREFFPAALVAFKDLDAPDALELLAAAPDPVSAATLSVDAIEAALKRARRRNRAAKAQAIAAALRTEHLGQPPVVAKAYAATVRAQAAILTVLNTQVEAMEEQVEAHFGEHPDAKVYLSQPGLGVVLGARVLAEFGDDKQRYADAKARRNYAGTSPITRRSGKKTVVMARYVHNDRLLDALGQQAFSAIRHSPGARAYYDQIRARRTGHRAALRQLGNRLVGILHGCLKTGTVYEEVKAWPQHQDQQLAA

SEQ ID NO: 81458 - protein, 366 aa, unidentified
MEKVRFVGLDVHKESIAIAVADSDGSAASFVSEVPNDLPRLLKELRKLGKASELRCCYEAGPTGFGLHRALMAAKIASVVIAPSLVPKQAGVRVKTDSRDAVKLARFHRSGDLTPIHVPDAATEAMRDLERSREDAKNAERIARHQLSKFLLRQGHRYEGKTWTDKHLAWVRALPFDHEAHHRVLVDYVHAVEEGAARVKRLDKDITELVESWSLKPLVQAFQALRGVRLLSAVVIAAELGDMARFARPSQLMAYLGLVPSEHSSGESTKRGGITRTGNTHVRRILVESAWAYRFKPALTRIIRERNEPLAPGVRAIAWKAQHRLHGRYVRMLARGKNKQQTVTAVARELAAFAWDIARQPELLAA

SEQ ID NO: 81459 - protein, 348 aa, unidentified
MSHYVGLDISMKETVICIVNEKGIIVHRGKSKTDPEKISYHLKKLNLNIEKIGLESGSLSHWLINELRKFELPAICIDARKMAAFLAVRVNKTDDNDAEGIAEAIRCNLYKEVSQKSQEAIEIGTLIQCRKTLVRQRVQLINSIRGFLKTYGIRLESCGEKEFPERVRAVLPGALMIAREGIESLVSCYEKLCLEIKNLDKKIETLGREDEDVKRLMTVPGVGIITAMSFKIEIDDPHRFKKSRDVGAYLGMTPRQYSSGETKRQGRISKCGSSALRTLLTEAGLVCLTRSKKWSRVKAWGLKIMRKHGVKKASVAIGRKLAVIMHRILLEKKDFIYGEEKKPEVKAA

SEQ ID NO: 81460 - protein, 344 aa, unidentified
MSEVSIIGLDISKHVFHAHGVDGRGRAMFSKRISRGKLLDFFATQPSCTVALEACGGAHHWGRQLGQLGHEVRLIPPAYVKPFVRRQKNDAIDAEAICEAAQRPNMRFVAVKSQEQQAAGLVFRTRDLLVRQRTQLINAIRGHLTEYGWVAPKGPSHVAMLADLIEEEEMANSLPGAARAMFRVMLGLLTGLSSKIAALDKEIARRAREDEVSRRLMTVPGIGPISATAIAALAPPAETFAKGRDFAAWLGLTPLQRSTGGKQKLGAISKMGERTLRRLLIIGSSAVVKQASKRGAPRGSWLEQMLARKPRMLVTVALANKMARIVWALLVTQETYRAPVAARA

SEQ ID NO: 81461 - protein, 344 aa, unidentified
MTIVTRAVTGGVDTHGDVHVAAVLDEVGTLLGTDSFPACTSGYVDLTRWLRHFGAPAKVGVEGAGAYGAGLARHLASEGIEVIEVDRPNRQARRTQGKSDPLDAVEAARAALSGRAHGHPRGRDGVVEAIRVLVVAKRSARGARVRAINQMRHLIYSAPDELRLRLKALSITEPVATASALRPKRCGDPVMAATQAALRSLARRVHALGEEMRLLEQLLQPLLEAAAPALLSVRGVGPDTAATLLITAGDHPERLRSEAAWAHLCGVSPLPASSGKLIRHRLDRGGDRQANSALWRIVMVRLACDPETQRYVERRTKEGKSRREAMRMLKRYVAREIYAYLRAT

SEQ ID NO: 81462 - protein, 440 aa, unidentified
MGGMSVKCSFVSSDFCCLYSSGYMISFMHYKMRHVYVGLDLHKAHHTAVIINCWNERLGEIQIENKPSAFDELMKFVKKHTPKEMTPVYGLEDTGGNGRALAVYLVENKQNVKEVNSALSYNERMSNATTQKSDSWDAYCIAKVLLARLDDLPDANPQDMYWTIGQLVARRNALVKHAASLKNQLHQQLSYHYPSYKKFFCDIDGKAALAFWEKYPAPHHLNSVAAEELAAYLRKASHNTCSTRKAEEILELVKKDGETKRNYQSSRDFLVVNMVQDMRRSRELIKQTEEQLRQVLAETDFKLQSMDGISTVTAAELIAEIGDIRRFSNADKLARFAGIAPIRFSSGGKGKDQASGQGNRVLNAIFHNLAVQQIQVAKGDNKKQRNPVFYEYYQRKLAEGKTKKQALICVMRRLVNIIYSMMKNKTEYRAAATLTERQAS

SEQ ID NO: 81463 - protein, 344 aa, unidentified
MENYAGIDVSLELSSVCVVDAQGKIVKEAKAASEPEALVAFFRTLGFAVKRIGLEAGPLSQWLHAGLKRAGFEAVLLETRHVKAALSAMTVKTDRKDARGIAQLIRMGWFRPVHAKSIGSQEVRALLVARKQLLERLIDVELSIRGILRGFGLKVGPVTRKGFEVRIRELVTGQATLERITGAMLSARAALKAEYEKLHKAVLALVRDDTVCRRLMTVPSVGPLVAITYKSAMDDPRRITRSKSAGALFGLTPKKYQSGEKDVTGGITRAGDEMVRTALYEAANVLLSRITRFSKLKRWGMDVAKRRGSKRAKVALARKIAVILHRMWIDGTTYRWAAAEPIAA

SEQ ID NO: 81464 - protein, 350 aa, unidentified
MKIFVGIDIAKLNHFAAAISSDGEILIEPFKFTNDADGFQLLVSKLESFDKNSIIIGLESTAHYGDNLVRYLVAEFYQVCVLNPIKTCQMRKNNVRKTKTDKVDTFVIAKTLMMQDDLRFITFFDLDMMDLKALGRFRQKTIKQRTRLKIQLTTYVDQVFPEIQYFFKSGLHQNAVYALLKEAPSPKEIASMHMTHLANLLKVNSHGHFTKEQAKELRILAQKSVGANDSAISIQITQTIQQIELLDSQLEKIEAEMTDIMKFNDSVIMTIPGIGYINGGMILGEIGDIHRFSNPNKLLAFAGLDPSVYQSGNFQAKTTRMSKRGSRVLRYALVNAAWNVVRNNATSSLL

SEQ ID NO: 81465 - protein, 343 aa, unidentified
MQVIIGVDPHKASHTAVVIDTNEAQLDLEKVRASRCQVDQLLTWAAPYRARTWAIEGAEGMGYLLAQQLVAAGEHVVNVPAALAARTRVLGSRRSSKTDPNDALSVAVTALRTDGLHQVRPAGHSEVLRVLAKRNTDIGNQRSRVVCRLHAVVLELTAGGIAKEINASDVDGFLAAFTPTTPAQQVRFDLAIDLLDDIRRLDAQLKASHQRIRTAVAASGTTLTNVYGIGPIIAAMLIGYTGDIGRFADRDRYAAYNGTAPVEFSSGGRTVHRASQRGNRQLNHALHMAAITQLRQPSTEGRVYFDRRVAEGKTKKEAIRSLKRQISNTVYRHLVADAATVRG

SEQ ID NO: 81466 - protein, 364 aa, unidentified
MFYSGIDQHKRSSYITTLNSDGIIIKQAEIKNNSFDILNYFLSIGNEHLATVETTGGWYWLNDLLSSNGINLKLAHAKYVKAIAYAKVKTDKVDSHILAQLLRMNFIPEAYKISDDVRPLRDTLRARLRLSQKRTSCLNFMNRMLEKFNIDDPASLPAFYKLQYQQFDNQEHLLKEQMLILEKSLYPSLIPNEDIQRILWIPGIGKMNAFTLLLEVGDINRFESEKNFLSYCRLVPSARNSAGKIKQKSSPKDGNKYLKLVFSDAAVHALQYYPVIKKYHDSKLRKKKKQVAHAIIAKEIARIAFYVLKYKSDFNNHFKGVLLENKKSFQWPRIIPTKSGLEWEVMRMPIIYLGYPFLRITLFH

SEQ ID NO: 81467 - protein, 404 aa, unidentified
MKGPIVSIDVSKGKSDYQAFKDLNVKYTGSRSIKHNKEGFDEIVNLVKEMEKKLETEVCVVYEATGVYHRVLKKVLEDNNIKQFIINPLLSAKTRKNDSLRSPKTDKLDPKSIAKTYYSHSLHNSHKQETIYHELRELSRYYEDILVHIRKDKVAFRAQLDIVFPGYDTLYDDLYGPVALAIIEKYPHPEMLQKKKINTVSKVIQNKTCHRQAVSDTMADKAIEYSKTIYSGCDKDDIEVLILQRFIKKLNEDMAEAERTIGEMIKLAQELPDFSIIKSIPGIGDNLAARIIAELGDMTRFKKKNELVAFAGLDPRISESGQNDGDHMHITKKGNKRLRCLLYLAVTCSIRLKRDDNSIKDFYIKKKQQSNPMCSKAAKTACASKLVRIIYSMCKTGELYQYNK

SEQ ID NO: 81468 - protein, 338 aa, unidentified
METYAGIDLHSSNNFIGVINDKDKRLYGKRHANRLTDVLTALDPFKESLQGVVVESTFNWYWLVDGLQENGYQVHLANPSAIKQYEGMKHTDDQWDSFWLAHMYRLDLLAEGYIYPKAHRAVRDLLRRRVLFVQQRTAQILSLQSMISRNLGFKMSNNEIKKLTANDIEGLFDCPNLVFMATNSWVTIEFLKHVISGIEKRVMSQAKLRKEFTMLLTIPGIGKILALTIMLEVGDIGRFAKVGDYSSYCRCVESKRLSNGKKKGENNKKNGNKYLAWAYVEAANFAKRYCPKAHSFYQSKEAKTKNVVAIKALSNKISRASYYIMRDRVAFDEDKLFR

SEQ ID NO: 81469 - protein, 354 aa, unidentified
MNTIIGCDAHRRYSIFAVFDTSTLSVEQVRVNHQPGAIKQFLSDFPEGTPVALETVGNYYWIVDEIELAGCVPQLAHAAKAKVIMGNVNKTDKLDAKGLATLVHLGSLPTVWLPPGEIRDERELHRTRMALSKVRTALKNRILATLAKYALNTTEHADVFVGKGRAWLNRTINRLPPETSRCLDQELALLDSTMEQIAILEQRILQRIQLTPDMQLLKTIPGVGNILAIIIAREIGTVDRFPSAGHLAAYAGVVPKVHSSGGKTRYGRMRKQANNYLKWAFIEAANVIVAHRHHPSWRQKKVTQVYERICRRKGHATAVGAVARNLAESAFWILKKGEAYKDPALSRQDSPKLV

SEQ ID NO: 81470 - protein, 423 aa, unidentified
MMKLKYSICCGLDVHKNVIVATIVTTNKDGISEYKQKSFSTINSDIQKFHNWLIENNCYHVCMESTGKYWIPIFNYLENDIDVCLTHPKYVKAIKGKKTDKKDSKWIADLYKFDLVRCSFIPPKDFRQLRELSRYRFKLVCMKSSEKNRIQNCMTVSNVGIASVLSDPFGKTATEIISYLLKHTADSMDEKAVRKLIKKGAKSKSDEIIEAIKGYTIETDQAKKLELARGHLEYLDDMITQTEVELYVRIKPYYEFVEFVSTMPGMTELSPTIVLAETGVDMDIFDDAKHLCSWCGLSPANNESAGKKKSVRIAKAGDYLKPMMVQCALAAIKSKKRPYFAIKYGRIKKRRGHKKAIIAIARMMMVCIYHMVSEKKPFTPTDYEELMNPQNHVERVVLNENNVFAYLESLGYDSSKLVKRNDN

SEQ ID NO: 81471 - protein, 317 aa, unidentified
MQPILNVGVDVAKDAVVVACAEHSFPVKSVINQRAPLRAWLKSLPAGSRIGLESTGAYHELLADLAQAQGYTVFLLNPLETRHYAKAMGTRAKTDRVDAELIARLIAQEHTRLRAYTPPTANQRKLDRLIRRRAKIVGLKGTLKLTMRHLGGFAAELKAVVGKLDALLAKIDATMAAIAAGSPQHQEAQHRVETIVGVGPLVGISLTNTLERVPFRKADAFVAFIGLDPRANDSGHKAGRRRLSKRGPAELRRLLFNAAMSAIKTTAWKPIYESYRTQGWSTTASLVIIARKIARAAWSIHHYRTTFNPERITKCLT

SEQ ID NO: 81472 - protein, 391 aa, unidentified
MDPAGKIAAEFTVVHSGEGITRLIRRLAAYGTAGQIPIAIERPNGRLVDLLLEAGHPVVPVKPNAIKLWREGEVLSGAKNDAGDAAVIAEYLRLRRHRLCVAAPYTPATTALRMLVRSRTDLVEMRVAAGNQLSALLETSWPGAKAIFADVTSAIALAFLTRYPTPASAARLGEQRIAAFCARHGYSGKRPAAELLARLRSAPQGVTDAVVCEALAQAVLALVGTLSALNAAVKDLDQKIAAHLGEHPDGKIFTSLPRSGRINAAQMLAEWGDCRPAYETPDAVAALAGCTPVTKESGKHRAVHFRWACNKRFRQAMTTFADNSRHASPWAKKIYADARAAGKDHPHAIRILARAWIRVIFRCWRDNRPYDPTQHGAAATLTKQLTGQIAA

SEQ ID NO: 81473 - protein, 320 aa, unidentified
MNERGQIVLRKRLSRHDLIPFIATLPPVLIGMEACGGAHYWARRFREHRHEVKLMAPQFVKPYVKSNKNDMRDAEGIGEAVTRPTMRFVPTKEVDQQDIQALHRVRERLIGARTALVNEIHGLLHEYGIVIPKGVAKFRQTVVGKLEADKAKLTPLSQEMFGKLVDEFTVLEKQLAYYQEKLEALATTHPECQRLMTIPGIGPLTATALVAAVSDASAFKNGRQFAAWLGLVPRQHATGGKERLLGISKRGDSYLRKLLVHGARTTIRWVGRKTDRRSQWIRQLVERRGKNRAAVAVANKNARIVWALLTSHQDYQLATG

SEQ ID NO: 81474 - protein, 363 aa, unidentified
MNYVGVDVHKKYSVLCALDERGRKLREARVEGNTGCGFAQFFRSLEGPSKAVVEACWNWGLIHDELEELDQVEEVVLAHPAKTRLIADAQIKTDRLDAHALGTLLRGNLVARAHVPRRQTRARKNLLRQRLYWARLRTMLRNRIHALLDRQRGLELPQCSDIFGQRGLFFLRQLQLPEPDGMLLREQLALHDLIAQQMKAQEKRIAAEFKSEVIHRQLLSMPGIGTTLAAVIGCEIDQIERFPRSEKLCAYAGVVPTTHASGGKVAHGRLLPFCNKWLRWALIEASWVAIGCSPYFGALYQQHRARGKKANTAITIVARRMCRIIWQLLSENRDFEKRPLSHRIGPFPGCSAVRLTARSAHGS

SEQ ID NO: 81475 - protein, 336 aa, unidentified
MDTISAAVGIDVSKKKLDVALLVDGKIKAKVVENCAKGHQTLIDWLGKSKVPLSAMHVCMEATGVYSEPVALALHQVGLLVSVVNPACIKGFGHSENIRNKNDEIDAGLIARYCRAMTPPAWNPPPLEQRQLRAWSLRVQALKDIRQQEENRMEALSISGLDDVAQHVKQHIAWLSAEIEKLEDDIDDHIDRHPDLKRDADLLVSIPGLGMTTVAKILGHLGNIRRFDSAKAFAAFLGVTPKQRSSGSSLKGRTTISRTGSTSMRAALYMPSLVASRHNPILRRFAERLATTGMAKKAVVGAVMHKLAHLIYGVIHNGKPFDANYLVKGLANQDGI

SEQ ID NO: 81476 - protein, 414 aa, unidentified
MALKIVHQICCGIDVHKTFVVACIASTNNKGVTSYKRHRFSTYTKGLKELSQWLFENNCCEVCMESTGKYWIPVFNILEDSCNITLAHPKYVKAIRGKKTDNKDAQWIADLFKHDLVAGSFMPPLAIRQLRDLMRYRAKLTNFMSSEKNRLQNSLTVSNIQLGHVVSDTFGKSSMKIIDKILENPLDTAFDLESLVHASLIKKLPELELAIDGFITPEQADKLKVIKRHYEDLTERRSDLERIILSLSAPYSEEINLILTVPSFKNNFSAITVVSEIGVNMDVFPTAKHLCSWAGLTPTNNESAGKKKSVRISRAGCYIKPLLVQCSTAVVKSEKHPEIRNRYLKLKKRRGHKRAIIAIARMLLTAIYMILKKKVPYNADLYKKSDVLPVDREITVEQAILIAKNQGYRIRSTA

SEQ ID NO: 81477 - protein, 417 aa, unidentified
MAEVTFPQLIQRACGIDVHLKVVVATIDGAGIQRETRSFKTFTSSLNELKEWLLSNGVTHVGMESTGVYWKPVYKVLEDSIPNVWIVNARHIKNVPGHKTDKMDSEWICKLLLAGLLKPSYIPPKEQRQLRDLTRYRNKLIQQIASEKNRMMRILEDCNIKLSSVVSNTSGTTATSLIDMLCEGKVLTLDDINSVYHGKLSASPEELLEACTGFVEEHHIYLLQMIRKDIDQTQTLVDDLSERIKRLLSKYENVLELLREIPGFSTKVVEDLVSEIGLDMSHFPSEKHLSSWAGLSPGNNESAGKKKAHEHSRKQTGKGGNHRSRMGCDPYKEYVFSERYHRIAARRGKKRALIAVGHSQLISVYLILSTGSRYHELGAQYMQSKIEQKRKVYLSSELKKLGYNVSLTKVPQAVTLN

SEQ ID NO: 81478 - protein, 432 aa, unidentified
MSYRIAGVDVHKKMLAVVVSDVEVDGQYQFERRIFGSNPEQLRSLAVWLVEQEVEEVVMESTAQYWKPVWEALERYWKPIRQKREGAGRMSGSLHLAQAQSNRARRGRKKDFPDAERLVKRLVARELTLSFVPDAEQRLWRTVTRRKYQLTRDHVRLQNQLESLLEEAHIKLSSLVSNLLGASARRMLKALADGETNPTALAALADENLRATPAQLCDALSACTDLKPVYRRLLKMALEQLQFLEQQIGQLDQEMANLLSQHQDAVMRLAEVPGLGVDSAQQIIAEVGPTAVTFPSEKQLSSWVGVSPGDDESAGVNYSHRSPNGNRHMRRVLNQAANAAARTKGSIFEIVYRRSVPRMGHNQTIGAIAHRQCRLIWLILHQGVRYEERGPAVTKRSKQKRTARMIRQLRNLGYRIELPNSQQPSPTQCDPV

SEQ ID NO: 81479 - protein, 344 aa, unidentified
MTYYAGLDVSLRTVNICVIDNEGELVAETKLASDVQDIVAYLDDLNIEIDTVALEAGTLTQYLTYGLQSAGFEVICMEARQVKGALSAMRNKTDKHDARGIAQILRSGWYSPVHVKSMQSHHIRMLLSSRKAVLSKCVDLENEVRGLFKIFGIKLPPKLGHGAFDVTVRDIIEIDATLSHALLPLLDARLVLYRTFRELDNRTRKMAHADPVCTRLMSVPGVGFITALTFKAGVDDPKRFKRSRTVGAHFGLTPRRFQSGEMDIDGHISKCGDADVRSTLYTAANALLTRSARWSPLKAWGMKLAKSRGHRKAVIAVARKLAVILHRVWIDNTQFRWGTEGARS

SEQ ID NO: 81480 - protein, 368 aa, unidentified
MLEQAHYKVGCDAHKHYSLFAVLDHRGKPIERTRVNHEPGAIRAFLSRFPEGTPVALETVGNWYWIVDEIEQAGCLPHLAHAQMAKKMMGHVHKTDKLDADGLAILQHLGSLPTVWIAPAETRDERELPRTRMALSKVRTMLKNRMHSTLAKYALSLDTQSDIYAPKWRPQLLDLLQRLPPETQRCMDQELELLGQVQQQIRRLEARILERVQITPTIQLIQSVPGPAKILSIVIDREVGSIDRFPSPHHFASYSGLVPKVMASGGKTHYGKMIKQANHYLKWAFIEAANVVVRQQHHPSWRQKYVVALFERTRQRKGHAVAVGTVARYLAETTYWVLKKDEPYREPVLLHPVGSKSAVSPKQRQART

SEQ ID NO: 81481 - protein, 373 aa, unidentified
MKYTTVYVGMDVHKESFTLACYTNEKEEAEYVQRTEGHYSKVISYLEAMRFHYGDDVTFICGYEAGCLGYTLYHQLTSHHVRCVILAPTSMPTQKGKKKVKTDKRDARKIAKCLAHHDYSPVHVPTAKDEKTKEYIRMRDDHKLALKKVKQQILAFCLRHNLRYPGGNRYWTIAHLKWLRELKLGDVYQEILEEYLLTYTNLVDKLERLDKRIEELAADQEYAENVHMLSCFIGIKTQSALSLITETGDFKRFANAQQYASFLGLVPGEDSSGEDQTRLGITKAGNRHLRTLLVEAAQGYSRGQIGHKSKELKKRQEGNPPEVIAYADKANERLRRRYYRMVLASNKRTNVAKTAVARELACFIWGMMTGNIA

SEQ ID NO: 81482 - protein, 401 aa, unidentified
MKFVGWDWASTTHDITVLDHAGRILQRWACEHTEAGLAQALHRLSRHGQPSTLPVIIERTSGLVIDRLLATGHPVVAVHPTAFHAARPRWGASGAKSDPGDSDKLADYLRTDGHRLRRLEPVDARLRQLQSLVRLRDDHIAAKTAASNQLGALLDAHWPGPKALFSRLGSPIALAFLTDYPTPESAARLGDARMAAFLHRHAYRGGKKATELLTRLRLAPTPPTGLPPQVLARLLVAQIQLLRTLLDTITQLEAEIKRIIATHPRARLLQQLPGIGHINLAQILAEIGPILDRVDNAEHAAAECGATPVTKASGKTSGVYFRWAANTRDRKAITGFAHNSRRQSRWAQRLYRDARARGKRNPHATRIVARSRIRVIWTCWHTNTPYDPLKHTAEQRAATLT

SEQ ID NO: 81483 - protein, 399 aa, unidentified
MFYCGIDIAKYKHEASVIDMSGKALSNSISFANDRQGCEKVLAIFEKSEITPDNVVIGMEATGHYWLSVYTFFLELGYTVKVINPIQSEAFRKMYIRQTKNDSKDSYIIAQIMRFGEYSATTLSEDNIIALRQLSRYRLALVDACGDCKRRVIALLDQVFPEYDKLFSDTFGKTSSELLLNCPTPEDMLAVSTRKLTNILNKASRGRFGKEKAEELKDAAKNTFGIAFAKDAFSFQIKQLIQQIIFTEKQLSELEEQIANLLHETNQYITTITGVGDVLGAIIVSEIGDINRFERPNQLVAFAGLDVTVKQSGEFSGTKNRISKRGSPYLRRAIWLAAQRAAFCDPILSEYYQSLKARGKHHLTAVGAVARKLCNIIFVILKENRPYLPIPPKKSQNLS

SEQ ID NO: 81484 - protein, 433 aa, unidentified
MEEAGDEPLFCERAAGIDIGKQMVMVTIRVPSDTRRGGRQQETREFGTTRRQLLELADWLRCWGVTRAGMEATSDYWKPVYFLLERAGLDCLLYHASQVKALPGRPKTDKLDSVWLAKVTERGSLAGSFVPPEDIRRLRTHTRYRRRLTQARTAEKQRCEKLLEDAHLKLSSVISDIHGASGRDMLTAVIAGQRNPRVLAEMARGRMRRKTARLEEALDCSFFTEEHAFILAMMLGNIDHLTAQIAVLDERIAVLCQPYERQIAQLDAIPGFGVTTAQDLIAEIGTDMSAFPTAGHLCSWARVAPRPKESGGRRTGGSATGRGNPYIGAALGEAAAGAGRTQTFLGAKLRRLARHMPKKKAQGAVMRTQLAAAHALLSDPGAHYRELGPGYHDQRAGTARQARGHVRSLERLGWKVTLEPLDPDTGELTAQAS

SEQ ID NO: 81485 - protein, 314 aa, unidentified
MAMQVQPQFLGVDVSKASLDICLAPEEPVQTLENTPRAITRWLKTLPPGPVCVALEATSTYHLSFALQAHAAGHTVYLIDGYRLSRYRDSIGQRAKTDVDDARLLRRYLTHERVALRPWIPPKKGYLTLQKLLRRRALLVRARVALQQSLAALSALRCATKALFQQLQRLDTLITRQIVTAISQAGWQADFRRCQAIEGIGPLTAAALTMAFHRGTFKNSDAFVAFLGMDVRVRNSGKTTGRRKLSKKGDPELRRLLFLAAMQACRHGSWREIYQRHLQRGLAKTQALVILARKLARVAFALMKNQTQYQPAAV

SEQ ID NO: 81486 - protein, 451 aa, unidentified
MSKPQVIDDEEHERVHERVAAVDVAKDSGMVCTRLPHPSRPGARPSTVWTVKARMGAVGKLGRQLKDSGIELVTLESTSDYWRIWFFVLEACGLAVQLVNAAQAKNLPGRPKTGKLDAQWLARLTELGLLRAWFVPPAAIRALRDYTRARTRLVQERTRCYQRLEKLLEGALVKLSSAASKLTTESAKDMVKAMIAGQRGPRTLAALARTRMKAKHDDLAEALDGMFDDRHGELAGLLLDQIAFLDERVTQLTARITAAVAAMPAAWGVDGDGTTGPDAGTGPDAVVLPAAARLAEIPGVSQDLARAIIAETGLDMSRFPTAAHLVSWAGLCPSARQPGPRTRAGKKSQGDTWLRGSLGQAATGAARTDTFLGERYWRIARRRGKAKAQVAVARSILVIIWNLLKDPAARFTDLGPGYYQARTDKVTKIKNHIRQIEALLGHPITITPKAA

SEQ ID NO: 81487 - protein, 346 aa, unidentified
MTIVGGLDVHRQQITFDYVDDDGLVHWGQIRPATRKTLRGWLAEHFRDGDAEFALEGCTGWRYVSEELAAAGLGVHLGDPAEIAGLRGRKKRAKTDRADARLLRTLLVEGRFPESWIPPAHVVEVRTLGRLYCTLMDERRAWQQRIHAQVFHQGCPPIRALLTRAGREALAGAELSAAGRQYVDTALRRIDELSAEIDPLRTQLIGLARRQPGCRALQRHYGIGWLCAVIIWAEIGDARRFASSDQLVRFAGLDVTVYSSDSKRAPGHLSRQGSPELRWAAFEAAKSAARRGSPDHGYYHKLAAKKDGHNGKNPTLAVERKILRRCYHTLRELGDSALAQPQEVAA

SEQ ID NO: 81488 - protein, 406 aa, unidentified
MELTPIYPTAIGLDVHQRQITACAITTDADGQVRVEHREFGAFKRDRRALSRWCAERAPEVVVMESTGIYWKSPYVALERVGIRALVVNARHVKNVPGRKTDIADAQWLAVLARAGLLRGSFIPPETLRHLRLVSRQRHKLGRMLAAEKNRLHKVLADGGVRLSTVVSDLHGQSARAMVRALIDGQSPTQVLALASRRLKAPRQDILASLDGELSDDHRFVLAQLLEHIEQLESRIRAFDEHLLAGLENYRELLQLLQTLPGVDRIGAAMLLVEIGTEMEAFGSPERLASWVGICPGNNESAGKRKSGRIRQGNPHIRRLLCEFAHAARRTRCGLQAKYHSLAARRGNKRAIVALAHKMLRIIYFMIKRRDYYRDSDVDYEALMVERNAPRWIHMLNRYGYLTTSA

SEQ ID NO: 81489 - protein, 354 aa, unidentified
MIIGCDFHPRFQQIAFVDQETGECGERRLSHPEEAERFYRSLAGRQVRLGAEATGNFRWFRLLMQELGHEFLLGDATAIRAACPRKQKTDKRDARHILKLLVEDRSPDVWQPPEENENLRELLMHRCRMVRMRTRIKNQLDSMAKNEGLLSKRVWCPMRRNQIEALPLAGWDVERRKDLIALLEEMNRRIEPLDKAVIKAAEQNPEACLLMTHPGVGPVVSLAYVLTIGSWERFPRGKQVGSYLPPQRRRPVAGDPGLGLIPVEESSSDKRRLGHISKQGNTTLRWLLVEAAATAQRYDPSWHRQYVRLSMTKHHGVAKVAIAHKLAVRLYWMWRSGEEYSNVMERGSHVGQSE

SEQ ID NO: 81490 - protein, 463 aa, unidentified
MFCSLVRVVGLVRGLWRAVECRCERVPRIPFRLVILTAGTCDDWGVSVMKQVRDGVAGLDVGRGTVVACCRVSDRDGWVEVSKRQFGTARKGLGELAVFLSGAAVTTVAVEATGVYWKAPYYVLEGLFEELWLCDAQHVKNVPGRKADFSDAEWLADVAAYGVVRPSFVPPPTIRELRELTRYPKTQVDARSKEIQRLEKTLQDAGVKLTSVASVASVVWSVSSREMVEALIAGERDPAVLAQMAKGRMRSKIPLLEDALAGSFGAHHAIVCRLIIDHIDFLDLSIASLTEEITARLVPFEPAVAIITSITGISRTTAEVIVAETGADMSRFPTARHLCAWAGLAPASYESAGKRRPAGTRHGTPWLRRTLLEAARPRGSYQEQLLLGPVRADRQRRGPNNAAVAVAHSMLEVVWHLLTTGALYEDPGADYFQRRHDPLVEAKRLTRRIEALGFEVAIHQKAA

SEQ ID NO: 81491 - protein, 344 aa, unidentified
MEYYVGLDVSLRSCSLCIVDSKGTVLFERELPCEVSDITECLVEFPHPIERVGFEAGSMSQHLFFGLTAEGFDVVCMEARQVSAALSAMRNKTDKTDARGIAQILRTGWFSPVHMKSREAHGLRALLSTRKALLKKTMDLANEVRGLLKIFGVRLPQTVKHGSFDSVVRPMIEIDDILAHALVPLLDARVVLYQHYLELDRRVKRAASQDDVCMKLMTIPGVGPIAALSFKSAVDDPTRFKRSRTVGSYFGLTPRRYQSGEHDNPGRISKSGDRDVRAVLYAAANALLMRTMASSQIKSWGMRLMRTKGRRRAVVAVARKLAVLMHRMWIDGTEFRQDQVGGMA

SEQ ID NO: 81492 - protein, 412 aa, unidentified
MEGETVIAGVDTHKDVHVLCLLDGLGRKIWSGSFGADPEGYDRLAEAIGDPGSCMVVGVEGTASYGAGLTRRLVELGYNVVEVLRPKRDKARPGEGKSDPLDAERAARKAASGRGCSVPKSQDGWVEAVRQLYVARRLAVATSTSCVACAKSMLTTAPSALRERFRGRERPKDLMPLLARGRKAGDALEESVLASLRSVAAVWKEARSQVESLDERIRALLEANAPALLGIEGCGTTTAAALVVAAGDNPGRLKGEAAFSMLCGVSPIPASSGKTERHRLNRGGNRQANWALYEIAIKRMAYDERTRRYVARRTSEGKSRREAVRCLKRYIAREVYRVLMDPNPDGAAPEGPELAKMRKAMRVTQKQAAAGLGMSAASLGHLEHGRRRSTKLERRYYELLCELKGALPQTAY

SEQ ID NO: 81493 - protein, 402 aa, unidentified
MYQPTLCIDVSKSKSFASAFLSPTKQFSKPFAFTHTEDGMKQVKSVLNQIQLDTNTKPTIVLEATGNYSKSLVGYFQAIGYDVVILNPLTTSTQKRKSMRKVKTDPIDTYRIAQVYYLNNCSPNISIDEKYEDLRNLCRQWDGINTLYTETQLRFQSILDLVMPDLNKVFNDLCSPTCIELVCNYPTFSTILDAGKDNIMDVLKISKQSKEWRSKKAELLLSIARESLPYDKAQQSNLQVLKSYITILKTIKKELTDMRALIVSRADSLSEFRLLTSIPGVGEITAATILGEIGDISRFDSPKKLIAYAGLDPSVFQSGKFNAKNNKISKRGSHYLRKALYQATFAGVSKQKWGIRNTTLYQYYTKKREEGKAMKSALTATSGKLLRIIYGILKNGEAFKTT

SEQ ID NO: 81494 - protein, 247 aa, unidentified
MTEMKTMTEVKESKELNVGEKLNVGVDVSKDSLDVAFWDADRDAAIFQGKFANDQKGFQTIAQKIGHRRREIEDTVETSETVSVIIVMEPTGGYEQPFARFAIQSQWQVSLPNPYHVKQWAGSMGIRAKTDRHDARTLAQSDGEGDSRSLVAYVGLDPQPHESGTSIRRRASISRQGNREFRSRLYMSALGGIKGDNPLRVFYKRLVGRGKPKKVALVASARKVLVWSWAVYRTNTPFDATRFQIAQ

SEQ ID NO: 81495 - protein, 450 aa, unidentified
MKTAVKVGVGWPGAGWQGQRHDRGWVWLMKMVAPRGALSEICPSGLRSGAGPVPLGGLIRSLPGPLQRIVAHHSPAARAHSPGRRRHDVSREGSTPQLAIVADQYDFVIGVDTHAASHTLALITAGTGAVGQQAQFPTSPSGLRRAVDWIERHTHQSPTPIVIDSAGSYGATFTEQLSAAGLTVAEAPDVAATTRRRRGKSDAVDAVAMAQAARSLDINELCWPRAGGDRTALRVLTVAREQMSGERTRAVNALTALLRTVDLGIDARRALTTTTIATVAAWRTRSDNATLAVCRAEAIRLARRIRALDAELAANHTALHEAVTAQAPQLLALPGVGAVVAATVLLAWSHPGRVRSEAAFAALAGASPLPASSGNTTHYRLNRGGDRRLNRALYTVALVRMGHDPRTRDYVTRRTRERRTKREIMHSLKHYISRQLFRTLNGTHPATSTT

SEQ ID NO: 81496 - protein, 344 aa, unidentified
MQPQEYVGIDLHRRRSVIVRRSAEGETLEVTKVDNDDLLAFERAVTAAGEHPEVVLEACYGWYWATDLLEELGCKVHLAHPLGNNWGNRRVKNDTRDAEDLADLLRLGRLAEAWIAPPEVRELRELVRYRAKLVSLRTNCKLQVYAVLAKEGVSVPMTDLFGVLGTELLETCHLAIAYRTRVESLRELIEVFDREITKLEGDLRQKLRGHAGYQAIQQIPGIGPLFASVFVAEIGDVTRFRSPAQLASWAGLTPKHHESDLTVRRGPITKQGSRLVCWAAVEAAQRQANGTKLRADFVRITAHHGDNAGARKIARVAVARKIVTLVYYGLRDGTIRSKAISEAA

SEQ ID NO: 81497 - protein, 387 aa, unidentified
MNHLYSNVSCGGMDVHYKFSNVTFRDKDGRVVRRERLRHAQRNQLRQRLSRWPRGTPIVLEASFGWGWLSDLLDEAGLDPQLSNCYKLEQMRKARGWVKTNKKDADMVSLLPFETTEWWQVWRAPPEVRNRREQMRFRADLVGSQTVVKNRIHAIFHRHGLFHDFSDLFGGEGRRFLGELCIGGSEHLSPQALQALRGQVKLLDHLRGQLADIARILHKQLANTPLIRRLKKIDGFGLILSHVLAAEIGRIERFRNHKVLASYSLLAPRSNDTGQDDPDRSPRGRHLGTRGNRTLKWAFIEAAHGAVRSGGRWRAMFDRVTNGGKKDRNRGYIKVARELVKVVYVVWAKRVDYQRNRPARPGSDKNKKRSRSGTGQLLHPMVHAPRA

SEQ ID NO: 81498 - protein, 345 aa, unidentified
MQPMYYIGLDVHKRKISYCVKDGSGQIYAEGWITATRFDLDRWMRTLPQPWSAAMEATMFSGWIYDHLKPHAAALKVAHPLMLRAIAAAKKKNDHIDANKICDCLRCDFLPECYMAPTAIRERRRTLRYRNLLVRQMVQMKNKIAVLLMEAGVTYNKEKLHQAGYFRELLGTNPDINEGLRPLLRLCRETVVRLRKTESALVRSLECDPSLLRRVERLMSIPAIGTITALTWALEIGEVRRFSSIKKAISYCGLCGDEHSSANSVQRTPLSKQRNKHLQTTLIEAAKMAPRYSPTLAQLYDREKQKGNANHATLAVARKLVAYLMAIDRGERHFLVIPEEARTAA

SEQ ID NO: 81499 - protein, 370 aa, unidentified
MAEPTTLFVGLDVHKDSIAVAHATIDHASDVVYVGQVGTREADIEKLLRRLHSHAARLVVAYEAGPCGYGLYRTLTQRGVSCLVVAPSLIPKKPGERVKTDRRDAVQLARLLRSGDLTSVYVPTVEDEAVRDLSRAREASIGVLKDAKLRLKSFLLRHGLNYSGRATWNDAHLRYLAKVVCPTPAQQIVFQESLRAVSEQTERVRRLEDELLEVAATWRLRPIIGAFQSMRGVQSHTAVTLAAELGDLTRFDNPRQLAAFVGLIPSEYSTGESRRLGPITKAGNGHARRALVEAAWAYRYPAKVSAHLQKRIEQCPKPIQEISWKAQVRLCKRYRRMVARGKNPNIVVTAIARELLAFLWAIAREVPIGA

SEQ ID NO: 81500 - protein, 489 aa, unidentified
MSTARKQREGKKGSDAHRSASKRKARGSHCQPGEGHRRRSKLTITNPDAAGIDIGAQVHYVAVPEDRAEVSVRSFGAYTAQLDELVQWLKDCAIKTVAMESTGVYWIPLFQKLEEAGFEVLLVDARQAKHVPGRKSDVQDCQWLQQLHSYGLLRAAFRPEDSICRLRTLQRHRKNLVESAAMWIQHMQKALNEMNLHLHHVLSDISGQSGLRILDAILAGERDPRKLASLADRRVEKSQAQIEAALTGDYRPELLFVLSQSLQNYRQIQEQIAQCDLNIEKQLAKMADCANPNQASEAIQQSQDSAGCRPRKRKPKDALELSLAGHLKRILGVDLTTIPGLNILAVLNLLSEIGTNMAKWRNEKAFVSWLGLSPNNKISGQRVLSSRTRKVVNRAATTLRLAVMILGKTNTPLGSFYRRKRAQLGAPKAITATARKLGCLIYRLIKNGQGYKEPDLRTYELKYKDQILNSLRKRANSFGFDLVQVPKAA

SEQ ID NO: 81501 - protein, 344 aa, unidentified
MQPQQYVGIDLHRRRSVIVRRSNEGETLEVTRVNNDDLPAFEQAVMAAGEHPEVVLEACYGWYWATDLLEELGCKVHLAHPLGNNWGNRRVKNDTRDAEDLADLLRLGRLAEAWIAPPEVRELRELVRYRAKLVCLRTSCKLQAYSVLAKEGVAVPMTDLFGVTGTKLLETCQLATAYRTRVESLRDLIEVFDREIAKLETDVRHELRGQIGYEAIQQIPGIGPLFASVFVAEIGEVTRFRSPAHLASWAGLTPKHHESDLTVHRGPITKQGSRLVRWAAVEAAQRQASGTKLRADFLRIAAHHGDTAGARKIARVAVARKIVTLVYYGLRDGTIRSKGVCRAA

SEQ ID NO: 81502 - protein, 343 aa, unidentified
MSIVGGFDVHRRQITFDYVDTDTGRLQRGRIAPACRAVLRRWLAERFVGRSDVEFAVEACTGWRFVVEELERAGIEVSLAETADTAAARGRKRRAKTDPADAAHLRELLAGGRLPTSWIPPEQVREMRAILELYKDLRDEHTAWVQRIHATLFHHGVPQLGTGGVTSPAGRARLQAGEGLSPAGHQATMVALRVLDALDTELDALHRQIRTFANQQPGCKALQAQYGVGPLTATAIWAMMGDTRRFSASRQAVRHTGLDVTVYSSDGKRAPGHLAKQGPPLLRWALYEAACLASHTRAPDHDFYASVKDRIDHKRATISVARKIARRSHHILRELGDKAYAAA

SEQ ID NO: 81503 - protein, 412 aa, unidentified
MRRIIGMDIHRTFGEVVFWEDGRLRPAGRVDMTRTALEGFGKSLQPIDEVVIEATGNCMAVSRVLSPFVKRVVIANPLQVKAIAHAHVKTDKVDAGTLASLYAAGYLPEIWTPDAATERLRRLIARRYQVVRHRTRIKNEVHAILHAHLIPKCPHADLFNGRGRDWLAHQPVPDDERDAIERHVRELDRLAEDLTILDREIATNSLDDGSVRRLLTITGVNLAVAAGLMAAIGDITRFKSPQKLVSYFGLNPRVHQSGLGAAHHGRISKVGRSHARAMLVEAAWAAAKTPGPLHAFFVRIRARRGHQVAAVAVARKLTVLCWHLLTNEEDYLWARPSLVAHKTRGMELQAGRAQKKGNTRGPAYAYNIKQLRDQEMHVAEQAQRRYEHFVEAWRPRPPKEKARGRLNPAGHR

SEQ ID NO: 81504 - protein, 382 aa, unidentified
MHVLAVDVSKDTLQYFSPSISGRVDNTPEGVQKLFDLSKHIEGLILVCESTGVYSQYLMNFFNSNRIPAYYIPSDAFSNARKLLKRPKTDRQDARTIFDAAMVIPTRLIPFQTFDELIEQLRDLMRYRFAISHDTARLKVRLNALVAKYFPGLDFDFRATYTYFLRNYSIEEIVEMDYEEMVQIVSKISHSRIDPQQFVQKLKESSRGAMNLSPSPRNALKLTINLTIDNIQSHLKQIKIIDAEVDKIVKKIPQTLTSLPGIGSTTAAGIISEIGKIERFSSPAKLASYAGITWNSYESGKYKSEDNRMTKKGNKYLRYYIVHAARTVARFEPVFKSYYDKKYNESFNHNAGRAIVLSARKLVNVIYFMMINQKQYDPREIR

SEQ ID NO: 81505 - protein, 454 aa, unidentified
MADAKRPRPRQALPPVHAHAAAIDIGATIHVAAVGPDHDPEPVRTFGTFTDEIRRMADWLAACGIETIVMESTGIYWIPAYEILDERGFDVQLVNARDAKHVPGRKTDVSDAQWLQRLHEHGLLRASFLPKGEIKALRAYLRQRERLLDYAASHIQHMQKALMQMNLQLQHVVADITGVTGMRIIRAIAAGERDPRILASYRNYRCHASAETIRQALVGNYREEHVFALTQALELYDLYQAKVEACDARIDAMLERLRAAVPPPTEPLSPARDRTRQPNAPSFDVRAALHALLGVDLTRIHGLGPYLALKLVGECGTDLSAWPSAKHFTSWLCLSPSNKISGGKVLSARTRRSGSRAASLLRLAARTVGRTPTALGAFYRRLSARIGKAKAITATARKIAVLFYNTLRHGMHYADPGASYYEERYRQRVLATLKRRARALGYALQEIPAEPAVS

SEQ ID NO: 81506 - protein, 389 aa, unidentified
MPTVADRPDAPTAIQSNLAAIFVSLELSRSIWLITSLSPGSGEKMSKHSVRAGDVAGLLARFSELKQKAFARTRKSFPIVVIQEAGLDGFWLHRALEQEGVESHVVDPASIATSRRRRRAKTDRIDGEALLRTLLAYKRGEPRVCTMVRAPTPEDEDRRRLCRERKVLIAERVEHVNRIKGLLFSQGISSYEPLRRDRRQRLEDLTTGDGRTLPTHLKVQISRELDRLELLLAQIKLAEAERDGLLAEGQAAAPESPTRMLLEFRGIGAECAATLWLEALFRHFDNRRQLASYAGLAPTPWQSGSVDREQGVSKAGNPRLRALLIELAWLWLRHQPQSALALWFKERVKRNGGRMKKTTIVALARKLLVALWKYVTAGIVIEGAVMKPV

SEQ ID NO: 81507 - protein, 396 aa, unidentified
MKSYILLKPEAVQSQIITAPAEAKPSILFNGLDVHNDSIAVSIAPGDSTEVRRYGIIGGEHDDVLKLVKKLQAAHPGATLKFCYEAGPRGFALWRCLRSHGLDCILVCPSQVPRKPGERVKTDRRDADQLARLLRAGELTGIYVPEPVDEAMRDLIRARFQVGKAQHRARQQLKMYLLRHNIRYGGKSSWTAAHLRYLAQIKMSYPVQQIVFQEMLEVITEATARLERYDQEIERAVPGWRWEPVVRALMSLRGMALLHAATLAAELGDFHRFEHPGQLMGYLGLVPSEHTTGNDRQQGGITKMGNGPARRALVEAAWQYRTAARLSPHLKKRQEGLPKAITDISWEAQRRLHHRYTHLTRVGKKKSQVAVTAVARELSGFVWAIARQVKPLDAKP

SEQ ID NO: 81508 - protein, 461 aa, unidentified
MFPEGIGAHDSHKKASIHAGFRGFAALVVGQIKAVLDKSRPQSDPQAQGESKKTPRNACRNPQRPGARQNHQAKYEGTPHFPATASSAKIGLLESQSITFERGSPMSEITRVGVDLAKSVIQVNAVDAGGKLVTNRQLSRDKFLPWCAQLSPGCLVAMEACGGSHHWARKLIALGLNVKIIAAHLVTPYRLQGKGGKNDANDAAAVCEAASRPNMRFVPVKTTVQQGILCVHSLREGLKEERTASINRIRGMLTEFGLVVSKSPEKLREKLTEMLEDASNDLSGLARLVVQEAYDHWKDIDKRIEWCDERINAHVKDDAQAKAAKELVGVGSVTASAVVATVGDFNQFKNGAQFGAWLGLTPRQNSSGGKNSLGGITKRGNMYLRMLLIQGAKSAVMTAHMRSDPISKWLFQLREKSGWQKAAVAMANKNARILWAIMTKGCRFDPRHVSVKPAGPATAMA

SEQ ID NO: 81509 - protein, 424 aa, unidentified
MNLTQNDRLKQVTSDTLIVGVDIGSQTHFCRAFDWRGFELSRRVFKFSNTGMGFLTFLRWTEELMNKTEMKKVIVGCEPTGCYWLTFQRFLQDHDIQLVTVNPFTVNRSMELDDNSPEKSDLKDPKTIALLVKDGRYSTSYLPSGVYAEIREASVCRDQIMKQHVRLSNQIQGWLQKFFPEYFECYAEWDSTSGLMLLKEAPLPQDILKIGAGGINQIWRDAKVRAAGIKRAQTLVEAAQNSVGLEAGEAARLEIWVLVNDYILKAEQLKRLDEYLEEKVKEVPNVKKLLAIKGVGMSTVIGFIAEVGDIGRFTDPKQIQKFAGLEIVKKSSGKKKGQPRISKRGRRKLRRTMYESARALMQWNPAFQDVFLYYRNRTHKPLGSMQAKIAVACKAIRVFYVVLQTGCDFDEEKFRRDIIRPEAA

SEQ ID NO: 81510 - protein, 328 aa, unidentified
MSKDVFYVGVDVGSEEVWAALPGLKPRRFVHAKRGLLALHCWAKRHAAGAILHFCLEGSGVYSVSVASCWVGLPETEVSVVNPAQIAAYARAQLRRCKTDQVDAIVIQQFATTQNPPAWQPASTTLRQLYELVQLADQLKAQRQQWQNRRHARGYIPDLPVAVTKTHQAIIRSLDRQLDHVNQEIKQLCTMTEELAQQVALLTTIPGIAQLSAVQILAYGQNWLTHRTAKQLAAHSGLAPHPKQSGTSLHSPGSIDRRGNVRLRKALYMPTLVAVQHNPLLRRTYQRLCQRGKPKKLALVACMKKLLLIARAILITKIPFNPSLSPLT

SEQ ID NO: 81511 - protein, 332 aa, unidentified
MKFTSFIGIDISKLDYDVAHLDVNGTVVDTKKFSNNSSGFRSMLSWIKKSSATEQLLFCLEHTGVYCLGICVFFEEYGLNYSLQSGLQIKRSMGIQRGKNDKADACVIGKYAYLNRNEIDCYRLPSRIILKLKQLVSYRERLVKSNVALKIAAKELKAFTDKDMHGYIVSDSQEHIKHITKSIIEIDHSLKQIIAEDPALNRMFKLITSVKGVGLHIAINMIVVTHGFTRFKNWRKFSCYCGLAPFEHRSGSSIRGKTKVSHLGNKKIKAIIGNGIASAIQHDPEIASYYKRKLEEGKHKMVVMNAIKNKLISRVFAVVKRGTPFVPLYQHI

SEQ ID NO: 81512 - protein, 355 aa, unidentified
MNSEKYIGLDVHQATISVAVMDCRGKVVMESILETKAATLLEFLAGLRGTLSVTFEEGTWAAWLYDLLKPHVQKLVVCNPRKTALLKHGNKSDRIDARKLADLLRLNDLEPVYHGETGVRMLRELARSYLTLVKDLTRVMNRLKAMYRSWAIPCAGRDVYYKRHRAEWLSKIPEAGVRRRAERLYQQLDMLQHLRQQARRELLAESRKHAITAKLRQIPSLGPIRAALAVALIQMPHRFRTKRQLWAYSGLALETRTSGEYCYVRGQLRRSQKQISIRGLNKDHNHDLKGLFKAAATRASVQPGPFQDFYQRSLAKGIKPTMVRLTLARKIAAITLTLWKKGENFDAKKLKSQAA

SEQ ID NO: 81513 - protein, 447 aa, unidentified
MAHGTGLTRGDRRRNQEIAALRKVVGRDRAVLAIDLGEDKQVATLMDHDNVALARKVALVKAHNLGSLLVWAGQHAAKHGFVGVTVACEPTGHRWKALMGLADGAGMGFVCVQSLAVHRSREGDDYTLDKTDHRDSVLIGKLATRLDCYLPERADAQWARLRHLGARRGRLVSEATACGQQVADLLSCAWPAVLECAAKPLESTTWLACLAVITARCNGNPAKIRKMGRETFVAAVRGELPYWDATRISHRVLGRVWDVLSDTRGVPTQRRGALERVHLVMADWRSARARLGDVQTRMLEVLDQLGLRELVCSIDGLSGVGAAAILAETGDMARFASARSVVKHAGLNPTENTSATMRGQTRVSHRGRPQLRAAAWRAVWGALPHNPVLAAKFAHLTKRDTDRLAAGQARAACAAALLRWLYAVAVRGGHQAPAVGSAGGQWTGPVP

SEQ ID NO: 81514 - protein, 310 aa, unidentified
MDMISIGIDVSLDRLDVAVRPSGEVFAVARKAAGLDQLIVRLQELGPQVVALEATGGYETIAAAALASAGLPVVIVNPAHVRSFAKALGQRAKTDPIDAAVIAHFAEATKPEIRPLPDEATQMLADLVARRRQIVEMIGAEGQREKRMTRPRLKADIARLIKTLEKELSKLDRELNDVVRGSPIWREKEQLLASVPGVGPVIARTLMAELPELGRLSRRQIAALAGLAPFTRQSGRWRGRSFIGGGRTTVRTALFMGAFVAMRFNPTLKIFFDRLVAAGKPKIVALIAVARKLLTILNAIARDNRPWQTA

SEQ ID NO: 81515 - protein, 344 aa, unidentified
MGRRKLRFERTDNILKYLEQVRRKYPEEVEFICGYEAGCLGYSLYHQLTDHGVKCIILAPTTMGITNTNRVKTDRKDAANIARCLAFHTYTAVYVPDGEDNAVKEYLRMRDDQKLALKKIKQQITAFVLRLGKQYTGGKSLWTENHLKWLRGLDLTLLEKETLQEYLITYDYLTDKLERLDARIEELARNERYGERVRRLDCFIGIKPHTALSLLVEVGDFRRFEKAPNFAGFLGLVPGEDSSGGGRNRLAITKAGNSHLRRLLVESSQSYSRGTIGFKSKELKKRQEGNPPEVVAYADRANERLRRRYHRMTLKNGAKRNVAIVAVARELACFIWGMMTDEIA

SEQ ID NO: 81516 - protein, 410 aa, unidentified
MDVIVARQSALDVHKAQVTACVRVPGEQGERVEQVEQFATTVGGLLVLSDWLKAHGVTDVVMEATGDYWKPIWHLLEAEFALMLVNARDVKQVPGRKTDVSDAAWLCRLAEAGLLRASFVPPKPIRDLRLLTRYRRTQIAERKREAQRLHKALEDTGIKLDCVATDILGKSGRAMLDALVAGTTDPEQLAELARGKLRKKIPALREALQGRFETLHALLIGAILAHLDFLDEQICQLSEAIEEQMRPFAAAVELLCTIPGVAQRTAEVIIAEIGVDMTVFATAGHLASWAGMCPGNDQSAGKRRSGRTRKGSKSLNAAFKDAAMAALRTNDSYLQALYRRKKPQLGHGRALGAVKHSMICACWHMLTTGEIYNDLGGDYYHRRNPERQTKRLIAQLERLGHTVTLQKAAA

SEQ ID NO: 81517 - protein, 351 aa, unidentified
MLIIGCDYHPGFQQIALLDVETGESEERRLVHREDAEQFYRELKQQSLSVRVGMEASGHARWFERLLSDLGFELWIGDAAEIRTKRVRKQKTDRQDAQLLLKLLMENRFPRIWVADGENRDLRQLLWHRHRLVQMRTRVMNQLHVVALNEGVRRKQALWRPAGRNELESLVLAPWASRRRRDLLDLLDQLTPKIHELTRTIEKEVENRPVARRLITHPGVGPLTALAFELVIGNPERFHCGKQIASYVGLVPSEESSGDRRRLGHISKQGNSLLRYLLVEAAQVTVRSHPQWRSKFFHLAMRRGRKIAKVAMARKLAVHLYWMWRQGWDYERFEKLGESPEIAMVCSKSPT

SEQ ID NO: 81518 - protein, 330 aa, unidentified
MDYFAGLDVSVKETSVCIVDDAGKIVREARVASEPEALLQVLTLYRFKRVGLEAGPLSQWLYSVLAEAGLPVICVETRHMRAVLTAQINKTDRNDARGIAQMMRAGLYRPVHVKTLRSQKLRMLLTHRKLLQSKAIAIENDLRATLRNFGLKVGMVGTVKFEARIKELVENLPDLAILVEPLLTVRRVLREQITVLHRRLLAIVRDDDVCRRLMTVPGVGPVVALTFRVTVDVPARFRNSKAVGAVFGLTPSKYQSGESDRTGGISRCGDEMMRAMLYEAAQILLVRSAKWSWLKAWAMKIARHRGMKVIMHRMWVDGTEFRWTREVAAA

SEQ ID NO: 81519 - protein, 344 aa, unidentified
MQLAIIGIDLGKNSCSLVGLDVAGKVVLRRRMRRDTVLQFCSKLLPCVIAMEACCGAHHMGRALAASGHEVRLMSPEYVRPYVKAQKNDDRDAEAIAEASTRPTMRFVALKSEEQLDMQTLHRVRDRLVGERTSLMNQIRSLLLERGFVVPQGKAKLARALAELLDGERPVLTQRMHALIEDMRQRWRALDERIAGFDAEFAASAKADENARLLCSIPGIGALNATALVAAIGDANTFAKGRDLAAWLGLVPRQSTTGGRPKLLGITKRGSKYLRKMLVQGARAALPVLKQSDTRIGVWLRGLLSRAHANTAVVALAAKMARTVWALLRHRQAYRVQSAGLAPA

SEQ ID NO: 81520 - protein, 360 aa, unidentified
MFKNSMLFVGLDLGDRHSHLVILDQDGELVEEARLPTTQASLTRRFSTLPASRVALEVGAHSRWVSALLTRLGHEVLVADARKLRLIYSNSRKRDRADAEYLARLARLDPALLSPIHHRSPQAQAHLAVIRARDSLVRARTQLINHARGLVKTTGARLPSCSAASFHTRTASAIPQELLPALSPILDAIASLTQRIRAYDRQIQQIADTHYPETRLLRNVPGVGPLTSLGYVLTLEDPRRFRKSREAGACLGLVPRSDQSGDHDPQLHITKTGDAYLRRLLVQSAQYILGPFGPDCHLRRWGLKLAERGGKAAKKRAIVAVARKLAILLHHLWKNGEIYDPLYRSRLSPRSAKEVAMASA

SEQ ID NO: 81521 - protein, 415 aa, unidentified
MDVLHDRCAGLDIGKKDLKACVRTPGLTGRRSRRQEIRTFATTTNALLELREWLLDQQVTLVVMEATGDYWRGVYYLLEDTLNVILVNAAHAKGLPGRKTDVSDSAWLAQLGECGLLKASFVPPEPIRHLRDLTRYRATLTVERTREAQRLEKELEDAGIKISSVATDILGVSGRAMLAALIDGEDDAQVMAEMARGRMRTKIPALVQALTGNFGEHHWFLCRMHLTRIDELSATIEELSARIEAEMRPFAPQIEHLVTIPGVKKTTAEVIIAETGADMTRFRTPANLASWAGVCPGHHESAGRQRSGKRRHGNRWLGGALGTAAMAAGRTKERTYLGARYARLVPRLGKQKTIVAVEHSILIAAWHMLTDNVDYHDLGGDYFTKQDPERAMRRIIRQANALGLTVRFDPIPDVA

SEQ ID NO: 81522 - protein, 376 aa, unidentified
MTEKLRFLGLDVHAETITVAVAEPDGEVRSLGTIANREESIRKFIRKLGSPENLRACYEAGPTGFVLYWQLTQLGVTCDVIAPSLVPKKPGDKVKTDRRDALKLARSHRSGDLTAVWVPDEGSEALRDLVRAREAAKQDQLRARHRLTKFLLRTGRRPPLGVKAWTERHAEWLQQVRYTHPAQEATLLDCLHEVQHMEERVKRLEQSIVEVIQLAPAPMQEVVRRLQALRGIAHISAVTIAVELGNITSRFERARDLMGYSGAFPSEDSSGKRIRRGGITKSGNAHLRRIVVESAWSYRHRPAIGARLRRRQEGLPAEITEIAWKAQNRLHKRYMTLMARGKEQRKTMTAVARELLGFIWAIGIKAEAACKQQKAA

SEQ ID NO: 81523 - protein, 380 aa, unidentified
MSVIRYVGLDVHAESTAVAVADSGGKGCTFVGKVPSPSDSVLKAVKKLGKPGTVKVAYEAGPTGFGLYRRLVAAGYECHVVAPTLIPVKAGDRVKTDRRDAEKLARCLRSGDLTDAWVPTVETEAMRDLVRCREAAVQDQLRARHRLSKFLLRNGIRRPSTMKKAWTGVHLVWLSKQELAEAAQQAVFDDLLTEVNHQSERLVSLEKKIEDQVPELPEVLRETIRALQSMRGIALVSAATLATEVEQFGRFEHPRQLMSYAGLVPSENSSGDRTNRGRITKTGNARLRRVLVETAWNSRGKPKMSYALKKRQYEDPRVREIAWKAQKRLHARYLRLSLKGKTHNKVLIAIARETLAFVWEIGKTVEHACMVKTRRQQVAA

SEQ ID NO: 81524 - protein, 346 aa, unidentified
MNETTTIGLDIAKQVFQVHGVAVDGTVTVKRQLRRSEVIRFFDRLPRCRVGLEACGGAHFWARELTVLGHDVRLIPASYVKPYVKRGKTDAIDAEAICEAVSRPTMRFVPIKTVDCQAGVMLLKTRYLLVKQRTQSINSLRGHLSELGIIAARGTGKVETLIAIIRDKTDERIPAVARRALEMLAEQVEALVRRIATLENEIVSEVRRDDTMRRLATIPGVGPITAATIVALVPDPGAFNSGRHFAAWIGLTPKMHSTGGKERLGRISKMGNPVLRSLLVVGATAVSRHARRGATVSPWLTSLLARRPAKVAAIALANKMARVIWALLTKGGVFTRRPATAAQHAA

SEQ ID NO: 81525 - protein, 407 aa, unidentified
MIAIGVDISKDFFNVCAVDEGLNILHKESLPMNQEGFFSFSKIVSSFSNPVIALESSGKYHIPLLCFLSSLRVKVCLVNPKAIKNFSKVIFPSTPSKTDRKDAFIIACFIIKHPDLAAKHAIAEEIKVLARQIESISCEISQVKTKIKDLIFVLFPEAERHFNIFSLWFLKIIRKYPSSKAIAKASANSINKIIRKSSRGRKPTAGPLDIIELAKNSIGIRNKGFEVSLVFYIDKLLFLDSQLGLLKKTFEDLIKERFFRQIEILCSIRGISKILAGRLMAEIGSIKLFPSSRHFISYAGYDPVIKESGRWRQRMSISKQGNPHLRNVLFQMAVMAIVHNPVFRVYFEKKRKGFGSYKKSVVAVINKLIRVIYAMLTREEKFDPSKVAPSCYIKVKSSMEVNFDHAA

SEQ ID NO: 81526 - protein, 390 aa, unidentified
MNTDGARLASRRLPEGLAGIRGFHELVATHAEEPGHVVVGIETDRGLWVEALTAAGYQVYAVNPLAVARYRDRHHVSGAKSDAGDAKLLADLVRTDRHNHRMVAGDTPIAEAVKVLARGHQNLIWARIRQTNALRSALREYYPAALEAFDDLSDRDALAILGRAPTPAEAAHLSLSKIRSALKAAGRQRNLDTRAQQIAALLRTEQLTAPAAVTAAFGATTRAAVGIIVELNCQIAELETELAAHFEKHPDADIYLSLPGLGVVLGARVLGEFGDDPNRYTDAKSRKNYAGTSPLTVASGKKRAVLARHVRNRRLYDAIDQWAFCALSTSPGARSYYDHRRAAGDLHHQALRALGNRLVGILHGCLRHRTIYNEHKAWAHRQTTHDTQAA

SEQ ID NO: 81527 - protein, 351 aa, unidentified
MANTNISGVIIGVDTHKSIHVAVAIDNNGSRLTAFSAPATTKGYKLLEDWACALGTITAFGIEGTGSYGAGLSRHLLAQGHKVIEVTRPNRQLRYQHGKSDSLDAEGAARSVLAGQAIAQPKTQTGSVEMIRHLKIARDTAVKCRSQAMVTLKTLIINAPAALRDTLDQISGKIALIRYIAAFRPGAMTSTIASAKTAMRALAQRWLTLHEEIQSHDKALEQLVVVRAPTLLASHGIATMTAAEMLILVGDDPTRIRSEAALAKLCGVCIPASSGKTNRFRLNRGGNRQANAALYRVAIVRMRNHPPTLAYVSKRKMEGKSNREIIRCLKRYIVREIFTHLCRPKTSRTSA

SEQ ID NO: 81528 - protein, 346 aa, unidentified
MRYKGMKNKSFVGIDISKNVIDVSIFCEGTPIKDFPHDVFNNSRKGFGEMCTWLKKNHVVLSNCLFGMEFTGSYSMELEKFLNARKYQFCMLSTHVIKHYPMGPKDKSDKIDSAKIADFLYRYNGTECVKPYKMPDKTMQRLKALMNERKFLVEQRTCFMNRRQLCTTKEDAQLYDSYIKKLSHDIENIELEEQKLLATDESLFTTYRNLLTIPGIGFVNAINVIVITRNFTAFETARQYASYVGVAPHFRTSGTSVRWRPRPSARCDVQAKADLSMAATVAVQYDAELQSFYNRKLGGKQDSDTKRKALNAVKFKLVLRMFAIGKQNRKWEPLDSKSSNEKLAIS

SEQ ID NO: 81529 - protein, 400 aa, unidentified
MDKRQRFRWFLGIDVSKETFDACCIPSHGERLFNLSASMDRKGFEELIKQLCTLSIPQESVLVGMESTACYHINLYSFLVSLGYTVMVINPLLISNFVKLQLRKTKTDKKDAYVIAQFLLLNRDSLSQSIVSSDISDLRDLSRQRESLVDQMSSTKSEIKRLLTITFPELEHISGIFTKSMLRLLCQYPSAASIKQAKRSKIAKILIPGSYGKQTPASVERILKAAQVSVGTSSTTKEIILRQKASLLIQLEEHLRELTDILIELCQGKIQGDMDILTSMKGIGEKTAVNFLIEIGGDIKQFESHKKVIAMAGLDPALYQSGKIDRKGRISKRGNRHLRRVIWLMTTKVIQFNERFKQYYLKRIKDGLPYKKAVLATAHKLIRVMFAMLRNKTLFDARMN

SEQ ID NO: 81530 - protein, 463 aa, unidentified
MRKKQSPRSQPQNNRVLEQLNHNAAGGDIGSDTIWIGVGEHVSEEPVRKFGTTTAQLRESAEWMISLGVDTVAIEATGVYWVPAYEIYEEYGLHPILINSRAIRTFNGMKKSDFIDCQWIQLLHTFGILQPSVRVESLMIELRGYMRHRKNLTEQCSEQIQRMQKALTLMNLRLDQAVSDITGMTGMNILRAIVKGERDAVTLAAMRNPGCAKSEAQIAEALTGHYREEQLFCLDQAIQMWDFFQKLMGQCDGKIEAVLHKLPAKQTETTVKPTRQKPRKNQVRFDGRTLLHERLGIDLTQIRGLEVLTLLTVISECGVDLSRFPTDKHYKSWLGLCPGTRKSGHRLLSSRSRRTTNRAATALRVAAQSLLKSDCELGAVGRALRGRIGAEKAITAVAGKLADRIYLSLKTGRVFEDRGAQYHDLKHRERTMASLQKRARRLGLQLVPIGETVKKTIAESTVS

SEQ ID NO: 81531 - protein, 315 aa, unidentified
MDAIIECCAGLDVHQETVVACILYGSLEQKPKEITKTFGTTTNNLLELRDWLTQFEVTHAAMESTGVYWKPVWNVLEGSFLLVLANAQRIKNVPGRKTDVKDAAWIARLLRSGLIQGSMVPPEDIRDLRDYTRYRRKLVGAATSEKNRIHKILQDANIKLTSYVSDLFGLSGRALLDSVVNGEVLEPKIIRSMVYSRMKNKVPQLVEALNGRVRLHHRNMIRFHLDHLQFVQGQIDEIESKIKILVTPYQEEIALLDTIPGINEDAAASILAEIGPDMSKFPSEDHISSWAGISPGNNESAGKKKVHEPEKAIGL

SEQ ID NO: 81532 - protein, 351 aa, unidentified
MIIIGVDYHPSDQYIALVDTETGEYGERQLKHSEGEAEKFYRELAAGGVSVRVGMEATGYSRWFERLLAELGIEVWIGDAAEIKTKRVRKQKTDREDARLLLRLLRENNFPRIWVPSPENRDLRQLLWHRHRMVQMRTRIMNQLQALAMNEGQRRKKKLWSEAGGAQLEKLLLAPWASRRRKDMLELLDRMNPTIEELTATIEQEARKRSEVLRLMTHPGVGPITALAFVLIIGTPERFKCGKQIGSYVGLIPCEDSSAGHQRLGHITKQGSSLLRFLLGEAAQAAARWDADWRRRYVHLAMRRQRNIAKVAMARRLAVRMYWMWRNSWEYTEWVKFGSHAGQLGIRHGVN

SEQ ID NO: 81533 - protein, 358 aa, unidentified
MRVQSKELNFKGQNIYIGIDVHKKDWKVRIQSEELVFRTFAQPPSVAALVEHLHRNFPGATYYSAYESGFSGFWAHRDLVSKGVNNIVVHAADVPTTQKERAFKNDKRDCRKIARSLCKGELEALHVPLIKTQEDRSLVRLRLTFRKDLTREKNRVKCMLNFYGKEIPEQFLTSSHWSKVFIEWLKGVKFETGSAEQALKLLIEQVEQIRSGLLDVTRKIRKLASSEDYAADMELMLKLPGVGLVTGIAFLTQLETIDRFPSTDSLANYIGLVPNCHSTGDKENTGEMTYRGNKWLRELLIECAWSAARSDPALHLAYLNLCKRMKPNNALIRIARKILNRMYYVLKYKREYQKGIVQ

SEQ ID NO: 81534 - protein, 339 aa, unidentified
MQVTTVGLDLAKTIFHVHGVTEGGEVAFNRPLRRAQVMSFFERLSPCLIGIEACASSHHWARELSKLGHTVRLMPPMYVKPYVKRGKSDAVDAEAICEAVTRPTMRFVEIKSEDQQALLSLHRARDFVVRQRTQLINMLRSLAAEFGIAIARGVARAIDFAKGIIEGKQSGLPELAQDVLRVLSRQLLDLHNRLGWYEITMRIQARLSHQAQLLQTIPGVGPVTASAVAATIGSGRQFRSGREFAAWLGLTPRNHSSGGKERLGKITKMGDRYLRQLIVVGMTSRVRQVANHPERADPWLTKLLQRKPARLATVAMANKTARIMWAVLTRNEPYKPHPA

SEQ ID NO: 81535 - protein, 368 aa, unidentified
MVHKSSKLYVGMDVHKESIDIAVADEGGEVRHHGQIGGDMNALWRAVRKLESLGRELVFVYEAGPCGFGIYRGLAARGHACWVVAPSNTPRRVRDRIKTDRRDSVKLAGLARAGELTPIYVPDVRDEAMRDLVRSREDAVVMQRQARQRLAALLLRNDVRYAGKTAWTAAHRRWIADLKLPQSGQRLAFEEYVQAVEEASARVQRLGQCIEQELTTWRWRSVVAALQACRGIQLIHAVRIVAELGDLSRFRHPRQLMGYLGLIPGEDSSGEHRHQGAITKAGNSSARRALVEAAWAYQYTAKVSALIARRQVDVPKAALNIAWKAQVRLCARFRRLAARGVHRNKIVVAIARELAGFVWAIAQYVKPV

SEQ ID NO: 81536 - protein, 345 aa, unidentified
MNNNSKKIVYLGIDVHKRTYSVTAISDKQVIKKATMPAVQEVLLSFIQKNFPNATVNSAYEAGFSGFGLHRFLVTNKINNMVIHAGSVKIAINNRAKTDKRDSQKIAQQLSEDDFQSVNIPSEQRECWRAITRVRAQLVKRKAQTSCQIKALLYYFGILPHNHSKRTSKKWLIGLLILKDSIDSDVFFSLKTLIDLWLYLNQRIKETEKRVKEQAKEDFVIGNVYKETPGIGLISSRILANELGNLSQFCSQSALFSFTGLTPKEYSSGEHTRKGNISHMGNPMIRAILTESAWKAIKKDKKLGETYERLLKNTGSKKKAIVGIARKMIGIVRAKLKKVRINTMH

SEQ ID NO: 81537 - protein, 357 aa, unidentified
MQTKCSEVDFRGQDIYVGIDVGKRSWKVCIVTEYVEHRVFTQVPSPAMLANYLHRTFPGARYHSAYEAGFSGFWAHEELQALGIDSRVVNPADVPTTQKEKSFKTDRIDARKLARSLRSGELRPIYVPPQEAQTYRSLVRLRSVLVRDQTRCKNQITSLLHYYGVPIDELCIRTHWSRAYLRVLETTSLHTEQGTMALRILLSRYYAIRDQVLALTKEIRTLAHEEPFRESIRVLVTVPGISVITAMVLLTELIDITRFASLDHLASYCGLVPGERSSGEREIITGITRRRNPFLRAILIESAWCAVRHDPALLAMFGSLSKRMNKNRAIVRIARKLLNRIRFVLLHHTEYQRSLAA

SEQ ID NO: 81538 - protein, 354 aa, unidentified
MNSVIEPIVKCAAGLDVHQGSVTGTVLEEQGAAAPRRETRQYATFPRRLKELGRWLQERGVELAVLESTGIYWKSVYAALEEFGIQTYLVNARHVKQVPGRKTDVADSEWLAELARCGLLKASFVPPRDLRELRLLTRYRRKMSGYLAGEKNRLQKVLEDAGMRLGCVVSDIDGVSAQRMIKALAAGEKDPAKMAALAAGSLRRKQADLVLALEGDLSDRHRFLLQRITNHIRWLEEQLQELDVQIVAAMAPYQEEWRLMQTIPGIDHLSAAMLLAEFGPDMGRFGSKERLSSWAGMCPGNHESAGKKSASAPRRATNISGNSCVKRPTVRQRRTASSRGSSRGSSSDGGPSEP

SEQ ID NO: 81539 - protein, 342 aa, unidentified
MDTIGLDLHQRESQLCILTEAGEIIERRIVTSRERFTAVLGNRPPARILLEASTESEWVARHLESLGHTVIVADPNFAPMYATRSRRVKTDRRDARTLMDALRLGAYRAIHRASAAQRHVRAQLAVRDALIRTRTRYVNVVRALTRREGLRLAAGGPEHLERKLATLPLAPELVEELAPLRVVLEPVNVQIDLADQQLAATAGADPLFARLRTAPTIGPVTAVAFVATLDEVSRFRTAHQVEGYLGLTPREHSSGERQRRGRISKTGNPRMRALLVEAGWRILRSNDPAAAPLRAWAERIAARRGTNVAAVALARRLAGILYAMWRDGTTYRAPVVKDVAVA

SEQ ID NO: 81540 - protein, 343 aa, unidentified
MAYFVGLDVSVKETTVCIVDDAGKIVREARVASEPEALLQVLTNTIYRFKRIGLEAGPLSQWLYSALAEAGLPVICVETRHMRAALKAQINKTDRNDARGIAQMMRVGLYRPVHVKTLRSQKLRVLLTHRKLLQSKAIAIENDLRATLRNFGLKVGMVGTVKYETRIRELVENLPDLAVLVEPLLIVRRVVREQLGILHRRLLAIVRDDDVCRRLMTIPGVGPVVALTYRVTVDVPARFRNSKTVGAVFGLTPATYQSGENDRTGAISRCGDEMMRMMLYEAAQIMLVRSTKWSWLKAWAMKIARHRGMKKAIVALARRLAVIMHRIWVDGTDFRWTREVAAA

SEQ ID NO: 81541 - protein, 336 aa, unidentified
MNNESEALGIDVSKSKLDVALLLNGKVKSKVVQNTPAGHQELLEWIGKSKASLSALHVCMEATGVYHEAVATTLHAAGLKVSVVNPACIKGFGHGENIRNKNDEIDAGLIARYCRSMAPEPWTPPPLEQRQLKGWTLRVQALQDIRQQEANRLEAHTVSGMLDVATHVKEHIVWLDAEIKKLEKEIDDHIDRHPALKHDAQLITSVPGIGRTTVARILGHLGDIRRFDSAKSFAAFMGVTPRQATSGSSVRGRTMISKTGNTSLRAALFMPSMVAQRHNPIVRQFAERLLATGMAKRAVIGAVTHKLTHLIYGVIRTGKPFDANYLMNRLAIQDGI

SEQ ID NO: 81542 - protein, 378 aa, unidentified
MRRGGSQIANDSEGESMKNHTVTKQVMSLTDLSACTTVAVDLAKQVFQVAGEDALGQVRYEERIKSREKFYAFLKGLPAHVEVLVETGPGAQAWARQLQDQGNQVRILPARLVANHSSGAKNDRNDALAILRAGRDSHIAGVPVKSAAALGMQALHRVRQGCIRRRTAIGNQIRGLLLEHGVALAQGDLAISRTLPRILEDATQPLPDMLRELIDELQAEWQQTGIRIDVLTGRLEVAAQADATAKRLMTVRGVGPITATALLAKHTEPERFANARMFAAYFGLVPDQHSSGAKIRLGKMSKRGDGYLRGLMIQGAHAVLRQIKPDSEQPDDRRLLNWLSRVGRKEAAVRLANRNLRILWKLLQNNDIYSRQPDRQAA

SEQ ID NO: 81543 - protein, 410 aa, unidentified
MDILNPHCAGLDIHRDTIVACVRLAEDGGVVRLVETFATTTSALEQLSEWLASHGVTCVAMEATGVYWKPVWAVLAETFELVLANAHHVKAVPGRKTDVNDAMWLADLLAHGLIRPSFVPSMQEQALRDLTRARKQLTREKASHVQRIDKTLQAATIKLGSVLSNIMGQSGRALLEALAAGESDPERLAGQVRTKIRASHAQVVEAVRGRLEAHQRLLLRLYLAQVDALDAAIADIDRELGERLEPVRDAVRRLTTMPGLSALSAAVVISEIGLDMSRFPSVAHLISWAGLCPKNDESAGKRRSTRLRPGAPWLKALLVQTAWCAVRAKATYLHALFQRLKARRGPRKAIVAVAGAMLTAIYFMLKRGAEYHDLGPDHFQRTERSRLATRLTRKLTELGFDVTPTQKAAP

SEQ ID NO: 81544 - protein, 338 aa, unidentified
MRLYGGIDLHSNNNVIAVIDEIGQVQFKRRLRNDLQQVKAALAAYRERLCGVVVESTFNWYGLVDGLKEAGYQVHLANPAACKQYDGRKHGDDESDALWLAEMLRLGILREGYIYPKAERGVRDLLRKRGQLVEQRTANLLSMQNVIARSTGTQLRGDAIKGLKIEQLAAVVPDADSARVIAAGLRVHACLEHEVNALERAVLTRVKRRPEFIKLNTIPGVGDVLGLTIMLETGEIRRFPDVGNYASYCRCVDSTRLSNGKKKGKGNVRNGNRSVSWAFTEAAHFAIRYSARIQRFHQRKQRRPHPVVAIRAVAHKLARASYFIMRDQVDFDEVKAFG

SEQ ID NO: 81545 - protein, 385 aa, unidentified
MGQPQKDPSATRASMRCPSEPESEISSPSAPVVVSPGQHLVATPPPRPEPAFTSMDSTMTPHRLFLGIDVGKDRLDMALTDSEGHAHTKHVRNDASGHRALVRWLGRFTDELGCVHACLEASGGYEDDAAIALHAEGLTVSVVNPRRTAGYATAQLRRNKTDRADAQLLARFCERERPAPWTPPADHARELRRLTRAIDALKRDRDRTRNRRGRMPDGPARTALDAVLAAYAEQISALGTAVEAHLAAHPDLARQRDLLVSIPGVGAQTAATVIAELGDGAAFASARSVAAFAGLVPHHHDSGTSVHKRPRLSKLGNARLRRALYFPALTAMRHNAAVRVFATRLSEKGKAKMSVVGASMRKLLQICYGVLKSGKPFDASLHPAA

SEQ ID NO: 81546 - protein, 421 aa, unidentified
MKKRTYRKIAVKDVDVAALAAELGTGRVVFAIDVAKVDMVAAIVAGDGRVVRTVCWKNPAENGLVLELLSGLRRAGLLVEAVMESSGTYGDVLRHQLLEHGVPVYRMSGKRTHDAAEVYDGVPSLHDAKSAAIIAKLHLDRASTPWGPLSEEKRELKAAIATMDLYREQHQRLIHSLESSLARYWPELTEHLELSSATLVALLARVGGPHDVADAIEQSRGLLHGMSHGLMSEEKIEAVLQSATRSAGVRLLTQERVALMTLAAEAHRALKEFKKAKLAVERLSTSGAAQRLAPTTGKATAAVLIADVGDPLDYPSTRAYLKGYGLNLKEKSSGKHKGQLSITKRGPGRARQYLWLAVFRWLQKDAVARAWYAEKIKRDGGRRARAVIALMRKFAQALFHVARGVPLDSTKLFDVSRLRLT

SEQ ID NO: 81547 - protein, 387 aa, unidentified
MIYYVGIDISKYKHDFCIISNTGEVIVENSSFENNKKGFQSLLEQLKPYDKSQVHIAFEATGHYSMNLELFLIDKEFSFMKINPLIIKQFFKTRSLRRTKTDKADALNIAEYLMSVPYKPNSLLLYHIYSLKSLCRTREQLIKERSKFAVLLTNELDKSFPELKPFFNNIISSTLLFILDKYKNPSHIALMKDYDSIRCISRGKFTYAKFAKLKELAKNTVGYHDDNTDLLISTYVSLYNYFNDKIVPIDKQISTIIKELNPSILSIPGIGEISAASIISEYGDISCFSSPAKMLAFAGLEPSINQSGTLESNGKMVKHGSGHLRYVLMNTSLTLLKFNPIFYDFYLKKRSEGKPHRVALSHVCKKLVRLIYTLETKHVDFDPSLLK

SEQ ID NO: 81548 - protein, 419 aa, unidentified
MSNSNISKKLAQVNPGTLHVGVDLALEGNTGIIIDENARQYSRFYFPQNTDGYDYFQNHIEKVRQKQDATQVLVAMEPTNYFWKLLANRLEEKQIPYHLVNAYTVKKHREGDQIDRSKDDPRDSFTIADLSRTGKYTETRMQRGIYAELRQYATLYYQLTRDVRREKNILWGLLGQVFPELRQVFKALTSQTFKAMMKTCPAAVSVRAFNEDDFIARVRTSFSGKRLFITKLHQAYRLAKTSIGLVDGIQANYLAIQIHLEHLEFLQRDISRVIVDLKTCLQQVEVSKYLLSVKGLSTLSVALFFAEIGDPSHYSSGKQLVKLGGIQPTPNRSGHKQNSPTPMSHQGRPGLRSVLYLACLRLIQVDRRFKDIYHYLQTRIQNPLTKMQALGVLMNKLLHILWALMRKKTFYIPDFAGSA

SEQ ID NO: 81549 - protein, 411 aa, unidentified
MIFVGDDWAEAHHDVYVCDEAGGKILARRLPEGIEGVTALHQLLAEQVDDPAEVVVGIETDRGLWVQSLVEAGYQVYAINPRAASRYRDRHTVSGAKSDPGDAKLLAELVRTDRHNHRQVAGDSDLAEGVKVLARAHQNLIWDRTRATNRLRCSLREYFPAALATFNELADRDTLAVLAKAPTPAEAKALPLGKVRSALKAGGRQRNIDTRARQIVDGLRVDELAAQPAVTSAFAATTRTAIAIITELNTQIAALETELADHFEQHPDADIYLSQPGIGVILGARALGEFGDDPNRYADAKSRKNYAGTSPITRASGNRHVALARFIRNRRLADAIDQWAFCSLNTSPGARAYYDHQRDKGLSHHKALRALANRLVGILHGCLHHGTSYDEHTAWAHRPENTLTKKIPNAA

SEQ ID NO: 81550 - protein, 440 aa, unidentified
MSKRAYRATRVNDVNWDQLAQGKDGLDIALGVDVGKYSLWAVCRWADGRFERPWRVQNPGEIPTLLTLLKRVSAGRKLVVAMESSGTYGDALRQALADNQLEVRRVGGKAAHDYAEVFDGVPSQHDGKDAAVVAELAALGKAMPWEYQPADPWEQELAYWVEWMVAHRQMLTIWQGRLEGLLARHWPEATQVLKLSSGTLLRVLKRYGTPQALAADGEAAKLLARWGGAFLAPEKIERLLAGARASVGVRLGEWQQRQIQNYAQQALAARQEANRAERRLRSLAEGHAVLQAQGKVVGVPTACVLWVSTGDPRKYHAAGAYRKAMGLNLVERSSGTYQGKLRISKRGSSRTRQWLYFAVLRLVQKCGVRSWYEAKKAHDEADARRALVAVMRKLAVALYYVGVHNEEFQPRRLFGRIRRHRGSPGEQKSRTKRRSRAEQL

SEQ ID NO: 81551 - protein, 321 aa, unidentified
MQEWYLGIDVAKKKLDCALRLPNGKYKHKTFDNAPKGFEELRVWIFSFDVTQLHVCMEATGVYWEAVAEYLANHQYVVSIINPVQIKAFGASRLVRTKTDKVDAKLIADFCKENRPEPWKAPSLEEQALRAMVLRLDALQEIRTQESNRLDVARESVKDGIVSHIAWLDEEIKNLSKKIRDHIDSDPDLKDRKALLESIPGVGERTIALLLAFSLAPGRFTNARQVTAYAGLDPRHHESGSSVQHKTRISRVGHNLIRKGLYMPAMVTLYRTSWGKHFLARLSSAGKKPMVIIVAMMRKLLHVAFGVLKSGQKFNPDLHAA

SEQ ID NO: 81552 - protein, 421 aa, unidentified
MKGLRTKKVNTIKEGTLIVAVDIGMVSNHGCCTTADGRSTKTFSFDNTRDGLDILWNMILASKNRFQCNEVIIGYESTGPYGEPLIHYLKQKPVTIVQVNPLHSKRMREINDNSPLKTDRKDPRVIADVIRIGHALSVLVPEGDAAYLRRINNARERHIKERTALLNQLQQFVFLIFPEFSRIIKTIYSKTALYILKKYTTPAKVCSVNIEKLGEEMRRRSMGKFGVEHAAALINYAKTTIGIQEGLDGLVMDIQHALVQLEMADSLIAELEHEMETTLHRIPYSRKLLAIKGLGIVTVAGLIGEVGDFTKFTTQSEIAKLAGLDLYEISSGKRQGQRRISKRGRSLLRKILYYAAMQAIRKNGIMHDYYQKLIGRGMKSMMALVAVSRKLLRIIFAIVRDDTEFILNHESQRKEEMRRAA

SEQ ID NO: 81553 - protein, 316 aa, unidentified
MYLGIDVSKLTIDCCLIADDQNYQKKFQNNKGGFEQLIKWLQSHKVSDKLHCVCEATGTYYEALAEYLYSRYTITVENPRKIKGYAIAELQRSKTDTQDAKLIAQYCQDRKHKLKAWQPPAKEQKQLQEIARYLDYLKKQRATEKAKQHEAPDYIKSHIQTTISNLTAQIQTVKKQLLQFYKDNPSYNDLRKRLKTITGIGEQATAVLLSTYKRHEFKNAKQFTAYLGLDPRKYQSGTSVNGKSRISKIGSSEIRKSLYMPAVVAYRCNAFPEFVGRLKNKGKHIKLILIAIMRKLAVIAFTLLQNGQDFQVERYK

SEQ ID NO: 81554 - protein, 347 aa, unidentified
MRFYTRQHKHYCGIDLHARTMYLCVLDQTGEVLLDQNIRCDPRIFLRTIAPYRDDLVVAVECIFTWYWLADLCAREQIPFVLGHALYMKAIHGGKAKNDRIDAHKIATLLRGGMIPEAYVYPPEMRATRDLLRRRLYLVRKRGQLLAHIQNTHHQHNLPEPTRKIIYRSNRAGIADTFTDPNVRKSIEADFALIEVYDRLIRELELHIVRTVKEHDPDSFLRLRSLPGVGKILALTILYEIHDIHRFPSVQDFASYARLVTCAQASAGKRLGTGGRKIGNAHLKWAFSEAAVLFLRQNPPGQKLFQRLQRKHGKGKALSILAHKLGRATYHMLARSTAFNMEKFMAA

SEQ ID NO: 81555 - protein, 402 aa, unidentified
MNAVGIDVSKGKSMVAIMRPFGEIVSAPFEIKHTASDIHSLVELINSVEGESRIVMEHTGRYYEVLAHQLLEANLFVSAINPKLIKDFDNDSLRKVKSDKADAVKIARYALDKWQNLKQYNVMDELRNQLKTMNRQFGFYMKHKTAMKNNLIGILDQTYPGVNTYFDSPARSDGSQKWVDFASTYWHVDCVRKMSLNAFIDHYQNWCKRKKYNFSQSKAEEIYGKAKELVPVLPKDAITKLIIKQAVDQLNSASTTVESLRTLMNETASKLPEYPVVMAMKGVGTSLGPQLIAEIGDVSRFTHKSAITAFAGVDPGVNESGSYEQKSVPTSKRGSSDLRKTLFQVMDVLIKTHPQDDPVYQFLDKKRAQGKPYYVYMTAGANKFLRIYYGRVKEYLSSLPES

SEQ ID NO: 81556 - protein, 331 aa, unidentified
MFPVGIDVSKNTLDLCMLYDGIKGRIKTRNIQNNRHSVENILRWLRLQHCSPEDVHVVMEATGVYHERLATELHDAGFRVSLANPHRSREFARGMGIMTKTDKVDAYMLACYAFLKKPHRWEPPAPEIRYLGALLRRRDVLLGDALREENRLEKYLSTDTPADIISSCRRMAQLLREEVSNIERQIKAHIKASPALRRDYTLLTSIKSVGPQLGMHMLVVLRSHDFSSAEQAAAFLGVVPIEKRSGTSVRSRPRMSKIGPPQLRAKLYMSALCGKIYNKRMRNIYDEMCLRGKPKMVAIGALMRKLVHWCYGVLKTGTVFNDEGLKQVLST

SEQ ID NO: 81557 - protein, 391 aa, unidentified
MIYIGIDVAKDKHDCFITNSDSEVLFKAFTIANNLDGFNDLYQKIESVMDDVTKVKVGLEATGHYSYNLLGYLIDKGLPTYVINPLHTNLYRKSLSLRQTKTDKVDARTIASMLMSDVNLKSYSDTFYHNEELKSLTRYRFDKVKERAKLKTSVSRLVCILFPELEKLVPTLHIASVYALLSEFPGAKQVANAHLTRLTNLLSESSKGRYGKDTAITFRDAARASIGSNMPAKSLELKHTIKLIQELDSEIDEIENEIKIIMDEINSPILSIPGINYRMGAMIIAEIGDFNRFDSPDKILAYAGFSPSTYQSGQLDGAYAHMEKRGSRYLRYALYNATKYVCHWDPTFAAYLAKKRAEGKHYNVAISHAVKKLVRVIYHLEKTKQQYIKVA

SEQ ID NO: 81558 - protein, 342 aa, unidentified
MTYFTALDVSLRFVSICVVDDTGQVCFEAKVPADVHRIATCLRKFSAQLRIVGFEAGALTQYLTYGLQAAGFEVLCLEARQVNAALAAMRNKTDKNDARGIAQILRTGWYSRVHVKSLESHQIRALLASRKAILKKCVDLENELRGLLRVFGIRLASKVPHGAYDAVVREQVGTEPLLARALLPLLDAREVLYHTYLKLDNEVKAIVRHDRICQQLMSVPGVGAITALTFKAAVDDPHRFKRSRTVAAHFGLTPRRYQSGETDNPGRISKAGDPDVRCALYVAAHSLLSRSATWSTVKAWGVRLAKTRGHRRAVVAVARKLAVILHKMWIDGTEFRWATEPA

SEQ ID NO: 81559 - protein, 338 aa, unidentified
MQAYAGIDLHSTNNYIGVIDANDKRLYGKRHENQLKPVLKALAPFKKTLKGVVVESTYNWYWLVDGLQEHGFKVHLANPSAIKTYEGLKHTDDKWDSFWLAHLLRLGILSQGYIYPKEQRPIRDLLRRRLMFVKHRTAQILSLQSMISRIRGLDFSGNSIKEFDTGFIERLFDSHHHRFTAERNLLTINFLGTIIKEIETEVKSQIQLRKDFQMLLTTPGIGQILGLTIMLEVGDIARFPKVGNYSSYCRCVESKRISNNKKKGENNKKNGNRYLAWAYVEAANHTIRVCPKAQKFFQRKLAKTNRPLATKALANKLSKATYYMMRDQVPYDAEKLFR

SEQ ID NO: 81560 - protein, 315 aa, unidentified
MYLGIDVSKLTIDCCLIADGQNHQKKFQNNERGFEQLTKWLQSHKVSDNLHCVCEATGTYYEELAEYLYSRYTITVENPRKIKGYAIAELQRSKTDTQDAKLIAQYCQDRKHKLKAWQPPAKEQKQLQEIARYLDYLKQQRATEKAKQHEAPDYIKSHIQTTISNLTAQIQTVKKQLLQFYKDNPSYNNLRKRLKTITGIGEQATAVLLSTYKRHEFKNAKQFTAYLGLDPRKYQSGTSVNGKSRISKIGSSEIRKSLYMPAVVAYRCNAFPEFVGRLKKKGKTYKADINRHHEETGGNSVHADEKRPRISSRKI

SEQ ID NO: 81561 - protein, 424 aa, unidentified
MNLTQNDRLKQVTSDTLIVGVDVGSQTHFCRAFDWRGFELSRRVFKFSNTGMGFLTFLRWTEELMNKTEMKKVIVGCEPTGCYWLTFQKFLQDHDIQLVTVNPFTVNRSMELDDNSPEKSDLKDPKTIALLVKDGRFSTSYLPSGVYAEIREASVCRDQIMKQHVRLSNQIQGWLQKFFPEYFECYADWDSTSGLMLLKEAPLPQDILKIGAGGVNQIWRDAKVRAAGIKRAQTLVEAAQNSVGLEAGEAARLEIWVLVNDYILKAEQLKRLDEYLEEKVKEVPNVEKLLAIKGVGKSTVVGFIAEVGDIGRFTDPKQIQKLAGLEIVKKSSGKKKGQPRISKRGRRKLRRTMYESAKALMLWNPAFQDVFLYYRNRTKNPLGGMQAKIAVACKAIRVFYVVLQTGCDFDEEKFRKDIIRPEAA

SEQ ID NO: 81562 - protein, 375 aa, unidentified
MKEKVRFLGLDVHAQTIAVAIAEPDGSVVSLGTIANRAESIRKLVKKLGPTEQLRACYEAGPTGYVLYWQLAELGVACEVIAPTLAPMKAGDRVKTDRRDAERLARSYRSGDLTAVWVPDEGSEALRDLVRAREAAKQDQLRARHRLSKFLLRSGQRPAMGVKAWTLHYMAWVRQLRFQQVAQESTRLDYLHEVEHMAERVKRLEQAITEAVKLASPAIREVVKGLQALRGIAQISAVTIAAELGNITRFEGARQLMGYSGAVPSEDSSGKRMKRGSITKTGNAHLRRIAVEAAWSYRLRPGVGPALRKRQEGVSEEIKEIGWKAQQRLHKRYMRLAAAGKDQRKIITAVGRELLGFVWAIGIKAEAAARQQMAA

SEQ ID NO: 81563 - protein, 380 aa, unidentified
MWLALSLTGFDVVDSVRSRHRSAIGCFVGNESHEGAVHMQITTIGLDIAKDVFQVHGIDAAEKVVVRKRLRRRQVLEFFKALPRCLIGMEACATAHYWARELTKLGHEVRLMPAKDVKAYVKRNKNDAADAEAICEAVRRPTMRFVRIKSAEQQGQLMQHRTRDVLIRQRTQIINALRAHLAELGLVAAQGNAGVNELRAIVTDEQDTRLPIDARASVIVLAAQLEALESVIGAIEKRIKMQHRSSEASQRVEAIPGIGVIGATAIVATVADPTIFRSGRDFAAWIGLVPRQDSTGGKQKLGPISKQGDRYLRRILVVGAIAVLRRAQENPGKYPWLTQLLARRPFKVVAVALANKMARMAWALLAHGGTYRAPELAETA

SEQ ID NO: 81564 - protein, 437 aa, unidentified
MNREVSTMKSNTQNAKIEAITEKTLVLGIVVGSETHYARAFDYRGIEYSKKPFKFSNTEAGFVTFKEWILDLQEKHEKDKVVPGMEPTGHYWFNLGKFLQDNEMKPVLVNPHHVKKSKELDDNNPTKNDRKDPKVIAGLVREGRYMIPYLPDGVYADLRTASNIRFQLQAELTRIQNRISRWFNIYFPEYKTVYGKPDAKSGMLILKQAPLPEDILTLGIDGVNQIWRDAKMRAVGKARAKTLIEAAEHSVGSKEGAISARMEIRMLLEDYESRNIRLQEIMTLIEELVNQIPMAEKLLEIKGVGIKTVSGFLAEVGDISRFNNPKELQKLAGLALVENSSGKHKGRTTISRRGRKRLRYLLFEVAMSLVAKNPEFRELHTYYTTRRLNPLKKMQSLMAVAAKLIRVFYVMLTKGVDYDPKKMVGDIKRPAVYLQAA

SEQ ID NO: 81565 - protein, 409 aa, unidentified
MSYKVAGIDIHKKVLMVVVTDAAAEELTFESRRFGTGASEREHLAAWLRERGVHQIVMESTAQYWKPIWLDLEPHFEQLHLAQAHSNRAPKGRKHDFADAQRLTRRLLAGELILSFVPDSEQRSWRTITRAKVQLVRDRVRLQSQLEALLEEARIKLSSVVSELLGLSGRRILEALAAGESDPVQLAQLGDRRLRASKEELADALRGQCQPVHRQLLQLFLQRLEVVDRQIQQLDQMAGTAMQSYEDAVIRLAEIPGFGPDSAQQTIAEVGARAQRFDSAAQLASWAGLCPGREESAESNSSSRTPKGNKFLRRILTQAAQAAVKKKGSHFQMVFRRWMPKLGWQAALWAIAHKLIRVVWKILHDHVHYIERGEESNPMVRRRRANKMVKALRAMGYKVAISPLGPEPA

SEQ ID NO: 81566 - protein, 344 aa, unidentified
MVTTIGIDPHKATHTAVAIDGSEVVVGEITIRADKDQATKLIDWAASVDGEGRVWAVEAATGLGHLLSQQLVSRGEPVVDVPPVLASRIRVLSSGKSQKNDPNDARSVAIAALRRETLAEVKREDETAVLRMLAKRHRELTALRTQAVCRLHAILAVLRPGGMGHRLSAKQASRMLGGIRGLDAVGEQRRQMAKTHIVDIRRLDRDLEANKTQIRRAVAAADTTVTDIYGVGPVVAAFIVGYTPPIERFTSADRYAAYNGTAPIEVSSGGKVRHRLSRRGNRTLNHAIHTAAVTQISHRTPGRDYYDKKLDEGKTNKEALRALKRRISNAVYRQLRADAQRHSS

SEQ ID NO: 81567 - protein, 412 aa, unidentified
MEVLYSCCCGIDVHAKMLVACVLKPGKKDIRTFSTMTEDLLRLLDWLTQEGCTHVAIESTGVYWRPVFNILEGAMEVILTNARDAKGYKARKTDVIDAEWLADLLRHGLLKPSFIPPRPIRELRELTRYRESLVREQTALANRIQKLIESANVKLGQVASDALGVSGKQMLRALATGETDAEKMSYLARGTLKRKQPQLQQALAGRFTPAQRWILGQLLDQYDQVEVALQRAEERIKAEVENSPDPFVPEAVQLLDTVPGVGETVAQIIVAEIGVDMTRFPTDHHLASWAGMCPGNNESAGKRKSGKTTKGSRYLRAALVQAAWAASHQKGTYLAAQYKRLVKRMGKKKALVAVGHSILVSAYHVLRTRTSYQDLGGDYFDRRNVDKQRKRLIRQLESLGAKLTVEEIKEAA

SEQ ID NO: 81568 - protein, 450 aa, unidentified
MQFMKKKAGFPVLYPNAAGIDIASREHYVAVNPDAAEQSIRSFGSFTDDLHEIAAWLLQCKVDTVAMEATGIYWVSLYLILEEAGFEVVLVNAKHVKNVSGKKSDVKDAEWIRQLHSCGLLSKGFQPDHFTRTLRAYMRHRKNLTEMAATHIRMMQKALEQMNIKLQNVIADITGKSGQAIIKAIIDGEHDPQNLVKLLDGRIKATKESICKSLHGIWKTENLFELKQSFDLYHTYQEMIKECDLHIKGHIEEKASYCESDQIQSLYPVKKKYKTNKNNLNFDATDMLQKIVGTDLTEIFGITDTNATEIISEIGLDMSKWPTAKHFTAWLNLAPNNKVSGGKLLSSRVPRKRNKAGQIFKMAAFAVQRSKNWLAIFYNRIKMRSGTSRAVTATARKIAIIFYKLMKEKVRFCPLDRDQYLESFKVRQLKKLKQQATRLGLVLVPDNLVT

SEQ ID NO: 81569 - protein, 499 aa, unidentified
MEWDWRASEVGARRKTKQKPAMVEPVEIPDAEHELVVDRGAAIDVAKAAGKVCVRLPGKSGRRFSRVWDVPARTGAITELAEQLVELGIEKVTVESTSDYWRIWYYLLEDAGLDVQLVNSRDVRNVPGRPKTDKLDAVWLAKLTEKGLLRPSFVPPAPIRVLRDYTRLREDLIRERTRYWQRLEKLLEDAAIKVSAVASKLDTLSTRDMVEALIGGERDSRRLADLARGRMKTKRSELITALDGRFDDHHAELARLLLGQIDALTAQIGALSARIERLIDAMDESDHPTGDRGRSGGGGPQVTGAPSTGGQATAPARRTTTAIGVDSDTATVVEPQRLTAVERLDEITGVGQCAAQTIIAEIGLDMARFPTPEHLVSWAKLCPRTIQSGPVIRGGKTGKGNPYLKGALGEAAAAAARTDTFLGERYRRLVKRRGRLKALVAVARSILVIVWQLLSDPTARFHDLGPDYHTSRVVTERKIRNHIAHLTAMGFHVTLQPAA

SEQ ID NO: 81570 - protein, 363 aa, unidentified
MSETYYIGLDVHKKSVSFCAKTASGKVVQEGKLVARREVLRAWAAAQPGPWRGGMEATLFSAWIYDTLKPYTQELVMGHPARMKAISAGKKKSDRLDARTMADLLRCNLFPTCYVLSPEMRDLRRLLRYRHLVVRQSVRLQNKMAGLLMEAGAPFVKSRLHGRKYFTQLLEALEEVPESVKDLLRMSRGALEMFQATQKRLVERLLAEPLLQARVERLSTIPGVGPITALTWALEIVDPFRFPSIAQALSYCGLTTAFRSSADQTQRGPLSKQRNAWLQSTLVEAAKLAPRWNPQLAALHQRELERGHRNRATLAVARKLVAYLMAVDRSGQPFQARVSLALPAELSSKEMEKAGPSLAPLPA

SEQ ID NO: 81571 - protein, 399 aa, unidentified
MLNPVSLQLRVGVDVGSRCHSVAIGLSDGSLLEEFEIPHTAEGFREFFARVETCGRRHAAPIAVAMEGYNGHVRPLDSLVRARGWRLFNVNNLKLARFKEIFPAAAKSDRIDTRKTLELFQLRDHLPMAGEVLQEVMATPEENNVLKRLSRRRRRLVNERGRVVNALQADLQAVCPGLLEVTRDVGNLWFLNFLTCRKGLLKLARVRRASLLKVPGIGATYADAIQAWQSRAYFAPDARLVGDMIQQDAARILELKQQVKALEDHMAHVAEGSSIACQLASIPGYGAVCTAELAGEIGTLERFRNEASLALYLGMAALDHSSGKFRGSKPPKHVNARAKAAMMFAVDHHRKLVPQSQGYYEKKRAEGKKHNQAIRALGRHLCRVIFKMLSQERPYRIAP

SEQ ID NO: 81572 - protein, 343 aa, unidentified
MQTVSTIGLDIAKSVFQVHGVDADGLVVIRRQLKRRYVLAFFEKLPPCLVGIEACASSHYWSRELQALGHTVRLMPPAYVKPYVKRQKNDMADAEAICEAVTRADMRFVPTKSPEQQSGLMLHRTRHLFIRQQTSVINAIRSHLAEFGVTAPVGRKGMEELLRVIADPSDKRVPDVVRACLAGLGSQLLSLKKRILDFDRMIMAWHRSNQTSRRLNCIPGVGPLLATALVANVADPKAFRSGRNFSAWIGLVPKQHSSGGRDRLGSISKQGDRYLRSLFVAGALAVIRYAKIHGTKHRPWLTALLARRPTKVAAIALANKLARMAWAMMATGARYNYPPALKV

SEQ ID NO: 81573 - protein, 388 aa, unidentified
MRRCIGLDVHREFAEVAIWEQGVVRLAGRIETTPEALSLFAESLCDQDEVALEATCNTHAIARLLERHVGRVVVSNPMKTRAIAEAKVKTDKVDAQVLAQLLAAGFLPSVWLADEETQALRRQVARRAHIVRQRTRLKNRVQAILHRNLLPADERQAVEALLRQLDFHAEELKLIDAALAQVALARAEVKRLMTIPGVDATVALSIVAAVGDFDRFRSPDKLVSYLGLNPRVRQSGSHPAVHGRITKQGRAHARGMLVEAAFAAARVPGPLRAFYERVRGRRGMQIAIVATARKLAVLCWQLISKGEDYAYQRPSLTAKKLRALELRAGTPSRRGRKGAAGAYSLREVRARENALAEQGELVYRHLVADWQAKRPAKAGAGAATGERL

SEQ ID NO: 81574 - protein, 334 aa, unidentified
MKSGIVHIGVDVSKGKLDVFVPAQKEGMRPTAKGVDNCVAGFREIRDIARKARATVCVEPTGGYELELIAFLHKFEVPVAYADALRVRQFARAEGSLSKNDTIDAALISRFADKIGVRVLAPQEVEAVELKRKAKFRQTMMDSRTAMANRLETETDPEMRALLKEQIRHMDKVIGKAERLCLDTVKKDERMNALLERFTKVGGVGDMTAMSILAGLPEIGNLADAKLNRLVGIAPEERQSGTKEWQRRIWGGRKDVRNALYMACLASIQWNAVLGGYYRKKRAEGHPHKWAIVPTMRKLLSLLNRIARDPDFIPSPEPESTKRNATAGRKRKAA

SEQ ID NO: 81575 - protein, 403 aa, unidentified
MVFVGVDWAEAHHDVCVIDEAGKVLGKRRVPDGLEGVRQIHELVAAQTEQPERVVVGIETDRGLLVGALIAASYQVYAINPLSASRYRERHVTSRAKSDPGDAKVLADLVRTDRHNHRQVAGDSELAEAVKVLARGHQDLVWSRQRFVNRLRNTLREFYPAALEAFKDLDSGDALAVLERAPTPWQGRQLSQAKIVSALQRAGRQRNIEERAAQIQRTLRSEQLQAPARVGSAYAVIVKSTVTMLQQMNQQLAELEAELTQSFEGHPDAEIYRSLPGLGVVLSARVLAEFGDDPNRFDHPKSRKAYAGTAPITKASGTRQVVLARVARNRRLADACYLWAFASLTRSPGARRYYDSLRGRGQTHHQALRALANRWVGILHGCLRYRACYSEDIAWPPPFQVAA

SEQ ID NO: 81576 - protein, 347 aa, unidentified
MIIIGCDFHSRFQQIAMLDTETGEVTERRLDHESGEAQTFYEGLKEPALVGMESMGYTQWFEEVLAELGHELVVGDAAKIRAKEPRKQKHDRRDAEHLLNLLAKGDFPRLWLPSVAERDARVWLEHRHQLVQMRTRTLNGLQAVALNHGLCLRQKLWTKRGQAELQKLPLREGRARRRADLLALRAQLDRWIAELDERIEQEVAHRPDAQRLLTHPGVGPLTALGTVLVLGPVERFPDARHVTSYVGLIPQEESSGGRQRFGRLTKQGNSLLRFLLVEAAQTASRLDPGLRRAYRRLTFRKGRASAKVAVARKLAIRLYIMSRDQIDYEEFCRRGSHAGMLGEVALA

SEQ ID NO: 81577 - protein, 331 aa, unidentified
MNINPQGGAAQRDVRPNAGIDVSKQHLDACWGAEERRLGNDAPGWSELIACLQADNVGLVVVEATGGYERGLMIALQGAGIAVARVNPRQARDFAKSMGVLAKTDGLDARCLRDFADVLARHKDRPKFITPLMDEQRELLLGLMTRRRQLVDMHVAETNRLEHAGARAVKSIKSVLRLLDRQLAEIDCDIDAHMERHFKAQRQLLDSVKGVGAVTTLTLLSALPELGTLGRKPIAKLVGIAPLADDSGKRKGQRRIWGGRSDVRAALYMATLSAMRYNPVIAAFYRRLLAAGKPKKVAMVGCMRKLLTILNAMMRDQVKWDPVRHLQASRA

SEQ ID NO: 81578 - protein, 414 aa, unidentified
MSKTLFVGIDISLKEDTCCFLNQNGNLVRKIFKVDNNISGFEKLKEEIESAIPTNNFSLVCIGLEATSMYGFHLLDYFSTTDFKYPVKVKLYQLNAKYVKRFKKAFPEKEKTDIVDCQFIAEYLRFGKLPAEYKPECLFLPLRRLVRYRYHIVKNLEKEKKLYMANLFLKFPGWVQNRPVASLGKTALDITREFTLDQLAEMPLEKLAFFVAKAGKNRSPDPVAIADEIQKAARESYRIRPELASSITFILASISRTISALKENLKQVDKAILAETKGFINPLISIKGIGPVYSTGILACIGDIKRFASHNQLARYAGLVWKRRQTGKTESEEKHMVIECDKYLRYYLIEAANSLRVHNELYRSYYQRRRCLSINTKEPLCSQPENWSGWSLLCSQRTSCMTNPGIPSLPGCLN

SEQ ID NO: 81579 - protein, 473 aa, unidentified
MARKKGKDPAGIGGLELTGEPAGVSDEPAEVIARAAAIDVAKGSGMVCTRVPHESRPRRRVQRIWQVSARYSEIAALMAELAKLGIQRLVLESTSDYWRIWYYLAEAAGLEVWLVNARDAKHLPGRPKTDKLDCVWLCKLNERGMLRRSFVPPEAVRDLRALTRLRSRLAQDQARHQSRIEKILEDALLKISSVISDLMGASGRRFLAALVAGERAPDKLAALGDRRLKASPAQLEEALAGRFRDIHALEIGMLLELIDDITAKMARLDAEITARLARIPGIAPACAGCGEIGGGHAPSCPQAGAPVLSVIERLDELTGIGIDAAQVIVAELGTDKTTFPTPGHAAAWAKLASRTIQSGSTSKDGRTGKGNPYLRAVLGRAAMTAAKTDTYLGERYRRIARRRGKQKAIVAVSRTICEIAWMIITDPSVRFSELGPDYYARLDAGRQTRNKIRELERLNPGMKVTLTPAATAA

SEQ ID NO: 81580 - protein, 376 aa, unidentified
MSPARATIQEGPVMQNSITWVGMDVHAENNVLAAVRGSSEAVLFRAEFPNTPKGRERLAGKLAENAPVRCVYEAGPCGYELRRFLEGRGIECDVAAPALIPRKPGDRVKTDRKDAEKLARLHRLGELATVFVPTPAQEALRDLLRTREDAREDLLRRRHRLSKFLLRLGRRYAEGVRWTTRHWDWIRAQTFTDHNTETVFREYIVAIEQEVERIRRIEQQIVEESRSPEVGKAIARLRALRGVDTITAMTIITEVIDLNRFRSPRELMAFIGVVPREHSSGGRERRGSITKTGNAHIRRVLIESAWHYQRLPAGTPKTILVRREGQPPEVIETARKAELRLHRKFMKLLGRGKPKGIAAVAVARELAGFIWALGRG

SEQ ID NO: 81581 - protein, 345 aa, unidentified
MKHYVGLDVSMKKTSLCIVNEQGKIVHESEVKTNPHALADAIEKTGLKIELVGFESGSLGHYLTQGFKERALPAVCMDARKMSAILSIRVNKTDKNDARGIADALRTGMFTRVHEKPQEAINRGAVLSMRRCLVNQRTDIKNHVRGILKTYGIRLGAVGPTKFNETVKRHIQELDLLVRQTMEEILEVFDMLTQKITRLDQELLKIAHQDKDARLLMTAQGIGPITALTYKAEIFDPSRFPNSRTVGAYLGMTPTQYSSGETQKQGRISKCGSMELRSLLTEAGVVVLTRSQKWSKLKAWGLKLMRKKGLKKASLAVGRKLAVIMHRMLLEQKEFVWGDAPTKAA

SEQ ID NO: 81582 - protein, 350 aa, unidentified
MKKMVKQSVGIDVAQKELVVTFGRMYEDFSIEMHAYNVFKNSDPGIKEMVKWVKKLSISELSVQFVMEATGVYHQKLAYYLDENAYKVSIVIPNKISNYFRTLDVKTINDKTASEAIARFGLERTLDQWKRPSEFYKKLQQLTRERDQLVSERVVIKNQLHAEENEAHPNASSIKRLKARMRFISQQEKEIKNEIDVIVKSNKALKEEVDRITTITGVGQLTAVIVLAETNGFELIRNKKQLTSYAGLDVREKTSGTSIKGKPRISKKGNRNLRSAMHLPALCAIKHNEKFKGIYARLVSKDGIKMKGVVAVQRKILELIYILHKNKTVYQPDYEKKEREQPQEVVPFTN

SEQ ID NO: 81583 - protein, 341 aa, unidentified
MKAYHYVGLDLHKKTVTYCVKEADGTIVDEGKLRATRQALVSWAESMKVPWAGAMEATMFTGWVYDTLLPYADDLEVGHSFMLRAIAAAKKKNDRVDASKLADLLRCDLFPSCYMAPQKIRELRRVLRYRNMLVREATRMKNKTAGLLMEVGAEYNKARLHGKGYFSDLLERLDYVPHSVVELLKLTRSNVEIFQAAQGRLIEALEIHQELRTRVELLMSIAAVGRVTALTWVLEVGDPNRFSSRKKAVSYCGLCSAQNESAGIAKRGPLSKQRNKHLQLMLIEAAKLAPRWNPQLAAVYEKERDRGANPNSATLAVARKLVAYMLYVDKTGKPFEPRHAA

SEQ ID NO: 81584 - protein, 307 aa, unidentified
MARVFEAVFERVAGLDVHKAQVTGCVRIPDADGKRVAHLAEFSTTVTGLLALADWLKGYGVTHVAMEATGVYWLPVWHILEDDFELTLCNAKHVKNVPGRKTDCSDAAWLCQLMEAGLLRGSFVAPKPQRRLRALTRYRKTQIAERQREANRLHKALEDTGIKLDCVATDILGVSGRAMLDALVAGTTDPEVLADLAKGKLKAKIPALREALQGRFEAHHALIIGAILSHLDFLDEHINQLSEAIEAELGPTGQAAVALAATITGVATRTAEVMVAEIGTDMSVFPSAGHLASWAGRCPGNDQSAVE

SEQ ID NO: 81585 - protein, 344 aa, unidentified
MDISVLGVDLGKNVCSVVGLDASGAVVMRRKVKRETLIALAEKLPPCIVGMEACCGAHHLGRVFAAHGHTVRLMSPEYVRPYVKAQKNDDRDAEGIAEAATRPTMRFVELKSQDQLDMQTLHRSRDRLVGERTALINQLRAILLERGMVAPQGKRKLEQFLAVLMDERGGADLSPRMILLVADAHAQWAELDRRIAAFDAEFVRWVKENEEARRLTTIPGIGAIVASALVAAVGRAESFERGRDLAAWLGLVPRQFTTGGKPKLLGISKRGNKYLRRQLIHGARAALPYVAERDTPLGRWAKELSGRAHHNVAIVAFANKLARIAWAVLRRGERFTATGMPVAA

SEQ ID NO: 81586 - protein, 359 aa, unidentified
MRVQINKLDFEGQDIYVGIDVHLNSWSVAILSDHSVLKKFRQNPDAAALYKFLSVNYPNAYYHSVYEAGFSGFWLHHQLVGLGINNIVVNPADVPTMSKEKLRKTDAVDCSKLARELRSGTLKGIYVPSVEALEIRSLIRLRKSIVKDSTRKKNRIKSLLHFHGIVIPEEFTKRPGGNWSKRFLAWLSSAELSTEYGRKALDIHIEQFVSLRQMLLQKTRLIRDLSRTESFAEPLRLITSVPGIGITTGISLLTEIDDITRFKNAEQLASFVGLIPMCHSSGEKEGVGGITIRRHATLRWHLIEAAWVAIRKDPAMTMAYAEYRKRMNAQKAIVKIARKLVNRIYFVMKRKQEYVPCVV

SEQ ID NO: 81587 - protein, 385 aa, unidentified
MTQATLQAEHNASVAKLCVALELGGTRWKLVASSGGTKITETSVPAGDIEGLEQKIRAARARHGLPSEAPVVSCYEAGRDGFWVHRELERCGVQNVVVDSSSIEVNRRARRAKTDRLDGRKLLTMLWRYEGGERTVWRVVRVPTPGEEDARRLHRELDRLIKERTAHVNRIRALLVLHGLGHSIGRRTVTARTALAHLTTCTLRDGQPLPPQLRAEIEREGQRWELVDAQIRTLETERQHRLQTTETAPVRQVQQLTRLQAIGEPSAWLLVQEIFAWRQLRNRREAGALVGLTPTPYASDGTQREQGISKAGNRHVRRVLIQLAWGWLRYQPQSALSQWFQARFGRGQGRMRRVGIVALARRLFIALWRFVAFGVVPDGARLRAA

SEQ ID NO: 81588 - protein, 331 aa, unidentified
MDQRNYVGIDVSARSLEVALVGAERRSATATFANTSTGHRQLIKWATKRGRLAQVCLEATGVYGLAVAFALHHHPKTEVMVVNPKVIKNYAGATMQRAKTDAVDAQLILDYGRRMPFARWQPPSDEVLQLQAITRRISQLKVELNREANRLDAEDYKVATTDLIERDIQVNLRHLNRRMVRLEKEAVALVLSVPHLSMLFQRLLSIPGIGETSALRLLAELAVLPEGMKPPQWVAHAGLDPRPHESGQSVHRPRAITKAGNKYLRAALYMPALVAMRHQPNVKAFYDQLIAAGKKPLQAITAVMRKLLHAIWGVWKHDQDFEGQKFYKIAT

SEQ ID NO: 81589 - protein, 348 aa, unidentified
MTLYIGVDFHPHQQTVCWCDPETGEIKTRDLFHNTPELLEFYQTMPSSVVGIEATSKATWFANLLFDNHHQLLVGNPAVIRKRAISRHKNDKRDAEHIFDLLIRGDFPVLWRRSAASEEVLDLMRMRHNLVRQRTQASNRLQALAHEAGLPKGRIDSQLFQSLLKKVELGETFALKREMLFEMRENFSLRIKQLDECLQEKANANEQVRLLMTQPGVGFLTALGVVHTIGDVSRFDKPTKQVVAFVGLDPVDESSGSRIKFGSISKAGSALVRFLLGQAAHSVIRYDTKLKAKYKQLSKKKHNAVAKTAIARRLLVKLVIMLRDDIPAQEFDERGRTNGNARGARGLK

SEQ ID NO: 81590 - protein, 345 aa, unidentified
MMVIGIDAHKRSHTAVSVDEMGRQGFVKTVGTATQDHLRLLKWAVGLAEERLWAIEDCRHLTRRLERDLIAAGESVVRVSPKLMAHVRDSARSYGKSDPIDALAVARAALREPDLPTARLDGVERELRLLVDHREDLVAERTRIISRLRWHLHELDPGWTAPTKLQRGSAFDKVQAHLSGRNDGTIVHRLALRLVEHLRLLTDEIDELTAEITARVTTIAPSLLTIVGCGALTAAKIVGETAHAGRFRSKDAFARHNGTAPLPVWSSNKQRHRLSRTGNRQLNAALHRIALTQARCYPPARELLERRTNSGNGGMEALRILKRRLSDVAYRAMLADQTDPPTVAA

SEQ ID NO: 81591 - protein, 400 aa, unidentified
MRVVFGIDVSKVSSEVAILVNGEKVHNYTMSNDAIGFSRLLGDLKTVHKPEIIFEATGVYSRRLQTFLEDNGYAYTRLNPLEAKKQLDSLRVRKTDQIDAEKLAQSQFVLNRKTTYVQEEVYQNLRDLSRFYQNLTEDIVRAKNRLHKALQITFPELENILSTPSGEQYWNLVITFPCKDFVLEFSNDELSKSIRLSTSKRISDKRVAYLAEKLIALANQSYCAVKKTSPMLEEVRYYAKELLRLSEQRQAVLDQMVELAQPLPEYDILLSIPGIAETTATSIIGELGDIRRFQSANQINAFIGIDLRHYESGNFLAKEHITKRGNPYARKILFKCIHNIASASHTNPCHIADFYEKRKRQSQTTSTKPHTIASIHRLIRTMYYLIMHNKLYDYASTQNR

SEQ ID NO: 81592 - protein, 444 aa, unidentified
MELTYTHCAGLDVHKKTVVGCCITPGTKNQVNIVTRSFSTMTVGLLELSDWLNSQGIQQVAMESTGEYWKPVYNLLESSFEVLVVNAQHMKNVPGRKTDVKDAQWIAELLRHGLLRGSFIPPLPQRDLRDLTRQRTNLVQERARVVNRLQKTLEWANLKLACVATDITGVSARQILAAIVDGQENVQALCELAKGALRNKRQELEQALSGRVREHHRFLIAQHLIHLDFLSEQIAIFDAKITEHIQAQTLTPPDAEPPTQSHSSSSDRETISENCPLSWEAAVALLDTIPGVARATAELLLAEIGIDMSRFPSAAHLARWARVCPGNNESAGKQFSGRTGQGNSWLRSGLIQAANAASRCKNTYLAAVYQRLAARRGRKRAIVAVAHRILTAAYHMLSTGQPYRDLGVSYLNQPQKLHLLKRMRSRLEQLGYKVTLEPEPSAAT

SEQ ID NO: 81593 - protein, 338 aa, unidentified
MSRQYVGIDLHRRRSVIVRMTEAGETLSTVSIDNDPVALALEVARAGPDPEVVLEATYGWYWAADVLEAAGAKVHLAHPLGVMMFSHQRVKNDRRDATNLAELLRMGRLPEAWIAPPELRELRELVRYRAKLVALRSGLKTQVHAVLAKEGVHVPMTDLFGVAGNHLLDSLQLAPAFDLRVRSLRELISVYDSQVVAFERLCARQLAGHPGYRAIQAIHGVGRVFAALFVAEIGDVTRFAGPRQLVSWAGVTPRHHESDTVVRRGSITKQGSKLVRWAAVEAVTQARGTSKIQLDRHRIAERRGTGIAKVAAARKLLTLVYYGLRDGEIRCLTRPQAA

SEQ ID NO: 81594 - protein, 376 aa, unidentified
MENDSTLYVGLDVHKDSIVVAYAIGMGDVELLGKTGTTHIEVDRLCKRLQSKARHIVVVYEAGPCGYGLYRRLTDKGFDCMVCAPSLIPRKPGERVKTDRRDAIKLVRSLRAGDLSAVHVPTVEDEAFRDLARAWSSAREDLKQARCRLKSFLLSHGVRYVGRPDWGPTHRRWLSTFSFDSAWQQLAFNEHRRTIEDRLAQCERLEVALREAVPNWRFYPAVLALQAMRGIQFTSAVGLASELGDLARFEHPRQLMAWLGVTPSEHSSGGKRRQGSITKTGNSYARKLLVESAWSYRHPARVSIDIQRRHEGIPKPIIDRAWDAQLRLCRRYRKLVARGKSAHVAIIAVARELTGFIWDIGRLGMSLASPRGPRSA

SEQ ID NO: 81595 - protein, 311 aa, unidentified
MTISPDCVGIDVSKSALDIFDAASGRRERLANNAAAIAGLIARWQPNSTFVLFEATGRYDRLLARLLQAAAITFARVNPQRARDFAKAAGFLAKTDAVDARMLALMAERLKPRPEAAQDGERERLRALHRRRDQLVHMRAQERTRLSEVDDAEEREEIAKHITWLTAQVKALDTRIKNMIALTQSWAALYKRMRQAPGIGPVAATTVLALLPELGSRSPKAIAALVGLAPFNRDSGTLRGKRMISGGRKRVRDALYIAALSAVRSNAHFKAIYMALVKAGKAKKLALIAIARRLLIALNAMIRDNADFKPA

SEQ ID NO: 81596 - protein, 334 aa, unidentified
MVQDSSGKTLRSGRVKNDRQSLGGFLERYRENSHAVVEATRNWMVMYDWLDDICDDVVLAHPLKVKAIADAKIKTDKIDATVLAHLLRADLVPEAWAPSERSRDLRVALRERMFYVRLRTMTKNRIVTVFDRYPEQTAQLKKLGDLFGKAGRVQLAQVNVSEIDRIQIDRGLAFIGDIDMRIKQSEATIRSMTKANANVKLLKTIPGIGEFFARLIDAEIDDISRFRHPKKLAAYAGLVPSTYSSGGKTFHGKIIKQGNKWLRWAFVEAVTPATASDPQLRAQYEQLKIKGINKARVAIARKLLTIAFQILRDQRAYEPRGTATMEGATISRLS

SEQ ID NO: 81597 - protein, 349 aa, unidentified
MRFYNRPHRHYCGIDLHVKMMYLCILDATGQVLLHRNIATTPDAFLTAVAPYREDLVVAVECMFTWYWLADLCAAEGITFVLGHALAMKAIHGGKAKNDKIDAHKIAGLLRGGLLPQSYVYPAAMRATRDLLRRRLHLVRKRGQLLAHIQNTRAQYNLPAFERRLAYPANREGVSLQFPDPSVRKSVEVDLALIDQYDVLIADLEQMLVREAKCDDPDAFHRLRSVPGIGPILALTILYEIHHIGRCDRVQEFAAYARLVTCAHQSAGKTLGTGGAKMGNVHLKWAFSEAAVLFLRHAHAAPVATFMARLEKHHGKGKALSILAHKIGRAVYFMLARNTVFSMPTFLAT

SEQ ID NO: 81598 - protein, 400 aa, unidentified
MRAVLGIDVSKTSSEVAILVNSEKVHGYSMPNDAIGFSRLLKDLNTVSNPEIIFEATGVYSRRLQAFLEENGYAYTRLNPLEAKKQLDSLRVRKTDKIDAEKLAESQFILNRKPSYVQEEVYQNLRDLSRFYQNLTEDMVRTKNRLHKTLQVTFPELEQLLSAPTGEQYWNLVSSFPSKDFVLDLSPSELVEVIRQSTSKRISEKRVTLLSDKLTALAKQSYCAVKKTSPMIEEVKYYVQELLRLTKRRQGILDEMVSLAQPLPEYEILLSIPGIAETTATSIIGELGDVRRFHSANQINAFIGIDLRHYESGNFLAQEHITKRGNPYARKILFKCIHNIAAASHTNPCHIADFYEKRKRQSQTTSTKPHTIVAVHRLVRTMYYLITYNKLYDYNLTQSH

SEQ ID NO: 81599 - protein, 319 aa, unidentified
MAQIICGIDVSSLSLDARIGPDGPFRSFANRPEGIAELAAFCQAQGVQLAALEATGGYEKQPFALLWAHGLPVAILNPRAVRRFAESMGFLEKTDRIDAGVIAHFAAVKRILPCRPASAEQQHLKALVTRLRQLTELQTAQRNQRLLVTDAAVLAWFTQMLALIASQIRALAEAISEMIGADPLWQQLDQAFRTIKGVADRTVARLMAELPEIGVLSNKAVSKLAGLAPLARDRGKHQGKRVVRGGRSGVREILFVVGGLVRRYDADFADFDRRLRAAGKPKKVIRIALAHKLLVRLNAKAREVRQQFSGAPACAVAAS

SEQ ID NO: 81600 - protein, 352 aa, unidentified
MASTAEEIYGGVDTHGRTHHAAAVDGLGRVLGDREFPATRAGYAQLIGWLKSFGPVALVGVEGTGAYGAGLATALSEHRVQVVEVDRPHRRARRRQGKSDPLDALAAARAALSGEASGVPKTHGGPVEAIRALRVARRGAVKARTAALNQLHGLLVTAPAPLRESLSGLSSMMLVRRCAGFRIDDSRLADPTMATKAALRAVARRVQALLEEVAAADRQLRPLTQRTAPRTTGLLGISTEIAGQLLVTAGDNPDRLRSEAAFAHLCGAAPIPASSGRRDRHRLNRGGDRAANAALHMALVTRLRYHEPHPGLRRATHRSRSVQEGHHAVSEALPRPRGPRGRPRRLLRIPRP

SEQ ID NO: 81601 - protein, 405 aa, unidentified
MGDIVEVAWVGIDAGKVSHHATLVDADGTIVWSRQVRNDQAAVEQLIAKAAATATTVRWAVDLTSAGAALLLALLIAAGQRVVYVPGTVVNRMSDTFAGEAKTDARDSYVIAETARLRRDLTELITPNELVAELALLAAHRADLMADWVRGVNRLRELLTRVFPALERSFDYTTRSALILVSRYSTPDAIRDADADQLAAYLRSEEAHRPSIPGMVAKAHAAAAAQTVRLPGEAATAALITRQARKLLDLDREIKDLDKQITERFRAHPQARIIESMPGMGPILGAEFIAITAGDLAAFGTAARLATYAGLAPVPDDSGKRKGVRHRPRRYHRRLRHVFYMAAFSSLKTDGPSREFYARKRSERQRHTRAMIALARRLVDVLWALLRDNRTWQPQPSTPLPATAA

SEQ ID NO: 81602 - protein, 354 aa, unidentified
MIIMGVDYHPEFQQIASVDTDTGEFQEKRLAHPEEAENFYRVVAAQGVKVRVGMEASGHARWFERLLAELQIELWIGDAAKIRTKRVRKQKTDRQDAQLILQLLLENRFPKIWVPSWENRDLRQLLWHRHRMVQARTRIMNQLQAVALNEGLHCKKKLWREQGRQQLQSFRLAPWASRRRLDLLELLDRLNPTIAELTRAIEHEAEKNSGVQRLRTHPGVGVLTALAFVLIIGQAERFQCGKQVASYLGLVPLEDSSGKRRRLGHITKQGSSILRFLLVEAAQVTVRSLPEWRSKYFHLAMRRGRKIAKVAMARRLAVCLFWMMRKEWDYEQLKKFGSHAGQPENRHGVQSNTE

SEQ ID NO: 81603 - protein, 364 aa, unidentified
MKKSIKGTRREMKIDWSEVSAVGIDLGDRFSQFACVNVGGERIGEGRVPTTAAAMEKQFGAVGAKLIAIETGTHSPWVSRLLARLGHHVTVANSRKLRLIYENRRKNDKVDAEYLARLARLDRKLLCPVEHRNERAQQHVALFRARQEAVETRTRLINHFRGAVKSMGMRLPACSAEAFVKRAATALPAELKSALEPLLTLITVSNEQIKKYDRKVEGLIEDEYRQVQVLTQIAGVGALTAVAFAVTIGDRKRFARSRTVGAWLGLSPGQRASGKQDPQQRITKEGDNYLRHLLVNCAHYILGPFGPDCDLRRHGEAIAARGGMNAKKRAVVAVARKLAVLMHRLWCTQAIYEPLHKGATAIAA

SEQ ID NO: 81604 - protein, 412 aa, unidentified
MQTLVERGCGLDVHQATVVACLLMVRRDGKVQKQMRTFGTTTRELVGLREWLLSEGCTHVAMESTGVYWKPIYAILEGALEIVVANAQHIKKVPGRKTDVKDAEWIADLLCHGLLRSSFVPPKPIRELRDLMRYRRKLVESQAAERNRLLKVLETANIKLANVATDVFGMSGRLMLRALIAGKATPQEMAELAKGLLRKKIPELELALEGKLEQHHRFLLELQLQRLEAAEKDLAVLEQRIRQMLEPYAAQLALLDEIPGVDWTLAAVIIAELGVDMSVFGNVSQLASWAGVCPGNNESAGKRKSSRIPTGNVYLKSALVEAANAAARSKGTYLRDKFFRLKARRGYKRAVVAIAHKILVAIYHMLSQQVSYNDLGDLYLDKLNKNHLTRNLVHRLERLGYAVTLTLQQKAA

SEQ ID NO: 81605 - protein, 387 aa, unidentified
MTVRTVSNLPAAMHIETARCLFAIELSKQSWVIGFITPLSAKISRRILSGGDWKGLLDLIEEVRARVSRETGRAVDVISCYEAGYDGFWLHRLLEAHGIRNYVIDPASLQVDRRARRVKTDRIDTERLLRSLMAYLRGEPKVWSVVRVPSVAEEDARRLHRERDRLVSERVQHVNRIKGLCALHGIYDYQPLRPQAMARLEQLRTAQGISLPPRLKSEIKRELQRLELVVEMIATLEAERDAIVEDEASTHVNAKKIQNLHQLKAIGPEFAAVLVGEIFHRKFNNRRQLASYVGYAPSPFQSGNVAHDQGISKAGNRKGRTTGIELAWLWLRYQPDSDLSVWFRARVGTTKGRIRRIAIVALARKLLVALWRYLETGVVPRGAVLKG

SEQ ID NO: 81606 - protein, 371 aa, unidentified
MSKASTFVGLDVHKNSIVVALLRPGQNAPLEWKVSNEPGAVHRLIRKLEREAEGGLQCCYEAGPTGYVLKRQLDRAGIPCQVIAPSLTPVKPGSAIKTDRRDARKLAELLRAGMLTEVKPPTEDEEAVRDLTRSRDDAQRDLTRARNRLSKFLLRRGCVYAIDRKPTWSQKYRSWLRALTFERTADQVIFEDYLLAVEQVEGRLEALTDRIEHFAEQEPWRERVQALRCFHGINTVTALALVAEIHDPRRFSHPRRLMSYLGLVPRESSSGMRERRGGITGAGNRHVRRLMVEAAWHYRHKPVVGRALRLRRREQDPKAIALADRALRRLTLRQRRMLYQGKHPNLVNIAVARELVGFVWNILHTRAAMQA

SEQ ID NO: 81607 - protein, 374 aa, unidentified
MVWLERGTRLSIWNQECPPRFPPTDDQEDLTEMVMIGIDPHKGSHTAVALDDQELELASLRVRAGRRQRQQLLEWATPFDVRVWAIESANGLGYLLAQQLLAAGERVLDVPATLASRVRVLSSGRSNKNDPNDARSVAVAALRSPAMTEVRCEDHVTVLRLLAKRHIDLGRWRNKVCCRLHAHVAELVAGGISTEIVVAQASELLAGLHPRGVAAVERHRQALELVEDLARIDDQLRASRRRVTGAVAASGTTLTELFGVGPINAAILIGYTGDPRRFATQHHYAAYNGTAPIEIASAGRTIHRLSRRGNRQLNHAIHMAAVTQIRHTHSPGRAYFDRKVEEKKTPKVALRCLKRRISDSVYRRLVADARRARR

SEQ ID NO: 81608 - protein, 447 aa, unidentified
MSDLPNRPGPEFAAWIGIDWGDQKHAWAVQAEGSTQVEQGEMAHTPEAIQEWAMELRRRFPTGRLAVALEQSRGPLVFVLSKYEHLVLYPIHPTSAANYRKIFRPSGAKSDGPDAAMHLDMLVKHRDQLRPLHPDTVETRTLQLLVEDRRQLVNERTRISNRLVADLKSYYPQLLQWFEKPYAPVTLDFLARWPTLEELQKARPATLQEFFKQHQCRDDAKNQARIEDMHKTIAATHDGAVRIAGRAAVCAAVRLLRGLSQSIQDYDQKIEELAQAHPDFEIFVSLPAAGAAFAPRLIAAFGAQRDRYRDAAEVQQFSGIAPVTEASGNQRWVHWRWSCPKFLRQTFHEWAAQTIQQCDWAAAYYQVQREDKKKSHHAAVRSLAYKWIRIVFRCWKDRKPYDESRYEGALKRQHQKAAAKSVQPSPFELPVQWISCAGFQKLASKNG

SEQ ID NO: 81609 - protein, 345 aa, unidentified
MELHTIGIDLGKTVFHLVGLDLRGEVVVRKKFSRTQLLRFTANVHVGLIGMEACGGAHFLGRALREQRHEVRLIPAQYVKPYVKTNKSDYIDAEAIAEAVARPTMRFVPIKTDDQLDMQSLHRVRERWVMRRTAVINQIRGLLLERGITLRKGRHHVHAALPLILEDADANLSGAVRLLLAQLKLDLDQLSVRIDEADAAIQKTAHENEACRRLVAIPGIGPVTATALIAAIGNGGAFHKGREFAAWMGVVPREHSTGGQQKLLGISKRGNSYLRRLFVQGARAVLQQRTKQSSGLSAWLAQLTSRTHRNVAAVALANKLARIAWAVLAKNEQYRPSVVADVAAA

SEQ ID NO: 81610 - protein, 403 aa, unidentified
MSNCFAGVDWASETHAVCVIDERGSIHERFEIAHSAAGLRELTAALKRCGSPPIALERPSGVLVDTLVEAGFTVVPIHPNAVKATRPRYRSHGAKSDASDAYLLADLLRTDGHRFKPLAPQSDEIRALRALVRGRDDLVATRVQLANELRALLESFWPGAAEIFAEVDSPIALAFIERYPTPQSALPLGPKRLAAFCAQHAYCGRRSPEALLARLRQAPQSACAELEMEAKGELARALARALRVLVQQLRLLSSRIEHCIASLEDGRLLMSFPRAGRICAAQLLAELGSVRERFASEQHLAAEAGVAPLTYASGKSKAVAFRFACNHRLRAALTCLADNSRHASAWAAAVYARARARGCDHPHAIRILARAWTRVIYRAWINHQPYDPAAHRGAQIALANPKG

SEQ ID NO: 81611 - protein, 426 aa, unidentified
MNTTTKFAATIGLDWADQKHDLWICPADGSKAQHVRLEQTPEALHAWVAKMRERFGNRPIALAVETSRGPVISALVAYDFIVLFPVNPKALKDYRGAFAVSGAKDDRTDAQLLEELVRLHPDKLRALEPDTELTRRLAGLVENRRRLVDQRTRLVNQTHALLKTYYPLAQTLLADQMNSAMAAAFLLRWPELEALQKASPEVLRAFFYKHHSRSAKKTEQRLQAIQQAQALTTDPALIEPARDLVLAFAGMLRPLHQAIARFDKQIEQAMDQHPDAPIFRSFPGAGPVLAPRLLVAFGSNRDRFDQAADVAQFYGIAPVVVQSGNSKQVHFRHRCPKFGRQTFHENAGCALKKEPWAKCYYNQHKQRNKGKHHQACRALAYKLVRIYFACWKQRQTYDPHRYLKALETHASPLHPKLQNLTASPCE

SEQ ID NO: 81612 - protein, 318 aa, unidentified
MTTSLYVGVDVAKDRLDVAVRPSGEGWSTGNDEAGVVALVARLRPLAPALIVCEATGGFERAAIAALAAAGLPVVVANPRQVRDFARATGQLAKTDQLDAGMLALFAERVRPTPRPLPDAAAQLLDAVLTRRRQLLEMLGAEKNRLGFAPKPLHRGIQAHIRWLERQLDDVTKELAGLIEASPVWRAKDDLLQSVPGVGPIVSCTLLGELPELGTLTHKQIAALVGVAPLARDSGTLRGKRLIYGGRASVRTALFMAAMCGRRWNPALKVFYDRLKAAGKPTKVALIACARKLLTILNAMVRENRSWMSPTAKLQYSC

SEQ ID NO: 81613 - protein, 450 aa, unidentified
MSNGNGVSRGDRNRNARLDRLRALVPVTNAIVGIDLADKKQMVVVCDHDSKVLARRTYRCRAWDLGTALDWAHERAAAKGFAGMTVSCEPTGHRWRVLAQLAADRSMPFVCVQPAVSSWSRRAEDLTHDKTDEKDAVLIARLTAQLRCYEPEPVDETWGRLRHLGARREQLITEISGQIQQMRDLLECVWPAALECAQQPFRSRTWIAALTVIVDRDGGQFDRTRRLGLARFERAVLREISKRGGQKPCRRITRGVFAALSDLAGVIAHRAGALERVQLLVEDWQRAHDRLTDTETRMIGVLDELELTVLVTSITGISAVGAAAILAQTGDPRRFTTARALVKHAGLAPREKLSGTFTGRTKLTGQGRPGLRLAAWRAVWGAQRANPVYGARYRHLTTREHNRLKPTQAQTVIAAAILRHLHAVITTGQAWNPSIATHGTRSAIRTTAAA

SEQ ID NO: 81614 - protein, 330 aa, unidentified
MRTIGIDVSKATLDVALQDEQGNLIKEERVNNSTGGLRSLLRKWARQGLCDATALVCLEPTGHYSHGVVKTLLDMGHPTWLAHATDIRLSIGMQRGKSDKVDARRIAQYAHRFRDKARLVGQSHVEFAELKALLALRERLVKERAKNKGQLKDNVLYLCGTTKDLVKAELQRQLKALERSIAKLDQAIAVFLGKDSSLQHKNKLAQSVSGIGPVLASELIAHTEGFTRFDSPRQLVCYVGVAPFERTSGSSVRGKTATSSFANHRLKSLFKLAALAAVRVPGDLQDYYKRKIDQGKRPIVALNNVAGKIIHHLWAVIHSGKPYQPRLHMS

SEQ ID NO: 81615 - protein, 360 aa, unidentified
MFSERTSVGLDVHARSVVAAAIDGQTGEVFKARLTPSHAEVLEWVGRLPGPCAVVYESGPTGFGLARALTAAGWRCEVAASSKLLRPAGDRVKTDARDALHLARLLRLDEVVPVRVPSLAEEAARDLVRAREASRQDLMRSRHRVSKLLLRHGIVYSGGKAWTELHDRWLRQQRFDSAATQAAFDDAYETVVLATARRARLDEKVIVLAADSEFTPLARRLGCLRGIATLTGFALAVEIGDWQRFTGVGIGAYLGLVPSEHSSGESRVQGAITKTGNAHVRRLLVEAAWHHRSTYHPGVVLRRRWDQAPAAARARGHAGNQRLHARWVNLNLRKKRPVIANVAVARELAGWCWSLAVMPD

SEQ ID NO: 81616 - protein, 321 aa, unidentified
MAETDKVYVGIDVSKDTLDIATMPQPSSRRFSNDPCGIDELVEYLRELAPTLIVLEDTGGYQRDAAVALNDVGLPTVVVNPRAIRLYAKARKILAKTDRLDAGVLARYAWKEQPEIRPMPDRDQRELRDTVTRRQQIAEMIAAEKNRCHQARGAVKAGIEAHITYLESQRSELDEVLDKIIASNAQWAESESLLRSVPGVGPVITYTLLAELPELGSLNRRKIAALVGVAPFNNDSGKHQGHRCIWGGRAPVRCALYIGVLAGIRYNPVISPYYYRLRKEGKPFKVAMVACIRKLLTTLNVIIATRRRWDTNRIALTGIVQ

SEQ ID NO: 81617 - protein, 436 aa, unidentified
MDIVHPRVAGIDVHKKIIWVAVRLPGDRPGERKVITKSFRTFWRQLQKMAGWLTELGVTDAAMESTGVFWWPVYHALAGAGIEACVCNAAHMRNVPGRKTDLQDCQWIAELHEHGLLRPSFIPAAEVATLRARTRYRKKLIEQRTSEGQRLSKTLEDGGIKIDSVASELLGRSGRDMIEALITGERNPGVLADLARGVLRRKIDDLQMACDGRFTESHAQMCRLHLDACDHLTAKIGELDQLVAEAAAPFAALIARLVTIPGIGQRTAQVIVAETGGDMSRFRTAARLASWAGLAPGDNESAGKRKKAAARKGNQHLRTAMIESAWTVGRTATRPGARFRRLARRFGRGNEKKAAFAVGHTLICIAWAVLKHDEDYAEAGEQYYEQRDHRNREHLARHHQQALARLGYQVTLTGPGDGRPPPGTRTPPTTAPVQAA

SEQ ID NO: 81618 - protein, 328 aa, unidentified
MVMIEKVVGIDVAKASFDVAVSLETKGKYRTKGKLANNASGFAVLSDWLGEHAPGAAVCMEATGVYHEALATFLVGHGVTVYVANPAQVAAFAKSELSRTKTDHTDAKLIARFAMAQRDVGTTLRPWTPPTPAQRKLRALVHRLDDLEGMRQREHNRLDVSDLAVRDSITQVITTFDAQIKALRQAIHDHIDSDPGLKHDAKLLGSIPGIGELTAAYLLGCAGDLRRFDNPRKLDAFAGMNPATRQSGRWTGHTRLSKLGPALLRAKIYMPTVTATSHNAAVHALYNRLVARGKPHLVALAAAMRKLLHIAWGVIHSGKPFDAKIALA

SEQ ID NO: 81619 - protein, 359 aa, unidentified
MASMPSQLDPVSRVVVAGVDTHKDLHVAAVVDTDAVVLGTESFSTTRAGYRSMLRWLRGFGDVRKVGVEGTGSYGAGITRHLTEAGIQVLEVDRPDRSDRRRRGKSDTLDAEAAALAALAGRRTSTPKRKDGLVESLRVLRLTRATAIRSRTKALQLLRMHVVSAPEELRDQVRNLTRMQLLRTCASWRPDTVGFRDPVVATRIALKSLARRILELNDEIADLDELINPLVQELAPQLLARPCVGVEIAGQILVTLGDNPARIRSEASFAMLCGVAPLPASSGKTQRHRLNRGGDRQANRALHMAAISRMRMDPTTKAYVARKTAKGHSKLEIIRCLKRYLAREIYYLMRQPTTLPNAA

SEQ ID NO: 81620 - protein, 494 aa, unidentified
MKQLQKHERSFTMKKRNIYQNRSQELLSLFEEAGNSAKVMCVPMDYAKKDHLVMFCNGHGDILRKPFSVKNSPEGIEYLLDQATRSSSRRGIKKKHVFFGGEDANSYAENFVSTLRSKGWVVAGVNAHDAKKQRANLQASTDRLDLMGIATMLLNCRANCCPAQSGIYRNLRTLVRHRRKLVVMSTEVKNRIHGVVDRLFPGFLNEGKTGIVPFTSSSLYLMEDRFSPKQIRRRKREKLIEILKRFGTSKAEETADRLQQYAAQVLHTPVEYIDTLQLSLAQHVKHLRCLQESVNQLEKEIAVNLAQTQGAFLTSVRGIGIVLAAGATAEIGDPNEQKPLNNLVSYSGIIPRVKQTGGDDGKTYTGKVAKRCNRILKDYVVKSALHIGLHGPQDLMADYKRRDASGQHADFGMGRRYLRMAMSLMRTSQIYLPHRLRKAEAKMEERAGYYLTTWPYLSGKWKKLGALKAAFAKDRPLGQWRQIVQELYDIRLKL

SEQ ID NO: 81621 - protein, 364 aa, unidentified
MKRKVYVGMDVHKETIQIASLTSKTKDLVKEQQIKHEEVQIKKFIQKLKLEKSEIHCCYEAGVTGYPLYRYLKSLGVNCTIVAPGKIPRQSSDKIKTDKRDAIKLARLLRSGELESIHVPSEEDEAVRDYLRSRDSLRLDLGRNRQRLMKFLLRKGIKYSTTKSPTKNHYKWLNNLHFENEILQTTFNDYYSRVRVQEENLKAMDKKIQEIAESEPYREKVGILRCFRGVDYLTAMFLLSEVNDFKRFKTAGSFMSFLGLVPGEYSSGSKRKQTGITKTGSPRLRRILTEAAWQHRFSGTGSKVVVARRVGQSALVVSLAEKASLRLHKKFKKLQLRGKSPQVMITAVSRELSGFLWAAMNLVV

SEQ ID NO: 81622 - protein, 412 aa, unidentified
MQVVYERCAGLDVHKRTVVVCAITSDAQSQRCRERRTFSTMTPDLLRMRDWLKELGISHVAMESTGSFWKPIFNILEGHLEVLVVNAQHLKAVPGRKTDLKDAEWIADLLQHGLLRPSFVPPVAQLEVRELTRYRISLVEERSRTINRLQKTLEDTNIKLASVASDVMGKSARDMLTALLAGEVDPSILAELARGRMRSKRDLLSQALQGQLKPHNRFLLSEQLADIDALDEAIERMSTQIAERLRPYEQQIQRLMTIPGIKRRLAEVILAEIGPDMSRFPSARHLASWAGMCPGSHESAGKRFSGKTRKGSPWLRSALVEAAHAAIHAKDSCLSAQYQRLAVRRGGKKATIAVGHTLLVIIYHLLSQDKDYEELGGHYFDDWDRQAVQKRLVRRLEKLGYEVKLEPVSPTA

SEQ ID NO: 81623 - protein, 397 aa, unidentified
MIAVGIDVSKSKSTVAILNGDGSIRAKPFDVHHVADELQALVDYIKRTSEPPTILMEPTSHYHYPLLKAFTEAELPVCLINPYQMKKYGDTELRKAKTDKRDSLRIAQYALEKSYSLIPYTPQDQKYEDLRFLSRQYSQRISTLTVAKVQLLSLLDETMPGITTILPLKSRDPDNCVLLRFIKRFKSFDVIRKMGKTRFLDSYQVLVKKTKDRFAGSKGLAIYELVLNSVTTRGENPLSAMTQDQCVDLVSTSQKAADEINLQMRIIAETMPEYKVLRSMAGVGDRLGPIILGEIGDIRRFHSGKALNAYAGNDAPPYQSGQFESRNRHISKRGNPALRKACFEVMQALKLTKPQDDPVYLFLLKKEQEGNPYNVAKMAAVNKFLRIYYARAMELYK

SEQ ID NO: 81624 - protein, 421 aa, unidentified
MEEITEEPVALVERVAALDIGKATLTACVRVPHDAKPGARLQEVRTCTTTTRSLLGLRDWLVCQGVTRVVMEATSAYWKPPFYLLEDDIAECWVVNARDVKNAPGRPKTDKLDAVWLAKLAERGMIRPSFIPPRPQRQLRDLTRYRRTLTHERTREMQRAEKLLEDAQVKLSSVISNIFGKSGRDMLDALIAGQRDPYVLADLARGSMRGKKSILAEALTGHFTEHHAFLLAMMLARIDALTAQINTLTARIEQAVAPFARQVAQLDEIPGIGMIGAQEIIAEIGTQMSRFPTAGHLVSWAKFAPKARQSAGRAKAATTGEGNPWLGGTLGEAAISATHTSTFLASRYRRIVKRRGKKRALVAVGNSILTIAWHLLSDPSARFTDLGPTWHDHLAPLRRKRQLIAELERLSGMKVTLHQAG

SEQ ID NO: 81625 - protein, 366 aa, unidentified
MIVIGADTHKATHALVAVDAGTGRIRGDREIKAEEPGHLAAVRWARELDDDRAWAIEDCRHVSRRFEQALLAAGERVVRVPPHRMGASRKGEREPGKSDEIDALAVARAVVKDGVECFPVAYLNDQSMEIRLLFDHRADLVAERTRIVNRLRWHLLELSPELERSCKRGSLSRSRPLGRVERGLRKLPAGARVRVAREQVRELRRLSREIDALHCELGALVRAHRPQLLAELGCGALTAAILIGRTAGNERFRSEASFALQSGTAPIPCSSGKSIQHRLNRGGDRHLNHALHIIAITRAQRDPATKEYLDRKEAEGKTPKGALRALKRHLARHFHRLLAAPAADQQRAAVDPNSNGVAPSPKVCIT

SEQ ID NO: 81626 - protein, 407 aa, unidentified
MVDTTAIDLFLGLDLGKEFHHAHGRTGDGRTVYDKRLPNTEPKLLELFTRLVAKFGTVLVIVDQVANIGALPLTVARAAGCRVAYLPGLSMRRASDLHPGEAKTDARDAFVIAETARTMPHTLRAVDRDDEVLAELTMLTGYDNDLAGEVNRTTNRLRGLLSQIHPSLERVLGPRLAYPYVQALLQRHGSPARLKKLGRARCEALLKAHGSRKAHHLTAEIFDALAEQTLVVPGTEASALIVPGLAAQLAAAHTQRRQAEQEIAALLEALPLFHLLTSLPGLGVRTTAAVIVAIGDGTGFPTAGHLASYAGLAPATKSSGTSIRGEHAPHRGNRLLKRALFQAAFAAIGCKSDPSSRIYYDRQRARGKTHTQAILRLARQRVNVIHAMIRTGALYEARTPGDVDLAA

SEQ ID NO: 81627 - protein, 422 aa, unidentified
MEEITEERERLVQRVCALDLGKAGLVACVRVPHETRPGRRLQEVREYSTVTRQLLELADWLRVQQVELVAMESTSDYWKPVFYLLEAEGLTCWLLNATHVKHLPGRPKTDRLDAVWLAKVVERGMCRPSLVHPKPIRQLRDVVRYRRSLIRDQTREKQRLEKFLEDAQIKLTSVISDLHGVSGRQMLQAMIDGERNPKVLAQMAHGTMRHKIPILQEALTGFFEDHHADLCRRMLRRIDDLAADIASLDARVEELIAPFAPAVATLDEIPGIGVRAAQEIIAETGVDMTVFPTAAHLASWAKFTPIDHNSAGRKKGGGTGKGNPWLGGTLGEVVAGLARTDTFLGERYRRLARRRGKKRAIVAVGNSVLTVVWHLLNDPDQHYQDLGSDYYESRINKRRRERDLIRQLEHLTGHKVTLTPAA

SEQ ID NO: 81628 - protein, 404 aa, unidentified
MSRGCGMDIHKEVVVATVRGLGIQQETRSFGTFTSSLTELRDWLMSLGITHVAMESTGIYWKPIHNVFEGHIPNVWVVNARHMKNVPGRKTDKKDSEWICQLLMAGLLKPSFIPPRLQRELRDLTRYRRKLIQMVSANKNRIIRALEDGNVKLSSVLSDTSGTTATKLIEMLCDGKELTLQDIEDIRHFRCRHTAAEMLEACTGYMNDHKRYMLKRIRECNRKLSVEIDELNKRIKEITAPFSEPMERLCEMPGIDTRTCEEIIAEIGLDMSQFPTAGHLCKWAGMCPGNNESAGKKKSTKAPKGDKHIKATLVEAAWAASNTKGTFYSERHGRLIGRKGSKKALIAIGHSMLTSIHYILATGARYKELGDNYVPERMEKKRKEYLKSELKKLGYEVVLTKKKD

SEQ ID NO: 81629 - protein, 350 aa, unidentified
MAMTIVGTNPDAVIGGVDTHAEVHVAAVVNHVGGVLGVESFPTTRIGYRQLVSWLESHGELTLVGVEGTGSYGVGLARYLARAGIAVVEVDRPNRQTRHRKGKSDTVDALSAARAALSGTATGLPKTRDGNVEAIRVLMIARRSAVDTRIETLNQMRHIVFTATPEIRGKFEGLTAISLANTAAGLRPREGDDPVRYTTLVTIRALGQRVQYLREEAKRLNRLLQPLIRQTAPTLLEVYGVGYDTAAKLLVAAGDNPERIRSEAAWAHLCGVAPIPASSGKTARHRLNRGGNRQANSALYRIMLSRLRHDQATRDYVARRLGEGKTMGEIGRILKRYIAREIYKHLPRPV

SEQ ID NO: 81630 - protein, 402 aa, unidentified
MNCVGIDVSKGKSMIAVMRPFGEVVVSPYEVRHTASELSELAKLLKSLDGETRVVMESTGNYHTPVAWLLHDAGLYVSVVNAMLVHDYGNNSLRRAKTDKKDAVKLANYGLDHWLTLPRYVPEEDTRLILKTCYRQYQQYSKVQTMLKNNLISLLDTAFPDANRLFTSPPRTDGSEKWVDFVAAFWHCECICGLSEKAFTAKYQKWCRKHGYNFSEDKALDIYASACGHFGVMPKTDTAKLLVEQAISQLRATSAALAALRQEMQSLAASLPEYPVVMGMFGVGPTLGPQLIAEIGDVRRFHSKKALVAFAGIDAPPYQSGQMDVRSRSISKRGSASLRRTLFLVMSVILQCAPMDEPVYQFMNKKRSEGKPYRVYMMASANKFLRIYYASVKTYLDSLEHD

SEQ ID NO: 81631 - protein, 324 aa, unidentified
MTSTKYIGLDVHKESISIVVMNSVGKVVMECVIETKASTILQFIDGLRGDVRVTLEEGTWAAWLYDLLKPRVTEVVVCNPRKAALLKDGSKGDRIDAHKLAELLYMNKIKSVYHGEHGLRTMKELARSYLTINKDLTRVMNRLQALYRSWAIPCGSKEVYAQRYRAEWLGKISEVGVRRRAEHYYQQLDVMHLLRQKVRKDLLAESRKHKAWKLLRQIPGIGPIRAAVLIAVMQTPHRFRTKRQLWKYSGLGLETHASAQYHAVEGELRRSKRPATVRGLNKDHNHDLKDILRVRRCAPARLLDRCTISTRICSLRGGSPRWPA

SEQ ID NO: 81632 - protein, 352 aa, unidentified
MVHVGIDLHKNLIVLCVVRQDLSVQTLRRLACQDVNEIVAFFKSLGEFQAAVEATGSYEWFVALIEPLAHRVVLVNAKKYRIIAESCHKTDKNDARNLAKSLAEDKLPLAYRPTPRQREHRSLVRHRQFLQKERTQIRNKVRRIANDYNADRKDLFTVKGQQALAQVALNTSERFICDQLMTQYNLVNQQIKALTDQTEEFAKDASAVEQKHREVLQTIPGVGPVTTEAVLSELGGVERFKSAKGAVAYAGLAPGRRESAGKGRDLGISKSGSGLLRCALVEASWQLVRRSPFWKSTYEKLKKRRGARRAIVAIARRLLGVMIALLRSSEAYKEPPPPPPRKLIVKRGSQAA

SEQ ID NO: 81633 - protein, 434 aa, unidentified
MLLSIFKAVILMMKLKYSICCGLDVHKKVIVATIVTTNKEGISEYNQKSFSTINSDIQKFHDWLIGNNCYHVCMESTGKYWIPIFHYLEKDIDVCLTHPKYVKAIKGKKTDKKDSKWIADLYKFDLVRCSFIPPKDFRQLREIARYRFKLVCMKSSEKNRIQNCMTVSNIGIASVLKDPFCKTATEIMSYLLEHTSDTMDEKAVRKLVRKGTKASSSEIIEALKGYSIETDQAKKLELARRHLEYLEDMITQTEVELYVRIKPYYEFVEFISTMPGMTQLSATIVLAETGVNMDIFDDAGRLCSWCGLSPANNESAGKKKSVRIAKAGEYLKPVMVQCALSAVRSRKQPYFAVKYNAIKKRRGHKKAIIAIARMMMVCIYHMLSEKKPFAPTDYEELMDSHKHEKRVVLNEENALAFLAAQGYDTSQLVKCNDN

SEQ ID NO: 81634 - protein, 331 aa, unidentified
MIKKTAHFAGIDVGAEELLLVVRKNATSMKAQKFANTPAERARLVAKLVKLPGVSVCLEATGVYHLELAVALHDAGVELNVLNPKASHNFAKALMKHSKTDAIDADTLAQYAERMPFTAWVRPSPQAFTLRSFARRINALTRQKAMTKNHLHALSFGPDLPKAVLADAKLAIAQLEKRLAGLSREAQAFIGKHEDLKRVFTLLLGIKGIAQTSAIALMGELLLLPKGLTHKQWVRYAGLDPRAFDSGKSVHKTPRLSKAGNRHIRQALYMPALSAKQHDPYVKAFFQHLIEKGKKPLQALCAVMRKLLHAIHGMLRDNQAFDNTRFYATAA

SEQ ID NO: 81635 - protein, 372 aa, unidentified
MKTTTNKNRSTPSVVPTSSAAVGSGFTLGLDLGDRQHHVCVLDVTGQIIREAALPNTRPALAQLLAEFPRSTVALEAGTHSPWISRYLTDLGATVIVANPRKLHAISRNERKCDRRDAQMLARLARVDAALLHPIQHSSAQAQHDLLGLKLRDALVRNRVSLINAVRFTLKSLGHPVRNPASESFHKHVLADIPADCLPVVQPLLTVLAHVTEQIKAMERDLVQRSKQVYPVTQRLQQIAGVGPLTALCFVLKVGDPQRFRRGRDVGAYLGLCPRRDQSGGTDKQLRISKCGDGLLRRLLVSAAHYVLGPFGPPCALREHGQRLTGTGSAREKKRAVVAVARKLAVLLLSLWKYGTDYEPRVTSPKLVMIPA

SEQ ID NO: 81636 - protein, 342 aa, unidentified
MGEVVTIGLDIAKSVFKVHGVGAAGEVLIRRRLTRARMLPFFAKLRRCLVGIEACNNSHYWARELTALGHNVKLMPAQYVKPYVKRGKNDAADAEAICEAVTRPTMRFVAVKSPEQQSLMMLHRVRLMLNRQRTQISNAIRAHISEFGVVAPVGRLGVERLLEVVGDAGDDRVPEDGRLCLQMLAAQLEVVKQQILENDRRVLASARRTELGRRLMEIPGVGPLLASAFVASVADPTVFKTGRDLAAWIGLVPKQNSSGGKERLGSITRAGNRYLRQMLVVGAMAVIRYAERHGTKRPWLVQLLARRPAKVAAVALANKNARMVWALMTSGERYREPMPIAA

SEQ ID NO: 81637 - protein, 347 aa, unidentified
MGKSITDLFSVTTVGLDLAKHVFQVHGVDASGRVIVAKAFRRKDVLAFFAQLPECLVGMEACGSAHHWARELIKLGHDARMMPPAYVKPYVRRQKNDAADAAGICEAVTRPSMRFTGVRTLENQAALMHHKAREMLAAQRTQLINALRGHLAEIGVIAAQGLKNARELARVILAEGDETIPACVRAALAPLVRQLHVLDQEIACSDRTIAAMARDDEMARRLMTIPGLGPVTASAMVASVQDISAFSGPREFAAFLGLTPRQNSSGGKERLGRISKMGNRYLRKLLVVGAHAVLYHRKPHEDALRSWAKKLMQTKPFKLVAVALANKMARIAFAIMRGRTTYSTASA

SEQ ID NO: 81638 - protein, 454 aa, unidentified
MAQKKRGKNRRQQGSLPILKLNAAGVDIGATEIFVAVPADRDPEPVRSFQTFTEDLHRLADWLKSCGIETVAMESTGVYWIPLFQILEARGFEVCLVNARYYQNVPGRRTDVSDCQWLQYLHSVGLLRASFRPDQEVCTLRSLLRHRDSLIQMASTHVQHMQKAMDQMNLQLHHVISDITGLTGLAILDAILAGERNPKVLAQLRDGRIHASEEVIIKSLVGDYRAEHLFTLRQSLEAYRYYQRLIAGCDREIERQLRRFKDQVDVKMQPLAPPKVRRKKLYSNEPAFDLRQHLYRIFGVDLTAVPGLNVLTAHTLLAEVGPDLAKFRSASAFASWLGLCPDNDVSGGKVLSVRTRRVNNRAALAFRMGANALYKSQSWLGNFFRRMRAKLGAPKAITAAAHKLARIVYHLLTRREPYDATVYAKHEKLWRFRAESKLRAQARALGLKVIPAAG

SEQ ID NO: 81639 - protein, 290 aa, unidentified
MSIKRILVNTIDTDLEYEVIGIDLAKNCVSAILLTTDGEIFGIDRLDYQELEKSAQELSPTIFAMEPCTEMNYMVQKLEDWGHHCIVISGKNVKDYVESHFSNQKTDLNDAQALAFLTKDTQLRTVKAKDPEQLKYASLTTLREQYVKQYRQTMVSLKGICQVWGLSISKGISGKARLKDMIENHAAFPAELRTALVGMVAHAQAVQKDLKSVTKILEELAKKDKACQLIQTVPGLGTICSCRLRATVGDIQRFKHPKDFPAYYGLVPRSMATGHNEKKGKIFQIGRAHV

SEQ ID NO: 81640 - protein, 370 aa, unidentified
MAKSTPLFVGLDVHKDSIAVAHAQGQSADPPVFLGEIGTRQADLAKLIRRLQAKTSKLVFAYEAGPCGYILHRDLTGQGFDCHVVAPSLIPKKPGDKVKTDRRNAVDLARLLRSGDLTRVYVPTVEDEAIRDLCRARDAARLTLKNAKLRLKAFLLRLGLHYVGRADWNDAHRRYLAKVVCPTPAEQIVFQESVRAVDEQVDRLARLEAALRELAPAWRLYPVVQALQALRGVQWLVAITVVAELGDLTRFTSPRQLAAFVGLIPSEYSSGPSRRQGGITKAGNGRARRALIEGAWAYRHPAKVSQHIQTRIDALPKPIQDIGWKAQVRLCKRFRRLVARGKHPNVAVTAIARELIAFMWAIATEVPVTV

SEQ ID NO: 81641 - protein, 352 aa, unidentified
MQMITTIGLDIAKSVFQVHGVDGAGQVVIRRQLKRRSVLVFFQKLPPCLVGIEACASSHHWSRQLQALGHTVRLMPPAYVKPYVKRQKNDMADAEAICEAVTRASMRFVPTKTPEQQSCLMLHRTRHLFIRQQTAVINSIRAHLAEFGIVAPVGRKGVTELLHIVADPSEKRVPEVARACLAALGDQLLSVKEQILQFDRMIMTWHRSNQTSKRLHYIPGVGPMLATALVASVADPRTFRSGRNFSAWIGLVPKQHSSGGKERLGSISKQGDRYLRSLFVAGALAVIRYAKIHGTGHRPWLTALLARRPTRVAAIALANKIARMVWAMMAKGERTRHACGVNEIARRIAGVT

SEQ ID NO: 81642 - protein, 404 aa, unidentified
MEKAQVIGYGVFVGIDVGKSSNYVVALARDKEKPLVSREVPQDEAAIREVLDEASSHGRMLVTVDQCGAFGRLTVAVAKDMGFDVAHIPPRKFKQAADTYGEDKDDLLDAYIIADTACSTPRLVELVGDRPEVLAQIKVLSSARDDCVTERTRCYNRLHDLIHQVCPPLEAVFAKDKLHNDLEMRLLKQYGGPQGFRKAGKARCAKWAGNLKYHCTRGPERVEEVFEALSRQTVALPAAEVIEQQIKKLAKRVIELNEEEDSYNAQIEALSASVPEVGILRTMPGVGRVYGATIAAEIGDIARFKDSAHLATYAGLSPVRKKSGSSLDQKKKRKGGNRRLKNALIQSVDRARSCEDWAEEYYQRKRREGKKHKQALFALARRRVDAIYAMLSNGTFYEPRTKEA

SEQ ID NO: 81643 - protein, 416 aa, unidentified
MNAVGIDVSSRKSTVAVLRPLGEVVCLPFDVTHDIAGLASLAEKLKAIDGETRVVMEHTGRYYEAVAKALHEAGFFVCAVNPLLIKEYGANSLRRVKTDKADAVKIARYALDNWADLRDFTPMDAIRYDLKTLNRQFQLASKQRTASANNLIALLEQSFPGIRKCFDSPVRSDGTQKWVDFAHSFWHVDCVRKQPFPAFCERYRKWCKLHAYFFKLRNAEKVYALAKSAVVLTPKSKVVKVLVQEAANQLISISRSVEVYRAEMDRLAAMLPEYPVVMAMYGVGKSYGPQLMAEIGDVRRFERKQALVAFAGIDPMPNQSGDKNVRSNKSSKRGSPYLRKTLFNVIRTYLQCAPQDEPVFQFLNRKRAEGKPFYVYMLAAANKFLRRYYAKLRDYFASLDTLQPAAPIPTILKATL

SEQ ID NO: 81644 - protein, 354 aa, unidentified
MEAVGVAQDFDIRKKAEPFHDGRHCRTAGRAFTLVYKDDAAMTDLTRFAGIDVSKSNLDLFILPDRHSFTFANTRSGIEHLLDQLKTYHPIHRVVLEPTGGYERLVLRGLLQADLPVSRVNALQVRHFARASGLLAKTDRIDAMVLADYGQRMPTRMDSFPSENRQKLADLVARHRQLTQMLVQEKNRLEKQENSAHYWVVQMIKHLNKQRGEVDQAMTDCAQADEEISKILPILMSMKGIGLLTACILIAELPELGLLGKGQIAKLVGVAPINRDSGSMRGKRMIAGGRKPLRNALYLAALPAIRFDPLMRGLYQRLIQKGKPGKVALVAVVRKMVVILNARMREHYAAVLDT

SEQ ID NO: 81645 - protein, 479 aa, unidentified
MIKSVGIDLACAGEHKVRCLDERAQPCDGFSFQTSLEGLTKLEERIFGDGSNPVIIFEPTGLAWLIVAIYLKARHPDCRLVRVQARKVVALRKYLRRSSKSDKIDALTLAKMSFIDSEQLEEVYLPPAKIYAMQRLARQRKRLESDIAAHKTRIGSIIDGYLPGLRGAFSDPWSAHARAFFCSRLNPMAVVRASERALHAFLTKARRHGKANAAESHMVYLSCKDAATVYELSQPVGTINDDFFADLQDEISREFRIMEMTEAESDAIAKRLEQLYLELHPSDNLRTIPGVGEHTAPIFLAAVGDPVRFRSQSAFANYSGVVPAAKQSSNAEAKGLRMTKAGPATLKWALYQSGQIGRRYDLQLACVYYREMVHHGKNHKQAMGAVMSHMGARVLAVLREDKPYELRDMQGKPITREEARKLILSNFQVPEEIKQDRRRRKATSSSTKPRRKNQEMAAHRTNEAAVAPQPVVTVAISRT

SEQ ID NO: 81646 - protein, 355 aa, unidentified
MSQEKYIGMDVHDATISAAVKNAQGKLLMECVLETKAATILEFIQGLRGTLAVTFEEGTLAAWLHDLLKPHVSRLVVCDPRKNALMRDGNQNDRVDARNLAELLRTNQVKAVYHGKHGTRALKELGRSYLTLTKDSTRVMNRIKSVYRSWAIPCGGTSVYSRRHRAEWLAKLVEPAVRIRAEHLYQQLDSLEPVRQAARGELLRESRKHAAVNLLRQIPSIGPIRSALLVAILQTPHRFRTKRQLWAYGGFAVQTYDSGEYRMVRGKLQRNRERITVRGLNRNHNHDLKNLLKGAAISAIERPGPLQDFYAALVEKGMRTSMARLTLARKIAAITLTMWKKGVSFDPKQLQRQAA

SEQ ID NO: 81647 - protein, 348 aa, unidentified
MEARLDVIQEHLYVGLDLHKRRWISTVRTRDLFLKRMATPADKELFVQSLRRQWPEAKFSVVYEAGCFGYHIADYLRTQDIEPIIVAPHRVPVMPGDRIKTDAIDSNKLAEALAAGTLKSIHQRPAPLLYDRGVLRKRLQLIKRRVQIQLQLKADLLFYGFELRAPGSTRWSKRTVASLRSLMFPNERFRRAYLLALDEYDGIAAQLSELNTMVRELLVAEPYVKTVTLLRTIPGIGPLIALSFVLEVGDFARFRNHGEFASYLGLVPSEHSSGERIRRGHLTGMGHTYLRSLLIQAAWVAVRKDPELRRVFDRLAVGGKQRAIVAVARKLAHRIRTVVIEQRPYKIR

SEQ ID NO: 81648 - protein, 391 aa, unidentified
MICVGIDVAKDKHDCCILDSEGTTLADCFTIPNNLDGFKRLLQTIKDCTQKSDKIKVGLEATGHYSCNILGFLLDNDLPVYVMNPLHTNLYRKSLSLRKTKTDRVDAKTIATMLLSDVDLKSYTDTAYHNEELKSLTRYRFDKVQERAKLKQSVSRLVTILFPELEQLVSSIHGTSIYALLSEYPGAKQISEAHLTRLANILVTTSRGHYRKDRATHIRDAARTSIGSVMPAKSLELKHTIKLIQELTSEINEIEDAIRKIMDELKPPILSIPGMGFYSAAMILAEVGDFSNFNSPDKVLAYAGCSPSTYQSGRLTNCYAHMEKRGSRYLRYALYTATKYVCYWNPVFTEYLTKKQAEGKHYNVALSHATKKLVRLIYALQKSGKAYLAIT

SEQ ID NO: 81649 - protein, 316 aa, unidentified
MEQHEREQACFVGIDVAKRQLDVCIRPAGLIFSVGRDGAGFEELVARLREVRAQLIVLEATGGFEQVVTATVAGALLPVVVVNPRRIRDFARACGQLAKTNTLDAALIALFAARVRPELRPLPDEPTRHLGDLAARRRQVVEMTTTERHRPRQAALPRIKMRVATHIAWPDAELASIDGDLDQAIRDSELWRHQEALMISVPGVGPTVARTLMTELPELGQLDRRSLAALVGIAPMNHDSGQHRGRRSIRGGRSVVRAKLYMAAWVACRWNPTIKSFCEQLTAAGKPRKTVIDACTHKLLTILNAIIRTNIPWQKA

SEQ ID NO: 81650 - protein, 385 aa, unidentified
MSELNDLSRSLTSLEQDKTIIAVIEMSQSSWLVAGIIPGIERHPLKKLEPSEEELVRLLMRWRTEATKNGHTITRFAVAFEAGRDGFWLARWLRARGIETYVIHPTSVAVSREHRRAKTDRLDTGLLKRVFIGWLRGEPDHCHMAAIPTLAEEDAKRPNREREGLVRERTRIVNRMKSCLARFGIRNFKPTLRKAPERLATLATPEGVPLPPNTLLELRRDMARLRFVMDQIKEVEEARAQRLEQAPQEKTHAMVRLIARVIGVGIETADMLVHEILSRQLRDRRAVARYAGLTGAPDESGNKRREKGLAKAGNARVRRGMIQLAWRFLVFQKDSALARWYRTRTESAGKKRKTMIVALARKLLIALWRLVTIGEVPAGVVLRAA

SEQ ID NO: 81651 - protein, 455 aa, unidentified
MTKRDAKQRRPGTFKQALTVINANAAGIDVGAKEHYVAVAPDRAEQAVRRFSAFTQDLHQLAQWLRQCGVTTVAMESTGVYWIPLYQLLQDYGFTVKLVNARHVKHVPGRKSDVQDCQWLQQLESFGLLTASFRPDAQICVLRSYMRQREQLIRSAARPVQQMQKALAQMNLKLQHVLSDITGVTGMAIIRAILRGEREPLKLAALKDRRIKSDTSTIAKSLEGDYRAEHLFVLRQALELYDYYQQQIAECDAQIYEEMKKLESTSEAVPSTSQRKRSCHNPFHFNAQSELQRVLGVDLTRINGISETTAQLILSELGSKVVTTWPSEAHFASWLGLCPNNEISGGKVLRRGTRKVVNRVANALRMCAESLLQSKSALGAYARRMRSRRDTRIAITATAHKLARLVYRTLKYGEEYVDQGQQLYEQQYQAAVLKSLNRTARKLGYELVTRQPPPS

SEQ ID NO: 81652 - protein, 339 aa, unidentified
MNDVSRIGLDVAKRVFQVHGVNAREEVVVRRSLRRGQLLAWFAKLPPCLIGIEACATAHYWSRELTALGHTTRLIPPNYVKPYVRRNKNDAADAAAICEAVSRPSMRFVATKTPSQQAVSGLHRIRQLLIKQQTAAMNCLRGLVAEFGIVAAQGMKGFNELLAIVADPDDTRIPDLLRSSLTGLVETLTTLEAQLAKTDKAIVAWGRSDNTARRLLAVPGLGIITTTAVAARTNPKAFAAAGHFAASLGIVPRQDGTGGKVKLGPISKRGDGYLRKLLVNGAMAVLRSKQAQQDPWLSKLLANKPLKVAAVALANKNARIIWALMVRDTDFRPRAVVAA

SEQ ID NO: 81653 - protein, 404 aa, unidentified
MYYIGVDWADQKHDALALDETGHQMGSIRVPHTPEGLTKLNAWLLQILGDQPKEEMACIIETTHGLLIAFLLDHGWPVYPVNPRTVDRRRSASGAKTDTIDAYLLAKTGRADFADLHRLVPDSEKVAELKALTRDQDSLIQMQTRLVNQLTACLKEYYPAALSLFAKLQQHSSLIFLQTFPTLEMAQTASVEQICQVLKAAGHTTAQKVAPKIVEQLHQPSLRASAITTRTKSRLALALIAQLLPLVEQIAAYEKEIQQLFLSHEDNEVFRSLPGAGRRLAPRLLAEIGDDAGRYASAASLQALGGTSPVLFQSGTYSKPHRRLGCIKPLSNALHSFAWQSTQQEPWAKAYYERKRREGKSHSVAVRALSNIWVRIIFAMLQFHKPYAAATFETARRLHVPKAA

SEQ ID NO: 81654 - protein, 387 aa, unidentified
MLSVGIDVAKRSHQACVLDDSGQMVGQSFKFPSSRSGADTLVATLQELGSPATIALEASGHYWQGLYHYLVSQGFPVIVVNPLQTEAYRSTGVRKVKNDRRDAFVIADFLRIGRAQPNYVPGEVTVQLRELTRYRMDLEDQIGDAKRRILTMLDRVFPEYPGLFSDAFIDSSRALLKAAVSATDFAMFDLQELTSILRQASRGRLGEGKAREVQKKAKESLGMAFLGPVARVKVGILLEQIDLLNRQVQEVELTITELMEQQPQYLTTIKGIGPVLAATLLAEIGDIRRFPSLESLVAYAGIDPSIFESGEFTGRRQHMSKRGSPYLRRALWLAAHSTRQWNPDLNDYFQRKMAEGKPYKVAMGALCRKLLARIYVVLKENRPYQVR

SEQ ID NO: 81655 - protein, 411 aa, unidentified
MRIVHQRCCALDVHKRNITACVLVWDGKQLVEERKKEFGTTKKQLGRLRFWLMACKVTEVAMESAGVYWKPVWHVLEKGNQFQLKLVNAQHYHGVDGQKSDQIDASWLAELLQCGLLKGSFVPSQWQRELRDLTRLRVALLQDQNRIQNRIEKLLEDANIKLGSVVSNTLGTSGRKILKALIAGDKDPGWMADYAQGRLRAKREELTEALFGFVTDHHRTLLDMLLRQIESLDRDIASLEADIRRRLAPHQDLVKRLAEIPGFGEITAWTVIAELGLDMNVFGTPQRAASWSGLCPGNRKSAGKRGHGRTRKGNRWIRRGLTQSALAASHDQDTYLRSFYWRISSKRGPKKARVATAHKQLTIAFFIIRDGVRYNDLGPDHFDRRQPERTQRYLIKRLEGLGLKVTVEPAA

SEQ ID NO: 81656 - protein, 419 aa, unidentified
MRNSNTKKLKRISEQTLLVTVDIGKVKHTGYCRFPNGTEGKPFEFFNSRNGFEELWWRVCQAKRSLNLAEVVVGFESTGPYAEPLLHFLRKRDVRLVQVNPLHTKRLKELQGNSPNKTDQKDPKVIADIIELGHALTVIIPEGTVAELRRLTQARERSIQRMSMLMSQLQDLVFLIFPEFITVMKDITIKSTQYLLKNYPRPQDIVEQGIDGLAQILKKVSRGQLGKERAEALYQAAVESIGIGEGRESIVLEIREIVFSIESIEKFVKEIEKHMSKHLKDVPYSRCILSIKGIGEITAAGLIGEMGDFKNYRIISEVIKHAGLDLFEISSGKHRGTRRISKRGRPLLRKLLFFASINVVRKGGILHKQYQHHLEKGMPKMKALVAISRKLLSIIFALVRDHSVYIAEYSKTQQLKEAA

SEQ ID NO: 81657 - protein, 465 aa, unidentified
MVKQREGGKKRPKVATPTALPVVRPRVAGVDIGSTQHWVCGPARADGTANVRMFGTTTDELHALADWLGAQDVESVAMESTSVYWIPVYELLESRGVEVVLVNARQLHHVPGRKTDVSDCQWLQLLHSCGLLRGSFRPAEAIVRLRALQRQMANLVAERTRCVQWMQKALDQMNVQVHRAVADLTGTTGLAIVRAIVAGERDPATLAGHRDPRCHKSVDEIARYLTGTWRAEHLFTLASALRLYDAFGQELAAFETQLRAELAALAPPARRADPVPAHPNTTKEKAIRRRGEHPVRTTLWRVAGVDLTRIDGISTGVATVVLTEVGPNLAAFPSEDDFVSWLRLCPRTPISGGKPLKKRRNGLGANRIAGALRTAACALQHSKTALGAAFRRVARRKGAAIAVFATARHLAKLIYRMLRFGQDYVDIGEQAYERQFQLRRLASLTEAARSLGFTLVEQTPEPASG

SEQ ID NO: 81658 - protein, 370 aa, unidentified
MPEPTTLFVGLDVHKASIAVAHASPDRAADVVYVGEIGTRESDIDKLLRRLHSHAARLVVAYEAGPCGYGLYRTLTEKGVSCLVGAPSLIPKRPGERVKTDRRDAAQLARLLRSGDLTAVYVPTIEDEAVRDLSRAREAAIGVLKDAKLRLKSFLLRHGLHYSGRATWNAAHLRYLAKVVCPTPAQQIVFQESLRAVSEQTERVQRLEDELVEVAATWRLRPVVDAFQAMRGVQSHTAVTLTAELGDLTRFDNPRQLAAFVGLIPSEYSSGASRRLGPITKAGNSHARRALVEAAWAYRYPAKVSAHLQKRIEGCPKPIQDSAWQAQVRLGKRYRRMVARGKNPNVVVTAIAREILAFLWAIAREVPIGQ

SEQ ID NO: 81659 - protein, 400 aa, unidentified
MSTGPMWIGIDAGKTNHHATAINTVGEVLWSKQVRNDQATIETLINKATASGAQVLWAVDLTNSYAALLLGVLGAADQTVVYVPGRMVNTMTATFGESKTDAKDALVIAQTARMRPDLATVTTPPELVAELSRLTAHRTDLAADWVRGVNRLRDLLGSIFPGLERALDYTKRSPLILLTGFATPEEIRTAGEEEIVSHLRDHGAHRPSIAKIAAAASEAAQAQSIVLPGQNSTATLIKRLAAKLLELDRERKDLDKTITGVFRSNPQAEIIESLPGMGPILGAEFITVTGGDLAAFAHSGRLASYAGLAPVSKDSGRVSGNLRRPKRYNRRLRRVFYMAALSSIKADGPSRVFYRKKRSERMLHKQALLALARRLVNVLWALLRDGRLFERSAPVRPVAA

SEQ ID NO: 81660 - protein, 334 aa, unidentified
MNSLVCGLDVHKNSGYATVMSYDGETVEKRKLTNDEVVSYLDQYPIDKVAMESSTSIVPIYRALRTKGYTVLVSHPKKTRLIAESRIKTDRVDSWALTELARLNALPLSYVPPPDIAILREKVRRRAYLVRMRSKLRVKIRAQLTINGIQPPAEHGLFTAKNLEWLHGLQLDPVESYLPIIQSLDVQIGKLSKELQALAPQDEDVRLLMTIPGVGYYSALLVKSEVGDIGRFSDGEKLCSYAGLVPSISSSGAYTRRGSITKEGSRWLRWIMVECVHIHIKYDTSITRSYHAIAQRKGKSLAKIAAARRLLMCCYSVLRNRQPYYDPAGHYQPS

SEQ ID NO: 81661 - protein, 356 aa, unidentified
MESIFVGIDLHKTQFTICILINEEVIDQGQKYPMNDKGYHEFATYMKDLSEIRGLPVSIAIESTANARFFRDLMVKEGFRVTVVNTLRFKVVNLSTKKTDKNDARTLAEFLSKGMLPESYLCSAKSEGLRRVLKSRALMVQNSIALKNQVHAVLLAYGKITKTAQFQSKASRKRLLDSLPPEVKEVVGVIFGTLDTVEQQKKDLERRLKEITSDDENVRLLMTIPGIGVVNACTICAYIDDIGRFQSFKQFSAYCGLVPWVQASNETYKIGRITKHGPQELRTAIIEGVIAMVRMEEKTGKYVLMEQYKQMKDEKSSGKAIVATARKLSRIIYVMLTTKTPFNPKMLINRLEKSEN

SEQ ID NO: 81662 - protein, 336 aa, unidentified
MVHVKGSYLMIYLGIDVSKNKLDLCLLPGNGKKKTKSMKNQPGAEREIYDWLLMQKCPPEQVTAVLEATSVYHENVAFGLHENTPVTVCMGNPQRVREFARGIGMLTKNDTADAWVLARYGELKQPDAWVPPSPEVRKLRELMRLRDSLQADVQRAVNRLEKAHSTRTSREVIDSLTRTRKANEEELKRIEALISDHTDNHPGLKEDRELLESIKGIGSVVGTTMLAVLHSCPFRSASQVASWLGVVPVEKTSGSYVRGLARMSKTGPADVRAKLYMAAVVASKWNGPARALYERLLAKGKAKKAALGAVMRKLVHQCFGVLKTRMKWDENYVATA

SEQ ID NO: 81663 - protein, 316 aa, unidentified
MAKDYVGIDIAKEKYDIAYLSGEGEIKRDVSRNDIEAHTALVTQLRDQDTHVILEATGTYHQKLEKALQDAGIIVTVINPRQALAYAKSRNRRNKTDKVDALLLAEFGRERQPEARASLTSLTKGIARELEALEEDLSRLKNRLEAANSGVSHPKVIASLKRRRKQLEQEKENLKKQLQDDVKAERIQEFKLLQSIPGIGMHTASLLLAELGDPLRFNSSRSLVAFAGLTPMLHESGKGSRHTAISRMGSSHLRRWLYMPALAAIRMDTPLKAFYQRLVNKGKAKKVAIVAVMAKLLKLVYGVLKHNKPFDPHYNT

SEQ ID NO: 81664 - protein, 400 aa, unidentified
MKIPCVAVDVSKGKSFFQGFIDLDKPINKATPINHDLEGFELMTKIGDKLKQEYNDVVYIFEATGIYHKNLQSYLDNRKEKYIILNPLEAAKVRKSHLRSTKTDKRDCLSIAKAYFLRDYPIHQKQDDIYQELQSMNRHYEYLVKKLRLMKTHFRTLLDVVFPMFDKLFENIYTSIPITVLKLFSHPIELKKRKLESITKHLVHNTNHRDSYCRKEAIRLKQYATTVVSGVNYDNYLVSLLKSEVIQIENQLKELDLCINKMKTLAENIPLYYQLQTIPGIGEVLAVRLIAEMGDLSRFTSKWKLVAYAGLDPTVYQSGQMTGEHLRITKKGNKRLRTLVYLAVSSNIKSKKPNSIKEYYKKKRQQANPLAHKAALVACANKLLRIIYSMSKSGTNFHYK

SEQ ID NO: 81665 - protein, 413 aa, unidentified
MLKEAEMEVLHPRCAGLDVHKDEVVACLRVAAKGRAEHEIRRFATTTRGLLALADWLEAARCRPVAMEATGVYWKPVWHILEERFDLMLANAAHVKGVPGRKSDVNDATWIADLLAHGLIRPSFVPPQPIGELRDLTRTRKQLTREVVQHTQRIQAVLEQANIKLSSAIADILGASGRRILAAMIAGETDAGRLAELGRRLGCSREKLAEALDGHVREHHRFLLAQHLKTIEQLEATIAAFDARIEAALAPFRDAVERLKEVPGVGATAAQVLIAEIGADMRQFPSAGHLLSWAGLVPRLDESAGKRRSTQVKKGAPWLKPVLVQSAWAAARKKNSYFQSQFLRLKARGGVKKAVIAVAASILTTVYHMLREGTCYRDLGPEHFARRDPARLARKLADRIRSLGYHVEVTSPA

SEQ ID NO: 81666 - protein, 392 aa, unidentified
MVVSVGIDVSKDKHDCFIVSSEGEVLADAFIIPNTMDGFHYLLQRIRHCTAPQDKIKVGLEATGHYSYNLLGFLLDNGLTTYVLNPLRTNLYRKSLSLRKTKTDRVDARTIASMLLSDAGLKPYTDTAYHNEELKSLTRYRFDKVKERAKLKSSIARLVCILFPELEKLVPSLHIASVYALLEEFPGAKQIAAAHLTRLKTLLETASKGHYKRDMALEIRNAAKNSIGSQMPAKSLELQHTIRLIRELDREIDEIEEQIQSIMDELHSPITTIPGLGFRMAAMILAEVGDFTRFDSPDKLLAYAGMSPSTYQSGQLKNCYPHMEKRGSRYLRYALYNATKYVCHWDPAFAAYLAKKRAEGKHYNIAISHAAKKLVRLIFAMEKSRQPYCSAA

SEQ ID NO: 81667 - protein, 321 aa, unidentified
MAESAGIFIGIDVSKTSLDVAVHEPASHWQVANSDDGVATLVARLAALKPQVIVMEATGGFELRLVAALLHAGLPTSVINPRRARDFARATGQLAKTDKLDARLLAHLAASLRPTPRQLPSEAEEHLSALLTRRRQIVDMLTVERNRLQTVCEALRADIAEHIAWLEQKLTGLDDAIDRFVRASPAWTATDTLLRSVPGVGRVTASTLLGMLPELGRLNRQQIAALVGVAPVNKDSGNRRGRRRVYGGRASVRSVLYMAALAATRFNPVIRTFYQHLVKQGKEKKVALTACMRKLLVILNAMVHTQQPWRATDAKLACPTA

SEQ ID NO: 81668 - protein, 446 aa, unidentified
MIRSRSTTAKIWKATISERPDPDPQGPRECLSSDLSSAAEFVALLLERDGRDFIEACISEGETHRSYVRLVSALACEVVAIRGRKSMDLAESAGNGVSVTLGVDTHKDAHVAVALDGLGRRLGALSAPATTEGYKAIVGWARGHGSVERAGVEGTGSFGAGLARYLKGEGVEVREVVRPKRRDLHRSGKSDPIDAEAAARAVLAGTATGRPKGADGEVEMIRVLRAARRSAVKARAKALNQIRALLDTAPEEMKDGLRGLSSSKLVRKASCFRLRERPCDVLSATKLALRSVARRCRTLSEEISELDSQLDRLVAEAAPELVAVKGVGTDTAASLLIAAGDNPGRLDSEASFAHLCGVAPIPASSGRVVRHRLNRRGNRDANRALYVVAFTRMSNDERTRAYVARRTGEGKSKKEIIRCLKRYIAREIYKILATPSLRENPMFSGP

SEQ ID NO: 81669 - protein, 346 aa, unidentified
MGAVCRIGLDIAKNFFQAHGVDKHGKEVLNKKLKRADVLPFFANLPSCLIGIEACSGAHYWARELAQLDAGHTVRLISPRHIKPFIINNKTDAADARAICEVVGRPSTRFVNGKTVEQQDMAGWHRIRERKVKERTALVNQIRALLAEQGIVLPQGITHVRKQLPCIVEDLDNGLSLCARDYLSELYGELVDCDTLADKYEARIKAFAVNNEDCKRLLKIPGVGPLTATAVVAHVGTAKHFKNGRAFAACMGLTPREHSSGGKQKLQGITKRGNKHIRHLLIQGARIIMRYCLQKLPEQTEQRIRWVHDLAKRRGQHVTAVALANKTARIIWALLARGEEYRPALT

SEQ ID NO: 81670 - protein, 375 aa, unidentified
MLDRLRRLAHEAGELRHLRLETCGGAFDGAKKKHAVAIAEGGRTGEVRFLGDVENSPLPIERTIKSLAGRYDRLHICFEAGPTGYGLYRQIQALGHECMVVAPALIPKRSGERIKTNRRDAVTLARLHRAGELTGVWTPDAAHEAVRDLVRAREAATDDLRRKRQQLLSFLLRHSRIYSGGGHWTMAHRRWLANQKFEHAAQQIVFQEGIDAIEDAVQRLRRLEKQLALIVPEWSMAPVVEAYQAMRGASFLVAVTFAAEIGDVRRFDTPRQLMSFLGLVPAEHSTGDTIRRNGLTLAGNRRARRALIEAAWTYRYPARVSETLRARLEALPKPVRDIAWKAQIRLCARYRRLSATGKKLPVVVAAIAREMAAFL

SEQ ID NO: 81671 - protein, 324 aa, unidentified
MIDAILGIDVSKNTLDVSISSCTKVRTKSFANSSDGWHHLLDWLIAQKIQRVHACLESTGRYSLGIAYSLYEAGHVVSIINPAQIRDFVRTKLGRNKTDGIDASRIREYCELFKPSPWAPPSEAHRRLGELQTIRAGIIAGLTEWKNRKNSGIVDTEAQALADATILHFTSQLGAVDKAIALTIDNDSDLRSKRDLLLSINGVGDTLAGVVLAELPGPAVLRSSGEVVAYAGLNPRQHQSGTSVDRATRISKIGNAVLRAALYMPALSAMRYNPAIVALVTRLKSRGRLKPKQIVVAAMRKLLVLCFGVLKTGKPFDPAIAMGC

SEQ ID NO: 81672 - protein, 424 aa, unidentified
MKPQINPAYAAYIGIDWADQKHDICLQAVGADVSEFAVLAHRPDTIEAWALSLKQRFQGQPVAVCLELTKGPLVYALQKYDFLVLFPVNPSTLAKYRQAFTPSNAKDDPSDARLLLELLMQHRDKLKPLQPEGVEMRTLQCLVEQRRGLVNDRVRLTNQLTYALKQYFPQILEWFKDKDTLVFCDFLSRWPTLKQAQQARKTSLEKFFREHHVRYPKVIEARVSAIKAATPLTTDVSVILPHQLLVQTLAQQLRVQLTAIEHFDAQIAAFAQTLPDYVLFQALPGAGPIYAPRLLAAFGEQRARYQSAAELQKYAGIAPVTERSGKKCWVHWRLQCPKFLRQTFVEWAAETIPRSFWAGAYYRQQRAKGCSHQAALRALAFKWVRILYRCWQTRTPYDESTYLNSLKRRGSSLLNAIGENTKMA

SEQ ID NO: 81673 - protein, 353 aa, unidentified
MMIIGCDFHPSFQQIACMEEETGEYLERRLSHRGEAEAFYRSLAGKAVRIGVEATGNDRWFHKLMSELGHELLVGDASAIHASAPREQRTDKRDARHILRLLMENRFPAIWQPSVGNQEQRQLLLHRCRLVRMRTRIKNQLDSIAKNEGLTGSRVWKAKRRQQIEALPLSGWYAERRKDLLALLDEMDKLIEPLDEAVRAAAEQNAEAQLLMTHPGVGPVVSLSYVLILGDWRRFPRGKQVGSYLGLIPAEASSGKHQQQMGHITKQGNTLLRWLLVEAATKAQSKDPSWHRQYVRLSMNKHHGVAKVAIAHKLAVRLYWMLRSGQNYTQIVERGSHAGQSDLAGGCGLRPIN

SEQ ID NO: 81674 - protein, 339 aa, unidentified
MEHVAIDLGGRESQVCVRQADGEILEEKRWRTADLGAYLKTRPPSRVIVETCAEAFRVADIAKELGHEARVVPATLVRALGVGERRTKTDKRDARKLSEMSCRMEVPSVHVASHLARELKTRLGMRQAHVAARTMFINTVRGWLRSQAISIPKSADAFAQRVAETMKDTVLPSHVLEQLKMVDVLSESVHRLDKELAAMAKAHPICPRLMTVPGVGPVTALAFVAVVDDVTRFKNAHELEAYLGLTPGESSSSNRVQRTSITKAGNAMVRWCLVQGAWAAKRSHARRPLAMVEWSLEIEKRRGKRVAVIALARKMAGILFALWRDNTTYVAKLSARAAT

SEQ ID NO: 81675 - protein, 322 aa, unidentified
MQDAQTRSNVFVGIDVAKDSFDVAVLPGEQSASFSYDDAGLEQLLQWLRPHGICLIVLEATGGLERRIAGELIDAGHQVAIVNPRQVRDFARGTGKLAKTDRIDAFVLARFAQQVQPRITEKASEKQVELAALVTRRRQLQSLAVAESNRRETARSSSARKSVEKHWEWLRKEVARIDAEIARLIAADETWRGQAERLKSVPGVGPATSAMLVAELPELGRLNRREISALVGLAPYNHDSGKLRGKRSIWGGRISVRSALYMAALTARRCNPIIRAFADRLQQAGKPFKVILTACMRKLLIILNALAKKHQAWSPASLHSPS

SEQ ID NO: 81676 - protein, 380 aa, unidentified
MNAAGIDVSSRKSTVAVLRPFGEVVRVPFEVSHSAEGLASLVQQLKAVEGETRVVMEHTGRYYEAVANVLHEAGFFVSAVNPLLIKEYGGNSLRRVKTDKADAVKIARYALDNWADLRDYTPMDRIRYDLKTLNRQFHLASKQKTATANNLIALLEQSFPGVRKCFDSPVRSDGTQKWVDFAHDFWHADCVRKHSLATFMERYRKWCKRHGYNFKQSTAQKVYDLAKSVVVLVPKSDLTKVLVQEAANQFTTISKSVETYRAEMDRLASQLPEYPVVMEMYGVGDSLGPQLMAEIGDVRRFERKQSLVAFAGIDPMPNQSGEKNVRSNKASKRGSPYLRKALFNVMTCYRRNPGADRQGSRRCRTGRGRVHRPGRRPHSL

SEQ ID NO: 81677 - protein, 469 aa, unidentified
MVNRKKRKRKKTKYRKMDTSQFKQLNVNAAGIDIGAEHHYVAVPSGRDPEGRDVKHFSTFTVDLHKLADWLRQCKINTVAMESTGVYWIPIFEILDSQGFDVRLVNPRNIKNAPGRKTDVLDCQWIQQLHTFGLLQSSFRPENKICELRAYLRQRAMLVSYASHHIQHMQKALEQMNIKLNQVISTVTGVTGMKIIRAIISGERNPVVLASMRDKRCNNSKDVIAKALEGNWRSEHIFSLQQAVELYDFYKNQIVECESRIQRHLESFDDQSNGIPLEKPSRNSRKSAQKLNFDARRYLYQMTGVNVTRIEGIEAPIALNIIGEIGIDMSHWPNEKHFSSWLGLCPGSKISGGKVLSSKTKPSANRAAHAFRLAAFSLQRSKSAIGAFLRRKKAQIGAPKAITATAHKIARIFYNMLKNGTEYIDLGQEYYEQRYQDRVITNLKRKAKLFGFVLVNTEENTQLTKLPVS

SEQ ID NO: 81678 - protein, 388 aa, unidentified
MSMVVIGMDPHKRSATIEVMASDETVLGRGRYGTHASGYRAMVRAVRHWPERTWAIEGCQGIGPHIALRLVADGEQVVDVPPKLSAQTRVFATGQGRKTDATDAHCVALAATRMAGLRPVADDQQLAVLRILADRRRSLGEDHTRMISQLHRLLLALIPGGAKKDLSAAQAKALLATVRPRDAAGKACRRVAAELISDLERIHQRKKEADKELRDLLKATGTTLTSLNGIGPSGAARLLIEAADITRFPSKAHFASWNGTAPIDASSGDQVRHRLSRAGNRQINRVLHIMAVVQLRHRSSEGRAYFDRKVAAGKTPMEAMRCLKRRLSDIVYHQMILDARAPETGPGGHVGAATGSSAAGSHPAAGTSEKSLPGPATSQPTTAPHSTP

SEQ ID NO: 81679 - protein, 404 aa, unidentified
MYYVGIDWADEEHYAYITDDSGQKLDSFPMKHSEKGMNKLQSRIHKFSRKLDNVLFSIETDKGLVTSTIMDWGYTVYPINPKSVDRYRDRYKSSGVKSDEFDACVLANILRTDRSRFHPILPDSELARELKVLTRDRDKLVGDRTRLTNRLTALLKAYYPAALELFSGVAQPITLSFLSKYPTYNDAKKLSFAEFEQFLSENHYPYPKRATGIYEELQQPHLECEDMLVRTKSRLMLTTVLQLQILMDEIKSYEKEIENLLKSHPDSDIFLSLPGSGDILSARFIAEFGDNRDRYQKAKDVQAESGSAPITIQSGKKKYVRFRKSCKKPFRKTIHSFAFCSINNCTWAREYYDQQIATGKTHNQAVRSLSNKWMKIIFTLWKRDETYDEDYHLRMKAKHAVVTA

SEQ ID NO: 81680 - protein, 343 aa, unidentified
MKLSRVGVDLAKNVYQLHGVDRHGKTVWKRRLRRGQWLQALLDKTDPGCEIGMEACTGAHHWARELQSRGYTVRLIAPQFVKPYVKSNKNDANDAEAICEAMSRPHMRFVTVKSVEQQDIQATHRVRTELKDQRNAKANQIRGLVAEYGLVAPQTLLALRRAIPCWLEDADNGLTDYFRSLLHGLWSDLVALDDRMTELDKQIKTLADSNEVAQRLQQLRGVGPLVATALIATVGTGEQYCKGKQMAAALGLTPRQCSSGDKQRLMGISKRGDVYLRTMLIHGARAVVSQAKHREDRLSQWVTSISKRSHPNVAAVALANKTARMAWAMLRNDANYDPDFVIS

SEQ ID NO: 81681 - protein, 361 aa, unidentified
MDGSKERPKVTAGLDLGDRYSYLCLIDTQSGEVVEEGRLRTTPEALRRRFVSEPSLRIAMETGTHSPWVSRLLEECGHEVLVANARKLRLIYANKRKTDEIDAENLARLARLDPKLLYPVRHRGEDSQAHLALIRSRQALIGCRTQLVNHVRGAVKSFGARLPKCPARSFHIHNKAPEHIPEALRSALEPVLEQIASLTERIREYDRLLVAISKDHYPETELLCQVEGIGPLTALTFVLTLEHPYRFERSRSVGAYLGLVPATERSGDRDPQRRISKEGDEMLRKLLVGSAHYVLGPFGSDSDLRRHGQKIAARGGKNSKKRAAVAVARKLSVLLHRLWVSGEVYEPLYNANRRQGQEEAA

SEQ ID NO: 81682 - protein, 342 aa, unidentified
MKIVMLGIDLGKNVCSLAGLDETGAVVLRRRMKRGSVLLFTAQLERCTVAMEACCGAHHLGRQLIAQGHVVRLMSPAYVQPYVKAQKNDERNAEAIAEAATRPTMRYVEIKSEAQLEVQSLHRVRGRLVAERTALINQLRALMLERGIAVAQGRSKLERYLPEILADERSGLGPRLRRLIEDMREEWRSIDQRINGYDNELAERVRNEDAATRLIRIPGIGVLTATALVAAVGNAQTFSCGRDLAAWLGLVPRQATTGGKPRLLHISKRGNGYLRMLLIHGARTALPGLAKKDTPLGRWVKALLARAHRNVVTVALANKLARIAWAVLARDHQYVTVQAIGK

SEQ ID NO: 81683 - protein, 327 aa, unidentified
MDQRILGIDVSKDTLDVVLWDERGWRHQVFANTPEGFVRLSHWLTKQEAGFVHACLEATGQYGEGVAEYLYAAGHAVSVVNPFRIKRYGESKLHRNKTDKADASLIAEFCLKENPPLWQPLPEHVKQLRQMVRRLDDLQRNYQQESNRLQSGVNNEWVVADLKDHLQELHMRIQALKAAIQQFVTETPELKHQVDLLVSIPGIGKLTAARLLAEIGDIHSFEDAPQLAAYAGLNPKGARSGSSVKKKTRISKEGRAFLRYILYMPALVARRCNPIIQAFCARLAQKKLPEMAIIAAVMRKLLHLVFGVLKNQQAFDPFFLQRKVFAS

SEQ ID NO: 81684 - protein, 350 aa, unidentified
MEYIAFDAHKRYTLASVVRPDGQLVREQRIAHERGARQEFLGRCERGSPVAVETIGNWYWIVDEIEAAGCLPRLVHARKAKLMMGEINKTDTLDVRGLNRLQQAGTLPTVWIPSGELRDQRDLPRTRMVLVRQRTQLKNRVHATLAKYALHDVEVSDLFGVRGRELLRQRLSLLPPHTAYATEQLLEQIEGLDRRVHGFEQRIQAVFKPTPVIQRMLTLPGVGLTLAVVIALEVGDVTRFATAEKLASYAGTTPRVHASGGKTRFGPSRPDVNRYLKWAFVEAANAICLTRGRRSHRHVSRLYERVARRKGHGKAIGAVARHLAEATYWMLSKEESYREPTASRRFVHGG

SEQ ID NO: 81685 - protein, 339 aa, unidentified
MAIVTTIGLDLAKNVFQVHGVDNQGNDVLKKKVSRNKVLDFFVNLPPCIVGLEACGGAHYWANEISKFGHNVRQMPPQYVKPYVKTNKNDANDAEAICEAVSRPNMRFVHTKNVEQLDIQAVHRIRSRLVGNRTALANQVRGLLLEVGIALPQGILHLRKQLPRICENLDERLTYLEIDYLSDIYTELVELDEKINKYESIITAFCHQSELCKRIIKIPGVGPLTATAIVAAVGDARNFKNGREFSASLGLVPRQHSSGGKTQLQGISKRGDTYLRMLLIHGARTVVRHSITKQDVNSQWIQGVVARRGIHRAIAAQANKTARKVWAVLAKNEEYRMAA

SEQ ID NO: 81686 - protein, 334 aa, unidentified
MPYIGIDLHKHYTHFAVLNQNGDVVKRARIPSQREAVIKFFSELEGPKVAALEATRNWYWFYDLVEGMVDSLKLVAPHKMRVIAESTVKTDKIDARVIAELLRVNYLPTCYVPSPAVRQLRELLRHRASLVDMRTKVKNRIHSLVDKLGVRHPFDNLFTGRGLKFLQSLQLGGMYQLELQECLELLEFLNEREKRSSKLIRQIAGGSPDCQLLMTIPGIGYHNALLIMAEMGEVSRFANAEKYASYCGLVPTVRISEKSRRYGHLRPQGNPWLRWAYVEAAHIARKKSVRLAGLYARVARKKGAQKAIGAVARELAVISYTMLKTRTEFKDRLW

SEQ ID NO: 81687 - protein, 325 aa, unidentified
MQTQTNYTGVDISKPFFDVAFLQAGRYTYNKFSNNIEGFKALLKVLPVGSWVVMEASGPYYLQLACFLRDAGIPVSVINPLVIRRFSQMRMSRAKTDKKDAKMIAEYGKLETPVLWQKPEQHTITLQQTEALLARLQTEHTALSNQLESFNSSGMLTKHLRKEISKELLHKDRLIKKLTKQMEQIAQEHYSNMLADLESIPGMGKKTAMMLTVLSGGFSRFDDYRKLSSYIGICPRIFESGTSVKGKARICKMGMSRIRAVLYVCSWSASKCNKACRELYERLLAKGKAKKLALIAVANKLLKQAFTIAKQQTKYNENYSNITCF

SEQ ID NO: 81688 - protein, 323 aa, unidentified
MQGKDTPKAKADTAVYAGIDVCKAFLDVYLHPLGHAFRVPNSRQGLTALKKTLAGHKIALVVIEATGKFHREAHRNLHAGGYPVAVINPLRSRTFASAMGQLAKTDKIDARILALFGESLCPAATPPAPALVAELQELVLARQAAVADRTDIGHRIGACECRFLSARLKRFKQAAEELVESIEARIAKLIASDAALLRRFEILKSMPSCGDVLASTLAACLTELGTLPDKKIVMLAGLAPVNHDSGDMRGQRHIRGGRAHVRSPLFLAAITAARSHPLLKTFYRRLRDAGKPAKVALVAVARKLLIIANTLVSENRIWNENHA

SEQ ID NO: 81689 - protein, 315 aa, unidentified
MTRNHIGVDLAKDFLEVCDPLRGRSRVANRPKAVARWLAGLGAADFVVYEATSGCDRPLRVALAEAGRAGARINPLHAWHYARSRNRAKTDRLDAALLADYGRERQPAPDPALDPAREALRALVGRRDQLRRMEVQEKNRLSGCLGEGAPALVVRDLRAGLARLACSLAKIEAAIRDEVAGDATLARDARLLRSIPDIGEVTAVTLLAWLAELGHTDRRGAASLAGLAPRARDSGKSRGKRFLGDGRRQVRRALYMAALSELRHPGFLADFVRRMKDAGKPGKVILMAVARRLLVVANAVLRTGEPFRTPIPMAA

SEQ ID NO: 81690 - protein, 309 aa, unidentified
MKQSVVYIGVDVAKEYLDVAWQKQSRRFGNNKSGHAALVSWIKQSACAVQLICEASGGYERGLLESLERNAVKVTLVQANRVRQYARAAGILAKTDKVDARVLAAFGAAMQPKPTVPASAKQKRLREYDAQRRHLSRILLAEQNRLAQLGCVQLRSLSRSLISKIKKQIATLDTSISDLIAQDQELRLKAQKLTSVTGVGARTAALVLAQVPELGQLNRRQTAALGGLAPFNRDSGTLRGKRAIFGGRRALRSGLYMAALSAARRNHILSQFYQRLRAKGKPHKLALTAVMRKLLIVLNQILKPIPSPA

SEQ ID NO: 81691 - protein, 337 aa, unidentified
MMYSGIDLHSNNSVVAVIDDGDRVVAQKRLPNDIGKITGFLARWQDELAGVVVESTYNWYWLVDGLQDAGLHVHLANTAAIKQYEGLKHSGDGTDAQHLAHLLRLGILPTGTILPREHRVVRDLARKRMQLVQSCTTHVLAVENIMARQFGGRMTSNQIKRLTDDTIDSLPLAADVGLAIKANVAVIATLQSQIEVLEKRLQERVRPRPQYALLTTVPGIGQTLATVIVLETGPIDRFAEVGNFASYARCVDSVHTSNRKKKGEGNVKNGNKYLAWAFVEAANFARRFCPEAKRFHERKKAKTNNIVATKALAHKLARACYHILKEGKPFDVTRCFA

SEQ ID NO: 81692 - protein, 385 aa, unidentified
MTASDHATKPFKNILRERGQWYGPRPRGAVESRTSTAMKEDIMQVVRIGLDLAKYVFEVHGVDTHGKVIVRKRLRRDAVARFFANLPACLVGMEASNGAHYWARVLTELGHQVRLISPQFVTPYVKSNKNDRNDAEAICEAVGRPSMRFVPRKSTDQLAVQAVHRIRQRLVADRVRLVNQTRGLLSEHGIVIARDIAQLRRGLAVIVGNIDDSLSEMVRALMRELQTELAELDARIAAYDRRIREIFRASEPCQRLGKIEGIGPVTATALIAAVGDRSCFKNGRQFAAWLGLVPKQRSSGGRARLLGISKRGDRYLRTLMIHGARAALSRAGGKQDPRSLWLGKMRQRRHPNVAAVALANKNARIVWAMLTGDTAYEPALSVKAA

SEQ ID NO: 81693 - protein, 344 aa, unidentified
MTTEASRKLYAGLDLHANNTFCAVIDQDGQSVFQRRLRNELPTISQTLQPYQPQLHAVAVESTFNWYWLVDGLQAAGFPVQLANPTKIQQYSGLKRTGDASDAHWLAEMLRLGILPTGYIYPKAERAVRDMARRRMLVVQQATRTLLSLQSMVTRHTGQMVPGRGLEDWTLVELRAAFPEAPSQQTAAALLELLHEQRRIEQALVKSVLAQVKLTGAWQRLLTLPGVGNILGATIMLETGPISRFASAGDYASYCRAVDSRRDSNGTKKGENNRKNGNKYLAWAYVEAANYAARYNARAQRWLARKTARTLRAVAVKALGCKLAKAAYYVLRDDVEFIEQRMFG

SEQ ID NO: 81694 - protein, 356 aa, unidentified
MKKDSTMTVGLDLGDRKSQVIVLDEGGEVVEESTVPTTRAGIGRKFTSMAPCRMAIEVGTHARWVAQLLRELEHEVVVANPRKLRMIYQNESKSDRMDALMLARVARLDPALLHGVVQRSQRSQDQLAVVKARAVLVGTRTKLVNHVRGVCKACGTRLSGCSSATMSKKAGEQIPEALRSALDPLLQILAEVTERIREYDRAIKQMAQKEVPEAGKLTQIPGVGALTALAFVLTLDEEGRFQKSRTVGAYLGLRPRRDQSGATDKQLPVTKAGDVYLRSLLVNCAHHILGPFGTDCAIRRWGLNLAERGGKNAKKRAVVATARKLAVVMHRMWVTGEVFIPFPEPARRPHSLQVAG

SEQ ID NO: 81695 - protein, 360 aa, unidentified
MAKARTLVGLDVHATKIVAAVLDAETGELEFFMLGGDVGQAAGLCAGLPRPVRAAYEAGPTGYTLARELARRGVGCVVAAPSKIPRAAGDRVKTDRRDAEHLVRLLLAGKLHAVRVPGAEEEALRDLVRARDAVRGDLMRCRHRLSKLLLRYGHRFDDGPTWNQRHRDWLAAIELPHAAAQATLADAIGATDALVHRRDQLERGIVALLPDSAWPTQVGRLRCLRGVDTLTAAGLCAEIGDFERFARAEQLMSYVGLVPSESTTGQQRRLGAITKTGSGHARRLLVEAAWHYRKHPRTGTTLIQRQDGQPAEAIAVAWSAQQRLHRTWTRLEARAKRRTLIAVAAARELAGFCWAVTRIE

SEQ ID NO: 81696 - protein, 453 aa, unidentified
MRVMYERCCGLDIHKASITACALITEKGKTQEETRRFGTMTDDLRALAGWLQQKEIRQVAMESTGVYWKPVWNILEPAGLELLLANAQEVKVVPGRKTDQKDSQWIADLHKHGLLRNSFVPPRAIRDLRDLTRTRAMLTQEHSSICNRIQKVLEDANIKLGSVASDVFGVSGRAILRALMNEENDAEALANLSKGTLRKKIPQLRRALEGQVTPHHRLLLTEHWDRMEFLERQIADFEIQIADRMKPTPEEMALMMQDATEDAPAPLSPREEAIQLWMAIPGVGWTAACSMVAELGINMDQFPSAAHVASWAALCPGNNESAGKRLSGKTRKGNVWLRRTMCEVAWAASHTKDTYFAAQFRRIASRRGNKRALMAVAHSILVTAYHMLKHKRHYTELGADFFDVINRDKVRDRLVQRLSKLGFDVTLKSKGTLESVDHLADNSHPVVPASPKS

SEQ ID NO: 81697 - protein, 356 aa, unidentified
MSRDIKYIGMDVHKEAIVIAVLNGSGKLVMETIVETKASSILQFIHGLRGELHVTWEEGTWAAWLYDLLQPQVEQVLVCNPRRNALLKEGSKSDQVDAQKLADLLRTGMLRPVYHGENGLRTLRELGRSYQTISKDLTRVMNRLKALYRGWGIPCAGTQVYGPRYREEWLTKIPQAGVRRRAELLYQQLDGLQGLRRHLRPEFLAESRKHKAAKLLRQIPCIGPIRAARLIALMQTPHRFRSKRQLWTYSGLGIETHDSAQFRFVSGQLQRSRKPQQIRGLNRNHNHEMKEIFKSAATRASCGRGPFHDFYAGLLAKGMKPEMARLTLARKIAAITLTLWKKEERFDAEQLKPQAA

SEQ ID NO: 81698 - protein, 343 aa, unidentified
MQIHSVGIDLGKTTFHLVALGAAGKVIVRKKFNQKQLLAYTANVPASLIGLEACSGAHFLGRALRQRGHDVRLIPAQFVKPFVKSNKNDFVDAEAIAEAVERKNMRFVPIKTDDQLDLQAIHRVRDRLISRRTAVINQVRAFLLERGLVFAKTPAKLRAALPDILENADLDLTPQMRSLIDLLSKEWKTVEDQIEGLSLELERISAADPGCTRIRQIPGIGPIVATAIVATIGNGAAFRKGRDFAAWLGVVPRQHSTGGKARLLGISKRGNVYLRKILIHGARAAVLRIKRDRAPIGAWLDALDARAPKNVVVVAMANKLARIAWAVLSSGEDYRPMGNTVAA

SEQ ID NO: 81699 - protein, 604 aa, unidentified
MLPQHAPASPAPTCAEPVPTRIGVGIDTARYGHYAAFLRPDLQPAAAELLFAESGDGYGELRQRLERIVQRHGPVHFVVRLDAAGQYADNLLHFLYSLRTPDAPGADPLRLAAFTISCGDPQRNKNYRAALFGAKKSDPVEARAAARYALSERPAHTPPLSTELRLLRQVAGRLQATVRQRTRAVNQFHHLLALAFPELALLVKDVSIGWVLELVHRYPTATLLAAAAPADLAAIAYLPDRHVEPLLTRARASVASTAGPTMEELLRDQVRQLRDVHARQKRLENTMIQAYRRLPTPNYSHTIPGIGEVTAAVLTAFILDIDRFETVNKLTAYFGVIPYEMSSGVDRDGQARGPRRYVMSNRGNDLVRRYLWMAALSAVRFNPAARALYARVVAKHPTRKAVAVGHVMRKLLHLVFALWKSGKPFDPNHYAWEPPAAAAAPSDKALSPEADSDDALSANEQAAGHKPDTKPVEEVVTAACVPTVAQSETGAESLAIDFAHLKQQLPLARVLEHLGLSARLARGDGAQRRCACPIHRGDGRGRTFSVNLDANVFHCFAKECGAKGDVIDLWSALHHLTLREAAVDLVQTFQLEPAPTPGTEKRNG

SEQ ID NO: 81700 - protein, 354 aa, unidentified
MEKQKKLDKNETVFIGIDLHKRTWHVTIRTFDIELFSGSIEGVWDKLESLLKRYSDNEMIAVYEAGYFGFWLHDKLTNYGVNCKITPPSLIPIEYGNKVKTDRRDSRKLAHFLAKGLLKNIYIPTLQERHHRQVTRRRRQLINDRVRVQNRIKAELQLNGITLPEPTGKWTKTYFSNLSNVKFSDRWMHESFKRFLEQYDFLCDQITRQTQLLKELSEKRPYKKRVTILRSIPGVGIIAAMEILLELQDMKRFRRADQLAAYVGLTPSQYSSADKIRMGRITCIGKNSVRAILVQAAWCLIRKDGVMRERYDKIKARAGGKRAIVAIARQLLIRMRRILLDGTLYVPGVIASTG

SEQ ID NO: 81701 - protein, 464 aa, unidentified
MTAGKQLWRNRNEKKEWARRLQSEDPGLEVVHPYAAGIDVGNSTHYVAVRPDRDPEPVRRFECFTADLHRLADWLQSCGVKTVAMQSTGVYWIPLYEILEGHGLEVYLVNARHTKNLPGRKSDVQESQWLLKLHTYGLLNNSFQPVSEIRVLRTYWRQRGEHVRGAATCIQRMQKALTQMNVQLANVLSDISGLTGQAIIRAIVAGERNPLKLAMLSDPRVHASHEELAKSLEGNWRPELLFVLHQEVDMYDTYQKRIAECDQRLQKHLASFTRPLPIQPPTQKLKTKKPAAKNAPRFDLSSELQRVTGVDLTRIDGIDVMVAQTLLSEVGLDMSRWITESHFASWLGLCPDNRISGDKVLSRGTRRVVNRAATALRQAANTLMRSRSYLGAQYRRLRTKLGAPKAITAMAHRLARLVYRMLKYGQTYVDKGTEYYEEKFRQQQIQLLRKRAAKLGLQVAEIHA

SEQ ID NO: 81702 - protein, 405 aa, unidentified
MEIIVEKGCGLDVHKGTVVACIMGVGIKKEIRTYTTMTNDLLRLKEWLQNSGITHVAMESTGVYWKPVFNILEDHFEVLLVNARHVKNVPGRKTDVQDSEWLCRLLRSGLVSGSFIPPRDIRELRDLTRHKRKLIQAIVAEKQRVEKVLEDANIKLSSIASDTFGASGKRIIEELIKGKLRAEEMVELSKGRLRQKREGLKEALVGEVREHHKFMIKVSLKHIRAMEKILSDIERKIQEKIDCHYREEYALLQTIPGVKGEASTLIAEMGVDMGRFPSEDHLSSWAGMSPGNNESGGKKKPGSTTYGNKCLKTMLTEFAWVASKTKGTYLRSKYHSLVGRKGKKKALVALGHKILIMCYHILKHRCAYKELGVDYLDHRRKDKIARSYIKRLHHLGYEVILQEAA

SEQ ID NO: 81703 - protein, 284 aa, unidentified
MNYSHFVGLDVGKKTFDASLMSADEKELSHKSFDNTPTGIQSLLDWIAGYHLSLSKLLFCAENMGSYVTELSVSSVSMGFSLALVCPLTIKKSIGLQRGKNDRIDAKRIANYAVLHYRKLELYKLPDKDLVRLRGWIIIRDNLVKQKVSSIKLLETFSWMAKLADVTESISFLEEQLKSIKERILEVEEDMEQLIAASTSLYTNYLLLRSIKGIGIINAIVLLCVTDNFQRFDNPRKFACYCGGAPFEHTSGISIWGKTQTSSLALYEGQKNGIIRVFCCLFLL

SEQ ID NO: 81704 - protein, 326 aa, unidentified
MSKDRDYIGIDISMNIFDVCYSDGTHNQFENTRKGFSKFKKTLNENSFCVMEQTGKYHWALATYLFSNEKQVAVVNAMIIKRFIQMRLRTTKTDKADAKMIQLYGVWDKPKEWTPPKQYIIQCRELRNLVALLLKHNVALKNQLHSLRKSGIDSSFSIKVIEKQLLVIKNEVKKLELQMQKIIAKNEEDLLNLLFTIPGMGKKTAMALIIITNGLHDFENSKQLSSYLGLSPTIRVSGSSVRGQSRISKTGNKDVRNLLFLCSFTAYKYNQPCAQLFERIVNKGKSKKLALIAVCNKLLKQALAISKSRIPFDENYRSKNPILNVK

SEQ ID NO: 81705 - protein, 347 aa, unidentified
MNITRIGLDLAKNVLQVHGVDERGKALLRKRLKRGEVVAFFARLSPCLIGMEACGSAHHWARELATLGHTVRLMAPQFVKPYVKANKSDARDAEAICEAVGRPSMRFVPVKTLEQQSVLSLHRARQGFVAARTAQANQIRGLLSEFGIVIAKGIRQIEGRVPEILEEAENGLCGMNRALFQRLFEHFRQLDRQVKQLEEQIHAWHREQVDSRRLAGIPGIGPLTASALTAAIGNAREFANARQLAAWLGLVPRQASSGGKDRLLGISKRGDVYLRTLLIHGARSVLRRTRACPDPAQGWLAQLVDRRNPNVAAVALANKNARIVWALLAHGREYQPGYVGAPLPTAA

SEQ ID NO: 81706 - protein, 339 aa, unidentified
MKVSTLGIDLAKNVFQLHGVGCNGQTVLKKKLTRDKFLPFLMQLEPCLIGMEACASSHHFARVLRQYGHEVKLIPPQYVKPYVKTNKTDAADAEAICEAVARPNMRFVQIKTAEQQAILVLHTERNILIRERTACANSMRAILAEFGIIMPRTLSQLYKKIPEILEEYDNELSPFVRCSVARQLEHLQGVEDQITLIEQELSRWAKTQPACQRVMKVPGVGLMTATYLVASVGNGQQFHSAKQFAAWLGLVPREFSSGGKQRLGRISKRGDRYFRYLLVHGARAVAAVIERHKDNMPWLYGLLNKKAYNVAVVAQANKTARILWSMLVHHTEYRTLSAV

SEQ ID NO: 81707 - protein, 336 aa, unidentified
METKFVHFAGVDVSKQKIDVCVIVNNQRSEIVHNQFEQSKKGFASLKKWLVQVTARQTGKLLICVENTGLYDDALMYYLSDHDLAVSLENAANIKRSVRDHRGKTDKLDARNIALYALNHHDELRLWERPRKQVALLQQMLSERSRLVNALKMLKQAHTEQQVFSWSGRVQSKSYQSGIKGLQKDIEQVEKDVWELVKSDKELLQMFMLIVSIPAVGKITAYHFICYTNEFKQVKSGKQLASYCGVVPFERSSGSSVKGKPRLPHQANKILKKLLHLCAITAIKMKGAFAAYYRRKIEEGKNGLIAINGIRNKLVLTIAAVIRNNEPYNKNYIYKP

SEQ ID NO: 81708 - protein, 401 aa, unidentified
MQQDQQHDFVDVFVGVDVGKGQHHAVALDRNGKRLYNKAMPNDEAKLRALISELRAHGRLLFVVDQPATIGALPVAIARDEGVMVAYLPGLAMRRIADLHAGEAKTDARDAAIIAEAARSMPHTLRSLRLADEPLAELTMLCGFDDDLAAQITQTSNRIRGLLTQIHPALERVLGPRLDHPAVLDLLERYPSPATLAAASEKTLANRLTKLAPRMGKNLAAEIVQALNEQAVIVPGTQAATIVMPRLAQQLAALRKQRDEVASEVERLVLAHPLWPVLTSMPGVGVRTAARLLTEVAHKAFASAAHLAAYAGLAPVTRRSGSSIRGEHPSRRGNKVLKRALFLSAFAALRDPISRAYYTRKVEQGKRHNQALIALARRRCDVLFAMLRDGTIYQPKAADNA

SEQ ID NO: 81709 - protein, 350 aa, unidentified
MIIIGCDYHPAFQQIALVDAETGDCVERRLQHREEAEKFYRDLAAQGMKVRVGMEASGHARWFERLLAELQFELWIGDAAEIRTKRVRKQKTDRQDAQLILRLLLEDRFPRIWVPSWENRDLRQLLWHRHRLVQARTRIMNQLQAVALNEGLCCKKRLWREAGRERLEAFWLAPWASRRRRDLLELLDRLTPTIAELTQAIEQEVEKCPEAQRLRTHPGVGSLTALAFVLIIGRAERFHCGKQIASYLGLVPLEESSGDRRRLGHITKQGNSLLRFLLVEAAQVTVRSLPEWRSKYFHLAMRRGRKIAKVAMARKLAVQMYWMLRKEWDYEQVNKFGSHAGQPGNRHGVQ

SEQ ID NO: 81710 - protein, 341 aa, unidentified
MAVAGGFDLHRGQLTFDYVDTGTGETCRGRICPADRESLHGWLRRFDGVPDVEFAVEGCTGWRYVVEELQRAGITAHLAEPAETAGLRGSKRRAKTDWADARHLRDLLLDGRIPESWIAPGHVLEARALVRLYKDLLEERTSWQQRVHATLFHQGIPVVPKLGTADGQQRLAAAGLSAAGRLAVQAGLRQIERLNQEMVPLRRELARLSLRQPGCRALRKAHYGIGGLLSVAVWAELGDCRRFSSSDDAVRHTGLDITVYDPDGRRARGHIARQGPPVLRWALYEAALYASRPASPDYACFCGVRDRIDGQRALLPVARKLARRCYHTLRDLGEDALVPAA

SEQ ID NO: 81711 - protein, 395 aa, unidentified
MFIVGIDIAKRSHEAIIIAEDGQVVRKAFSFRNNCTGYNLLLEQVRRLTLVKSQIVFAMESTAHYWLALYARLLKDGYTVMVLNPIQSHSLRELYIRKAKTDARDSLIIADLVRFGRCKASNVPQDKILALRELCRSRAYLVDMAADLKRKLIALLDRIFPEYESLFECIRDRASIAVLSKYSTPQKVKNANLRKLTDILMESSNGHFGEWKAHQLKEAACSSFGIDDSDGVYSMLLGMFLEQILSLTAQADSLEKQISVFFQEFNNPLTSIPGVGTVLAATILSEIGDITRFSSADKLLAYAGLDPSVKQSGEFKSNQNRMSKRGSPYLRRAIWLASTVAVHRDPMFQTYYEKKISEGLHYMNVIGHVSRKMTAVIFAVLRDGQPYQPILQSAG

SEQ ID NO: 81712 - protein, 351 aa, unidentified
MKSINKQIQSEELFAGIDLHKHRWHVTIRTADVEIFSNSIAGRWQELKKVLNRYKGCRIHAVYEAGFLGFWLFDHLTQYGVDCIVTPPSLIPQEHGNRVKTDRLDSRKLARLLAKGLLKGIWVPSAKERFHRQVIRRRRQLVGDRVRTQNRIKSELCFYGIDLPTPRGPWTQVYFANLQRIKFNNRWMQQSFNRLLEQYEFLSAQIDKQTQLLKQLSQLALYRDRVKILCSIPGIGLLTAMEILLELQDFSRFRRAEQLAAYVGLTPSQYSSADKIRMGRITGAGKNTVRSALVESCWQLIRKDKAMRKKYEQIKARAGGKRAIVAISRKLILCIRRLLIDNRPYEYEPIS

SEQ ID NO: 81713 - protein, 411 aa, unidentified
MRIVHPRCCALDVHKKSITACVLVWDGKQLIEERKKEFGTTKRQLGRLRFWLMACKVTEVAMESAGVYWKPVWHVLEKQNQFRLKLVNAQHYHGVDGQKSDQIDASWLAELLQCGLLKGSFVPEQWQRELRDLTRLRVALLQDQNRIQNRIEKLLEDANIKLGSVVSNTLGTSGRKILKALIAGDKDPGWMADYAQGRLRGKRPELTEALFGFVTDHHRTLLDMLLRQIESLDRDIASLEAEIRRRLDPHQDLVERLAEIPGFGEITAWTVIAELGLDMNVFGTPERAASWSGLCPGNRKSAGKRGHGRTRKGNRWIRRGLTQSALAASHDQDSYLRSFYWRISSKRGPKKALVATAHKQLTIAFFIIRDGVRHNDLGPDHYDRRQPERTQRYLIKRLEGLGLKVTVEPAA

SEQ ID NO: 81714 - protein, 412 aa, unidentified
MEVLYPHCAGLDVHKDTVVVCVRHMVNGTVSREVRTFKTTTKELLALSEWLATEGCTHIAMEATGVYWKPVWHILNDGDFALVLANAAHVKNVPGRKTDVNDATWLADLLAHGLIRGSFVPDQQTQEMRDLLRTRKQLVREASRHIQRLQKTLEDANIKLDSVISDVMGLSGRRMIEALIAGQSDPEELAQLAHRRIKASPEELREALRGRVTRHHRFLLSLHLQQIDAVDAAIGAIDQEVDAQIEPFRTTVHLLTTIPGVDELSACVILAEIGRDMSRFPTAGHLISWAGLCPRNDESAGKRRSTRMRKGAAWLKTTLVQCAAAAARKKASYLQALFHRLRARRGAQKALGGVAASILTAAYEMLKSGALYEDLGCDHFEKRGKARQINRLVSRLQNLGFAVQITPVPAAA

SEQ ID NO: 81715 - protein, 365 aa, unidentified
MKKIANVGVDYHLNSLSIAVLPEGEKDFYQTIHLKNDDRMIAKYLRKLSKTFELRICYEACSSGYDFQRKLSSWGYHCDVIAPSLVPKKPGDRRKNDFRDARNLAEHYANGMLTVVHPPTEEEESLRSLIRCRLEFKKDARRTKHRINSFLLTQGLRWKKSTWTKQHRWWLSKLEMPYEYLQKVLDEHLGHLAYLESRIQHLDEQIEEIACSEIYAPSVKKLRAFRGIGTLTAMVLIAEITDFRRFPSPKALMAFLGLIPSEKSSGDKRKDGSITKAGNIRCRTSIVESVQHYVKKPHISAQMKEKLAEVDGKSANIALHCMYRLHKRFWALTMKGKIRPVAITAIAREFVGFIWAMMRPELVEA

SEQ ID NO: 81716 - protein, 387 aa, unidentified
MFYVGIDIAKNTHWASIMSSDGEIVKEPFSFSNDNSGFQKFISNLESLDKTKILIGLESTAHYGENIISYLFNLNYKIGLINPIQTANLRKSNIRKTKNDKVDTYIIIKALTLGNYSLITSRDINNLKLKGLCRSRRNLVTMRSKSKIQLVSYLDQIFPELAQFFKGNIHLNVSYQLLKEYSSPKQISSLHLTKLSNILHDNSHGRYTKQDAIRLRELAKSSVGIDNPSLSLQIKHAILQIELYNEQIAEIEALYKSILDEMDSPILTIPGMSYNQAAVIVGCIGDINRFTHSCQLLAYAGLDPSVVQSGNFQAKSTRMSKRGSGMLRYSLVYTAHNVVLNNKTFKEYYELKRSQGKSHYCALGHVAHKLVRVIFKMLKDNIAFNLD

SEQ ID NO: 81717 - protein, 404 aa, unidentified
MPTYYVGIDVSKFKHTCCIIDKNGEVIKKSFDFSNSKEGFDSLIDIFKSIDQSESLFQIVMEATGHYHECLFRYLVANNYLVQIKNPVVIARFKQSEYLDKAKTDNLDALILAQYASKHKFSPSMLKSYNIERIRRISRAKYFLYQDKERTINHLHRYLDESFPELIPFLRKRGDIKRYQGRNFFDSKTTLWLLENFPSAKKFSNARSETAEKLRRMSKGAFSLIKFNELRNLSKNSIGVSFIETETIIVQLVQELRNIQERNEKLDQLLEPLIDETASNLLTVPGIGYRLAGLLISEIGDASEFPSADKIIKFAGLDVKVYQSGTIEKHGAIRKRGSPLLRYALFQAAEKARIHCHEIAEFYSKKKSEGKHPICALTHTTRKILRIVWALLKTGQNYSQSISD

SEQ ID NO: 81718 - protein, 370 aa, unidentified
MTTQEKQHTLFVGVDVHKDTHTAVGLSPFGEKIFEMTIGNEAEGFISLIEKTKVESEKLGLIPSFGLEDVHSWGERLSSFLVEEGLLVRAVAPILVDHRRQKATHPEKNDSLDAAGVAEVMIQRIDTLPTYKLTEEAQKAKQIRELSLEREWLVKERARLKNQLHILLHRIHNTGYRTKFKDPFSKKALRYWMRGVPKNTDAILEQRMKRAVRRLFDLREEIQEIEKELDALMKNNGQTLSTASGCGTVIAAELIGEIGDVNRFHSPGALAKYAGCAPREHSSGKTIRWRKTRSGNRRLNRTFHRMALSQISRSGNDAARAYFKRKVSEGKTKAQALVCLRRQLVSVVWMMMKHKTEYRYPREKVVDFFS

SEQ ID NO: 81719 - protein, 320 aa, unidentified
MTISNSQVVVGVDVAKAEIVVYRADQQKTQVVTNERSALKQWLKKLPANSAIALEATNTYHLDATEMAHEMGHDVYVIDGSRLNRYRDGIGIRAKTDALDAVLLARYLSKESDRLRIWNPPPKAYTQLKSVLRRRAELVQHRVALKQSWKDEPLLKEALANYLANIERTEKDIQSLLRSIISEAGMDAQVKRCQAVEGVGVLTATAAVTAFMRGEFSDSDGYIAFLGMDPRVRQSGKKDQRRCLSKRGDSEFRRLFHNSAMAASRSATWKPYYQSYLARGLKGTEALVILARKLARVLFALMKNQSEYKPNSMLGGSPQT

SEQ ID NO: 81720 - protein, 343 aa, unidentified
MQTITTIGLDLAKSVFQVHGVDAGGQVIVRRQLKRRYVLTFFQKLSPCLVGIEACGSAHHWSRELQALGHTVRLMPPAYVKPYVKRQKNDATDAEAICEAVTRANMRFVPTKTPGQQSGLLLHRARHLFIRQQTSVINAIRAHLAEFGIVAPVGRHGVEELLNVVADPNDKRVPEIARACLSAFGAQLRRIKEQVLEFDRLIRAWHRSNELSMRLDEAPGVGPVLATALVAAVADPKSFRSGRNFSAWIGLVPKQHSSGGKNRLGNISKQGDRYLRGLFVAGALAVIRYAKIHGTTHRPWLTALLARRPTKVAAIALANKIARMVWAMMARGERYKEPFALAR

SEQ ID NO: 81721 - protein, 440 aa, unidentified
MSKVTVFETVNEQAAGIDVGAKEIFVSVDGAEAVSFETFTSGYLQCIEYLQQRTVKRVAMEATGVYWMCLYTMLEDQGIKVCLVNPKETKQVKGRKTDVKDCRWIQKLFAAGLLRESYIPEGKYMELRQLIRERLDIIEMGSTYVNKMQKCLELMNIKLKEVISQIHGSSGIKILKAIIKGNREPACLLGLCDPRIIKNKSVQVLKSLEGKYNDTYMFMLAQNMQMWELHEQQVIETDHQIQVLLGQLCRGKEPVEINSKPKRIRHHEPKIKNLPGMLVQLQGVNLSSISGLNDYTVLRLIGETGTDMSRFPSAKHFESWCGLAPKSHQSGKMKKRIKGSSCNKAGQIFKECAQGLLNSKYIAIGCFMRKLRAKKDSAIAIKAGARKLAGAYYNGLTKGLDYVEQGVKKYEEQIKQKEIETLKRLAKKHNLKIAENQAAA

SEQ ID NO: 81722 - protein, 397 aa, unidentified
MIAVGIDISKAKSTVAVIDSDGTVLASPFTMAHTQPEMEAFVSYLKGLGEPTTILMEYTGHYHYPVLKKLQDEGFPVCIVNPYQMKKYGDVEIHKAKTDKKDALRIAAYALEKSYKLVPYSSMEQKYEDLKFLSRQYSQRITYVAKLKVQLIALLDQTMPGITRTLPLNSRNPEKCALLLFIKRFKSFDEIQRIGKARFLASYDVLAKKTSERSASSKGLSIYELAVDSITTRGEDPYIWLSQNQCVDLLSATQNAADEIISQMRNIAETIPEYKVLRAMHGVGDRLGPIILAEIGDVHRFHSGKALNSYAGNDAPPYQSGQFESRNRHISKRGSSALRKACYEVMQALKLIKPQDDPVYLFMLKKEQEGKPFNVAKMAGVNKFLRIYYARAMELYK

SEQ ID NO: 81723 - protein, 335 aa, unidentified
MTLNCGIDLHSNNQVIVVIDDKDKRLLEQRVPNELGATLSALEPFRKDLLAVAVESTYNWYWLVDGLGDHGYSTRLVNTAAVQQYSGLKYAGDRHDAYWLAHLMRLGILPTGYICPLEIRDVRDLLRKRLGLVRERARNLTSVQNILARELGHRVATAQLRRILDTDEHFRPGVRTAIAANLAVIETLDTVITGIQAQVLEVIKSTSRHRQLKTICGVGDVLAPTIALETGEIARFKSVGNYSSYCRVVDSRRESNDRKKGEGNKKCGNRYLAWAFSEAAHFAVRYNDRARRFFDRKAARRNRMVAIRAVAHKLARAAYFVQRDRVEFDAMKLFG

SEQ ID NO: 81724 - protein, 411 aa, unidentified
MIWIGDDWAEDHHDVELLDDDGRRIARARLPEGLEGVARLHALIAEAMPASWAELDPTQAADRVCVGIESDRGTWVQALLGAGYRVYAINPMSVARYRERHSTSGAKSDAGDAHVLAEIVRLDHAHHRQVAGDSPAAEAVKLVARAHQNLIWDRTRQVLRLRAALREFFPAALEAFDDLTASDALELLDRAPDPDRAARLPRLTIVAALRRAGRRKLDAKADTIQQTLRRDQLRQPGPVQHAYAAIVSSQVQIINILNVEIAELGQVLAEHFGRHRDADRYLSLPGLGPVLGARILGEFGDDSHRYTDAKSRRNYAGTSPITRASGSRRIVLARYARNRRLADAVHQWAFCAMRGSPGARNYYQSLRQRGTGHQAALRQLSNRLVGILHGCLKTGTTYNEATAWAHLQPTT

SEQ ID NO: 81725 - protein, 453 aa, unidentified
MSKERSRSKPSGLPIIHPFAAGIDIGSRFHVAAVSPDLCDEPVPTFQAFTSDLERMASWLVATGTKTVVMESTGVYWVAAFEVLESHGLEVILANAREARAVPGRKSDVNDAQWLQRLYACGLLRAGFRPGRDIAESRAYLRARETHTDYAAAHIQHMQKALTFMNIQLHHVIATITGVTGMKIIRAIVAGERNPDTLAAMRDVRCKESLETIRSALVGNYQPEHVFALKQALALYDFYQQCIDECDAEIERLVAGLNMGKAVPEAPLPKAKHRSKMPSDPKFDVRAALYQLTGTDLTQIHGVGPFLALRFIGECGTDLSRWRSAKHFTSWLTLSPGCKISGGKVLSAHTRKTSSRLTVAIRLAAVTVGRSDTALGAFYRRLAGRIGTAKAVTATARKIAVLFYNAMRYGMDYRDPGADHYEQQYRDRVIKQLHRRAAQFGFALQPQESIANE

SEQ ID NO: 81726 - protein, 338 aa, unidentified
MNYVGIDHHRQYSHMTLMGQEGRVLRSGRVPNLQAEIEKFFEGFEAVEAVIETGRSSYTMVDVLEEMGVAVKIAHPNEVKAIARAKIKTDKRDSEVPAHLLRMNMVPEVYRRSMENRQAQRVLRQRSFYVSAMTALKNRVLAFLAQQREEVREEAARETNLFSEKGQKVLLELDLAPGEKRLLAALLKTYRHLETRIHESTELVEKLYEKSREAQLVRTIPGFGKFLSVLVTVEIADLARFADAAHLHAYAGVIPSTHSSGDKTYHGKIIRAGNRWLRWAAVEAVWPGIRADFDLRCFYDQLARRKGANKAKVATARRLLTIIYKVWKEQRNYIPYRR

SEQ ID NO: 81727 - protein, 372 aa, unidentified
MSETRVAYQSFVGVDLHKCTVTLAAVDPRGETLSKLTISTKSVGKIEAWLVALPRPSQLAVEAVGFVEWFIDRFRRCVDRMEIADATELANRRGKRRKTDPNDALDVAKRLARGECPLGFIADDELMQLRKLGRHWRQLSSVLVRAKHCMKSMLLAANLRGPKFDGASAQRWLLAQGHLLKPAQRQAFAHFTEIVQLIELQRQPLRHAIIEASRSERFAPVTKLLESVPGIGQIWSCIIAAEIGPFDRFPNADTLEFWAGMTADLKESAGRTQSGRITKAGSRTLRWALCNAALTLCHSDESQEAIRQRLIRRTGSIKGKANVAMGRRLLRILYAMVRDGTPYQGGTPRNRTAAANKARAAKRARKNRKEAA

SEQ ID NO: 81728 - protein, 373 aa, unidentified
MPKYSTAFGMDVHLRSTTVCALDADTGEAVTRRFPGNPWGEIAGWMDGFPGPSLAAYESGYLGFAPQRELAGLGVECVVAAVSKIPRSAADSASKNDRNDAARMAKAILAHDISPIWVPSPEVEGIRDLAGAYDGATARLATAKQRLLAFLAKRGFVYGGTTPAGNPRKYWTYDFLRWLDKVRPEDDGGVRTLAALRNEVEAAAEARADLLSEYRAAVDASPIAAEVAALQSIKGCAFALAAAFSAEVGDFTRFRSGRQVTAYFGLAPSQRSSGDSVRLGGISGAGNALVRKLAVEGSWCYAAARHQPKLMPRDTGVPLEIRMHGRKGSERLLRRREEMLARGVPAAKANAATAAELVRWLWALGMMCREGAE

SEQ ID NO: 81729 - protein, 409 aa, unidentified
MEKIEKRYIGLDVHKYYLIALGVDENLEVVMPARRVELSNLESWMKKNLTKQDEVVLEMTTNTWQLYDELVAYAGSVTVVHPPHVALITRSQVMNDKIAASILARLLAKGLLVGIWVPPQEVRELRGLVAQRQKMMRLSTQAKNRLHAVIQRHHLKPPEGNPFAKTNNGWWESLSLGRLEKMNLQSDLETLQFAEKQEVRLQEEMTGIAAEDEEIGRLLHIAGFGVITAVTVYAAIGDIGRFVESKKLVGYAGLGARVHDSGLTTRTGKITKAGRRDLRVSLVEAAHVAANNHPHWKAELARLEPRLGYNKAIVAIARKLLITAWHVLARKVADRFAEPEKVSKKMLHFAYEVGKENRAGKSAAQFTRERMDTLGLGSELTSIPWGAKKPIPLPPSALLKKKESDVPNK

SEQ ID NO: 81730 - protein, 340 aa, unidentified
MEDVIYERCAGIDVHKKMIVVALRIGRKTQTRTFGTLTHELRQMTAWLKENGCQMAAMESSGSFWKPLYNVFEIEGLPAMVVNAQHMKAVPGRKTDVKDAEWIAKLLSQGLLKPSFIPDREQRELRELTRFRKSQIEERARNLNRLQKMLEGANIKLSSMVSDIDGKSATEFLELVIGKPDFTVEDVAERRHGCLKASAEDLFLSLEGIVTPIQRELFKHVMQVIREQTTQIEQTDNLIQSYMPEAYANAADAIDAIPGIGQISAQQIIAEIGHDMSRFPTAAHLCNWAGICPGNNESAGKRKSGKTNYANKTLKSTLAQCAQSVKKNRIASFAHSINDL

SEQ ID NO: 81731 - protein, 343 aa, unidentified
MVAIGVDTHRASLAACAVDAAGRAVAERSFANSASGHRALLRWLRALPAPRCTGIEGSGGLGAALCARLLAAGEEVREVPSMLTCRERRRTGRAGKSDPADALAIARIMLREADLPRVRGPHDHRDLKLLVDYRDQLLAEQTRVRNRLHSDLQVLVPGYQGHVGELIRASGLAAARQLLARRRGIAVELAEMRLARLEVLAAEISASKLRIEGLVAGEHPALTSICGVGALTAARLLGETGDPRRFRSAAAFAMACGAAPIPASSGKTQRVRLNRRGNRQLNRALFTIAFTQVRGHEPARAYVEHKRAEGKSWKEAMRCLKRHLANVVYRAMLEDRRAQALTT

SEQ ID NO: 81732 - protein, 375 aa, unidentified
MGNHSEAFVAFDTSKLRNAVAIAEAGRAGEVRFFGEIENTGAATAKLVKKLAAKYQRLTFCYEAGPTGYEVYRQIKSLGHECVVVAPSLIPKRPGDRVKTNRRDALNLAKLLRAGELTAVWVPDRHHEAMRDLTRARETTMMDLRSKRQQVSAFLLRQGLHYSEGKKTWTKTHMNWLASQKLEYAEQRLVFEEMMLAVRQAQERLERLEQAIRVAVPDWSLAEVVTALMAMRGMDLISAATFLAEIGDLSRFQHPRELMGYLGLVPSEASTGDTIKRGPITKAGNRRARRMLVECSWSYQHPPRVGQEKQEKVAAAPRAVREIAWKAQCRLHGRYRALVRRGKLKTVAITAVARELAGFIWAVSREITTARAASK

SEQ ID NO: 81733 - protein, 412 aa, unidentified
MSNPLLVGIDVHRKTNTVALMERNGREVAPPFTVANNRPGTAALAQKLGAFAAEEGYDAIQVAAEATGWYWEHFFRTLDDDPFLKQRPLTLYPFNPRLTAHFKKTYADLDKTDLIDAFVIADRLRLGRDLPQPFAYDETGLALRFLTRHRFHLVHQTVREKAYFMAHLYLKASEYTHLKPFGDIFGATSRAILQGSPSMEAIAAIPFDDLVEIIDVQGKRRFADPADNARKMQAVAQDSYLLPEALQAPLNLILRQTLQQIDALQRQVQRTEAAIAEALQNWPHTLDTVPGLGFVFSAGIISEIGNLARFAYDEAKVAKFAGLKWRKTQSADFQAEETRLTHTGNRYLRYYLCEAANSVRMHDAEYRTYYERKYHEVRLHQHKRAIVLTARKLVRLVVRLLTTNQPYRPRRI

SEQ ID NO: 81734 - protein, 312 aa, unidentified
MAMLSFCGIDVSKDRLDVVVLPEGWFFSVSNDTAGWAELVARLRPLTVSAIGLEPSGGYERGIIRALLAAGLSVRRINPNKLRQFARARGVLAKNDRLDARLIAEYVAIMPTRVVQRDAAAEKLAEIVTMRRQLCDEHVAAENQAAHLEDAMLRRLSKRRQMRLEADIRLLDKRLAEMVAANVALAQRYELLTSMPGVGPVLAFTLIALLPELGKMSRKQIAALVGLAPYDFDSGKLKGHRSIYGGRMPVRNVLYMAALSASRYSPALKTFHKRLAAADKKSKVIIVAVMRKMITTLNAMLRDNAAWQPRSA

SEQ ID NO: 81735 - protein, 313 aa, unidentified
MIITPGFIGCDVSKAHLDIFDGGLGRPERIPNCAEAIAALCERWRSREVFALFEATGRYDAGLRLALDAAGIPYARVNPAHARAFARAKGRLAKTDAIDAESLAAMAMTLRPDPSPARSAVRDRLAALGGRRDQLVADRAREKARREALDEPAVADDIAAHLDFLDGRIKALEAAIAALVAAEAELAQDQALLRSIPGFGPIATTVMLSVMPELGRRDPKAIAALAGLAPINRDSGAFRGKRAIGGGRRRVRRALYMAALAAIKTRQRFADIYKAMIAKGKPPKVAIIAIARKLLVVANAVLRDQTPFKAEHA

SEQ ID NO: 81736 - protein, 473 aa, unidentified
MAARMKDQGRDAPAGGGDGAEVAEDRVEVVTYAAAIDVAKASGMVCTRVPGSRPDRRRQAVWQVPASYGKVVALMDHLRCEGIQRLVLESTSDYWRIWYYLAEAAGLEVWLVNARDVKHLPGRGKSDREDCVWLCKLNERGMLRRSFVPPEATRDLRALTRTRSRLAQDQARHQARVEKILEDALLKISAVISDLFGASGRRFLDALVAGERSPAALAALGDHRLKATRQQLADALTGRFRDVHAFEISVHLRLIDAINEEITGLDARIEQALAAIPGTAPACGGCGLTGGGHTPGCPREDTPVLDLAARLDEITGVGICNARVLIAELGTDRSVFPGPGHAAAWARLTPRSDQSGATARPGRTGKGNPYLRGALGQSVMAAARTDTRIGEQYRRIARRRGKQKAIVAVSRVICEIAWILICDPAARFTDPGPGYYSPRDPARQTRTRIREIERLNPGMKVTLTPAGPAAAAA

SEQ ID NO: 81737 - protein, 350 aa, unidentified
MLYIGLDVHKEFCQACVIDESGRALSNERFSSTNEELDRFLNRFQDAKFVLESTGIWEFIYEGIEKRGFEVQLAHPLKVRAIAEARVKTDKVDAHTLAQLLRADLIPRSWIPAKDMRDLRQLVRQRAYLVQQSTSLKNRIHAELLRRGVRRPENLRTPFAQRSIRWMRSLEIPTVSSCLNCLESVQAQIEEINAQLLVEFERRGDAQLISTVPGIGFYGALLILAEIDDVRRFRHSENLCAYAGLVPTVSQSASSVKYGAISKDGSAYLRWILTESVHVHTRYNPGSQLSSFHARVARRRGKRIATVATARKLLRIIYFMLMRHEPYSSHGSDPGKRVHSECDLWIGANP

SEQ ID NO: 81738 - protein, 478 aa, unidentified
MRKDIRHVGFDVDSDKIAVAVAEPEGEVRSLGTIPHTGESVRRLVKKLGPASRLRVCYEAGPHGYGLYWLLSSLGVHCDVIAPTLVPVRSGDRVKTNRRDAMKLARSYRSGDLTAVWVPDAEHEALRDLVRAREVAKKDQLRARHRLGKFLLRRGLRAAAGMKSWTKKYLLWVKTLRFEQPAQEATYLDYLHEVEHAAERVARLERAIDQANEALPAEMRALIAGLQALRGIKQVSAATIVAEVGPLSRFPRPKQLMVYSGMVSSEDSTGDSVRRGAITKTGNAHLRRIVGEAAWAYQYRPAMSPEMKKRQEGLSEEVKEIAWKAQHRLCTRYRRLMAKGKLRQKVTTAIGRSCSASSGRSVCRSRRSSVSRGPALARRSGCKSILTEEPKESGFLEQSKRRSRGGTERRTLADSMWRASAPTHEASPRQLPTDHDHDGEPQARSANIRVINRRDSASTDAPSAPGNSPHGGDINGRA

SEQ ID NO: 81739 - protein, 353 aa, unidentified
MGYPISIHFPPPPDGTRFTAYSISQKKFGNDTEIVVGYEAGCLGFKLKRDLEKNGLTTKILAPASITGTEINRRRRKKTDKRDAEAIARSLKNHEYSEVYTPDEEDESVRDFIRMQQDHKKQLRVIKQQICAFTTRHGYTYTDGKNYWTKKHLKWLKELPLEGINKETMDSYLLSYETVSDRIEQMNKRIEEIAETDKYREAVHKLICFKSVKVLTALAVIVEIGDFTRFVKAKNFAAFLGLVAGELSSSGDQNQTGITKQGNTFLRKLLVECAQSFSRASSGKSEALKKRQEGSAPEVIAYADRANERLRKRYMRLVLHNRKSHNKATVAIARELACFIWGMMTGNIHTVLA

SEQ ID NO: 81740 - protein, 420 aa, unidentified
MKIVHPICCGMDVHKKSIVATLAVTENIITTYTTRSFITSNPDLINLRTWLLDHNCLDVCMESSGKYWIPVYNILESHMSVVLTHPKYVRAIKGKKTDKKDSKWIADLFKHDLVRASFIPPVQFRASRELARYRFKLVCMRSSEKNRYQNAMTVSNITLANVLSDPFGMTATDIMHYRLSSDVFDEEHCKKLIQKGAKKKTELILESIRGSEIRPDQAFKMNEADAHMQFIDAMIIRTEAELFTRIQPYYGLVQLLASQLPGLQELSATLILAETGVDMSVFESAKHFVSWAGLAPTNNESAGKKKSTRISRAGTYLKPLLITCALSAVQDKKQPYFAIKYARLKKRRGHKKAIVAIARMMLTCIYHILSTGELFNPSDYEEILSSRKTPLTKHQELNVDTAIAFLAAQGYDTSSLIKLC

SEQ ID NO: 81741 - protein, 350 aa, unidentified
MEKYIGLDVHAASTTFAVIGESGRRLSSHVVETNGQALVEQLKAIAGKKHVCLEEGTQSAWLYEILSPHAESIVVAMVSESRGQKNDERDAFALAELLRTGGLTRTVFKETSEYRELGELGRAHTMVVQDVVRVQNRIKARFRSRGVGVSGKSVYSEKGREEYLAKLPDATRGATRTLYAQYDAVEEIRRQAEKELVREARRHPIYRVLLSCPGLGPIRVAQLIPIVVSPMRFRTKRQFWSYCGLGIVMRSSSDWVQSKKGTWERAEVKKTRGLNQNHNHTLKNIFKGAATTVISQLEGEPLNQDYQRLITSGTKPNLAKLTIARKIAAIALSMWKSKETYDPTKHRKQG

SEQ ID NO: 81742 - protein, 337 aa, unidentified
MSVYVGIDVHRKRSQVAVVTENGKVQLNKNTVNGTEPILRLIGDLPSGTPVAFEAAFGWGWLAQLLEDYGFDPHLVHPLRCKAIASARLKNDKVDAAILAQLLRADLLPEAQLAPPAVRQLRALLRHRAGLVRLGTQQRNRIHAVVADFGYDRSGSYLSGPGRGWLAGLDLPATSREVVADCLAVIDGLAPAIDRIDGELRAHAKADPRVKTLTTLPGVGQFTALVMVAEIGDISRFPSARKLASWAGLTPTVRGSDRTVRHGHISKQGSAWLRWVLNQAAQTAKRSPEFAATYAAIAKRRGKKIATIAIARKLLTRAWHLLNEMQATNASTQLRRP

SEQ ID NO: 81743 - protein, 347 aa, unidentified
MSITMIGLDTAKSVFQIHAVNEAGQIELRRKLRRSELISFFERQEACTVVMEACGAAHHWARVLTGLGHKVKLIAPEAVKPFVKKGKKNDAADAAAICAAASHPDVKFVPAKSLEQQGVLTLHAARSLLVKQQTMLANAIRGLATEFGLTVPKGIGKLEELMTLVDTDETVPETAREAVQGLFDQTHALAEGIKALEAKIVDHARHNETARRLATIPGIGPITASLIVATVVDISLFKTARDFAAWLGLVPRQHSTGGKTRLGRITKTGNREIRKLLVLGATSMASRASQWNSAAGAWTRAALERRPFRLVTVALANKMARIAWALMTRKEVYRAKGGVTAAADAVA

SEQ ID NO: 81744 - protein, 349 aa, unidentified
MKKKIIRRAVGMDIGKNTIHLCVKNQDEETNVKVKSTRTFSNTLKGWNAISKYLEKHFSDGLPYRIILEATGIYHENIAYYLDDLSYEVCIILPKQSYYFAKSINVKSKNDSIDSKMLAQMGLEKFGTLKRWKVPSKIMRELRQLTRHRSQLVAHRTQYKNQLHALEYAHKPNSVVLTSVLKQIEYLDDQISYIEKQIEFCVKEDAKIEQGIKNICTIKGFSLTSAAIVVAETYGFELFKSIPQLVSYAGYDVIENQSGKRTGKTRISKKGNSNIRAALFFPAFSAARFIAEFKSLNDRIFERNPKVKMIGFVAVQRKLLVLAYTLYKNNDTYDSNFQKKKNAVLESAV

SEQ ID NO: 81745 - protein, 395 aa, unidentified
MNYWVGFDVGKRFHWLCVLDGDGAILLSRRVDATEEQLEAACSEIAALGDVEERVIGVDVLGGPATLLETTLLERGERVRYIPGTAVNKVRDAYPGGEHKSDPKDAFVIADQLRLRWKSLREVRIRNESAIELRTLVGYRRDLVQDQRRRVCRLRDLLSQVFPGLEAALPDLAEKGALLTVAKVALPSDARRLGKSRLARWLKARGSRKSEALAEKALLAAKAQRRELPASEVKAALVSEIAWEILRTKDRIADLEKRLEELVETNPDGKIVGSLPGMGLILTAEFLAEVDDIGRFGSPDRFAAAAGIAPVLRASGSVSYQRRAKKGNRALKRVLYQSAYCAIGHHDKSRDYYQRKRAEGKMHEQAVVALARRRVNVLWAMLRDRTTYREMPLAA

SEQ ID NO: 81746 - protein, 330 aa, unidentified
MTMTPTQQTYNHVVAFEVSKEALVVHTLPADEQCTISNKPQSVRRLLKSQLKQNRKQNLGPILIVCEATGGYERHVLDAAIDLGLRVHRAHGARVRFFARYCGLIAKTDPIDARVLAHYGVKTDKLRLYVPPPPETAALRALHARRTEIQQMMIAETSRLDQTHHKSIVKSLKAHIAQLKSALEAIEDEITHLLQENASLKKKVELMRTVIGIGPVSAMILLAYLPDIGSLTKGEVARLCGLAPINNDSGKKRGARHVEPGRTAIRRALYMAAVVAMRANPVIKRFADRLRGKGYPFKYVAVAVMRKLVVILNAVLRDGQPWKGAQAACA

SEQ ID NO: 81747 - protein, 346 aa, unidentified
MTIVEAARGITGGIDTHGEVHVAAALDDVGGLLGTESFDATPEGYAALLSWLAGFGRVGTVGVEGTGSYGAGLARFLARSGVEVIEVDRHNRQARRHQGKSDPIDAVEAARAALSGRARGRAKSRDGSVEAIRVLVVAKRSARQARMKALTQMRQLTFTAPDQLQSKIKGLAAPQFIAAAKGLRPTRSSDSVTAATKAALSSLAHRISELDEEVAELDAKITPLLQAHAPELLAVYGVGIDTAATLLVTAGDNPERLRSEAAWAHLCGVSPLQASSGRVTRHRLNRGGDRQANRALWTIVISRLASDPETQAYMERRVKEGRSKREVIRMLKRYVAREVYRKLPRG

SEQ ID NO: 81748 - protein, 370 aa, unidentified
MSIKRILVNTIDTDLEYEVIGIDLAKNCVSAILLTTDGEIFGIDRLDYQELEKSAQELSPNIFAMEPCTEMNYMVQKLEDWGHHCIVISGKNVKDYVESHFSNQKTDLNDAQALAFLTKDTQLRTVKAKDPEQLKYASLTTLREQYVKQYRQTMVSLKGICQVWGLSISKGISGKARLKDMIENHAAFPAELRTALVGMVAHAQAVQKDLKSVTKILEELAKKDKACQLIQTVPGLGTICSCRLRATVGDIQRFKHPKDFPAYYGLVPRSMATGHNEKKGKITHRGDKTMRSLMVQGAGIVINQATKGNLHSKQLTKWILKKQKEKMPWGKLVCAVAAKLLRIVRAILISGKPYNPKIAGVAKCSLPKAS

SEQ ID NO: 81749 - protein, 392 aa, unidentified
MLFVGIDIAKRNHEASVIAQDGRVVRKAMRFANSQAGYNKFMDMVRGLSEPVVFGMEATGHYWLTLYTHLRNDGFTVHVINPIQSDALRGMYIRKTKTDSVDSVIIADVIRFGRYCETSVEPGDLQAMRELCRQRFYIIDMASDLKRKVIALLDQVFPEYEKLFSDTFGASSMEILSQYTTPEEMLSVSSQQLAEILEKASRGRLGAEKAVEIQDAAKNSFGIVMASSSFSLIIRQYIEQIRSLEASVDVFDAEIARLLSGFDTQLTTITGVGPTLAAVILSEIGGDIRRFSSPAKLAAYAGVDPTVKQSGDFSGSRMKMSKRGSPYLRRAIWLASTVAAFKDPAIHALYERKRAEGKDHMTVIGHVCRKMISIIFAVLRDNTPYVPAAISD

SEQ ID NO: 81750 - protein, 407 aa, unidentified
MNAVGIDVSKGKSMVAALRPMGEVAFLPQEFLHTEVGLEQMAGAIVALGEDTRVIMESTGRYHEPVAAALHEYGIYVCVLNPLYIKQSGGGSIRKVKTDKADAMKIAKYGLDNWVDLREYTPMDTIRQQLKLCSRQYNLYMKTVVSLQNNLISLTDKTFPGVNELFSSPERADGHQKWVDFVMTFWHCDCICRASEKAFTERYQKWCKRKGYHFSAEKALDIYAGSCGHFTTLPKNENTKLLIVTAAQQLLAGKTTLATLRAEMTRLASQLPEYETVCAMYGVGKITAAQLMAEIGDVRRFPRRSSIVGFAGVDPGVDESGKHSAKSVPTTKRGSPHLRKTLYQIICTYLKKSPADEPVYQFLDKKRAEGKPYFVYMTAAQNKFLRIYYARVKECLEAFDTEPAKQS

SEQ ID NO: 81751 - protein, 410 aa, unidentified
MGNVAGIDVHKKMLAVVIRVESEDKVEYLKRKFGTTANEVVHLASWLTQQNVLEAALESTAEYWRPVWNGLEAHLKLHLCNPLQVKARRGRKQDFRDAQRLADRWHSGDLEESFVPGAEQRSWRWLTRSRVQLRRLIGAARSRVECLLEQGGIQLTSVVTDPFGVSGWAMLKLLAKGERDVKILVGEARGQLKKKEAELTQALVGKRNPTHRLVLQQSLEQVELLRRQIEEINQALKEAMLPHTAALVRLVKIPGVDLAAAQELLAEIGPGAVTFPSGGQFASWVGVCSGSNESAGVTYSRRSAKGNRYLRRLLCQIAWAAIRTKDTFYGSLFRRLSPRLGAKGAAWAVAHRIGKVIWLLLHEEVEYRELGPAPQRPKSLVKKLQRLQADFARAGMDLQSVLGQCSPAVA

SEQ ID NO: 81752 - protein, 332 aa, unidentified
MYVGLDVHKRVCYGTVMDEKGKIVKQDKFTNDLEALDEFMEDLDEALVAMEAGYCWQPLYDRLMESGHHVKLAHPLKVKAIAQAKVKTDKIDSKTLTHMLRADLLPESYVPPRDIRELREVVRRRAFLVRMRTMLKNRIHSDLAKRGISLGASPFSKTGKGLLQGLGLEAVDQILPVMEVLDRQIGEISRCMRRMCGEDPNAKLLTAIPGVGYYIALLLVSEIGDVRRFPDAEKLCSYAGLVPSVRRSGGSTKHGGITHEGSRWMRWALVQAVHVHIRFDTELTRFYRRLAVSKPKQVAVTATARKMLKVVYWLLRNGESYRPWPGGVPQEV

SEQ ID NO: 81753 - protein, 277 aa, unidentified
MRIRKSAMFNGSSEPEMFEFRTTREGVSEFMNKVPKGSTVVIESSTTGKTLSMMLSSKYEVHMIAPPEKKPQVKTDKRDAKRIVREDELGYARKVYVPSPYIEELRVLTSRVMELGTKISAIKNQVHSLIERNMLQSEFEDISDMFGVDGLDKLAGIELPESESRALTMYLDELSFYAEQHEKLDAELAKIASNDEDCKLLMTIPGVGPFVAVTIKARIGTISRFPDKQKLCSYAGIVPKADDSGDYKGRRGVKRGDYVLKNALTTAVRGGHLPEHR

SEQ ID NO: 81754 - protein, 317 aa, unidentified
MSQPLSIGIDIAKDSFQVASWPPQVQGTWLNTRQGHRAFRDRLQGVPIARIIMEATGGYEKTLAAELTQAGYPVVVVNPRQVRDFARGLGQCAKTDSIDADVLARFGDLVQPSCKPPVDPETEALAELVTRRRQLTDLLTQETNRAGMIHHVKVRKSIRKMIHTIEHQIRELDDLIQDHIQGDGDFQQKDRLLRSVPGVGPQTSAMLLSHLPELGRLNRHQIAALAGLAPYDCKSGKQARASHIAGGRKPVRSLLYMAALTARRCNPVIRHFAELLEDQGKSFKVILTACMRKLLIILNAIIRDQQIWTPKKFLKNT

SEQ ID NO: 81755 - protein, 358 aa, unidentified
METKLSDVRFDGQEFILGLDVHHRSWTVTIRTTGMEVRTMTMPPDPRGLHSYMVKHYPGGTYRSVYEAGFSGFWAHRQLVELGIANCVVHAADVPTSDKERRQKDDIRDSRKLARSLENGELKPIHIPDPHIEPVRSLCRLRERSRSHLVRLKNRIKGFLKYYGIPVPEDSAYRHWSGAFLSRLEAFCSEPGPRSDTLSITLEALREESRRMATITKKLRAHCREGEPGRITCLLQTIPGIGSKTAFSLYTELQDIGRFPNLDKLNSFLGLIPSTESSGESEKATGITPRANRALRPLLIEASWVAIRHDPELLRAFSKLASRMKKQAAIVRIARKLAARMAYVWREGTPYKPAVPIG

SEQ ID NO: 81756 - protein, 378 aa, unidentified
MNCPLVMLWTAPPPGTRVPKMWALLVAPTNSEELPMQTITTIGFDIAKSVFQVHCVDAEGKVVLRRQLKRRYVLAFFQKLPPCLVGIEACASAHHWSRELQALGHTVRLMPPAYVKPYVKRHKNDATDAEAICEAVTRPNMRFVATKTPEQQSCLTLHRTRHLFIRQQTAVINAIRAHLAEFGIVAPVGRHGVEQQLGIAADVNDKRLPEVARGCVAALGAQLRMLKEQILQFDRMITAWHRSSEASRRLDDIPGVGPALATALVASIADPKAFRSGRDFSAWIGLVPKQNSSGGKDRLGNISKRGDRYLRSLFTTGALAVIRYAKIHGTRHRPWLTALLARRPTKVAAIALANKIARMAWAMMARGECYKEPAALAA

SEQ ID NO: 81757 - protein, 344 aa, unidentified
MLYVGLDLSRKRLDFDARLGGGELVERGAVPPDADGLAGLARRLGDAQVLAVIESMNGARFVHDRLELEGWDVRIADAVKAKGLAPLACKTDKIDAWVLAELARLNLVPEIWLPDPEVRAERERARFRLHLVKHRSALKNRVHSILIAHGVPNPSSDLFGVGGRRLLERLPLPEPWRSTTTASLALIDTLDQEIGRCERELRRLGADHRYVPLLMTCPGIAWILAFTIASEIGDIARFSTPVKLVGYSGLTPRVEQSGESDRRGPLRKNGPDHLRWALVEAAHSASRHTLYRPILERTRARHGRKRGTKIAALTIARKLAEASWYMLTRNQPFAPAGATRPLAA

SEQ ID NO: 81758 - protein, 346 aa, unidentified
MEYIAMDVHKKYTWARVENEKGDKLYECKLSHSHGTIENFVKRWTGGSAVAVETVGNWYWVVDEIEAGGGKPQLVNARLAKLMMGSVNKSDKLDAKGMNRLQRTGTLPTVWIPPSSVRDARELPRTRMVLSKQRTQLKNRVHATLGKYGFVVEGVSDAFGKRGREILTELMAKLPPHTEQALGRVLDQLDHVCENLQWIEEKMIEVFAPCPQTLWLKSLPGVGDILAVVIWTEIGTIERFSRAEQLASYCGLVARENSSGGKVRFGPVRRDVNVYLKWAFVEAANSSVLNRKRCGYDHISRLYERIKARRGHGKAKVAVARHLSEASFWMLKKGEPYREPMSSTQR

SEQ ID NO: 81759 - protein, 287 aa, unidentified
MTSTKYIGMDVHKESISIAVLNFAGKVVMECVIETKASTILQFIHGLRGDLHVTFEEGTWAGWLYDLLKPHVTELVVCNPRKIALLKDGSKSDRIDAHKLAELLYMNKIKPVYHGEHGLRMLKELSRSYLTISKDLGRVMNRVKALYRGWAIPCAGTQVYAPHYRSEWLSKIREAGVRRRAELYYQQLDALRLVRQQARKELLAEARKHRATKLLRQIPGIGPLRAAHLVALMQTPHRFRTKRQLWTYSGLGLETHDSYNARRNPSHCVVSMTITTTTSKIFSRVRR

SEQ ID NO: 81760 - protein, 374 aa, unidentified
MYGLLPLTGDLRYKVKSIHSNQLLPGVHTMEQCNVIAIDLAKDIFQICIMTTNGKIIVNKAMNRAKLKEWLAKQKLSLVAMESCGGAHYWARFAQSLGHKIIVIPPKQVKPFRTGQKTDANDAVAIAVASRAANIKPARVLSIEQQALQSIEKMRSLIDKQKLQLSNQARGLLLEFGIVINKSIKSFKERIPEILEDAENDLTFPMRKGLLQMWELYSRLEDDFDEINNELIQLTAQDSDCQKLMKLEGVGPITAVRLKIQLGNGEHFNSGRQVAACICLTPKQHSSGGKVKLGSVGKGSCDKPLRSCIFLGARAVVSKLKNRPAKTEKERWLKALIERRGVNCASMALANKTARTAYALLKNNTDYKPVLIAA

SEQ ID NO: 81761 - protein, 361 aa, unidentified
MSLPTQNSASFKCFTGVDIAAKDFTAATFMPSGKPKLAKKPFEQTAEGFSHFLARLASSGVAPKEHLIVMESTGPYWVALAVYLGQAGFGVSVVNPAQVHFFAKAQLKRAKNDKLDAQTLAEFAQTMQPKLWTPPPQFYHELRQRISQRDSLLKLKNQVENQLHALQVNPVIIESVRDQLKELRTTLSVQIEQMDQELSGLLKVELKELDQEIEVELSQEKAWKKSIALLRTIPGIGPLTACWLVLSTLNFTTCQSPEGLVLYAGLAPIERSSGSSIRGRPQIGHSGNARLRTLLYMATLTAARYNPMIKVFWQRLRDVKHKPVKVARCACARKLLHLAFSIVKSGKPFNPGKILVEVEAV

SEQ ID NO: 81762 - protein, 381 aa, unidentified
MTEQNAHSDMNLYLALELSNKEWKLAFGDGKRVRLVGIPARNQKGLHVEVERAKEKLGLPPSTPVFSCYEAGRDGFWIHRMLKEAGITNLVVDPASIETNRRARRVKTDRLDARKLLSMLMRYWLHGEKTLWSVVRVPSEEAESLRRIHRNEDRIKKERRQHLTRIRSLLVLYGINPRVLPREWAKVKDWKSDALPVEVVLELEQEQARLDLCDEHLSHMQQVRKEHLGATRQPDAESKEKPSVPVGEWTHKLSRFVGVGEQTAWDLSAEFFAWRKFKNRKQVGSAAGLTGSPYSSGDSQRDQGISKAGNARVRHLAIEMAWRWVHFQPDSALTQWFNRRFGHGTRRMRRVGIVALARKLLIALWKYGEFGELPEGARVKA

SEQ ID NO: 81763 - protein, 452 aa, unidentified
MAKQHRKKSKNIIKHIHVLQPNSAGIDVGANEIYVAVPDDRSSKPVRRFDTFTDDLHGAAKWLKECGIESIAMESTGVYWIPIFQILDTYGFDVILVNARHVKNVPGRKTDVQDCQWLQYLHSVGLLCGSFRPDQDICSVRSLLRHRDNMVKAASSHIQHIQKALTQMNLQIHNVISNITGVTGLAIIDAILAGERNPDILADLRNPRIKADRQTIIKSLTGDYRSEHIFTLKQTLQSYRNYHLMIQDCDAEIEKHLKEFDSRIDLDDCPKPPEKNLKRKPKGNAPNFDLKTHMHRLLGTDLTRIDGISDLTAHVFFTEVGPDLSKFNSANHFCSWLGLCPNNKISGGKILSSHTRPGSNRVAQALRISANSLWNCKSYLGDYFRRMRARHGAPKAITATAHKLARIIYYLVKNQRAFDETIFSEQEKNHQIQLKKRVISQAKSLGLQLVPA

SEQ ID NO: 81764 - protein, 508 aa, unidentified
MVAAPREPVIGGVLPQGRTTPFRRLTTLFMAAAPALHLNPKPPNPMSKTRKKRSKKIKAASNDAALNTTVHPDAAGIDIGAEELMAAVPPGRCEGGTVRGFSSFTSGVHALRDWLVECQIRTVALESTGNYWITTYAVLEDAGIEVCLVNARHVKGVPGRKTDVQDAQWLQQLHAAGLLRKSFRPAKDIVPLRYLMRHRSEMIAEGARQVQLMQKVLIEMNLHIQHVFSDVDGLSAQRIISAILAGERDAATLARMRDHRCRTPEAKVIEALQGDYRAEYLFVLRQCQERWEQTGAAIAACDAQIGLITAAISGDGQQSGPLPAPENKRQHTAQKNSLAMPVFEEGWRFYGVDLSAVPGVGSAVLATLMSELGTGTQIKGSFRSAEAFASWLGLCPDNRISGGRVLKAKTRKVVSRVAAALRIAAQSLRNSEHKLGEYCRRMKARLGKAEGITATAHKLARILYAVITSRVPYNEEQAFRQTPATQARRLHRLQKQAARLGLQLIPAI

SEQ ID NO: 81765 - protein, 355 aa, unidentified
MDSAKYIGMDVHKESISIAVRNGAGKIVMECVIETKASMILQFIDGLRGDLQVTFEEGTSAAWLYDLLKPHVTKLVVCDPRKNASMREGNQSDKIDARRLAELLRLNHLHPVYHGEHGLRSLKELVRSYLTITKDLGRVMTRVKAIYRSWAIPCTGKQVYAPRHRAEWLGKIGEPGVRRRAEFYYQQLDALRALRQEVRRELLAESKKHPAWKRLCQIPSIGPIRAAVLLGILQTPHRFRTKRQLWTYSGFGIETQSSADHRRVDGQLERVKKPSAIRGLNRNCNHDLKNLFKGAAIVASSKPGPFQEFYTALLTKGIRPEMARLTLARKIATIVLIVWKRGASFDAQHLKPQTA

SEQ ID NO: 81766 - protein, 409 aa, unidentified
MRLFAGLDVSSFDIKVCILNGEGEKLDSFSVNNDLPGATTLKERLLKHIANQKVEIFKIGLESTSVYSFHPSMFLHYDEDLQRFGAKVFLMNPKQIANFKKSYSDMDKTDEIDAFVIADYLRFGRNQMSIVKENQYVALQQLTRSRYQLVRMLTKEKQHFLQHLSYKCNTFSQEVDSSIFGNAMMELFLEKFSLEELADMPLEELAEFLQTKGKNRFGDPKCVASTIQRAVRSSYRLDKVVEDSIDVLLGTSIAVIRTYQQQIKEIEKSIKRIMAGLTQTLESIPGIGPVFAAGIIAEIGQIERFDDETKIAKYAGLYWRTHQSGRFTAENTSLSRNGNHYLRYYLVEAANSVRRHVSDYQEYYVKKYNEVPKHQHKRALVLTARKLVRLVDALLRSHQLFAPERCVKV

SEQ ID NO: 81767 - protein, 417 aa, unidentified
MSEFAALVAIDWADKKHAVSLYDQTTGSREQRIINHTPEALQEWALDLRARFQAQPIAVCLEQSRGPLIYALLKYDFFVLYPINPTMLARYRKAFSPALGKDDPSDADYLLDLLQHHRERLTPWRPDDQKTRTLRLLVEQRRRLVNDGTRITNRLTALLKSYFPQVLCWFSDLRRLVVCDFLDRWPTLEAVQRARPTTINKFLRAHHSVRRQTNERRLAEIKTAISLTNDPAVLTSAQLIVKVLAAQLRTTIKALAELDRHIEALCLTHADYELFSALPGSGTVYAARLTAAMGSDRSRWKTPDDLLRFSGVAPVIERSGKQNWIRWRYFCPKFFRQSFVEYAEQSIHHSFWAKAYYSMQRLRGKEHNAAVRALAFKWIRIIWKCWQTRTPYNEVIYLESLRKAGSPLLKFAAEHQN

SEQ ID NO: 81768 - protein, 350 aa, unidentified
MTSLSEIVEVVIGVDTHVRTHSAAAVDARTGGVLGEVTVEATPEGYQALVDFAGAHSLLRAWAVEGTGGHGAGLARLLARRYELVLELDRPERARRRNGAKSDPLDAIRAAREALSRAKLGTPRSAGQRQALSVLLAARRSAVQAGTDAQRQLFSLVIAAPEQLRERFRGQTLPAMTRLAARLRISPRWDLETATTARVLRDLARRALELSDEAARHEKDILAIVRSWRPDLLAQPGIGPIIAATVLCAWSHPGRIRSEAAFAMLAGAAPIPANSGQTTTRHRLNRYGDRQLNRALHTAVLCRLRYDPTTQAYAKRRTTEGKTSREIKRCLKRYLARDLYRLLENPSQPT

SEQ ID NO: 81769 - protein, 454 aa, unidentified
MEQEFVSMQVVNPQAAGVDVGSRSHWVAVGQSEKDVREYGVFNQDLFALADWLKEKDVKTVAMESTGTYWQNLYAVLISKGLHVVLCNGKFTKNIKGKKTDIKDCQWIQKLHTLGLLTSSFLPDGKTEELRTYCRQRANLLHLAASTSKKMQKNLRLLNLRLDVVVKDICGLTGLLIIRAICDGETDPEKLASFRHGNCRKSEEEIAKALQTNGRKDYLFALQQELDTYDHLQNKIDECDKEIDKMLNEIIQSDDNKRQHFIDAKPHKRVNKNTPKDIDLNLKSYQMFEGTDLLAIEGMSYSTVLALMSEVGLEGIRKFKTAKHFASWLRLAPNNKVSGGKVLSSKVPKGSNRLKIALRNAANAIGNLKDSTPLRDFFHRISFRKGRVSAISATARKLAVIIWNMVVKGVPYINPEGYLFLDQKRKLGLVKRIKKQIDKFGLTNADLGLEIEPI

SEQ ID NO: 81770 - protein, 343 aa, unidentified
MKLTRVGVDLAKQVFQVHGVDRGERPVWCKRLKRSRWIADLEREAEPGAEIGMEACGGAHHWARVLQAKGYRVKLIAPQFVKPYVKTNKTDANDAEAICEAMSRPSMRFVAVKTVDQQDLQAVHRVRSSLIRERTAKANQLRGLVYEYGLVAPQQISSLRRAVPQWLEDAENGLTVRFRSLLAGLYRDLKQLDERVRELDQEVAAITREHEPVRRLMQINGVGPLIASALYALVGDARQYRNGRDLAVALGLTPRQHSSGGKEKLLGISKRGDKYVRTLLIHGARSALRTAPSRTDRISRWALALAERSHPNVAVTALANKTARVAWAMLRHGANYEPERVAA

SEQ ID NO: 81771 - protein, 418 aa, unidentified
MVMKIVRFNCCGMDVHKNLVVATIGITDRKTNITEYFQRSFSTLNSDLYRLKDWLRSHHCSDVCMESTGKYWIPIFNILEDETNVHLTHPKYVKAIKGKKTDKKDSKWICDLFKHDLIKFSFIPPKEIREMREIARYRYKLVCMRSSERNRYQNCMTVSNVGLASVVSDPFGKTASNIMKEVMKSNVIDDDKILKLVHKNCKNKDKILDSLHGYHIESDQRFKMEKSLDHMEYLDQLIDSCEVELIKRAYPFRRSFQHITQIKGISALSAILIISEIGIDMSQFESDKQLVSWAGLSPANNESAGKKKSVRISKAGQYLKPLLVQCALSAIKDKTSYFGRKYSNIKKRRGHKKAIIAIARMMLVSIYHMILTGEEFNPCDHESFMDPKPNTNPSLTVEKALNFLKQSGIDISSIPVNL

SEQ ID NO: 81772 - protein, 339 aa, unidentified
MKLTPVGIDIAKNVFQVHHVDEETGEIVNKPIKRAKFLQYFANRAPCLIGMEASGGAQHWARQLTAMGHQVKLMPGQYVKAFNIRNKKDPADARAIWLAVQQPGKPVAVKTEMQQAMLALHRMREQLVKFRTMQINALRGLLTEYGEVMGKGRPALDRAMPDVLARVADRLPAALTDTLREQWNGLSALDAQIAAIERRMREWKKEDRDVRAIAEIPGVGLLTATAAVATIGDAKTFRSGREFAASTGLVPKQVGSGGKLMLLGISKRGDTYLRTLLIHGARSVVSSPKQNDPWIEQMKKRRPMNVVIVALANKMARTIWAILAHGRSYQEGYVSTKPA

SEQ ID NO: 81773 - protein, 314 aa, unidentified
MDTTIAVAGIDVSKAKLDVVMPDGGAFVVPRDGRGLAALRGRCREAGVTDIALEASGGYEQEVLDGLADGDWRIHLLNPRRVRRFAEAAGVLAKTDPIDARVIALFTRHFPEAGVVRRPPGARRLAEFLRVRAMLRKAVDDARNQLEHLREPALRELVLAHRAGLEGRLKALDADIAAAIEADGECRRKASLMRSMCGVGPVLAASVLAVLPELGSLTRRQAAHLAGTAPADRRSGAGRARATVRGGRDGLVEVLHMAALNAMRFNPDIKAFAERLRADGKPFQLVCMACARKIVVTLNAMIRDDIPWTPRLAA

SEQ ID NO: 81774 - protein, 414 aa, unidentified
MSNHTASWTYVGLDVHAETITVAVAEGSGRARGRHVGTIPNRPDSIRKAMKKLGGAKSLRVCYEAGPTGYALYWQLHKMGIACEVIAPTLVPVRAGDRIKTDKRDALKLAQTYRAGELTPIFVPDAEHEALRDLVRAREAAKKDQLRARHRLSKFLLRLGRRRDTQSQAWGQAHWRWLDSQVFDHTAQEETFQDYKNEVEHATERVARLDKALDRAVEQAPPRMQELVLALQSLRGVAMLTAVTVVSEVGSFARFPSAQKFMAYLGLVPSEHSSGGSRHQGGITKTGNAHLRRVLGESAFCGRLRPRRSPSLKRRQQGQSQAIVDMAWEAQKRLYQKHGRMRIRAKSHQVTVTAMSRELAGFVWAVGRQRETEMNKEDLPVERLKEAGKHPHGKEQSSKHLCDRHGRAELAPLV

SEQ ID NO: 81775 - protein, 321 aa, unidentified
MEVTIVGIDIAKKKFDVAVLMGEKVKSGTFHNTADGFGVFDRWLTKLGVERVHACMEATGTYGEELALYLHRAGHVVSVMNPAKIKGFAQSELSRTKTDKADAALIARFCRAMRPEAWQPTAPEVKELQSLVRRLESLNDMLTQERNRLPITHGMASASIERTISHLETEIQSTRRLIREYIDQDPDLRGKRDLLESIPGIGPATSAMILSEFGDVERFGEARRMASFCGLTPRHRQSGSSVRGKSMMSKTGSSRIRRALYMPALAAIRYNPVIIAFRTRLIANGKQKMVIVGAVMRKLVHIIFGVLKSGKPFDPAIAAVA

SEQ ID NO: 81776 - protein, 342 aa, unidentified
MEYIALDAHKHYTTVSVEGPTGEALRETRLAHHRGAIRTFLEEWTRGSPVAVETVGNWYWLVDEIEAAGMVPRLVHARKAKLMSGMINKTDKLDARGLNRLQRTGTLPTVWIPPAEIRDQRDLPRTRMVLVSTRTRLRNRVHATLAKYGLTVTGVSDLFGIEGHKLLADKVCELPPHTRYATHQLLEHLDLLDEQVADLEERIRDVFTTTPAFEGLRTMPGVGFTLGVVILTEVGDVRRFPDAEHLATYAGTTPRIHSSGGKTRFGRTRPDVNHYLKWAFREAAEACCQHRERPHWKHRHVSRLYTRVRHRKDHARAIGAVARHLAEATYWILTKEASPPKA

SEQ ID NO: 81777 - protein, 337 aa, unidentified
MEGRYVGIDLHRRRSVIVTMDDSGEVLSSIRIPNDPVAMSIAVAEAGEGADVAFEATYGWYWLADLLESDGHRVHMAHPLAMRGMTMNRRVKTDWKDATLLADLLRMGSLSQGWIAPPELRELRELVRYRAKLVALRSGLKAQVHAVMAKNGVLPSRVEMFGPGGRAQLDALELPVSFMARIDSLRDLIDLYDREVTTFEREIHHQLKDDAGYRAIQKIEGVGKVIGAVFVAEIGDIGRFSSPQKLCSWAGLTPKHRESDLVKHQGDITKQGNKLVRWAAIEAVSGRRGGPKLRADYEQISKRRGKYRAKVAVARKLLTLVYYGIRDGHIRCLDEAA

SEQ ID NO: 81778 - protein, 318 aa, unidentified
MEQYVGLDVSQKETAICVIDGEGNRVWQGTCRSTPDAIAEVVRTKAPLAVKVAMETGPLAVWHWHALKAAGIPIVCIHARHAKAALSMQINKTDSNDAFGLAQIVRAGWYRPVDVKSMESYKLRLLVTARARVVSMRTGLYSQIRGLLKTFGVMLAPGKGTSFEQLVLRGIPNDHLVQEVVESLLSTWRHLSTQLKKLNREIERTARAIPVCRRLMTVPGVGSLTAVAYATTVDEPSRFRRSKDLGPYLGLTARKYQSGEVDRTGSISKCGDRTTRSLLFEAAGVLLFRNRQPSALKEWGLNLSRRAGTRKARVAVAR

SEQ ID NO: 81779 - protein, 360 aa, unidentified
MPMLADAIDAVLGVDTHRDVHHAEIAQPSGAVIATCSVPNTSAGYARLLGWARQHAPGPRLAACIEGTRSYGAGLARAAAAAGLVVIECEQPTRKARRGKGKSDPIDAHLAVLTALRLDTAKLPVPRADGDREALRILLCARQELTTLAAARTNRLRALLRDGDDADRDLARRTRLSITTLTGLASRPQPSGASRAQAVRHAEIRRLALALRDAAREVKANRAQLATIVEELAPGLTSRPGIGPVTAAQAIVSFSHPGRCRHDAAFARLAGTSPLEASSGQTTRHRLNRGGDRALNSAIHVIATTRMRRDPATIAYVTRRRAEGKTTREIRRCLKRYIARQLYRTLTTAMTPPSPEKLTA

SEQ ID NO: 81780 - protein, 342 aa, unidentified
MKIIGCDFHPSFQQIAMVDTETGEQTERKLNRSEAAAFYRGLEGKVIVGMEACGNTLWMERLLAELGHELRMGDATRIRSMEVRKQKTDRRDAELLLRLLLEQRFPQVWVPSLEQRDTRQLLLHRNKLVSVRRQIKNQLQHLALNQGVQQKRKLWTEKGQALLQELPLTGWTARRREDDLKLLDQLNRSIAELDAAVEQEAKNNPIARLLQSHPGVGPITSLAFVLTVGRIDRFAHSRNVISYLGLNPAEHSSGGRQRLGAISKQGNPMLRSLLVEAGQSAARGDTDLKRAYQRLRHRKHSAVAKVMVARKLAVRLYWMWRTQQPYAATRMQDSPSHLVGAR

SEQ ID NO: 81781 - protein, 391 aa, unidentified
MVCVGIDVAKDKHDCCILDSEGTTLVDCFTIPNNMDGFKSLLQTIQDRSQKSDKIKVGREATGHYSYNILGFLLDNDLPVYVMNPLHTNLYRKSLSLRKTKTDRVDAKTIATMLLSDVDLKSYTDTAYHNEELKSLTRYRFDKVQERAKLKQSVSRLVTILFPELEQLVSSIHGTSIYALLSEYPGAKQISEAHLTRLANILVKTSRGHYRKDKATHIRDAARTSIGSVMPAKSLELKHTIKLIQELTSEINEIEDAIRKIMDELKPPILSIPGMGFHSAAMILAEVGDFSNFNSPDKVLAYAGCSPSTYQSGKLTNCYAHMEKRGSRYLRYALYTATKYVCYWNPVFTEYLTKKQAEGKHYNVALSHATKKLVRLIYALQKSGKAYLAVT

SEQ ID NO: 81782 - protein, 430 aa, unidentified
MEHSDEPVELVARVAALDVGKAGVVACVRVPHEDRPGRRRQEIREYVTLSRSLLELADWLRCERVELVAMESTSDYWKPVFYLLEAEGFRCWLLNAKHVKNVPGRPKTDKLDAVWLAKVAERGMCSPSLVQPKPIRQLRDMTRYRRSLIRERTREKQRCEKLLEDAQIKLSSVISDIFGVSGREMLGALIAGQRNPKVLARMARGTMRSKIDVLEEALTGHFEDHHGFIAQAMLAHIDTLSTQIAALDARITTMLDEALSHHVERFDEITGVGPTAAQELIAEIGVDATRFPTAAHLVSWAKFAPIDRNSATIKRGGSTGKGNPWLAATLGEIVAGACRTDTFLGERYRRLARRRGKTRAIVGLGNSILTIIWHLLADPEAHYHDLGPNYYQSQINTQRRQRDLTRQLEQLTGHKVTLTPRPVQPDHHIA

SEQ ID NO: 81783 - protein, 351 aa, unidentified
MLIVGCDYHPSVQQIAWLDTESGECGERRLLHSNGEAETFYRKLKEQEVSVRVGIEATGHARWFERLLAELEYELWVGDPAQIKAKRVRKQKYDQEDARLLLKLMMEDRFPRVWVPGVENRDLRQLLWHRHRLVQMRTRVMNQLQAVALNEGVRRKKALWSDAGRSQLESFRLGPWATRRRQDLLQLLDQLNSSIAPLTASVEQQAGQHLEAQRLMTHPGVGALTALAYVLIIGSPQRFRCGKQIGSYLGLIPCEDSSAGRQRLGHISKQGNSLLRFLLVEAAQAAVRSNADWRREFLHLAMRRQRQIAKVAMARKLGVRLYWMWRKGWDYETFLQFGSHVGQPEVGYGVK

SEQ ID NO: 81784 - protein, 445 aa, unidentified
MLPIMYERVAGLDVHKKTVVATRMRVTGEKRLDWETKTYGTTTPELLQLHDWLQEWELSQVAMESTGDYWKPVYNVLEDTFQVLVVNARHVKHVPGRKTDVKDSEWLAELMMHGLLKPSFIPPKPQRALRELTRYRTTLVQERARVVNRVQKLLEGANIKLSSVASHVMGVSARAMLAEIAAGQTDAALMADLAKGRMRSKIPELERALTGIVQPHHRFLLAQQLGHIDFLDERIDAIGTAIGEQLESMGWPEKPSAQNNGGSVGSGTEATDNSELPLTWDTAVALLDTIPGVDRRTAEVMLAEMGLNMSQFPTANHLASWAGLAPGNHQSGGKRYTGRTTKGNRSLCSAMVQAAWGAVRVKDTFLKARYHRLASRRGKKRAIVAIAHSMLVSAWYMLTHEQPYCELGGDYFDQRSRDAKVNYMVRRLEKLTGGSVSIEIQPAGA

SEQ ID NO: 81785 - protein, 487 aa, unidentified
MGKGRRLVGIDLGIASAHTVRVLDESGETVAKRKAWPTVESLSEVESAALAGALAGTRLEVVMEPTGPAWLPIAVFFARRGHVVHRVSSAKAADLRRFLSRHTKTNGIDADTLARLPLFDPAGLQPLQLPGAERAALDRRVRACDRLTQAGAEHKKRIKDLVRQLLPMTPLTGDLGAADLAVLERCADPHALLKAGVKQLSALIAKASRNHQGTERAAEWIAAAEASIDLYAGHPGIAFADLAAEVATEVRLLRAVQAELAAHGDERETCYRWVDTAGLARSLPGLAQVGGPALVACMGNPGRFRRAKQFRAFTGLAPRTSETGDTDRKGQPMSKAGSSLLRTTLVRAADHARKIDPQLARIYYVQMVERGKDHLGALCVVAANLAERAWAVMARGMPYVICDTDGRPVTPDEAKAIIAQHWTVTAEVRARRRSKKTGKAPQKVLAGQSKPHAQDAGTRSDLPRPASSAQRTSPVNNKNTSSTQRTA

SEQ ID NO: 81786 - protein, 381 aa, unidentified
MTTAAPHNEHGNITEATLFVAFELSEKTWKLGFTTGHGQKPRERTVTARHHERILDEIAQAKRRLGVPETAPVVSCYEAGREGFWLHRFLQAHGITNQVVDSSSIEVNRRRRRAKSDGLDVRKLLSMLIRYTHGERQVWQVVKVPSVEAEDHRHLHRDLETLKQERARTTTRIQGLLSSQGLRVTSLTKLPEQLEALRLWDGSPVPPGLRRRVLRVYAHHTFLSEQIAAVEAERRAQLHASTDARIDKVRQLMLLKGIGINGAWLLVMAFFGWRAFKNRREVGGLAGFTPTPYQSGDSAREQGITTSGNLHVRWMTTELSWSWLRFQPDSALSVRFRERFGGGGKRLRRIGIVAVARKLLIALWRFLETGVLPEGAILKAA

SEQ ID NO: 81787 - protein, 382 aa, unidentified
MNDLSRSLTPLDPVDTLIAVIEMSQSSWLVAGIVPGIERHPLKKLDPNEGELLRLLMRWRAEATKMGRTITRIAVAFEAGRDGFWLARWLRARDIEAHVIHPTSVAVSREHRRAKTDRLDTGLLKRVFIGWLRGEPDHCHMAAIPTLADEDAKRPNREREGLVRERTRIVNRMKSCLARFGVRNFKPTLRKAPERLATLVTPEGVSLPPNTLLELRRDMARLRFVMDQIKEVEEARAQRLEQAPQEKSHAMVRLLARVIGVGIETADMLVHEILSRSLRDRRAIARYAGLTGAPDESGRKRREKGLAKAGNARVRRGMIQLAWRFLLFQKDSALAQWYRTRTDTAGKKRKTMIVALARKLLIALWRLVTIGEVPAGVVLRAA

SEQ ID NO: 81788 - protein, 412 aa, unidentified
MRRVIGMDIHRTFGEVVFWEAGRLRHAGRIDMTRTALEGFGKKLLATDEVVIEATGNCMAVSRVLTPFVKRVVIANPLQVKAIAHAHVKTDKVDAGTLASLYAAGYLPEIWTPDAATERRRRLVARRYQVVRHRTRIKNEVHSILYAHLIPRCPHADLFGRLGRTWLTSQPLPDDERAAIERHLRELDRLGDDLRVLDQEIAQSALDDAAIKRLITITGVNLAVAAGLVAAIGDIGRFSSPQKLVSYFGLNPRVHQSGLGAAHHGRISKVGRSHARAMLVEAAWATAKAPGPLHAFFVRIRARRGHQIAAVAVARKLAVLCWHMLTKQTDYHWARPALIANKRRAMELQAGRPQKKGNKRGSTYAYNVKALRDQEMRLAQQAEQSYENLVAHWQPRPAKKQARGRLKPAGLE

SEQ ID NO: 81789 - protein, 352 aa, unidentified
MAATAQSAIAVIGIDIGKNSFHVVGLDGRGAIVLRQKWSRGQIEARFANMSPCLIGMEACVGAHHLSRKLKALGHDARLMPARYVRPYSKGQKNDFRDAEAIAEAVQRPTMKFVATKTADQLDLQALHRVRERLVSQRTGIINQIRAFLLERGIAVRQGQRFLRVELPRILATPPDVLSPRMVRVIEGLASDWHRLDERIEGLSSEIEELAKRDAGCERLMSVPGIGPIISSAMVAAIGTGDSFSKGRDFAAWLGLVPRQISTGDRTILGKISKRGNRYLRVLFVQAAWVVLVKVKPNRWQGHGLKPWIEAAKKRLHHNVLAIALANKLARIAWSVLAHGRAFETNKLQAAA

SEQ ID NO: 81790 - protein, 363 aa, unidentified
MSESTTVTVGLDVHARSIRWAAIRADELLEERTLPYDEEAVERALRRWPVVRCCYEAGPTGFGLYRHLVEQGFDCRVVAPGLVPQRPGDRVKTDPRDARKLARLLAGGLLEPIHVPSPEQEAARDLVRAREDARLDRMRDRHRLSKFCLRHGRTLPTSSWTVVRRKWLSEQRFPFAAQQITFDSYVHAVDLVDARIDQLERAIRETAEQGSWRELVARLRCLRGVDTLTGLALVVEIGDFTRFRRAEEFMAFVGLVPSEHSSGDRRGQGSITKVGNSHVRRLLVESAWHARRRPKVGYELARRQRGQDAIVIERAWRCQQRLYQRWQRMAGRGKPQQKIVVACARELAGFTWAIATDQPLRRT

SEQ ID NO: 81791 - protein, 411 aa, unidentified
MHNRRNYLYVGVDLHKEHHTAVMINCWQEKLGEIQFDNKPSAFSKFLLEVETYVSDGITVVFGLEDVGGYGRALAKYLVDHERVVKEVNPALSFLERKSQVMIQKNDSWDAECVARILVNKFNQLPDAKPNDLFWSIQQLVSRRNALVKAQSALKNQLHIQLNHHYPSYKKFFSELDGKTALAFWQQYPSPSCLEGVSIKKLTAFLLDVSNNTCSVKKASDILKLVKEDGQTMKEYQEMRNFLVRSIVRDIEFKKKEMKYIERELKQLVKLLDYQLETVPGIELVTASALIAEIGDVRRFPNANKLARFAGIAPVYFGSGGKGKTHKSKQGNRALHALFYNLAVQQVQVAKGSKLPRNPVFHAYYQKKLKEGKTKGQALVCIMRRLVNIVYGMMKYKTAYELPVVEEKEVV

SEQ ID NO: 81792 - protein, 475 aa, unidentified
MSNRLFAGIDVSLENNQLCLMDGDGSTIGKSLSFANNLPGTLAMVDHLNAIMENGDFEKLTIGMEATALYWFPLFNFLSSEASFKETQAQVLPLNPKIVSNFRSSYPDVDKTDIMDSFVIADRLRFGRVPQGHVPDVNFLALQRITRFRYHLVQCASELKNYAKSFLFLTFSEWSRTKPFSDLFGATPSKLLKKFHSAQELADVSAEDLKELLWQFSKGRFRDVDAKTEEVKQSAKDSFPVPRELADQVHLILKQTLQQLELLEKHVARLDKKIAKKMKKFNNVLESIPGIGPVLSAGILAEIGDISRFPGQAQLAKYAGLTWRKNQSGNFSGDFTPLTKTGNSFLRYYLIQAAQCMITHNAEYREYYNRKFKETTRHAHKRALSLTARKLVRLVYALLSKNQLYMVPEERKRRELAREEVSKTSVPEVQSEDFQALHKPQKKTKKVKTQTVAARPKRTLPLQQEHMRGRRAVNT

SEQ ID NO: 81793 - protein, 389 aa, unidentified
MLLDHPSDEPTAIRTHIAAIFVSLELSRSTWLVTSLSPGKGEKMSKHSITAGDVAWLLALFAELRRKAEVRTGQSYPTITIQEAGLDGFWLHRVLQQEGIESHVVDPASIATPRRRRRAKTDRLDGETLLRALLAYKRGEPRVCAMVVAPSPEEEDRRRLCRERRTLIGERVTHVNRIKGLLFAQGICDYAPIRRDRRARLEALRTGDGRELPSHLKAQIGRELDRIELLLGQIKEVEAALDALLAAARRPASQEAGPDPVTMMLALKGLGSNFAVVLWSEAFYRQFANRRQVAAYAGLAATPWQSGGIRHEQGVSKAGNPRLRTTMIQLAWLWIRHQPQSTLTRWFKERSQQGRKRAIVALARKLLVALWKYVTQGVVIEGAAMKPTV

SEQ ID NO: 81794 - protein, 407 aa, unidentified
MDVLHPKCAGLDVHQQTVVACARTGAGKAVTYDVRTFGTTTAEVLALSDWLTAHGCTHVAMESSGVYWKPVWHVLEGHFELVLANARHIRNIPGRKSDVNDAPWIADVLAHGLIRGSFVPPEPIQELRDLTRTRQQLVREIAQHTLRIQKTLENANIKLTAVLADVLGSSGRAILRALARGERDPERLAELASDRVKASRAELVAALHGRVPPHHRFMLTLHLTQIEALEAAVREVEARLGDALAPFRAALDRLITMPGVSETVARVIVAEIGFDMTRFPSAGHLVSWAGLCPRLHESAGKRLSNRTRSSNPWLTTTLVQAAWAAARKKDSYCRAQFLRIKSRRGPKKAVLAVAASMLTAAYYMLKHGVDYRDLGADHFDRRDKAKLAKRLIARLHDLGLTVEVRAA

SEQ ID NO: 81795 - protein, 339 aa, unidentified
MQVTTVGLDLAKNIFQVHGITEDGTIAFNKSLRRAQLLQFFESLEPCLIGMEACGSSHHWARQFQKLGHEVRLMPAMYVKAYVKRGKSDAIDAEAICEAVTRPTMRFVAIKSEEQQGVLFLHRARDLVVRQRTQLSNILRGLLGEFGIVIAQGIGSAVKFAKAVADGDRPSIPEVAIDVLTNLCNQMVALHLRILWYDKRILLEGRRDPKVMLLRTIPGVGPVTASAIVATAGDGHQFRNGREFAAWLGLTPINRSSGGKERLGRISKMGDRYLRRLLVTGMTARLNQMKVNPDRVDPWAMSLRERKPPRVATVAMANKAARIIWAVLTRNERYQPHTA

SEQ ID NO: 81796 - protein, 426 aa, unidentified
MRVLYPCCAAIDVHKDTVMVDVRCAEPGADTSSEVREFGTMTRDLLALSDWLTDRGVTHVAMESTGVYWKPIWNVLEASFQLLLVNAQHVKHVPGRKTDVQDCQWLAELLQSGLLKGSFVPPRPLRELRDLTRYRTKLVQDKTRAVNRLQKVLEDANLKLGSVASDVLGVSGRAMLERIIAGEQDPVVLADLAQRALRAKIPQLQQALYGHVTEHHRFLLAELYDEVRQLEARIQRITARIERALSGGELEAASEDPDALPFEAAVQLLTTIPGVQTAIAEVIVSEIGTDMSRFPTADHLASWAGVAPGNHESAGKRRRTKTPPGNRWLRGALTQAAWAASRSKGTYLSAQFRRLAGRRGAKRAIVATGHSILEAAYHMLATGQPYADLGPNHFDQLHPERLARYLVKRLERLGYSVALTYASEAA

SEQ ID NO: 81797 - protein, 445 aa, unidentified
MSKVNGLTRGDVRRNARKAALRELVPAGGAVIGVDLGERKQALVVTGADNRVVARRSPRAGVHGLGAHLDWAAGRARAAGYGTVAVACEPTGSRWMVVQELCAARGLPLVCVQPLVTHVAREQQDLTGDKTDEGDCVLIAGLARELRCYVPEQLDAGWAELRAAGRDRAALITRAAAARQLIRDQLGLAWPGLLQVHSDPLASATWLACLQTAVDGGGLAGDAAGYAAFAAAAAAGLAGWGGRRLGPAAARFHAALAGPAAVPRMARAARRRLAGALEDLRYARARRERLEQDMIAMLGELGIDYERICQIPGLTPAGLAAILAEAGDPRRLRSSSSLVKHAGMAPARNESGQFTGQARMSHRGRPGLRLAAWRATRAVLRHCDVLAARHAALTSRDHSRLADAQARVACAASLLRWIWALTVHGTRWDPRIAAGQLSHHHASAA

SEQ ID NO: 81798 - protein, 314 aa, unidentified
MINNFLGIDVSKDRFDVFLSFISKKGKRETRKRSFKNDDHGFQGLLSFLQKHNVEQVKACMEATGCYSEALAEFLHNTGHFVSVVNPYCIKSYARSKLTRQKNDQTDAEIIADCCQRQEPTRWTPPSPELKKLKHLYRCSVALKDELILVNNHLEKKERLPKEVANAWEDLAMNIAQKIETIKNSVRELLKQHKELLENFQLLLTIPGIGEESAVAILAEVPDIEVFRNARQLAAYAGVIPRNITSGSSVYAKPRLSKSGSQPLRKALFFPAIVAKNHNPIIMSFCQRLKEKGKHNMAIVGSAMRKLLHIVLVF

SEQ ID NO: 81799 - protein, 318 aa, unidentified
MEKSSKVFVGMDVHKESIDITLAEAGGEVRRLGQIGGDRGSLLKMVRKQQSKGGERVFVYEAGPCGFWIYRELAALGERCMVVSPALVPKRAGDHVKTDRRDSERLASLARAGELKAIHVPDIRDEAIRDLVRGRDDAVIAQRRVRQQLKALLLRNDIRYVGKTSWTGAHRRWLSELKLPEPAQQIAFEEYVDAIAVATGRIERLTRAIETEVLTWRFAPVVGSLQAMRGIQFVHAVTLVAELGDLTRFGSARALMGYLGLVPREDSSGEHRRQGSITKAGNSYARRALIRSRLGLSPSGASHAHHRHPASRNTESRL

SEQ ID NO: 81800 - protein, 378 aa, unidentified
MRFYNRVHKFYCGVDLHARTMYLCILDHGGAVVLHREVPAEPGAFLEAIAPFREGLVVACECLFCWYWLADLCQAENIAFVLGHALYMKAIHGGKAADDKIDSSKIAHLLRGGNLPIAYAYPKGLRETRDLLRRRMYLVHKRAEVVAHVVNTNSQYNLPPFGKKLIYARNRQVLKIAQRFGDASVRKNIELDLALLDSLDELIGDVELYLDRTVKVDDADSFYRLRSIPGVGKILALVLFYEIHDIGRFASEGEFLSYARLVRPLKTSAGKVKGGGGAKIGNAHLKWAFSEAACLLARESGQAKRFLARKEKQHGKPKALGILAARLGRAVYHMLRQKRAFDAKRFWNGEPKVPPTPKGKSVMTPGRRRKGARCVLEA

SEQ ID NO: 81801 - protein, 414 aa, unidentified
MDVVVERCAGLDVHRDSVVATVRLPVTGRSRRRRDQQTRSFGTTIGQLETLADWLASLGVTLVGMEATGVYWKPVFYVLEPRFECWLLNAQHLHNVPGRKSDVIDSAWCCQLLEHGLVRPSFVPPPEIRRLRDLTRLCIAQVEERTRAIQRLEKVLQDAGIKLSSVASTTYSASARAILEALLAGVSDPEQLAELAKARLRAKIPQLREALANRFELAHHGVLVAGLLAHIDALDQTVATLDARIAAATEPHAELVELLCTIPGVGVNTARVLIAECGLDMSVFPTAEHLVSWAGICPGLNASAGRRRSGTTRHGNRWLRKTLTEAARAAARSKNTYLASHYWQIRGRRGDAKAIGATRHDILIAYYHITRDRVPFRELGPDWLARRYSVEHRTHRLVKQLEALGHTVTIEAAA

SEQ ID NO: 81802 - protein, 353 aa, unidentified
MSMLAELVEVVIGVDTHSQTHTAAVVDARTGAVLARKTVAADPDGYAELVALAEQQAGLRAWAMEGTGGYGAGLARHLADSDELVVELDRPKRPARRAGAKSDPIDAERAARDALARGQLAQPKTGAERAALQMRLTARRAAVEAATAAQRQLLAMVITAPEAVRTRFRGQNTRAMITTAARLRPTSSSGDIEAITALTVLRDLARRIRFLEEEALAHERAIRTIVRSWRPDLLELLGVGPIVAATVLTAWSHPGRCRSDAAFAMLAGTAPIPASSGKTVRYRLNRSGDRQLNRALHTVTLSRLQRDERTRAYADRKRAEGKTDREIKRCLKRYIARELYRRLETPPSTLDAA

SEQ ID NO: 81803 - protein, 337 aa, unidentified
MKVTLIGIDLAKSIFQVCGVNQACKAVFNRAVKRDQLLGFLARYPGVVITMEACSGSNYLGRTLQQHGYPVRLIPPMHVKPFVKGNKNDRNDAFAICEAANRPQMVFVQPRSVEQTDLILAHRVRERLIGQRTTLINQLRGLLQEYGIVLAQGKEKLRQQLPQILEDAQNPLSMAARACFAQMLQEWADLDHSIGVHDRCITQQCRQTPACQRLTGIKGVAQITATALVAYAGNGAQFRSARHFAANLGLVPREHSSGGKQKLGGITKRGNRYVRRLLVQGAWSIIRHLQRATDRLSVWAKQVIARRGKHIAALALANKLARISWAMLYKQQEYKAV

SEQ ID NO: 81804 - protein, 366 aa, unidentified
MDKSSTVKMSGNEILKQRKLTIGMDLGDRSTRYCVLDEAGDVILERSVPTTKKGIDQVFGAMPRSRIALETGVHSPWISRQLTQLGHEVIVAHARNVRLIGESSRKDDRLDARTLARLARIDPQLLSPVQHRSAEAQAHLTVIRARAALVGARTALVNAARGLAKSYGERLRKCGTQQVRPDLAAGWSVELRAALEPLLGEIESLSQRIAAYDRQIEQIAKKEYPEVSLLQQVKGVGTLIALTYLLTLEDPHRFRRSRDVGCYLGLRPGRRNSGSSQPQLHISKEGDGYLRTLMVQGAHYILGPFGEDSDLRRWGLRLAERGGKNAKKRAIVAVARKLAVLLHKLWVNGEVYEPLRNHPTAVDAVA

SEQ ID NO: 81805 - protein, 368 aa, unidentified
MINLGFLNLKIVIMIQVKTLDFSGSTIFCGIDVHKKSWKVNVQDGEFELENFSQDPNPATLLKHLTRRYPNAKYKVCYEAGFSGFSAQRELSESAIECLVLNAADVSTSHKERSQKSDKIDARKLCNHLQGKMVKSIYIPSEDWEHSRSLVRARGKIVSNQTRCKNRIWQLLFFSGINLPKEYDASQYWSKGFINELKSIESSDTLRITLNLYIQDYLQTRSLLLEATRRVRELCRNDKFKEDFKYLTSIPGVGGINAAVILFELQDVKRFGSFDQLSSYVGLVPNTSNSGETKIDKGITNRRNNYLRTALVECSWMLIRRDPAMLMKYKEYCKKMEKNKAIIRISKHLLSRINYVLKNKKEYVIGVV

SEQ ID NO: 81806 - protein, 419 aa, unidentified
MQHWKHITHYAGLDWATDHHDIVVVDQQGRIKLTQRIAHSAEGWNLLQAKLSQLGNVAVAVENNHGLAVEQLLSHDLETYPVNPKCAQRYRERKSPSGVKNDQLDAWSLADALRLDGHGWKRLVADDPLVGELRLLTRDEVNLIEQRTAFTNQLIAALRDYYPAAVEAFEDWTLPAAWAFVERFPTPQALVKAGKRAWEKFLHAHKLCRPETYQHRLEIFARADQFAGTTAVTAARSLLATSLAVMLRTVNLQLEKYRERIQTVFSQHPEHHIFASLPGIGPKLGPRLMAELGSDRERFDSAQSLQCFAGTAPVTIQSGKFSKCIMRRACQLRLRAAVHLWANLSRSSCPWAQVYYRAHRAKGQSHACALRCLGQRWLKILWKMWQTRKPYDADFHARNQQQHGSWVLKLEPSSADKTV

SEQ ID NO: 81807 - protein, 315 aa, unidentified
MEHSAPTPSFVGIDVSKDRLDVHLRPSAETFAVARDGEGLEALVAALRRLDVALVVLEATGGFELTVAAALAGAGLPLAVVNPRQIRAFARATGRLAKTDALDAEVIALFAERIRPEPRPVAGEQAQALSELVARRRQLVEMIGQERNRSRQARSRRVQKSLAATLKVLEAQLAALDRDIDGAVRGSPAWREADDLLTSVPGVGDVTSRTLIADLPELGQIGRRRIAATVGVAPFNRDSGQWRGQRAISGGRTDVRNTLYMATLSAIRCNPVIRAHYQRLLDRGRPKKVAIIACLRHLLTILDAILRTKKPWQIA

SEQ ID NO: 81808 - protein, 367 aa, unidentified
MKKVSTVAANQSGHFAQPKLTIGLDLGDRSSWYCVLDERGELQAEGKVSTTAKAMCEAFQRMPRSRIALETGTHSPWVSRVLSELGHEVIVAHARNVRLIGESRRKDDRLDARTLARLARIDPQLLSPVKHRSAKAQADLTLIRARAGLVRARTALVNTVRSLAKSYGERLRSCNVRNMDPEKAEGLSPELQAALEPLLRSVESLSEGIREYNQRIEALAQQSYPEVALLKQVKGVGTLIALTFLLTLEDPHRFRKSRDVGCYLGLQPGRRNSGQSEPQMHISKEGDPYLRTLLVQGAQHILGPFGPDCDLRRWGLKLAERGGKSGKKRAIIATARKLAVLLHRLWVSGDVYEPLHNSRHQAVPAVA

SEQ ID NO: 81809 - protein, 350 aa, unidentified
MKIVGCDFHPRWQQIAVFDRETGEITEHKLMNGDGEAERFYAGLPVPTLVGVEACGNSQWFLDLLERLGHEVWVGDAAQIRASYVRKQKTDRRDAEHILRLLMEDRFPRLWRPTAGQRDLRQLLIHRHKLVEIRTRVKNGLQHLAMNQGEVKPSRLCGVRGRADLAKLPLEGWSARRREDLLHLLTELDGQIGELDRAVEAAAFADAEARLLMTQPGVGPVTALAFVVTIGDVRRFEHSGQVSSYLGLIPREHSSGGKQRLGSITKQGNQFMRQLLVEAVQTSCRLDEGFRKQYQARCHHKPKGVAKVAAARKLAVRLYWMLRQNVGYPEIARIESSSGVPLARTTRPRR

SEQ ID NO: 81810 - protein, 367 aa, unidentified
MKKISTAAVKQGRNISQQKLTIGLDLGDRNSWYCVLDEAGQIQLEQRVRTNAKALQEVFAAMPRSRIALEIGTHSPWISRLLSELGHEVIVANARKVRLIGESRKKDDRLDAQTLARLVRIDPKLLYPVKHRSAQAQADLMMIRARAGLVRARTALVNTARGLAKSYGERLRGCNVRNMNPEKAEGLSPELQSALEPLLACIESVSEQIREYNQRIEKLAQDSYPQVALLKQVKGVGTLIALTFLLTLEDPHRFRKSRDVGCYLGLQPGRRNSGQSEPQMHISKEGDPYLRTLLVQGAQHILGPFGVDCDLRRWGLKLAERGGRNGKKRAIVATARKLAVLLHHLWVSGEVYEPLHNSGRTIVAAAA

SEQ ID NO: 81811 - protein, 351 aa, unidentified
MPSLAEFADVVIGVDTHVDTHSAAVVDARTGAVLEELTVATTPAGYQELVDLANAHSPARVWAIEGTGSHGAGLTRYLRRGPEVIVELDRPERATRRHGAKSDPLDAVRAAREAMARPVLGTPREGDGDRQALSVLLAARRSAVDGARVAQQQLFSLIIAAPEVLRDKFRGATSAQRLRVAARLRVAAAWDTHTTTTASVLKTLARRAQALTAEANTLEKEIRRIVKAWRADLLDQFGVGPIVAATVLCAWSHPGRVRSEAAFAMLAGVAPIPANSGQVTTRYRLNRYGDRQLNRAIHTIVLNRQRHQEPTKAYTAKRTAEGKNPREIRRCLKRYIIRDLYRLLENPPLPR

SEQ ID NO: 81812 - protein, 472 aa, unidentified
MSKLSQRKPSSQAGSQIEVRPFDGLVRIQPHVAGMDIGAHEIVVCIPGPGNTQIVRSFGNYTADLYAIADWLLEHNIQSVAMESTGVYWIPLFETLESRGFRCCLIAATAIKRFPGRKTDVLDCQWIQTLHSYGLLADSFRPEADLAALRTLLRHRAQLIQHRSPHILHMQKAMLHMNIQLSQVLSDITGETGQRIIRAIVAGERDPHKLAGMRNYRCKKGEAEIAKALTGTWREEHLFVLRQSLAFFDFYTWQIEACDEQIERTYASIRPDWDDPNPEDQTPLPSKKPRSHSKNTPKYVQVRTHLKRIAGVDLVAVHGISASLAQIILSEIGTDMSRFPTEKNFCSWLGLAPHNDITGGKVVRSRTLKTHNRAGQAFRQAAAAVIRADCSFGAFYRRLKSRLGPAQAVVATAHKIALVVYHMLKFKIDYQTVSAQEYDQRFREREIRYLQRKAAKLGFTLSPSTSPVPAVS

SEQ ID NO: 81813 - protein, 368 aa, unidentified
MIKTLVHHQGAAAPAAARHQDGRTPATIKLGVDIHARLYVVVAQYDHAQPKPPQRFAPEEFLPWVEGLLARGHTVHVVYEACGFGFGLHRQLTAAGAHCYVIAPRKLDEAHTGVKTDPRDALTLCQRLSRYLEGNTRELAVIRVPTEEEEQARHVSRQRAQLVRHRQKLEAAGRGLLVSHGLPAPAHWWKEQTWTYRLTPHLPAWILPHLETYRPILLALDAQIAALTATLEAAAPRDLPSGLGKLTSVVLSHEVCNWHRFKNRRQVSSYTGLCPGEHSSGGRRVQGSVTKHGNPRLRAALVECAWRLVRFQPQYPPVRKRLAILAKGAKATGAQRKKAIVAVARHLAVDLWRLQTGQCRAAQLGLTA

SEQ ID NO: 81814 - protein, 412 aa, unidentified
MQVLHQICAGMDVHKKDVKVCLVTRDSQGQRQEEVRSFRTMTRDVLAMRAWLQGQGCTIIAIESTGVYWKPIFNLFEGDFTVLLVNPSHIKQVPGRKTDVKDCRWIAELLEHGLLRGSFIPPVEMRDLRDLTRYRRQLVNTHSAEVNRLQKVLEDANIKLASVATDVMGVSGRAILRALLAGVVSPEALAELAKGRLRKKKQDLQAALLGRFRPHHTQLLTHILAHIEFLEESIAECEAQIEALCRPFAEVIALLDTIPGVSQRTAQDLIAEIGVEMAWFPSAKHLCSWAKLSPGNNESAGKRKSGRTGKGNKWLRALLVECAHAAGHTKETYLGTKFRRFASRKGKQRAAVMVAHRILEAAYFIIRDKVPYRELGEQYLDAQHREHVIRHHVRRLESLGLHIDIRELPLTA

SEQ ID NO: 81815 - protein, 423 aa, unidentified
MDILYERVAGLDVHKDTVVACVRMVVDGKTTRECRTFATTTEQLVALRAWLEECRCTHVAMEATGVYWMPVFRLLDAGKFKLIVANAAHIKNVPGRKTDMSDAMWIADLLACGLIEASFVPNEEVQELRALTRTRKQLVREQTRHVQRIEKTLAEANVKLSSVISDIVGASGRRMIQAMIDGVRQPNKLAELAGKQIKATPKELYDALHGRLTDHHRFLLALHLKQWDSIDEMIRKLDVEIDQRIGQMTAEAEGNETPFRALIGLLTTIPGVSAVAAPAILSEIGPDMSRFRTAGHLVAWAGLCPGQNESAGKRKSSRLRKGAPWLKTMLVQCAWAAKRTKDSYYRAQFFRLQAKRGPQKAICAVAASILTAIYHILKHGTEHHDLGSDYFDRRPVELKASRLVARLKKLGFTVQLQPIAEAA

SEQ ID NO: 81816 - protein, 404 aa, unidentified
MWYVGLDWADTHHDVAVLDESGKPVGARRFSHSPRGLNDLKQFLWSFASHPEELACIVETNHGLLIAFLLSAGIPVYPVNPKTINGLRNVAGAKTDRIDAQLLAKAGYFRLSDLHRLEPDSPTVQELKTLTRDQDALVQMQTRLVNQLTACLKEYYPVALSLFSQLHQPATLRFLRAYPTPEAAAGASVEEITATLRQGKFPNPTQAAAAIVEEVHRPQLEASTVTVRTKSRLMLSLVKQLLVVIEDIASYEKEIQALFLTHPDHEIWSSLPRAGKRLAPRLLAEWGDDRTRYADAQSVQELAGTAPVPFQSGNYARAHKRFACVKPWRNDLYQFAWQSTLSEPWAASYYQRKLAEGKTHSMALRALANVWVRIIYRMWVSHTSYQPATFEAAQRAHAPRPHAA

SEQ ID NO: 81817 - protein, 378 aa, unidentified
MRDHTEGFVAFDTSKLRNSVAIADGGRNGEVRYLGEIENTGASVTKLVKKLAGKYERLSFCYEAGPTGYGVYRQITSLGHECSVVAPTLIPKKPGDRVKTNRRDAVSLAKLLRAGELTAVWVPDRRHEAMRDLTRARETAMLDLRAKRQQISSFLLRQGLSYLEGKRSWTKMHMNWLASQKFELAEHRIVFEEMMEAMRQAQGRLERLEGAIHAAVPDWSLSAVVTALMAMRGLDMISAATFLAEVGDLSRFQSPYELMAYLGLVPSEASTGDKVKRGPITKAGNRRARRMLVECSWSYQHPPRVSKQKQAKVDAVPQAVRDIAWKAQCRLNRRYRALVRRGKLKTVAITAVAREFAGFIWAVARAASAPTTAVTGAK

SEQ ID NO: 81818 - protein, 371 aa, unidentified
MTSEKYIGLDVHQATISVAVMDSQGKVVMESILETKASTLLEFFAGLRGSLFVTFEEGTWAAWLYDLLKPHVTEVLVCNPRKIPLLKQGNKSDKIDARKLAERLRLHDLKPVYHGETGIRMLRELARSYLTVVKDLSRVMNRLKALYRSWAIPCAGRDVYYRRHRSAWLDKIPEAGTRRRAEQLYQQLDLLQHLRQQARRELLAESRKHAITAKLRKIPSLGPIRSALAVALIQTPHRFRSKRQLWTYSGLGLETRDSGEYHFLQGQPRRRKKQATIRGLNKDYNHDLKGLFKGAATRASVKPGPFQEFYQRSLAKGIKPTMVRLTLARKIAAITLTLWKKGARATPSGWLYDSETVRAKCAMSVKRPGAN

SEQ ID NO: 81819 - protein, 420 aa, unidentified
MSSPLSNFAALVGIDWADKTHAVCLKLPGQAPVECTELVHTPEAIEDWAHDLQRRFCGRPIAVALEQKKGPLLYALCKYDFLTLFPVHPQTAASYRQTWAPSQAKDDPTDAALLVELLERHYDRLPRWKPQGKQVRQLQQLVEMRRRLVGDKVRITNRLTAALKNYYPQALELFEKKDTLIFCAFLEKWPTLHQAKRARAHTLMRFFHEHNAHYDTTNTARIDRIKRAHPLTEDDGIILPHQLLVQALGAQLRTTLLSIHTFNEQIETLYEDHPDAPLFDSLPGAAQVYAPRLLAAFGEDRDRYQSADEILKYVGIAPVIERSGQKYWTHWRYACPTFLRQSFVEWAGQSIQGSSWANAYYQRQKERGKSHQVAIRALAFKWIRILFRCWKNRTPYNETIYLRAMQQKRSPLVENIVKTT

SEQ ID NO: 81820 - protein, 340 aa, unidentified
MTITTVGIDLAKNVFAVHCVDQNGKTVLVKPKVSRAALPELIASLPPCVIGMEACSGAHYWARVFRQYGHEPRLMAAKFVSPYRMAGKSGKNDAADAQAICEAVRRPHMRFAPVKDESQQAMQCLHRTRQGFIEEKTATYNRLRGLISEFGVIAPQSTDALRHIVFEQKNSLPLQVQQCVDDLLEHVARIEDNIAEYDRILSRMAKTDHRSQRLMELKGVGPTTACALVASIGNAHDFKNGRQLAAWLGLTPSQYSSGGKSKLGRITKAGDSYLRTLLVQGARSVLIGAEKRTDLFSRWVCSLVERRGYWRAVVAIAAKNARLCWASLHYGDDFRLYSAS

SEQ ID NO: 81821 - protein, 408 aa, unidentified
MNPLYVGIDVSSKSNVVYFMLPDGSKHCNFSVANSHTGSSQLVKRILSALTSHSLDTVLIGLEATSVYGDNLVYFLREDATLAPFNRKIHVLNPKQVSKFKEAYNDLPKNDLIDSFVIADCLRFGRINKEVYIGDYRYKALQNLTRARYFAVSNLIKEKQRFMNILFKKYSTMTQEKVFSDTFSTTALAVYDEFESAEALADMDLHELTAFIMEKGKNRFPNPNAVAKAIQKAARSSYRLPKTVNDSVNQVLSISITSIKALEAQIKEFDKAIATQMELLPNVLISIPGIGPVFSAGIMAEIGDINRFHNQAQLAKYAGLAWKQHQSGDFEAQTTRLINSGNRFLKYYLCEAAFSLVRCDKEYSDFYHLKYKEVNRYQHKRALALTARKFVRLVFRLLKDNRLYTSAE

SEQ ID NO: 81822 - protein, 416 aa, unidentified
MKKNSKSPMKKEQQAKRAKVQRPVQREVKAVLAELVEKLQGKLAVKATSASPAEAGPRAELSPNLDRLTVGVDLGDQWSHFCILGFEGETLSEGQLQTREAEVAEFFQAIPPARVVMEVGTHSAWMQEIITGEGHEVVVANPRLMEGSKRRKRKNDRIDAKKLARLGRVDPESLHPIRHRSREVRQDLVVLRAREALVAARTELINATRGLVKSMGTRLPKCSSPSFGEKVKGVIPEKVREALLPLVQLADALSDSIQSYDQKIEELGSEKYGQTKLLRQVKGVGPITALAYVLTLENPEHFAKSREVGPYLGLVPKQEDSGESQPQLGISKTGDTMVRKLLVGSAHYILGPFGPDTDLRRYGLRLCERGGKNAKKRAAVAVARKLAVLLHRLWVSGEVYEPLGYASSRGIVQQAA

SEQ ID NO: 81823 - protein, 416 aa, unidentified
MLYVGIDQHRKQLTVNVRDEAGQIVLRRQVSTAWDRVTAFLDDLEQRSRDCDGYVAVVEICGFNAWLLKLLNTRAPACRQTIVVQPEFQSSHKTDRRDASGLSELLWVNRERLLAGRKVNGLRCVRTPSADDQADRQLTALRVTSGRELTRTVNRVKAILRRHNLEQECPTKGLGTRRARAWLMTLPLSAVERLELNQLLLRWDQFAAQRQQLEALIGERQKQNRAAIILASIPGAAAYSSLALACRVGDVSRFPHPRSLANYWGLTPRSRNSGEATQRLGSITKEGSRIARFLLGQLVMHVLRRDGVMRGWYKRLKRRRGSKIARVAVMRRLATIIWHMLTKQERYRCGGPPRERLVSTTAAPVTTSPPRRREPNKRSDHKPAQQRDESNETKNDQQSRTPVRGFAPEPPGFSEA

SEQ ID NO: 81824 - protein, 379 aa, unidentified
MNDYSKYVGLDVHKETIVAAIAKAGRGDAMQYGEIDSTAEAIQKLTKKMSANGERVLFCYEAGPCGYGIYWQLKEMGQECMVVAPSLIPRKAGDRIKTDSRDALTLARLSRAGELTAVWVPDKEQEAVRDLTRAREDMKVMEHHARQQLGAFLLRHGKRYPGKSAWTQAHFRWMEALRFEHSCQQIVFQEYVDMVKHAQGRLEALEQQMLAVLETWSLREVVIALMALRGVKLIAAMTILAELGDLSRFESAPQLMAYLGLVPSEHSTGQKKKRGGITKSGNGHVRRVLVEAGWSYRFPARKTAALQRYAEKTSDEVQEIAWKAQKRLCMRYRHLLLKGKLKVEVCTAVARELTGFIWAIACEVMKKRGIKTITKAKAA

SEQ ID NO: 81825 - protein, 440 aa, unidentified
MIDTNQKQEIEFAAFVGIDWADLKHAWALQIPGHRDVERGDLDHTPQAVEAWAAELGRRFGGRPIAVALEQSRGSLLFMLTKYVHLVLFPVHPTTLSDYRKGFRPSGAKSDPSDAGLLVDLLVRHREKLRRLNPDTEQTRTLQFLVETRRKFVSDKTRYSNRLTAYLKMYFPQVLGWFSEVTSPIAGDFLERWPSLQKVQKARPETLRKFFIQRHSCKPESIDRRLEEIRRGVPATHDAAVTCSCSAAVLALVRIVRTVREAILSYDQQIETLAHQHPDFAIIDSLPGAGPALVPRLIAALGTQRDRYHSASELQSYSGIAPVLASSGKQHWVHWRWACPKFVRQTFHEWAAHSIGSSAWARAYYEQQRAKGKPRNTVVRALAFKWIRILFRCWKDHKPYREDFYREALARHQQRASTSSPVQLQWKNCAGFSKITAITS

SEQ ID NO: 81826 - protein, 457 aa, unidentified
MSQTKPSRRSRELSPVHPAAAAIDIGATVHVAAVGSNRDKEPVRTFRTFTADLHRLADWFSECGIKTVAMESTGVYWIPVFEILEQRGFEVMVVNARDAKHVPGRKTDVCDAQWLQRLHEYGLLRASFRPQAEMAALRAYLRQRERLLDYAAAHIQHMQKALMQMNLQLHHVVSDITGATGMSIIRAIVAGERDPNVLASQRDRRCHASEETVCQALIGNYREEHIFALTQAVELYDVYQTKMLICDMQIEAILKRLKKNAAPPKSKLPPARRRARQSNEPAFDVREALHAILGVDLTQINGLGPSLALKLVGECGTNLTAWPSAKHFTSWLGLAPHNKISGGKVLSSKTRRTRNRAASLLRLVASSVGRTDTALGAFYRRLSARVGKAKAITATARKIAVLFYNTLRHGMSYVDPGANYYEDRYQKRVLNNLQRRARSLGFILLKVEPDTAQVGVS

SEQ ID NO: 81827 - protein, 355 aa, unidentified
MNTRRVQDFVVRGKEIFVGLEDSKKTWKLAIRSERMLIHRASMEAEYEVLNRYLKNNFPECTIHLIYEAGFKGFTLHDQLAGDGIDCVVIPPHVVTEPKVNRVKTDKRDANRLALILENHDFKDACYVPDKERREDRQISRTLIGIQKDIVCTRNRIRKFLDFHGIQVPASRLRRDEFRVLMTSSLPESLRISLNVLIGELEHLWTCRTILRAALRQLCQKERYHKAWEIAKSLPGIGWFTAIRLVLELGDDLTHFTSGKKIASFVGLTCSEYSSGETEWKCRITGMGSGFIRMTLIESSWVAIRKDPVLLAKFSRIWRSSGSRNKAIVGVARMLIVRLRACMVLGCPYRIGVVQ

SEQ ID NO: 81828 - protein, 403 aa, unidentified
MNSVGIDISKGRSTIAVMRPFGEVVISPFEVRHTDSELSELARQLKSLDGETRVVMEATGNYHTPVAKLLHDAGLYVSVVNAKLVHGYGNNDLRRVKTDKKDSVKLANYGLDRWLTLPRYVPEEDTRLLLKNCYRQYRQYSKVQTVLKNNLISLLDTVFPNVNRLFSSPIRGDGSEKWVDFVAEFWHCRCVSEKSERAFTSKYLRWCRKHGYNFSEAKAHTIYAEASGHIGVMPKSETTKLLVEQAVAQLRATSTALAALKHEMQTLASQLPEYPAVMDLFGVGPTLGPQLIAEIGDVRRFYSKKALVAYAGLDAPPNDSGDVTGRHKSMSKIGASSLRRTLFLVMSVYLQTAPLDEPVYQFMDRKRAEGKPYRVYMMASANKFLRIYYATVKAYLESLEHTA

SEQ ID NO: 81829 - protein, 354 aa, unidentified
MQEYLQFFLLNQKIKIMKKYLLFIGIDISKKWIDLAASFDGKEKQMHHKRFTNDVKGFDAMLKWLSQLFNVDLQSGALFCMEHTGVYTIPLCAYLEGKQLDYVLESALRIKRSIGIRRGKDDKADAKAIARYVFLNHKDLKVSILPAQVLVDLKNLLAYRSRLLKQLHAIKVSAEETQKFSISSDSMNWIAENSEHLVESIKTQLKQVHANIKTLIKGNQEINKVFDLVTSVKGIGLITGLQIIIYTNNFKSFDCSRKFACYIGIAPFHKKSGSSLDIQAKVSPLGHTKIKALLSNGIMAAIKYDKELKSYYQRKIAEGKNKYKVLNAVKNKLISRVFATVKRGTPYVELFNYA

SEQ ID NO: 81830 - protein, 356 aa, unidentified
MYGLKHQKEKRSMDHFAGLDVSVKETSVCIVDDVGKIVRETKVASEPEALLVVLTNPTYHFKRIGLEAGPLSQWLFSALAEAGLPVICVETRHMRAVLKAQINKTDRNDARGIAQMMRVGLYRPVHVKTLRSQKLRMLLTHRQLLLSKAIALENDLRGTLRNFGLKVGMVGKVKFEARIRELVESLPDLAVLVEPMLIVRRVLREQIVILHRRLLAIVRDDEVCQRLMTTPGVGPVVSLTYRATVDIPARFRKSKSVGAVFGLTCAKYQSGEVDWDGRISRCGDEMMRTMLYEAAQAMMRSKKWSWLKAWAMQIARRRGMKKAIVALARRLAVIMHRIWVDGTEFRWTREQAAVAA

SEQ ID NO: 81831 - protein, 456 aa, unidentified
MSKVSKHRKRIPRLEALKQINLDAAGIDIGSTEIFVCVPEDCAEQNVKAFDTFTRDLHAIAGWLEACEIKTVAMESTGIYWIPLFEILTEKGFEICLVNAREIKHVPGRKTDVLDCQWIQQLHTYGLLKASFQPDERIGQLRSLIRQRDSLLKNRGSHIQHMQKALHQMNLLLDNVISDITGLTGMKIVRAILAGQRHPGQLAQYRDRHCKNSEEVIAKSLEGNYSDEHIFELHQAVKLYDFYTELIGEVDREIERKYDWFPKKIELEDKPLLPQKRSNKKPLKNEPHFPLRESLYKMCGVDLTLIDGINSLTVQTVVSEVGLDMSRWKTVKHFTSWLGLCPSNDISGGKVLKSRTKKTNNRANTALRIAAMSLHRSNSALGAFYRRMRAKAGAPKAITATAHKLARIFYFMLRDSKEYVDMGADYYEAKYQQRVLKYLNHRANSLGFRLMPVEVS

SEQ ID NO: 81832 - protein, 442 aa, unidentified
MPNRTVNRLSRGDRRRNAKLRDLRSLVRPDLAILAVDLADANQAAVVADHDSVVLGRRMFRCSAWGIDQILDWAIPIAQQAGFAGVVVACEPTGHRWKPVAERARARGLNMVCVQPLLVHRAREAEDFTRDRSDYKDATIIARLTSERRCYRPEVTTPTWARLRHLGQRRAAVLAAATAARQTLRDLLGVGWPSVLDAAAQPLDSLTFRACLAVATDPTPIVAMGYDAFAGAVAAELPRWGGKRRRHQILRAVFAAAQAPGGVAAERVGAAERARFAVADWHRALQQLGEVEGRMVAVLDQLGLTRLVTTITGLSAVGAAAILAETGDPARYDIARTWAKHAGLCPRDNTSGRFQGQTTTSGRGRPGLRTAAWRAIWGLLPHNPIFAARYAHLTGRAHNPLNDGQARAALAAGLLRQLHAVCTHRVAWDPKIAAGEVTATAA

SEQ ID NO: 81833 - protein, 409 aa, unidentified
MERVVERCAGLDVHKDTVAACVRVPGPGQQRAQEIKTFGTTTADLLALRDWLEAHHVTHVAMESTGVYWKPVFYILEEAFTCLLVNAAHIKQVPGRKTDVQDCAWIAQLLECGLLRGSFVPPAPIRELRDLTRYRKVLIQERTREANRLHKVLQDAGVKLASVATDILGVSGRAMLEALVQGTTDPAVLAELARGKLRAKLPALRAALAGRFRAHHAFLVSQLLAHLDYLEEAIQTLSARIEEVIAPFAAEVARLDTIHGVNRHTAEVLIAELGVDMAVFPSDRHAASWVGLCPGNHESAGKHRSGKTRKGNRWLRMALTEAALGAIRTKNSALAARYRRLVRHRGHKKAVIAVAHAILRTAYHLLARQTAYQDLGTDYFDRRHAERVRRRAVALLERQGYRVALERAA

SEQ ID NO: 81834 - protein, 388 aa, unidentified
MNRIIKIGMDVHSTNYTLCAMEPTIGSEDRIFAEIQIAPDYKEVIRFIESLKKKLGYDNNYSIECGYEAGCLGYTLYHQLTNAGTKCVILAPTTMLTQQGQRIKTDKRDARLIAQCLCYGGYHTVYIPTGEDDAVKEYLRMRDDHKLALKKLKQQINAFVLRHGYQYIGTKWSNKHISWLNKLELDSMYRETLDEYMASYEEQKAKIERYDKRIEEISTEANYNESTKKLGCLLGIRTHTALSLIVETGDFNRFAKGNIYAAFLGLAPGERSSSTNVNRLGISKAGNTHLRYLLIEASKGICKGAIGHKSKELRSRQNGQPAQIIAYADKANTRLRSKYYRMIRHGKKKNVAVVAVARELACFIWGIMTGNIGIALETSKSVAAASQG

SEQ ID NO: 81835 - protein, 410 aa, unidentified
MLELFVGDDWAEEHHDVELMDPAGRRLARARLPEGVTGMARLHAMIAAQLGEGVEDAVVKVGIETDRGPWAQALIAAGYEVFAVNPLQAARYRERHSVSGAKSDKADAHTLADMVRTDSHQLRPVAADTPRAEAIKVVARAHKTLIWERTRHTQRLRHALREYFPAALEAFEDLAASDTLELLSKAPDPAAAARLSISQISAALRRAGRRKIEEKAAVIQTALRAEHLRQPEVVAAAYAASVQSTVAVLKVLVEQVKTLQGQVESHFGRHPVAEIILSQPGLGPILGARVLGEFGDAADRYVSAKSRKNYAGTSPITRASGKKKLVLARFVHNDRLIDALAAQAFAALSSSPGARAYYDRIRARGVGHRAALRQLANRLVGILHGCLKTGTVYDETTAWPADATDSPAAA

SEQ ID NO: 81836 - protein, 339 aa, unidentified
MKYTPVGVDIAKHLIQVHFINEHTGEVVDKQLRSKDFLTFFSNREPCLIGMEACGGSQHWARELKKLGHEVRLLQASFVKAFVMGNKNDVMDARAIWMAVQQPSKEIAVKTEEQQSVLVLHRSRRQLVKFRTAQINALHGTLLEFGETLHKGRVAMDRELPAALERMKTKLPPYLITVLEDQYTRLSELDMLIDDLEKQLNSVARQSETCKRLMEIPGVGPLIATAAVATMGKASAFKSGREFAACVGLVPKQTGSGGKVRMLGISKRGDTYLRTLFIHGARSAALLTKEPDPWITELKKRRPTGVAIVAMANKLARTVWAIVAHDRKYDKNHVSIRPY

SEQ ID NO: 81837 - protein, 343 aa, unidentified
MQIRWVGIDLGKTPFHLVALSAAGKVLLRKKFTRKQLITFTANLQTCLIGMEACSGAHFLGCALREQGHEVKLIPAQFVKPFVKSNKNDFLDADAIAEAVDRQNLRFVPIKTDDQLDLQALHRVRDRLIARRTAVINQLRAFLLERGMTLAKTPAKLKVAMSEILEDADSNLTPRMRNLVSLLWSEWKDLEQQIVAMNAEVEQIASSDPACQRLRQIPGIGPLLATAIVAAIGNGSAFHKRREFASWLGLVPRQHSTGGKARLFGISKRGNRYLRKILVHGARSAVLRVKRERSPFGAWLDALEQRAPINVVITAAANKLSRIVWAVLSSGQDYRPAVTAMPA

SEQ ID NO: 81838 - protein, 351 aa, unidentified
MMRYVGIDVGKNRCRAAVMNEKGIIENEFFFENSNKGIANLLSTLNNKDKVVMESTGNLWLNLYDSLDQRNIKVVLANPLKTKAIASAKVKTDKIDARILAHLLRADLIAESYVPEGKIREMRALVRHRLSLVQMRTMVKNKVHAIVDKYGYRCEYSDMFGKAGIQWLKSQEINQIDSLLLENHLSLIDSIKLQIGRVDDVIRARACEDEDVRLLLSLTGIDVYTALLIRSEVGPIERFSDYKKLVSWAGLAPSVHQSGNVEFHGRITKRGSTILRWALVEDARIAVRHDERMRAFYERVAKRHGDQKATVAVACKMLKIVWFMLTRREAYGDANVRRYGEKLKRIEMQKG

SEQ ID NO: 81839 - protein, 358 aa, unidentified
MQTQSNKLDFTGQNIYVGFDVHLKSWKVTIMTEKLTHKTFSQSPKPELLYGYLTKNFPGGNYHSAYEAGFCGYWIHNKLKTLGVNSIVVNPADIPTTDKERVQKEDARDSRKIARSLRSGELNPIHVPCLKTLDDRSLVRTRSALVKDLARNKNRTKSFLYFHGIDIPIAFSNQKVWSKNFITWLHAIDMPEQSGKNALNAIVGASNDLRASVFQITKQIHELSKTKEYQEQITLLRSIPGIGLLTSMTILTELETINRFESFDKLCGFIGLIPSTHSSGDNDIVGDITRRGHGVLRSAIIESAWVAARVDPALTKSYHDYCKRMEPNKAIVRIARKLLNRIRYVLKNKQLYVCSVVK

SEQ ID NO: 81840 - protein, 392 aa, unidentified
MTSMTLDPPLTNLLPPDAELVAGVDTHKNTHHVAILDLVGRPVADREFRADGRGYAQIVTFLHAHGDVVRVGVEGTGSYGAGLARALTAAGLTVVEVARQDRQARRRRGKSDPLDAHQAAVAVLAGTDTAIPKSGDGAVESMRILLAERRSAAKARAQVMNQIHALLITAPELVRQAFRALSGQRLVNTLAKTRPGTIMSPDPEVVARQTLRRFAVRHLTMQAEIDLIEQQLEVLVRQVNPTLLSLSGVGPVTASSGQRTRHRLSRGGNRHANAALHRIVLLRMRHREPRTMAYFERRRSEQLTDRDIMRCLKRHVANEIYAALLNPATDNPIGRELRARRQAVGIPISVLAATLDVPYQRLRRLEIGTRADPELEARATAVLEQISPPLAA

SEQ ID NO: 81841 - protein, 359 aa, unidentified
MSDPSRSITGGVDTHKDFYVAAAIDGLGRILGTEQFPTTPRGYRRLLRWLRRFGDVVAVGVEGTGAWGAGLARYLTAEGVRVVEVDRPNRQRRRRRGKSDPADAEAAARAVLAGDQTGTPKAATGMVEAIRLVRVARRSAMKARTQAANQIHSVIDTAPEELRGQLLGLRENERIAKCSRLRATDPTTPAGAAKLTLSTLARRWLALSDEIKTLDAQLERLVEATAPSLVAAKGIGTETASMLLTTAGDNPGRLSSERSFAAVCGSSPVDASSGRQQRHRLNRGGDRQANCALYLIVLNRLSWDPRTKAYMQRRLAEGKTKKEVIRCLKRYVAREVYNLIAKDLAGRSEAAQRRVQLAA

SEQ ID NO: 81842 - protein, 407 aa, unidentified
MEGRSIGLDVHRDFCEVAICEVDGRVRRGPRVATRPDALRAFAEQLGPRDRVAMEATGNALQIARIIRPHVEDVIVANTRRLAAISDAKNKTDRRDARTIAQLLHAGLLEDCWQPDETIRALRRRTTRRAKLVRHRARCKNEILAVLHRNLKPRPPMSDPFGVAGREWVASMALPGDERDTINAALRQIDFLTEEIAVIERDLARYTLQSASARRLMTVPGVGMTTATVFVAAVGEISRFPDARRLVGYLGLDPRVRQSGNSPALTGRISKEGASEVRHVLVEAALTAVRSPGPLKGFYERVRARRGHQIAIVATARKMANLFWHLLTTERDYAYAMPTAHAKKLRAIELKAGGQPRKPGGPRQPLNRDQRRQAERAAAEHAQAAYERTVTDWHRQQRQRATRPAPT

SEQ ID NO: 81843 - protein, 339 aa, unidentified
MVKLYGGLDLHSNNSWLGIIDRKEKRILKKKLPNDLPVILDVLKPYRKDLAGVVVESTFNWYWLVDGLMDNGYRVHLANPSAIKQYEGLKHSDDERDVFHLAHLLKLGILPEGYIYPKEDRPVRDLLRKRLQLVRHRTSHIVSFKNLVSRNLGIQMPGNEVKSLKEEDLEGLFKEEHLVLAGKANIATMHFLKERITEIEKTVIKKVKLRNEYINLLTVPGIGEILALTIMLETGDIARFPSVGNYASYCRCVGSARLSNGKSKGTGNRKNGSKYLSWAYVEAANYAVRFYPYVRSYYQKKTAKTNNVVAIKAVGHKLARASYYVIKNQEVFNPKKAFA

SEQ ID NO: 81844 - protein, 408 aa, unidentified
MANKIAGIDVHKKVLMVVVIDARTPDSKPERRRFTTMPSDLCRLSTWLEQLGVEEAVMESTAQYWRSVWLELEPHFRLHLAQAFSNRAPRGRKHDFKDAERLVRRLIAQELILSFVPDGEQRIWRNLTRMKLQLVRDRVRLQSQIECLLEEMRIKLSVVITDLLGTSGLRILHALANGETDAKNLALLGDHRLKCSEEQLVEALTGRPHSMHRQMLSLQLERLRLLDEQIGKLNSLIAVAMNPHQDTVIRLAEVPGLGIDSAQQIIAEVGVTASTFRSAAEFTSWVGTCPGSQESAEENSSSRSAKGNKYMRRVLNQAANAAARSKGTHFQAVFRRLLPRLGYQSAVWAIAHRLCRLVWKILHEGIRYIEQGIESEPKLLIYRARSLAKQLRKFGYNVQITPADGAPA

SEQ ID NO: 81845 - protein, 331 aa, unidentified
MKFTNTIGIDVSKKILDIHDYVHQLTLQVNNNPAGHKELLKWVKQNNAELSEVLICFEHTGMYSLPLALYLTEHKQCYVMVPGLEIKRSMGISRGKNDSADALAIARYAHLRREEIIIYQLPSKQLLELKSLLSLREKMVSQRAGYQASKKEMKAFLKIVKTSSVIFDAQETMIKELNKQILRIEKQMMEIICNDEHLKKTFDLVTSVKGVGVILGTTMLVYTNCFTSFDDWRKFACYCGIAPFEYQSGTSIKGKTKISPFANKRLKSLLSNAACSSIQHNPEMKLYYERRIQEGKNKMSTQNIIRNKILARVFAVVNRGTQYVDTLKYAA

SEQ ID NO: 81846 - protein, 367 aa, unidentified
MSSVASQAGLIHLGMDTSKNTIVVATLLPGEENPVTERVANEEAPIRRLVGRFADRSVLRCWYEAGPGGYELYRLLASMGVACQVVAPSLIPKGGSDKVKTDKRDSRRLARLGRAGELTPVRVPGPAEEAVRDLVRARTAVVEDRRRAQQRLTAVLMRHGRIWRGGSYWTAAHRSWIAGQRFAEPALAAAISYYRATLQVRESELAAIEAELAPWAAREPLAGPVGRLGCYRGIAELTALSLAAEVVDWHRFPAARAFMSFTGLVPAEYSSGERTRRGHITKAGSEPVRSALTEAAWSYRHAPAIGARLARRQAGADPATLARSWTAQRRLHARYVHLLHAGKAAPEAATAVARELAGFVWAEMTAA

SEQ ID NO: 81847 - protein, 424 aa, unidentified
MNFKMQDKQNQLIERISDTHLIVGVDIAQQFHVARAVNFRGIVVGDPLTFENNEEGFMNLLNWIKNLQKLKNLNTTIVGMEPTGHYWINLSKWLDNQNIEVVTVNPHLVKRNKENRDNTQSKSDKKDALVIADMVKNGYYSYVRPSSESFEKLRVLISNRDVIVKRLVSSSNQINRWVDIVFPELRQIFKDVTCKGAIATLRLFPIPIEIAAMESLDVMRGWKSLMKRQPEPKKAQLLINLAKSSIGTGQALDAYKFHLEQLLEEYDLAVKQLERVEQQVKEVLNKIPFAKKLLMIKGISEISLAGILGESGDLSGFSHGNSLLRHAGLHLAEASSGKWKGQIVISKRGRSRLRRFLYLATMSLVMNNPEFKALHSHNVKVKKIKKMKSIMKLIGKLARIFVGIARRNESYCPNKIQELIPLAA

SEQ ID NO: 81848 - protein, 323 aa, unidentified
METQDLYIGIDVSKTRLDVAVYPTGESWQAYNAPEGIAAVIQKIRPLAPQRIVLEATGGLETLLTVCLVAEQLPVVVANPRRVRQFARSLGRLAKTDRIDAYVLARFGHGTQPEVRSLPDEQARQLATLLTRRRQLINMRTAEKNRLQIMPSTVEPSIKEHIRWLEQQLVELDDDLDTRIKASPLWSAKLHILQSFKGIGPVTAITLVANLPELGQVNRKEISALVGVAPLNNDSGKIRGRRCIWGGRAQVRAVLYMAALSATQHNPAIRDFHERLIKAGKPPKVAIVACMHKILIIVNAMIKNGTLWQADYAPILPPAPSLT

SEQ ID NO: 81849 - protein, 318 aa, unidentified
MNTKTLQNINVGVDTGKSQLDIYIRPLNIYFNVPNTDKGIKEAIKVIKKHCPKRVVIEATGRLEMPFILACDTAKLPYVIANPLHIKRFAGAIGKRAKNDRLDAALIAHYAEAIKPKLTQLKSENIRLMSDLVTRRNQLLSMQTMEKNRLQVLPEAIASSIKPILTALKNQIERTETKIAKLIDTCPEYQAKNTLLQSMPGVGKVVAASLISNVPELGYITNKQAASLIGVAPITKESGRYKGKRIIQGGRSQVRTVLYMAMMSAIQCNPVFKATYERLLAAGKPKKVAIVACMRKMVVILNSMLRDGVMWNNNSARN

SEQ ID NO: 81850 - protein, 410 aa, unidentified
MEVLHTHCAGLDIHKETVVACVRHMAGGKIKAEVRTFAAHTAALLDLSVWLATEQITHIAMEATGVYWKPVWHILADGDFQLVLANAAHVKNVPGRKTDVKDAEWLADLMAHGLIRASFVPDEPTQQMRDLLRTRKQLVRERSSHTQRIQKALEDANIKLDCVVTDILGLSGRRILAALIAGETVPQALATLAHRRIHASTDELEAALRGRVTRHHRFLLKLHLDQISAIDAALASIDKEVEGNLDTFRPAAQLLTEIPGISQLSARIILSEIGLEMNRFETSGHLISWAGLCPRNDASAGKRHATHMKKGAPWLKTTLVQCAWAAARTKNSYFQAQYHRLRARRGAKKAICAVAASLLTTVYHMLKNGSCYQDLGPNHFDQQAKTKHIMRLVNRLENLGFDVQIVPRAA

SEQ ID NO: 81851 - protein, 343 aa, unidentified
MKLIRIGVDLAKDVFQVHGVDRHEKAVWRRKLRRNEWLKVLVATAEPGCQIGMEACGGAHHWARKLQGLGFRVKLIAPQFVKPYVKGDKNDANDAEAICEAMSRPSMRFVTVKSAEQQDIQAVHRIRVGLVEQRTAKANQIRGLAAEYGLVAPKELGQLRTALPCWLEDAQNGLSDRFRRLLSGVWEDLRALDERVGELDREITVIAKSDPLAKRLQQLRGVGPVIATALVGALGNGEQFARGRQMAAALGLTPRQHSSGGKERLLGISKRGDAYLRTLLIHGARSVIRTAKGKEDRLSRWVNALAARSHPNVAAAALANKTARMAWAMMRKGTDYQPDLVTD

SEQ ID NO: 81852 - protein, 342 aa, unidentified
MLYVGIDVAKNKHDVTALNVPGKTVLKPLTFSNNKAGFELLDLSLRQLNQDCLIALENTGHYAFNLLNFLHEQGYKVYTYNPLLIKEFAKSLSLRKTKTDKKDAHGIALKLLSDPNREQFQHDNRQVELKILARHIHRLKKKQSDWKVQYTRCLDIIFPELDKIVGKHSEYTYQLLTCYPNPQKRLEAGFDKLIEIKRLTASKIQDILSVAPRSIGTTSPAREFEIIEIIKHYKRLIDKAETCVNDLMAEFNSVITTVTGIGGRLGAVILAEIRNIHAFDNPAQLQAFAGLDSSIYQSGQIDLAGRMIKRGSPHLRWALIQAAKACARFSPAFKAYLKTKLE

SEQ ID NO: 81853 - protein, 324 aa, unidentified
MTTVTVRWIGMDVSKERLDLVSLPDRTHWQVPNDAAGWEQLCTEFATSPPSLIVLEASGRYELGIVVALDAMGLTPVVMNPLAIRRFAQSLGRRAKNDRLDAELLARYAEQVRPVPRPIPAETARDLRDLLARRQQLTEQLVMEKNRLHQATALVRPSIARLLAVLAEELAGIDKLLAAVVASDPGWQARVDQLDTVPGIAPLSATRLAVWLPELGQLSGRQLAALAGVAPYDHDSGRVRGLRQIGAGRAPVRLTLYQVLLTTIRWDPTFQAHYAQLRARGKPPKVALVACMRRLLGILNAMVRDGLTWTQTRVGQGHFLPSAA

SEQ ID NO: 81854 - protein, 343 aa, unidentified
MTISMLGIDIAKNTFQLHGADNSGKAVHKKRLSRRELVEHVANLLPCTIVMEACGGANYWARVFQGSGHAVKLISPQFVKPFVKTNKNDANDAQAIVEAASRPSMHFVPIKQVEQQDIQSVHRIRTRIVKNRTALINEIRGLCLEYGVVLIPGAARVRSSLCVAIADSDNELTPSSREFLQDLYEELVDVEARVKNLNTKIRQLCRQNENCQRILKIPGVGELTATAIVAAVPDPGEFRNGRHMSAWLGLVPRQSSSGDKQRLLGISKRGDRYLRTLLIHGARAVLSHYKDRDNDYTRWVGRKKATLSHNKAAVALANKNARIIWSMLNTGEEFNYGAQATAA

SEQ ID NO: 81855 - protein, 341 aa, unidentified
MDKELYFGVDVSKKTLDLAYYDGETIDWKNAHIKVSNDDAGFRKIGSWVAKVGKDFDTFLFCMEYTGLYSQNFRLWLESKEYIYGMVEPRKMHRFEPDLDDDQRSLDRIKTDELDAFRIAIYCEQNHKKILRNPSKLPSPVYFKLKRLLAERKQNTKQSVLYKQQLHDICAYDSDLSVERKKLLLKNMKENQKAIDKEIDCYMNEDVSISKNYDLLTSIPGIGHIIALEAIVLTENFTAISNPRKYACYIGIAPFKKESGTSVRKKTGVSKKGFSEAKADLSIAVLSAIKNNPSIRDYWIRKRKEKCGGIVLNAIKFKLVLRMFAVIKRGTPYVETDAYKN

SEQ ID NO: 81856 - protein, 436 aa, unidentified
MSGVWGGEVFFVRRDKGAGGSAVRVVRPRPRHGDWTKPAIEHQSVAGRRGDRTTNRSPVYEAAKLQDSRSHFMTKGEDMEEAMTRVVGIDLAKRSYVAHAIDPAKDKAVIWDGKTDQKGIEKLCAKLRPTDRVGIECCSYAFYLVKVLTAKVGCRVLVLNAGDLAIIYKSVKKTDLEDAGKLAWLLEKMSDDELPVVTPPSEKEEHRRALVSELGSKKKARTVLINRLHSLFVRHGIVTVGKEDLRTADHREAQIVNLAGYTASEAKRVQAELILLEGHIDEIEAEIQLDLKDEPKVSRLMSIPGVGPTTAMAFLAYVGDGSRFSHARQVSHYVGMTPRVDSSGETTRIGNITKRGCTAIRALIVQSAWASVHTSKDHKLKQKYLELSARRGKGRAIVAIARRLLELMWVVLRTDTFYWETTKEELDLKMVRSKVA

SEQ ID NO: 81857 - protein, 345 aa, unidentified
MQAEYDGRQIVGIDLHRRRTVIVRMTETGDQLDCVRIDNDPLVLAAEIAKAGEHPDVVLEATYGWYWAVDVLQDAGAEVHLAHPLGVKGFAYRRVKNDQRDAADLADLLRMNRLPEAYVAPPAVRELRELVRHRAKLVALRSGLKAGVHAVLAKQGVLIPVTDLFGVGGRQLLDAAGLDGAYRARVNAQLRLIDAFDFEIDTVSKQLRARLCQDHGYQVIQQIPGVGPVLAAVFVAEIGEAGRFTDAAHLVSWAGLTPKHRESDTTVRRGPITKQGSGLIRWAAVEAAQKIPASAGWLVSSRARIAQRRGRNIATVAVARKLLTLVYYGLRDGHIRALARAEAAA

SEQ ID NO: 81858 - protein, 428 aa, unidentified
MDRCPSDTDLWGVAREGSATLEVALPSLRPGSSEQGEEAVAKVVIGVDPHKRLNAVVVIDVKGKVLARRQFPNSAEGFRELRSFGRQWRPRTWAVEGCNGVGKHLAQRLVAVGERVVDVSTRRAALVRVFAGGNGRKNDDVDAHSVALVGLHTRDLPEVRKDDRSASLRLLANRRKELVDLRTQCVNRLHRDLVGLISGGAPQALTAVKAKALLASIRPRDEMGRLRRRLAADQLADLVALDKKLAAVEAEIRAMVKRTPTGLPDVYGIGPVITATVIGEVGDVARFRDRHHFASYNGTAPDDKGSAGRPVHCVNLKGNRRLNHAIHMAAITQIRNRRSPGRAYYERKLAEAKTNKEALRCLKRRISDVVYRQLLADAERQAKAGPGGQTETTLQSSVTGPTPTAGSSDKPQPGPATEATPTPLRAAG

SEQ ID NO: 81859 - protein, 419 aa, unidentified
MKENTTQNGDGYMALTCGVDWAEAHHDIALVDEDGALVARARIDTGATGFTNLLALIAEHGGSAAETPVALETDKNLLVVALAEAGFTLYPINPRAVARYRERHAQAGGKSDPGDAAVLAHILRTDRHLHRPLPVVTEHARAVKALARQHQEAIWALHQTISRLRSVFLEFYPQALHAFPNLKHRAAMTVLAAAPTPAAGQKLTRRRLVTLLQRSGRGNHPALAEQILTDLHTPALRQPPRVEQALGHTVAGLLGIVIAMQRAVDDLETELAREFDTHPQAVILRSAPGLGPVLAARVLAEIGDDPTRFATPGNLRAFAGTAPVTRASGRSHYVKARKVRNKRLGDACHWWAFAMLTKSPGAREHYDKRRAAGDHHNAALRNLANKLLGRLWWCLANNQLWDDNAAWPHRAEHQNPVAA

SEQ ID NO: 81860 - protein, 463 aa, unidentified
MNNLTAKSKSRRGRRPKQGLRVIRTNVAGIDLGSREHYVCCPPHSDGAANVDHFGTTTPELNRLADWLEAQGVESVAMESTGVYWIPIYEILERRGFEVLLVNARALSSVPGRKTDMLDCQWIQMLHSCGLLKGSFRPSDDICVLRSLVREKTTMEEQRSDWLRRMQKSLDQMNVCVHHAVSDISGTTGMAIIRAIVGGERNPATLAKFRDPRCRKSEKKIAEELTGNWRVEHLFSLKQALRMYDHICTCIAQYDAQIQRTLTALHPAENRNLKAPDVTNKNKRKNFRKRGQEPMREALFRLTGYDLTAIDGIGVETAETVLSELGTDLSCFPSENHFISYLKLAPKLAISGGKPIRIKRTGSTTTRLGATFRMAALALRNSKTALGAEYRRIARRKGASVAVFALARKLAILVYRFLRFGQAYVDEGMHVYEARFKAARIRTCKQIAKEFGLIILQPDKVVA

SEQ ID NO: 81861 - protein, 411 aa, unidentified
MRRVIGIDIHRTFGEVVFWEDGRLRRAGRIDMTRTALEGFGKSLLASDEVVIEATANSMGVSRVLARFVARVIIANPLQVKAIAQAHVKTDKIDAGTLASLHAAGYLPQIWTPDAETERKRRLAARRYQIVRHRTRLKNEVHSILHAHLIPKCPHADLLNARGRAWLAAQPLPDDERAAIDRHVRELDRLAEDLALLDRKIAQDAIDDPAVKRLMTITGVDLTVAAGIVAAIGDIARFNSPQKLVSYFGLNPRVWQSGLGAAHHGRISKIGRSHARAMLVEAAWAAAKTPGPLHAFFVRIRARRGHQIAAVALARKLTVLCWHLLTKGEDYLWMRPALVAIKTRAMQLQAGQPQQKGSRRGPAYAYNIKALRDREMMVAAQAEQSYERLVAQWKPRRPKTGARVPQSGKTS

SEQ ID NO: 81862 - protein, 377 aa, unidentified
MIAADRSEVSVNESVLYVAFELGKKDWKVAMTSGFGRTPWLRTIAGGDLAAVERVINAARPRFGLAAPVRVISCYEAGRDGFWIHRALWRLGVENRVVDSASLEVNRRARRTKTDRLDATKLVRMLVRVCAGDRGAWAEVRVPTVAAEAARHVSRERTALTQEQTRLRNQIGSWLATWGCRVPPPMRRQPEWWTHARDWADAPLPRAVQARLARADARLAVIAEQIATIAVEQTRLTQQADPTSARARLVQLKGVATTSASVLLDEGLVWRAFRNRREIGGLLGFAPAKYDSGESSRDQGITRAGNKRLQSVMVQLAWGWLHWQPLSALTRWYQARFSTGQRTRKVGIVALARKLLIALWRYATQGVVPAGAVLKTA

SEQ ID NO: 81863 - protein, 343 aa, unidentified
MYYIGLDVYKKTISYCVKDVAGHVHREGKIGSTRRELDAWINTLPQPRTMAMEATIFTGWIYDHLLPHAQQVKVAHPLMLRAIAAAKKKNDKIDASKIADCLRCDFLPECHMASTEIRDRRRVLRYRNLVVKQMVQMKNRVSGLLMETGVSYNKQRLHKVGYFGELMSTNEDISQAVRPLLNLSRGMIRRSGKLEYDLVSSLERDPLLKERLRRLRTVPGVGSITALTWALEIGDYTRFSSNKQAISYCGLCADENSSADKVMRMPLSKQRNKHIQRVLIEAAKLAPRESPELAMIRERELQRGNPNRATLAVARKMVCYMMAVERRQQDFMRAGESMPTAAA

SEQ ID NO: 81864 - protein, 349 aa, unidentified
MKKTERSKLAVQDFAGIDVSAHELDVAMRRGIDDSLTIATFPNRVAGHKALLRFLLQGATRVRVCVEASGNYALDLALTLQAHPQVEISVINPRRARRFAESLGKRSKTDQVDAQVLCEYAWRMPWVPWQPPSAVALHLRAITRAIADLSGIHTQQNNRAHAAAASHALPALVVKEMQHHQKHLEQRMTRLRRQALHLVAEDPELDRRFRLMLTAIGIGEISALQILGELAVLPETLDARQWVAFSGLDPRLFKSGKSVEKRPRISRGGSRHLRRALYMPALVALRRDPYLRSFYQNLLLRGKARLQAIVAVMRKLLHALFAMFRTNQPYDGSKLCALGRIGIAVADCA

SEQ ID NO: 81865 - protein, 355 aa, unidentified
MSQEKYIGMDVHQATTSVAVMDAQGKLMMECLLETKAATIVEFIRGLHGTLSLTFEEGTPAAWLHDLLKPHVSRLVVCDPRKNALLKDGSKSDRIDARKLAELLRGDQLHPLYHGDHGMRTLKELGRSYLTITQDVTRVMNRIKALYRRGAIPCAGATVYSPRHRTEWLAKITEPGVRIRAERLYQQLDLLQPVRLEARREFLAESHKHSGVKLLRQVPSIGPIRSALLVALLQTPHRFRTKRQLWAYSGFAVETHDSGEYRSVRGKLQRNRERMTVRGLNDNHNRDLKNLFKSAAISASTRPGPLRDFYVARVEKGMRPTMARLTLARKMAAISLAVWKKGVEFDPQQLQRQAA

SEQ ID NO: 81866 - protein, 311 aa, unidentified
MDEVFIGIDISKQYCDLAVIPDGIQKRFTNDEEGQQAILSFISPLRPARIVVEATGGYEMGVIRTLADSRLPVAAVNPRQVRDFARATGCLAKTDTIDAGILAQFARAIQPDIRPLPEKEAEVLRALVARRRQLIQMLTMEKNRLEKSPPAGSEDIRDHIYYLTEALKKIDKDISRSIRKSPLWKEKETILMSMPGIGPVISCTLVAALPELGTLNRKAIAALVGLAPFNRDSGAYRGRRTIWGGRSHVRAVLYMGTISAIKFNPAISAFYKRLIDAGKAKKLAITACMRKLLTILNTMMKNKTPWIEVAP

SEQ ID NO: 81867 - protein, 412 aa, unidentified
MDEVVEFCAGLDVHRDTVVATVRFPQGRHRGSETKTFGTDTAELVALGDWLISHRVTRVGLESTGVYWKPVFYLLEDRIEQLWLLNAQHLKNVPGRKTDVVDSAWIAQLVEHGLVRPSFVPSPPIRELRDFTRHRRVLSEERTRMVQRLEKVLQDAGIKLTSVASTVLSKSARAMLEAMLAGESDPVVLAELAKGRMRSKIPALTDALRGSFRVCHHGVLVRQILAHVDFLDAQLAEIDEQITTRVATFEPIIERVQTIPGVARKCAIGMIAEIGVDMSVFATPAHLALWAGICPGNNASGGKARSGRTRHGPVALKTVLTEAAQAAARTKNTYLGARYHAIRGRRGTFKAVGAIRHDILIAYWHIVTADVGYQDLGVDWLARRHSREHQIAQLAKQIEKLGAAVEITMPAA

SEQ ID NO: 81868 - protein, 383 aa, unidentified
MKKSQETLRKHVSTKEAVLHVAFELSNSKWKLGFSDGNKMRFKSIDARNLEQLREEIEKAKSRFRLDNDVRIVSCYEAGRDGFWLHRYLLSEKIENVVVDSSSIEVNRRKRRAKTDRIDARKLLRMLMRYHGGERKLWSVVRVPSVEAEDGRQLSRELESLNKERTRHRSRIRGLLILEGLEVKNPSGKKFLEELDSLCTWDGKQLPGDFKARIVREYERLRMVEEQMGILRKEREIRVGSAETLSMRKVAQLRTLYGIGVTSSWDFVTEMFGWREFRNRREVGAFAGLTPTPYDSGGSQREQGISKAGRGRIRALSIQIAWGWLRVQPKSKLSQWYQERFAGGGSRMRRVGIVAVARKLLIDLWRYLEYGVVAEGARLRPVK

SEQ ID NO: 81869 - protein, 341 aa, unidentified
MDHYAGIDVSLECSSVCVVDAGGKIIREAKVASEPAALIAWFASLGFGLERIGLEAGPLSQWLFAAMREAGLAVELLETRHVRKAFEAMPVKSDRNDARGIAQLMRLGWFRPVHCKSMGAQETRAVLTARKLVQSKLRDVENSLRGILRGFGLKVGKTTELGFAGRIRELVAGHPHLEMIANALLAVHAVLRNEFKAFEKRVHRMARSDTRARLLMSTPAVGPIVSLTYASAIDDPARFKSSKRVGAHFGMTPKKYQSGESDYTGRISKIGDQSVRTALYEAAHIMLTKPVKGCSALKSWAMRIARRAGMSKAKVALARKLAVIMHRMLVDGKPFNAGTAA

SEQ ID NO: 81870 - protein, 369 aa, unidentified
MPHVTSIGLDVHARSVAAAAFNPFTGEVVHRDFGTGAAEIAERALGFEEPRACYESGPTGFRMARELRALGLDCAVAAVSRMQRPAADARRKNDRRDAEFIARMLATHNIVEVPLPDAAAEAARDLDRALDDATADCLRARQRLNMSLIRIGRVWDERNADGTRKKAWTRAHWRWISETRLEGPQRDVLEHYVTAARCAESDKRQLERKVVALAGTDRWRPAVEALSCIKGIDTLTAFRLAAEAGSFSRFRSAPAFASWCGLTPSERSSGETERRGGITKAGNRLVRTALIESAWHYSMRTPRPKAPAPGADVPAAIRSRADECTARLCRRREALSAAGKNACKANAAVARELACWVWEIGCRAEGTLG

SEQ ID NO: 81871 - protein, 339 aa, unidentified
MHVTTIGIDLAKNVFQVHGITLDDEVAFNRPLRRAQLLPFFSKLNPCLIGMEACSSAHHWARELTNFGHDVRLIPPIYVKPYVKRGKSDAIDAEAICEAVTRPTMRFVAIKTVEQQSLLSVHRARSLLVRQRTQLINGLRGMVAEFGVYIARGLARVIGFAENILTGEVLELPDIANEVIHNMCEHLMALHARVHWYEDRLKQVAKEDARVRLLRTIPGVGAVTASAIIASIGDGHQFSNGREFAAWLGLTPANKSSGGKEKLGRITKMGDQYLRSLLVVGMTSLVRQTKSHPERASKWLTSLLERKPARVATVAMANKTARIVWAVLTRNEPYTPHTA

SEQ ID NO: 81872 - protein, 369 aa, unidentified
MADYREAFVGIDVAKLRNAVAIAEAGREGEVRFFGEVDASAVNTRGIIVRIASRFNRVHFCYEAGPTGYGLYRLIRSLGHECTVVAPSLIPRKPGDRVKTNRRDAVSLARLLRAGELTAVWVPDEGHEAMRDLVRARAAAVEALRVHRQQVSAFMLKHGRTYPRKKGWTMRYLRWLQEQQFDHPAHQIALQEMVEAVRVARERVERLERTIEEFVSAWSLEPLVRALQTLRGIDLIVAVTFATEVGDVSRFESPRQLMGYLGLVPGERSTGETVRRGGITKAGNGRVRHMLVESAWTYRHPPKIGKTKLYRLEQASPAVREIAWKAQSRLTARYRKLAACGKRTTVVCTAIARELVGFMWAVARQVQPA

SEQ ID NO: 81873 - protein, 318 aa, unidentified
MLIHYIDIAKRNFVIAVSSLSKTKTETNNPKGIAHTIEYLKKHKVALVVTESTGGLEIPAAKAIRRAGIAVIIANPRQTHQFAQSQPLTKTDAKDAKMPAFFAQMTAQKEDSQTMPYQPPTEAEEVLEALVNRRNQPADMRTAEKNRLHQVHETQVGSVKQLIAHFDRLIDELDKQIDNHTHTHFDGKDQVAEQIKGIGSITTATLMAMLPELGRLSHKRIASLAGIAPHPRESEETKFKSRCFGGRSAVRKALYMATVAATRFEPLIRDFYQRLLSEGKPYKVAVTACMRKLLTISNARMRDYFAENDTAENGIRTA

SEQ ID NO: 81874 - protein, 459 aa, unidentified
MPEKKVTRKSRKRQAHLLKAVQPDAAGIDLGSREHWVAGPPRPDGSPNVERFGTTTAELLRLCQWLKQQQVTTVAMESTGVYWIPLFEILDSRGFEVHLVNARQISHVPGRKTDMLDCQWLQLLHSCGLLRGSFRPGDEICRLRALIRERHSVVEQRSDWVRRMQKSLDQMNVCVHHAVSDITGVTGMAIVHAIVDGERDPRVLAHLRDRRCLKSEEQIVAELTGNWRPEHLFNLGQALKIYDHLNGVISDYDTEILRCIDSLQSAVCEDSSAPPPASKAKASKISQRGQEPLRQGLYRMSGFDLTTIDGIGVDTAAVILSELGPDLSAFADEGRFVSYLRLAPNLSISAGKKVPGKFKAVTSTRVSNALRMAATTLRTSKTALGAYYRRISWRKGASVAVFATARKLAQLVYRLIRFGQTYVDEGAKAYETRFTQRRLSSYARALNELGYKIEPLTAQ

SEQ ID NO: 81875 - protein, 403 aa, unidentified
MAKVFIGVDPHKPSATIEVVDGRERVLATGRFGTDKAGYAAMRKQVASYPNRVWAVEGSNGTGRPLAQRLLADGEHVVDVPAKLSARARLLDTGHNRKTDAHDAHAVAVVAVRTKNLRVLSYDADLEVLRMLVDRRDELSKSKVQAVNRLHRLLSELVPGQSKKDITALQAKAILASVRPRDSVGKTRKRLALEQLAEMVAIEKKMKASSKELKTLVIARGSHLMDLTGVGPVVAARILADVGDVARFTDRNRFASWTGTAPLDASSGEQIRHRLSRAGNRKANHVIHIAAVNQIRLDTPGRAYYRRKLAAGKTPLEALRCLKRRISDALYRQLRADARTAATTDANAGPGGHRGASHVSSAAGSHPHTDTSDQPLPGPAPTTLPASTPTRKTTILRPLEPAS

SEQ ID NO: 81876 - protein, 385 aa, unidentified
MWLTTGERGLIGEPVTLPVLREGVDELERLIASSGVAGTPVIGLEATGSLHRAWAAEIERRWPGSLRLFAPSETTAARGQLGSRRFKTDDRDCAALVWLLRQGAGRPAEPDTVAAMLGVVRHRGQLVDARRVLQQRLHDQLNALCPGLSAPIGHGRALKLASPTGQAVLACAAAFDGRAPTKRSLLARAPGRMTDPTAAFWIDRWKRLLDAPADAPLRAARMRRDLQRWQGLQGDIALAEAQLSDLLAQTPGQILTTLPGVAVVRAAEFSAYTLPIGRWPTPEHLYSATGLAPASYRSSTITRRGRISRQGLAEHRNALMGIAWGLSVNSPAFQARDAELKARGMAPIQARVALARHACRLAWRLLHTQQPYDDRRYAHARRRGR

SEQ ID NO: 81877 - protein, 416 aa, unidentified
MDVLHPRCAGLDVHKRTVVAAARLVEDGKVNMEVRTFETTTAGLMALAEWLSNRAVTSVAMEATGVYWKPVWHILSSVGGFELVLANALHVKAVPGRKRDVSDAAWIADLQAHGLIRASFVPPREVGELRSLMRTRKQLVRERTSHTQRIQKTLEEANIKLDSVISDVLGQSGRAMLEAMIAGESDAKRLARLASPRIKAAPETLERALDGRLAEVQRLLLRVHLAQIDAVEASIATIDRHVETHLDPFRTAVEQVVTVPGMGVRSAMAVLAETGIDMSRFPSQGQFLSWACLVPRSDESAGKRRSSRLRPGGNWLKTMMVQCAWAAVRKKGSRFAALFERLSAKRGARRAICAVAAEMLRTIYHMLKDGTCYEHKCLSLHRQATPQEEAKRLIRRLARIGYVADIKPIPTPAPSV

SEQ ID NO: 81878 - protein, 369 aa, unidentified
MNKFSKYVGLDVHQETIAVAVADTAGEVRYMGEIVNTREAIAKLVAQLKRRTERLAFCYEAGPCGYPICRQLRDLKQDCQVVAPSLIPKKPGERVKTDRRDALSLARLHRVGELSPVWIPDEAQEALRDLTRAREDMKHLQRQAKQRLLSFLSRHGHRYTGRSRWTQAHWRWLESIKFARPEQQIVQQEYIDTVQACGKRMVSLDREVETAAHASQVWPVIEALMALRGISLLAAVTVVAELGDLTRFAGPPQLMAYLGLVPSEHSSGKRERRGGITKTGNSHLRRVLIEAAWTYRHAARKTAILQRRAERTAPEVQEIAWSAQKRLCQRFRNLMARGKLKNQVCTAIARELVGFIWAIGQHVVPLSRA

SEQ ID NO: 81879 - protein, 368 aa, unidentified
MSNVFHVGLDVHKDCIEIAFIDENGEARSYGKIKNNLSTLEKVIRRLHSKGPKELKFVYEAGPCGYGIFRHLTGLGFECAVVAPSMIPKRSGCRIKNDRRDALNLCRLFRAGELTPVHVPTPEDEAMRDLVRARDDAKSAEKKTKQRLKAFLLRHDLRYSGRSHWSQAHMNWLADLRMEHPAQQIALQEYINALEESLQRVARLTEQIRNLLPDWNKTPIVEALQALRGVRLVSAAIIVAEIGDFRRFKNAKELMTYLGLVPSEYSTGDQIKRGGITKTGNRFARKALVESAWSYRMSAKVSRDLLKRQEGLPQAVRDISWKAQVRLCDRYRRFRAQGKPQQVTVTAIARELAGFVWSIAHEVTPEPA

SEQ ID NO: 81880 - protein, 410 aa, unidentified
MGYETLIRRAHVMTRKNTLKSLPTDTEFRVVGLDLAKSDVSVAAIPVDDNTPSLVDRMTYADLLDWAGKISPTLFAMEPCNGYSLLCLQLENLGHEIKVISGWTVSMWINTHLSGQKTDLNDAIALARLAVSDAELTPIRHKSITEIRIQTVQAVRQQLMSQRSKSIVSFKALAQQWGIPCAAGHRNLKKLRESIEAKVDLITRPVANAMLFLLDAVKSLDRQIGQLNQTLQELVMSDERGRLLQSVLGVGTQISARVITVVGNVERFNSPRSLVAYVGVAPRNFITGHKNLTKKKHGNCPDLSHKGQGKIRRRGDKLLRSLFIQGAACLYMQFCKDQLPECQLKRWILKQLASQKPYGKLIVSLAAKLIRIVWAVLTYREKFNIQKAGMTRSMWSEMALETPLNKEVPA

SEQ ID NO: 81881 - protein, 404 aa, unidentified
MFKFGIDWSEQHHNLCIRNSKGAIVSQVEFKHTLEGFQRFDDERRKLGVPPSECLVAIETAFNLLVDFLLDRGYLVYLIPPQATKGYRNRQRSTDAHTDDTDAALLSSILHTDLDSHRCLQPNSALTQQILAQVRLIDLLRRSIQRQTNQLRAVLFRVYPQALGLFGKLTAQINLHFLMAYPTAQEAQALTRAAFEAFCREHRYGRVDLISRRYAHLMDPAPEANPIAVAAYCDQIRILAELLLPQVLRRTEALSSLAQLFSQHPDAFIFDSLPGAGELLAPGLLAKFGDHRDRFPTPAGVQALAGTCPVTKQSGKRKIVIFRRGCDREFRRIAQQFAKASVRQSGWALAYWRDVRPRCRSDSDAYRRLANRWLAIIWKMWQDGKAYDESYHIQQRAQRRRPRS

SEQ ID NO: 81882 - protein, 457 aa, unidentified
MRKKKEKIQKVGFHEQLRPMRTDGAGIDVGASEIWVDVGIENDADPVKRFQTFTADLNRMAKWLQQCGVRSVAMESTGVYWIPVCQILEDHQVDVVLVNAAHAKNVSGRKSDILDCQWLRTLHCYGLLSASFRPARDIGVLRTLMRHRQMLVECAASHVQHMQKAMTQMNLQLHHVISEITGLTGMRIIRAIVAGERNPARLAELRHETTKADHATIAKALEGDYRSEHLFTLKQCLELFDDYQKRIEQCHEQIAEHLRSLESKVDPDSLKPGRQRKRKRRNQPGFDVRGQAHRISGVDLTQVDGIHETAALGLIAEIGVDMSPWKTEKHFASWLTLSPNHKISGGKVLQRSTRKSASRARNILCMSAQALFNSRSALGAFSRRLRTRIGAPKAIVATAHKLALLIYRMLKFGRDYVDIGQQRYQEQFKERTMKSLARKAKELGFQLVPNAHEQAVP

SEQ ID NO: 81883 - protein, 345 aa, unidentified
MKLIRVGVDLAKNIFQAHGVDRNEKVVWRQKLTRATWLKVLLETVEPGCEIGMESCCGAHHWARQLQKHGFKVKLVAPQFVKPYVKSNKNDANDAEAICEAMSRPHMRFVSVKTVEQQDIQAVHRIRAELIKQRTAKANQIRGLVAEYGLVAPRQLVQLRRAIPLWLEDAGNGLSGRFRRLLQALGDDLRGLDDRVAELDREIALIARNDPVARRLQQLRGVGPVVATALVAAVGDGRQFANGRQMAAALGLTPKQHSSGGKERQLGISKRGDAYLRTVMIHGARSAVATAKGKRDRLSQWVMAVAARRHPNVAATALANKTARIAWAMLRHGTDYQADLVLAER

SEQ ID NO: 81884 - protein, 339 aa, unidentified
MRQITTLGIDTAKQVFQLHGVDAQGNVVLHKRVTRKQVLPLLAQLPPCLVGLEACGGSHYWAREITKLGHTVKLMAPQAVKPYVQGNKTDGRDAEGICEAASRPRVRAVAINSTADQDLQTLHRIREQCVKMRTALANQLRGLLGEYGFVVPQGIGRIRQAIPLIVEDADNGLSALCREWLWDVYQRVCTLDAEITRYNARIAQLADQSEVCRRLTRVEGVGPLTVTAFVAAVHDPRAFKNGRHCAAWLGLVPTQHGTGGKTVLGGMSKRGNQYLRRLLLQGAMAVIRRVDGKKDARSVWLQQLRARRGTQVAAVALANKNARILWALLATGDSYRQAA

SEQ ID NO: 81885 - protein, 359 aa, unidentified
MDAQEGAVRRIIGGVDTHKDLHVAAVVDEQDRVLGTQSFASTRQGYRQMLAWMRSFGEVQRVGVESTGSYGAGLLRFLQQAGVTVLEVTTPDRQDRRRRGKNDDFDAQNAAHAAFAGIRTVTPKSRDGMIEALRVLSACRKTAVTARRIALQMIQNTIVCAPESLREMLRRMTRMQLVRTLAAWRPDLTAYRDVEAAYRISLKSLARRYLELHDEIADLDAMIAAIVDELAPNLVARNSIGHRGAAQLLLTAGDNPERLRSEAGFAALCGVSPVPASSGKTARHRLNRGGDRAANSALHIIAIGRLRTDARTQAYVAKRIGEGHSKLEAIRCLKRYIAREVFTLIKQRQREINQTRIAA

SEQ ID NO: 81886 - protein, 363 aa, unidentified
MYDSTTVAVGMDVHARSIRLAAVRADELLEERTLPYDEEAIERVLRRWPGVRCCYEAGPTGFGLQRHLVERGIDCLVVAPGLVPQRPGDRVKTDSRDARKLARLLAGGLLAPIHVPTPELEAARDLVRAREDARLDRMRDRHRLSKFCLRHGRMLPTNSWTVVRRRWLSEQRFEFAAQQQTFDSYVHTVDLVDARIEQLERAIRETAEQAPWRELVARLRCLRGIDTLTALALVAEIGDFYRFKTAEEFMAFIGLVPTERSSGEQRRQGSITKVGNSHVRRLLVESAWHARRRPKVGYELARRQRGQDAIVVERAWRCQQRLYQRWQRMAGRGKPQQKIVVACARELAGFVWAIATDQPLRSN

SEQ ID NO: 81887 - protein, 415 aa, unidentified
MALKIVYKICCGIDVHKTFVVACVASTSDKGITSYESHRFSTYTSGLKTLLQWLIDRNCKDVCMESTSKYWIPVYNILEKGCSIVLAHPKYVKAIRGKKTDKKDAKWIADLFKHDLVAGSFMPPSDIRQLRDLMRYRFKLTCFKSSEKNRLQNCLTVSNIQLGNVVSDTFGKSAQAILDKLLENPADTSFDLEPLVYKSLKKKLPELRDAIDGFITPEQAGKLKIIKDHYDNLESRKAELEELILALAAPYQQELTILQTAPGISSNFTAIGIISEIGTNMEAFPSAKHLCSWAGLTPTNNESAGKKKSVRVSKAGCYIKPLLVQCANAVVKSTKHPEMRNRYLHLKKRRGHKKAIITIARMLLTALYHMLKNGENYNPELYQKTDLPPVDREITIEQALMLIRNQGYKIKSATT

SEQ ID NO: 81888 - protein, 356 aa, unidentified
MSQKLNSTIAVIGIDIGKNSFHVVGHDKRGAIVLRQKWSRGQVEARLANMQPCLVGMEACVGAHHLSRKLQVLGHDARLMPAKYVRPYSKGQKNDFRDAEAIAEAVQRPTMKFVGTKTVDQLDLQALHRVRERLVSQRTGVINQIRAFLLERGVAVRQGFRFLRAELPSILAKRTDVLSARMSHLLEDLAGDWRRLDERIEHLSREIEGLARQDQGCARLMSVPGIGPIIASATVAAIGMGDAFSKGRDFGAWLGLVPKQISTGDRTILGGISKRGNRYLRALFVQAAWVVLVKVGPKHWERYGLKSWIEAAKKRLHHNVLAIALANKLARIAWAVLNKGRAFECTKTYAVAPQAA

SEQ ID NO: 81889 - protein, 339 aa, unidentified
MDQQQHYVGLDVSLETTSICVIDGKGITVWRGKCASTPESITEAVHTYAAAVVRVGLETGQLSNWLTLNLRRRGLPVVCLDARHAKAALSLQINKTDANDALGLAQIVRTGWYREVAVKSMDANTLRMLLVARAQLVSQRQTIANTIRGLLKTFGVVIVRGAKGLFPVRVREQIVGNDVLAAIVEPLLTVWHALREQIAIFDRQILARARADAAARRLMTIPGVGVVVALAYTAVIDDPARFRRSASVGAYLGLTPRRYQSGQADTSGHISKCGDGLVRAYLFEAATVLLQRHSRASTLKTWGLALAKRIGMRRAKVAVARKLAVIMHRVWSDRRIPLG

SEQ ID NO: 81890 - protein, 317 aa, unidentified
MTTFVGIDVSKAQLDVALRPSGERMRVANSEEGIAELIASLSRSAPTLVVVEATGGYQAALVASLAIEKLPTAVVNPRQVRDFAKATGQLAKTDAIDADVLAHFGEVLRPEPKPLPDEQTLALEALITRRRQVVEMITAEKNRLAQSHKSLRAGIKSHINFLQRELSDIHRDLDGMLRQSPVWREQEDLLRTAKGVGRMTVATLFAELPELGKLDRKQIAALVGVAPFNRDSGPYRGKRKIWGGRASVRATLYMAALVASRHNPTIRAFYERLCAAGKPKKLALTACMRKLLTILNAMARTNTAWRGALPATAQNSC

SEQ ID NO: 81891 - protein, 413 aa, unidentified
MNVLHPRCCGLDVHKSSISACILLREGGRVQKHQRRFGTMTQELQELAEWLRQFGVTEVAMESSGVYWKPVWNILEGQFTIVLANAQHIKNVPGRKTDQKDAEWIAQLLQYGLLRASYVPCEIIRDLRDLTRMRASLSQEASRISSRIQKVLEDANVKLASVATNVLGKSGRAMLQDIITGEDNPEQLASLALGHLRVKIPQLQLALEGKIRFHHRFLLRRLLDQVQFVEHEIALLDERLEDIGRQRPDLAHAVARWDTIPGIDRVAAWALLAEIGDNMGQFPTAGHLASWAALCPGNHESAGKRLRGTTRQGSPWLCRMACQCAWAAARTKNTYLSSQFRRLAARRGKKRAIIAVAHTLIVIGYHLQKNQSNYDDLGGNYFDRIHSDGLKQYLVKRLQQLGHKVTLEPIETA

SEQ ID NO: 81892 - protein, 331 aa, unidentified
MDPAVVIGIDVSKAELVIAAHPVAETWTSETTPAAIDTLVARLRDTRPQLIVMEATAGYELPLAAACAAAQLPVAIVNPRQVRAFAQEIGRTAKTDAIDAAVLALFGARVQPAPRAVADAATRALAGLITRRRQLLEMLGAERRRLEQAPPTGPITRDLRTHIRWLERRLGDVDDEIGTAIHQSPVWRVQEDLLRSVPGIGPTTARTLLAELPELGRLDRRAIAALVGVAPFNCDSGQFRGQRRIWGGRASVRASLYMAALVAARHNPVLAPFYRRLRQAGKRAKVALVAVMRRLLTILNAMLKHQSRWNPKVASTPASPSGPARAATVVV

SEQ ID NO: 81893 - protein, 411 aa, unidentified
MQVLYPRCAGLDVHKDTIVACVRCVSAPLHQEVRSFDSTTSGLLALTDWLALHGCTHVAMEATGVYWKPVWHILEGNFELVLANAHHIRGVPGRKTDVNDAMWIADLLAHGLIRSSFVPPAAIQELRDLTRTRKQLVREIAQHSLRIQKVLEDANLKLGSVLSDILGHSGRAMLKAIVAGEHDPMQLAALAQGNARKKTAELREALRGHITDHHRTMLKLHLDIIAALEHTLAELDAVVGKALAPIRQRARLLTTIPGVSDLTAQVLLAEIGVDMTRFPDAGHLVSWAGLCPRNDESAGKRRSTRVRKSGTWLKTALVTAAWAAVRVKSSYLCAQFLRIKARRGAKKAILAVAASMLTAAYHMLRDGAEYADLGSDYFNRHDVSKTIRRLLKRLADLGCHVDPIAIPSSAS

SEQ ID NO: 81894 - protein, 351 aa, unidentified
MMIIGCDYHPSDQQIAFIDQETGECSERRLNHSEGEAEKFYRDLQQRRVSVRVGMEATGHARWFERLMAELGFELWIGDPAEIKTRRVRKQKSDRQDAQLLLKLLLEDRFPQVWVPSPENRDLRQLLWHRHRLVQMRTRIMNQLQAVAMNEGMRRKKALWSKSGRVQLESFSLALWSSRRRQDLLELLDRLNPTIDQLSEAIAQEAEKRPEVRRLMTHPGVGPLTALAFVLIIGSPERFRCGKQIGSYVGLIPCEDSSAGHQRLGHISKQGNSLLRFLLVEAAQIAVRHDPDWRRRFLHLAVRRERRIAKVAMARKLAVRLYWMWRKEWDYRQVLQFGSHAGQPVKAHGVK

SEQ ID NO: 81895 - protein, 322 aa, unidentified
MAMQVQKAILGCDVSQEWLDWCCYGDDDTTQIRNDRGDIDRWLKSFAAGATAIAVEATNDYHELVVERARHLGFTVYLISGYQLKYYAKSLNTRMRTDAVDAQLLARFLEREIDDLRPYEPRSSEHQRLIRLLKRRALLVKQRQQLSQSFAGLAELRASVRSVRSRQQQLIVLIERRLHQLARQLGWQHDLARLRTAPGIGPLNALALCAAYHSGQFIHRDAFVAFLGLDVRTKDSGKHKGRRKLTKNGESEYRRLLHNAAMAATKKGRYFHEEYLRLQARGLCKIAALVVIARKIARVAFGLLQNQTTFDPISHRRRCMPT

SEQ ID NO: 81896 - protein, 339 aa, unidentified
MALYGGIDLHSRISWLVILDGALKLVRQVKLVNDLEEFLRLLEPYRAELAGLAVESTPNWYWLVDGLQGAGYRMHLTNTCAAQQYSGLKYTDDRHDGRWLAHLLALGILPEGYIYPAHERPLRDLLRRRGFLVEKRTSMLLSLRSAFECHTGHRVSSDTIKKWTAVEIEELLDNATVARGLTCLLEPIKVMSTQIRILEKEVLAQAKLRDEFALLRTVWGIGPILALTVMLEVGDIKRFEKVGNFASYCRLVKTDRFSVGKRKGSGNAKNGNPYLSWAFSEAAHFAIRYHDAAKPFYQRKLAKKNGIVAVRALAHKLARASYYVMRDKVEFNPDRLFTS

SEQ ID NO: 81897 - protein, 331 aa, unidentified
MNYSHFVGLDVGKKTFDASLMSADEKEFSHKSFDNTPTGIQSLLDWIAGYHLSLSKLLFCAENMGSYVTELSVSSVSMGFSLALVCPLTIKKSIGLQRGKNDRIDAKRIANYAVLHYRKLELYKLPDKDLVRLRGWIIIRDNLVKQKVSSIKLLETFSWMAKLADVTESISFLEEQLKSIKERILEVEEDMEQLIAASTSLYTNYLLLRSIKGIGIINAIVLLCVTDNFQRFDNPRKFACYCGVAPFEHTSGISIRGKTQTSSLANKEVKVYLTRAAITAISWDPQMKAYYKRKIAEGKHKASVINAVRAKIIARSFAVIRRQTPFVTLAV

SEQ ID NO: 81898 - protein, 334 aa, unidentified
MHYIGIDFHKESTHVVVLNEAGKLLERTRIPSRREELVRFFANRTEPAKAALEATRNWYWPYDTIEPLVEELKLASPPKIRIIAESTVKTDHIDAKVIADLLRSNFLPTCYVPDAETRQKRELLRHRAFLVQIRTRVKNRIHIILDKLGIEHPFDNLFSKRGLEFLQGMELPWAYQKELEDSLEMLEFLNGKEKEQNKIIEKLCKESEEAALLMTIPGIAYHNALLIMSEIGDVNRFATGTKFCGYCGLVPTVHISDKTVRYDQMTQVGNKWLRWVFIEAAHIGRRKSLRFSRLYERVKVKRGPQVAIGAVAREMAVVSFYILKSGKPFRDAKW

SEQ ID NO: 81899 - protein, 340 aa, unidentified
MTIVTLGLDLGKNWVHMVGLDADGRIVLRRRVRRDRLLVETVDMPPCLIGMEACCGAHHLGRALAAQGHTARLMPPQYVKPFVESNKNDHRDAEAAAEAVQRPTMRFVPLKSEAQLDLQTIHRVRQRLVGRRTALINQLRAILLERGITVARRRRVLELRLRAILADESARLSARVRHLIEDMRAEWRDLDARIDAFDAELTAKARQDDACRRLCEIPGIGALNATALVAAVGNGAVFDRGRDMAAWLGLVPREYSTGGKQRLLGISKRGNKYLRTLLIHGARAALPYLAARNDRLGSWLRSLLARAHRNVAVVALANKLARIVWAVLANDGCYAMPTTA

SEQ ID NO: 81900 - protein, 320 aa, unidentified
MQTPSVVLNIGADVAKDEIVVACSEGSFPVRKVANKRPALFAFLKGLPAGSRIGVESTGSYHELFAEAAHQLGFLVFLLNPKDTRHYAKAVGLRGKTDRVDAELIARMIAHEHSKLHAWIPPTAQQRELDRLIKRRATLISLREAVAMSLHELGGFADELKALRTRFNQLIARLDLRVKALVEASPERKQNCTRLCTITGVGRVTGTALVNTLERVPLKSADAFVAFTGLDPRADDSGQHRGKRRLSKRGPAELRRLLYLAAMSAAKTKTWRPLYEHNRAKGLSTTAALVILARRIARTAWSIYTHKTEFDPGRLTKPLT

SEQ ID NO: 81901 - protein, 330 aa, unidentified
MKTWEFTLGVDVSKNTLDISCSELNEHIRINNGTEGFVLFLKWCRKLQIDLNKSFLVMEYTGGYEYKLLQFCDAHKIQYTRIPGLAIKNSLGIARGKNDKVDSARIANYGEEKYKSLKPSRPLNAVIVSLKELLSIRKRLVRENAGYQSSIKEREHMYGKNKKDIVIKILEQKQKANTKSIEKIEAEMMKIVANDEEINTNYRLITSIKGIGKVNGLMTIAYTENFTSFSNPRSYAVYVGVIPFDHSSGTSIKGRKKVSHIANKELKQELNQAARSALEWDSEMKIYGQKKLQTKCYKIVLNNIKFKLILRMFSVVKKGEMYVDNYRKTA

SEQ ID NO: 81902 - protein, 497 aa, unidentified
MSNSTSIYAKQNPKIHEIFERAGHFKKVLAVALDYAKSKHMVLFCNGLGDVLKKPFPIENSSKGLEALLQEVHSTCQHRGIQTEHVFFGGEDRPTYAENFINQICQKGFLVVRVNAWEAKRQRDNHQASTDQLDLRGIAKTMLQQCSYSESDRSSTHQNLREISRCRSYLVGEQTAFKLHIHGYIDRLFPGFLDPRKSGITPFSTASLALMSNGFSAEQIGRRRLRSLVAQLQRHSVAEPESAAQKLQQFAREALPAEPKHLNTWQSSRQQCVALYRQFNQSILALDKDLAHWLAMSPGALLTSIRGIGVVLAAGIVAEIGDPAQWRGLRQSCSYVGIVPGVEQTGGPDKPALTTPVKRRCNRRAKNWVVQAASQMGKHGPSPLHEQYRQLVDNGQHADFVMSRRLLRIGKDLMRRGSVYRPKELLDPNTPLPRLANYYQELWPALLEKWSGLLEWDHLFNSQYPLGQWRQMVQELYRICLPLPSEPGRFNSAGSRR

SEQ ID NO: 81903 - protein, 365 aa, unidentified
MNNAYNTAIGLDVGDRKTQVCVMAKDGKSPKIVMEMAIPTTKEGLAKFLSTQDRSTPVAFETGTHCRWMNEVAQELGFKTYVANPCRLRMITESKTKNDVNDARMLARLALLDPELLHPVKLRGPEHQKMINLHEARNLAVKQRTEAIVQLRAMAKSMGFRIAKCQAASFHNLDRRAWPEAFRCIAWPMLKNLEQLAITIKTYEKQIRELAETPTFKAQVERLREIHYVGLYVATGFIAATGGDMDRFEKPRDVGPWLGITPKQDQSGDVDRQCHITKAGSPFMRRLLVESAQMILRDGAVDTDLKAKGLRICARGAKIAKRKAVTAVARALAVLMVAMLKKPDAPYVPLSERCEKELLAMRAST

SEQ ID NO: 81904 - protein, 373 aa, unidentified
MSDYSAFVGLDVHKDTIAVAVADAGRTGEVRFWGEIANTPDAVSGMLRKLGGRHPLMHFVYEAGPCGYGLHRQITATQHHCEVVSPAQTPRKPGDRIKTDRRDAIILARLSRAGELTSVWVPDTIHEAMRDLIRLRQAMVKDLRAARQRTKSFLLRHGRVFKGTSWKRSHRIWLGNQSFAHPAQQIAFQSYLNAVDQAQARRDEVDVQIRLFAADWSMAPVVEALQALRGVAFITAVTVVCEVGDIRRFAKPRQLMAFLGLVPGERSSGETRRQGGITKAGNVLARAVLIEAAWSYRTPAKIGAQMMLRQEGIPQAAKDIGWKAQVRLCGRYRRLMARGKKSALAVTAVARELVGFIWAIAHITEPTGAEGVA

SEQ ID NO: 81905 - protein, 410 aa, unidentified
MKVAGIDVHKKVLMVVVVDASMPEEKPARRRFVTLPSELHRLLTWLREQGVEEAVMESTAQYWRSVWLELEPHMRLHLAQAFSNRAPRGRKHDFKDAERLVRRLIANELILSFVPSGEQRIWRSMTRMKLQLTRDRVRLQNQIECLLEEMRIKLSIVVSNLLGASGLRILHALADGETDPKKLAQLGGERLQCTEEQLVDALTGRAQPVHGAMLALQLQRLQLIDQQMARLNSMIAAAMKAHQDAVIRLAEVPGLGVDSAQQIIAEVGAQASTFPSAAELTSWVGTCPGKEESAEQNHSSRSAKGNKYLRRVLNQAAHAAVAKKGSHFQAVFRRLLPRLGYQSAIWAVAHRLCRLVWKILHEGVRFIEQGAEVGPREKKKRAQMLARALRKLGYEVTIIPINQLAPKPVV

SEQ ID NO: 81906 - protein, 360 aa, unidentified
MTTSIPSKTTVSYDSVKLGIDAHAKYYWVSRQLDGATPQPVQKMTYDELLLFVVKQQKLTPNLVTCYEAGAFGFHLHRKFEQLGIKNYVVQPQDWDERGKGVKNDRLDAAALCQRLDRYQRGNTKAFSTVRVPSEDQERERAISRQRQQLMRERQRISAMGRSLLATHNIHVTGKWWKGKTWTVVQKLAPAWVVERLEVFIIILKPLEEQELKLMHQLQEAAQEQKIPRGVGPLTFEILRREVGDWGRFNNRRQVSSYTGLCPREHSSGGKRRSGSVSKSGNPRVRAMLVEMVWRMMRWQPEYKPLRKWAHVLYSPTPNAAAKKKAVVAIARQLAVDLWRIFTGQCKAETYGLIYLPEAA

SEQ ID NO: 81907 - protein, 432 aa, unidentified
MKYKLKQKKNQQITRITESTLVVGADIAKKVHVARAVDFRGIELGKECVFHNDQEGLTKLVTWMKELGQAHGKTDIIFGIEPTGHYWFALAAFLQDQGIQVVIVNPHHVNKTKELEDNSPTKSDYKDAKVIAKLIRDGNYSEPKLPTKEFAELRILMNLREKVSDSLTQVKSRIGNWFDRFFPEYTSVFKDWSGKASLLTLRTFALPADIVAKGARDVLVHWKTEVKRGVGIKRAEALYAAATASIGLTEGIVAARVELSILLAQFDLFNEQLEAIMAQVEEILEGIPGTTEMLTIPGIGILTVAGFLAEVGDLNTYDHGQQIIRLAGLNLMENSSGKRKGQTGITKRGRSRLRALLYRAIMPMVAKNAEFQALHRYFTTRGQNPLKKKQSLIALCGKLIRVLYTLGTKQRVYNAIDVVGPVRKVQLQQLAA

SEQ ID NO: 81908 - protein, 356 aa, unidentified
MTSNIKYIGMDVHKESISIAVMNSVGKVVMESVIETKASMILQFIEGLRGDLQVTFEETTSAAWLYDLLKPHVTKLVVCDPRKNKSMREGNQNDKIDARRLAELLRLDHLTPVYHGEHGLRTLKELVRSYLTVTRDAARVMSRVKAIYRSWAIPCTGKQVYARCHRAEWLGKITEPGVRRRAEFYYLQLDALRVLRQDARRDLLAESKKHKAWKRLCEIPAIGPIRAAVLLGILQTPHRFRSKRPLWNYGGLAIEMHSTADHRSVNGQLQRSRKNVLVRGLNRNCNHDLKNLFKGAAAVASSKPGPFQEFDTALVAKGMRPEMARLTLARKIATIVLIVWKKGVCFDASHLKPQTA

SEQ ID NO: 81909 - protein, 402 aa, unidentified
MNAVGIDVSKSKSVVAIMRPFGEIVSTPFEIKHTASDIHSLIELINSVEGESRIVMEHTGRYYEVLAHQLLEANLFVSAINPKLIKDFDNDSLRKVKSDKADAVKIARYALDKWQNLKQYNVMDELRNQLKTMNRQFGFYMKHKTAMKNNLIGILDQTYPGVNTYFDSPARSDGSQKWVDFASTYWHVDCVRKMSQNAFIDHYQNWCKRKKYNFSQSKAEEIYGKAKELVPVLPKDDITKLIIKQAVNQLNSASTTVESLRTLMNETASKLPEYPIVMAMKGVGASLGPQLMAEIGDVSRFTHKGAITAFAGVDPGVNESGSYEQKSVPTSKRGSSDLRKTLFQVMDVLIKTHPQDDPVYQFIDKKRAQGKPYYVYMTAGANKFLRIYYGRVKKYLSSLPES

SEQ ID NO: 81910 - protein, 343 aa, unidentified
MLAVGVDIHKKTLTICVLDESDKPVITKRIENTVEKVVEFFSPYRGDARVAIEPTHNWGPIHDLLTEMGFECKVSDPRQNRLIGKAVVKTDRLDAKRLATLFRVDMLPLCYAAPSDVRRRREKVRARASLVRTCTSLKNQLRAQLTRSWITCPLTDVSGKGGRAFVSTLEWDDDQKAVARMRLDLIAQAQVYVQKLEDEISHDAQGDLRAQLLMTIPGIAEYSSSVILAEIGDIDRFARAESLVAYAGLCVSEDSSGESVRRGRITKCGSAWLRWVLVEAALHTVTQEGKIRDLYERVEKKKGHSKAIVAAARELLVSIFWMLKRMEPYRPSGKKVSFAGEVR

SEQ ID NO: 81911 - protein, 417 aa, unidentified
MIRKVMDAIYQSVGGLDVHQATVVACRRRLIGNGQVELEVKVFKTTSADLRQLRAWLLQWQVTHVAMESTGVYWVPVWNVLEGHFKLVLENAQHLKKVPGRKDDVSDAEWIAQCEQCGLLRGSFVPPSEVRQWRHLTRQRVKLTDQRTSVINRIHAVLEQGNIKLSNVASDIVGVSGRAMIRAMSQGESDPAKLAALSRGRLKTDFAQLVEALDGQLNDNQRWLLKHLLVQVESLENEIAAYSERIKEQMLPYQKQLERLDTIGGVGRLSAENLLAEIGPDMSPFPTDENLVSWGALCPGKEKSGGKNRSSRTPKGNVWLKRALTEAAWAATLKRKSYLAALYHRLAPRRGKKRAVIALARTILQAAWHILKEDVDYKELGGDYFDQLNEEKTANWLVKRLEKLGYEVELKSKKASV

SEQ ID NO: 81912 - protein, 405 aa, unidentified
MSDERFAGVDWASEEHAVCVVDERGRILEGRRYRHNEPGIRALCARLLRLQVALVALERPDGLLIERLLDAGLTVIAVHPNQVKAMRPRYSVAGGKSDSFDSFVLAELARTDSHRFRVLVPDSDRTKALRSMTRARDGLVHTRVGLANQLRDQLATFWPGASKVFSSVDSQIALAFLKRYPTPLDARGLGEQRLQAFLKRHGYPGRKPARELLARLRNGAEGRAGELEMHARREIVLALVSALEPIVQRISELTIEIRHALDDHPDGSTFRSLFIAPDSWLCAATMIAEIGDCRERYPTYRALAADGGQAPVAVESGKAKHAQFRWACDHRLRQAFCTLADSSRRHNPWAADIYDRARARGASHTHATRILGRAWSQIIWRLWHDRDTYDPNRHTAPQRLLAAGG

SEQ ID NO: 81913 - protein, 340 aa, unidentified
MTITTVGIDLAKNVFAVHGVDQNGKTVLIKPKVSRAALPELIASLPPCVIGMEACSGAHYWARLFRQYGHEPRLMAAKFVSPYRMAGKSGKNDAADAQAICEAVRRPHMRFVPVKDESQQAMQCLHRTRQGFIEEKTATYNRLRGLVSEFGIIAPQSTDALRHVVSEQKYSLPLQVQQCVIDLLEHIDRIEENIAEYDRILSKAAKTDHRSQRLMTLKGIGPTTACALVASIGNAHDFKNGRQLAAWLGLTPSQYSSGGKSKLGRITKAGDSYLRTLLVQGARSVLIGADKRTDSFSRWVCMLVERRGYWRAVVAIAAKNARLCWASLHYGDDFRLYSAN

SEQ ID NO: 81914 - protein, 338 aa, unidentified
METYAGIDLHSSNNFVGVINAKDKILYGKRHSNRLDDVLRALDPFKDSLNGVVVESTFNWYWLVDGLQEHGYPVHLANPSAIQQYEGLKHTDDQWDSIWLAHMYRLGILPEGYIYPKEHRAVRDLLRRRLLFVRHSTSHILSLQSMISRNLGFKMSNNEIRKLKSEDIDGLFACPNLVFMANNSLCAIKFLKKISLDIEKKVKSQVKMRQEFEKLRTIPGIGNILGLTIMLEVGDIARFPKVGDYSSYCRCVESKRLSNGKKKGENNKKNGNRYLAWAYVEAAQFARRYCVKAQSFYQSKEAKTKSVVAIKALSNKLSKASYYIMRDQVAFDEEKLFG

SEQ ID NO: 81915 - protein, 341 aa, unidentified
MQDVTLVGIDLGKHSFHLHGQDQHGKPVFRKKVSRKQLVEFFATFHACTVVMEACAGAHHMARKLASFGHQVKLISPQFVRPFVKSNKNDFVDAEAICEAASRPAMRFVTPKTESQQTLSALHRVRESLVRDRVKTSNQMHAFLLEFGISLPIGQAVIRRLSAVLAEHSLPPSLVSILERLHAHFKYLSEQINEIDKELGRQLAADDLGQRLLSIPGVGPITASVLAAEMGDGKQYGCSRDFAASIGLVPRQYSTGGKSNLLGISKRGDKNLRRLLVLGARSYMQRLDKHAGRLADWVRAMLTRRHPNVVACALANKLARTAWALATHHSTFDAGSAAMPA

SEQ ID NO: 81916 - protein, 466 aa, unidentified
MKSFYLGVDVSKGYADFMIINSMKQPAGRSFQLDDTFVGHQCLYDILNRFFADHPGAAMFAAVESTGGYENNWYHTLISFQGLLNIQTARLNPLGVMHNSKADLKRNTTDKISAQNIAEYLVAHPEKVLYQQQDPLSSLKKQWGFIRMLTKQSTQLLNQLNALLYTSNPELLRFCQDGVPAWILKLLRKYPSAHKLSKAKAKTLAKIPYVSLDRAQQLVTNAKRSVSSAKDPVAEQLIMATAGQILHLKKIIDEQTKLMVQACSLPEIELLKTFPGISDASAIGLMLEIQTVKRFASAKKLASFFGVHPVYKVSGDGAGGFRMSKQGRKEARKILFMVALSAIRYCPLIQEVYEKHLQRGKERMDAMGICMHKILRILYGMLKHDNPFDPDIDKANRQKRSQPKANAVKKPTTRRFQAYDRIAPVTKRQRKKRLEQERSHSVNDTKSGITAPVPVDDIIAEILPEL

SEQ ID NO: 81917 - protein, 358 aa, unidentified
MKTYFGCDAHKHYSIFASVDETGASGPFVRVENERSLFRRHLRTMLPGSEIAVETVGNWYWMIDEMERAGHVPLLTHAGKAKAMMGQINKTDKLDARGLALLLRNGTLPSIWIPPGELRDQRELPRMRMTLVRMKTMLKNRIHATLAKYAIQIDEVRDVFGAAGRKLLEKRIRELPPQTCHSVEQQLELLDDVEAQIKETEIQIKTIIQDTPAMKLLMTLPGVGMILAVVIALEVGDVDRFSGPEKLASYAGTVPRVKASRGKIFHGPVRSDVNRYLKWAFIEAANTIVIFHKRWTGRHVAILYTRLREKRGHAKAVVAVARHLSEATYWVLKKGESYRERNAIKPVSSTREQARQFA

SEQ ID NO: 81918 - protein, 403 aa, unidentified
MNAVGIDVSKGKSMVTILRPFGEIVPSPFEIKHTSSDILSLIKLIHSIEGESRIVMEHTGHYYEVLAQQFSAAGLFVSAVNPKLVKNFNNDSLRKVKSDKADSIKIARYALDKWQNLKPYSIVDELRTQLKAMNRQFHFYVKQKTAMKNNLINLIDQTYPNANTYFNSPPRSDGSQKWVDFVYTYWHVDCVRKMSLNSFVKHYQNWCKQKKYIFNKSKAEEIYTKATELVPVFPKNEITKRIIRQAIAQLNSTSATVETIRILMNETASKLPEYPIVMQFKGIGPSFGPQLMAESGDITRFTHKGALTAFAGVDPGVNESGSYAQKSVPTSKRGSSNLRKTLFQVMDVLIKTMPQDDPVYQFMDRKRAQGKPYYVYMTAGANKFLRIYYGRVKEYLCILSESS

SEQ ID NO: 81919 - protein, 385 aa, unidentified
MQTLNDLSQSRIVLKQDSTLIAVIEMSLSSWLVAGLVPGVERQPLKKLAVDESVLLKLLHRWGEEAEKTGRRIERIAVAFEAGRDGFWLARWLRARGIEAHVIHASSVAVSREHRRAKTDRLDTELLKRVFLGWLRGERDHCKMVTVPTIRDEDAKRPNRERESLVGEQTRIVNRMKAALSRLGIRGFNPKLKKAAARLEDLRTPEDEPIPPNTLAELRRDMERRRLISDQIRQIEDARLERLERMPNDGSHAMVRLLARVIGVGIETADMLVQEVLSRTMRDRRAVARYAGLTGAPDESGAKRREKGLARSGNARVRRGMIQLAWRFLMYQKDSTLAQWFRARTENARGTRKTMIVALARKLLIALWRLVTTGEVPAGVVLRAA

SEQ ID NO: 81920 - protein, 294 aa, unidentified
MAFAGIDLHKSFCQAIVCTSEGDVLKEGRIPTEQEDIEEFFSGLECLEIALEASTNYEYFYDLLESLGHHVVVAHPLKTRMIADAKVKTDKRDARILAELLRGDLLPTSYVPPKEQRELRHLVRHRIALGRLRGRLKTQIKTELRRKNIKYHEGGNCFTEKGKAELKRLHNPVINSYLTIYAVVEDELKKMDRAIAEAGTQYEAVKLLTSIKGIGVYSALVIYSEIGDGSRFPTEDQIFFSYAGLVPRVHQTGNEQYYGRITKEGSKYLRCGGSWWRLHGSTCSGARRADNETL

SEQ ID NO: 81921 - protein, 366 aa, unidentified
MDAPTLNRHLCAKVEVSNNHCEEGGVIMKITACGIDLAKNVFQFHGVNGAGKTVQKKQIKRDKMAEFFMKLPPCLVGMEACGSAHYWARRLTSWGHVVKLIAPQFVKPYVKTNKHDAADAEAICEAVQRPNMRFVPIKTREQQAILAVHRARQGCIKARTAQGNQIRGLLAEFGIIMPIGLASVRQRIPTLLDDATEELPRIFVNLILQLLEVFHTLDRHVAELELVIQRWHRSMPASVRLEKIPGIGPITASALVASIGDARNFTNGRQLAAWLGLVPKQHSTGGRANLLGISKRGDTYLRTLLIHGARAVILHASRKVDDDWLHRLMGRRNKNVVTVALANKNARTVWALLAHDREFQSDYAAA

SEQ ID NO: 81922 - protein, 397 aa, unidentified
MYIVGIDIAKRKHEAAVIDGEGTVIIKPFSFTNNCSGYNRLLAMLTKAKLPLDEVSFAMEATGHYWLALFTRLQKEGFRVQVINPVQTNSIRSFYIRQAKTDPRDALLIAEVIRFGHFSESTLHPENIYELRELCRGRHAIVSMQADVKRKVVALLDQVFPEYETAFTNLFGDTSMAILQTCPTPKELSEMRLEELCHLIEVSSHKRFRMAKAQELQALARNSFGFAMAGDVFSTMIRLYAKHLDFLKQQVREMDRKIAEIMDTLDTPITTITGIGPTLGAYILSEIGDISRFSSAAKLAAYAGIDPTMRQSGEYNGVRNRMSKRGSPYLRHAIWLAASSAVLHDPALKLYFQKKRDEGKPYMASVGHACRKMVSIIYAVMRDNKAYTPCIPNEISA

SEQ ID NO: 81923 - protein, 347 aa, unidentified
MLIIGCDFHAGFEVLAIFDKRTGVRTEKRLEHPGEAMGYYRELQERGERVRVGMEAGAPSQWFRRLLSECGHELWVGNGARIRAAAVGKKKTDREDAKLMLQMMLEERFPRIWVPTEEERDVRQLLLDRHHRVRARTGLKNQLQALAMNQGVQKGRRLWTAAGRELLAGLPMSEHTGRRRDYLLRRVAELDQEIAAMDVLVWKEVQQRPEALRLMTHPGGVQTALATVLTLGDVSRFHSARAVSAYLGLVPSEYSSGGKQRLGHISKQGSSLMRFLLVEAGQTAVKKDPELKRAYQRLWVRKGNKAVAKVMVARRLAMRLYWMLRAQWTYPQLVEHVGKPESSCGKR

SEQ ID NO: 81924 - protein, 393 aa, unidentified
MEIRYFCGIDVSKNSFSVAVKNGQFLIKNKSFSMDREGFERFEELIFSYKDSLITEMEATGIYHQNLFNFLINRGYNSCVVDPYRVAKFFKFRSNKPTKTDKKDSKTISEFLEEEVKNNPSFMQEKQDERFNLRYLVREKERITQSIAKTKTEIKRIVSLVFPELEVKTSIFSKEILGILYEFSSADRIRRLTLEEFINRAQVYIPNGKGRKVSIEKEEIYRLAKDSISFCYPVYEKLLKIKIKRLRNLIEERKEIEEIIKKEADKLFRREIEILTSIPGIAKESAIYFMAEIVDIRRFKNKRKLIGFCGLDPVIKQSGNYKGRFKISKRGNSHARRIAFIMAGCVKRSCPYFREYYLKKRREGKSYKEAVIATSTKLLRTIYTLLRGDRLFK

SEQ ID NO: 81925 - protein, 358 aa, unidentified
MTIVSHTVAKMYSFVVGVDTHAKKHVYAIMTNTGEHLETRDFPTTSTGIKRAITWAGRRTGGDVNTLWVVEGTSSYGAVLTGAVTDAGYKVTEAPGGYAKIGRGVGKTDPLDAQRMAVAALPVEAGKLRIPRLNEGARAALRVLVTARDMLAVERTKYVNALTALLRLTLLGVDARKALGNAQILEVAGWRTRNEALELKVARAEAVRLAQRITELDAQIKENTVEMSALLQLSEGRELLELAGVGPVVAAVCVTAWSHPGRLRSEAAFASLAGVNPIPASSGNTVRHRLNRRGDRKLNKALHTAAMVRMTHDEETRAYVEKRTAEGKTLKEIRRCIKRFLARRIYKILESAEVLPMT

SEQ ID NO: 81926 - protein, 486 aa, unidentified
MKIKQVRRIVVSAILDIAGEVRLHLGGNATPFFNVDELPKRTAVCCITQVKSTSSKVRIPTRAIPSLHISGRDLMQDILTCAMGLDVHRDVIVACLARGELGTEPEIEIRSFSTLIPEMRKLRDWVLEVECRHVAMESTGIYWQPIYEMLEPCFDGQINILVVNARHMKNVPGRKTDMRDAQWIATLLRAGLLNGSFIPDKTFRELRHLTRYRKSIVHDITAQKNRIDKFLQSSGFRFTAFLSDAFGASGRNIIRHLMEYGNISREALDKCLKTQTRKRIDEILVALNGSLSEHQRSFLRMIFEHLESLERHRHTVEDAISEEIVKHEAALSLLCSIPGIDVTAAASIIAEIGTDMSAFPDSQHICSWAGLSPGNNESAGKRKSAHINKGNPYLKSMLCEVGWVISGKRTLYLSGWYWRVKQRKGAKRATIALARKLLALIYTMLKTGTPYNEECFEIRRKQSERKRASRMVNELQKLGYFVVAPD

SEQ ID NO: 81927 - protein, 341 aa, unidentified
MEKKLNVLGIDIAKQVFHLVGRNEQGTILLRKRLYRAQVMAFIAQLPPTLMDMEACGGAHYWARRFREHGHAVRLMAPQFVTPYRKANKNDMRDAEAIAEAMTRPTMRFVPVKSVAQQDLQALHRVRERLMKARTALINETRGLLHDYGIIVPQGAATFRKHVLEKLTTEAAKLTPHSLELFRQLLEELAALESRVAPYDAQLAQVAQMHPVCQRLMTIPGLGELTATALVAAVNDATQFKNGRQFAAWLGLVPRQHSTGGKSRLLGISKHGDSYLRKLLVHGARSCLRWVGRKRDRRSQWVQSLMERRGWNKAAVALANKHARVAWALMGTEQVYRVAEA

SEQ ID NO: 81928 - protein, 345 aa, unidentified
MDQISRIGMDTSKHIFQLHGVNAAEVPVLRKKLRRKDMVAFFEKLAPTVIAIEACGSSHHLARLLQSFGHSVKLIAPQLVKPYVKRGKNDSADAEALCEAMSRPTMRFVPVKTAEQQATLMLVGVRDRLIRNRTQLINAIRGHAAEFGLNAAKGVAHLVPLLERIEADDSLPTLARELFAIQSKEYEQLQMQIDEVDARLAVWNRADECSRRLIKIPGVGPIGAALLIMKTPEPELFRSGRQFAAWIGLTPKDHSTAGKARPGVITRAGDEHLRSVLVVGATAVIQQALRHGRASPWLAALLKRKSPKLAAVALANKMARIAWKLMVSGETYTAKSVPFAFAGAV

SEQ ID NO: 81929 - protein, 403 aa, unidentified
MFYPKLFVGIDVSKLKHDIVVVNEQKQLVHKPLVIREQREDYQHLLTKLSWLQQRHGTEVFYIGLEATSDYWKNIYHFLKKQSPAFVLTVINPIRTRAFTVTELRRAKTDPISAKDIALFMVEKRPRPSTDRAPLFEHIKDLDGQVYHFKKQQTMMQNKLRLELAKVAPEIEHVLKRLGGQQILALLQSFPTAEVIAKAPLEELRAVRYGKKQWVLPLGFVQKMKTLAATSIAHKAGVGSGYVVQSLVRRICEHQQEIQLLKQQLLELYRHVNERDSLLTTIKGISKETAIVLEAYIGDVSRFGDAKKLVAFFGMNPVINLSGKSVKRVSYLQKKGSGIVRHKLFMAVLQIIHLKEGPIYKYYARLVAAGKPKLVAIAAAMRKLLVIIYTILKNQQPFDPKHP

SEQ ID NO: 81930 - protein, 344 aa, unidentified
MKLFIGLDVSLAKTAVCIVSEHGKIVKEAEVGSDPAALTQFALEQQGEIAMIGMEAGPLSQWLHRGLTEAGLEVVLMETRQVKGALKAMPIKTDRRDAEGIARLLHLGWFRPVHCKSVSAQEIRALLGARKSIQQGVIALEMSLRGLLRNFGLKVGAISKGRFDARIQEQVASDTTLVAATEPMLRARATLRHELARLERHVRSLAQDDPTCRLLMTMPAVGAVVALTFKSAVDDPARFSSSKKVGPWVGLPPSRQQSGERDVTGGITKAGDAHLRRALCQAATVMMNRGRGSWLRTWASRVAKRRGTKRAMVALARRIGVILHRMWLDGRNFRWEGAPEPIHA

SEQ ID NO: 81931 - protein, 382 aa, unidentified
MGTRNATKTDAKPKTPRESSRRPGPSVQSTLGVTTPTRRRRKEIPVEQQQQYVGIDLHRRRSVIVRRNEAGETLDTVRIDNDPVALAAELGKAGEHPEVILEATYGWYWAADVIKECGGTVHLAHPLGNNWGHRRVKNDERDATDLVDLLRMGRLAEAWVAPPSLRELREHIRYRAKLVNLRSNLKAQVHAVLAKEGVNVPMSDLFGVAGQRLLDKVQLANAYRIRVESLRDLIGHLDREIAMVEKQVAPIFAGDLGFHAVQAIPGVGPVLAAVFVAEIGDIERFKSARHLCSWAGLTPTHRESDEKVQRGHISKQGSRLVRWAAVEAVVRQRGDTPVRRHHHQVGERRGARIGRVAAARKLLILVYYGLRDGEIRCLTETG

SEQ ID NO: 81932 - protein, 370 aa, unidentified
MGQDIKVFVGLDVHKDSISISVCEVGREASQFRGTIRHDVPALLKVLRKLGAPATQLVAYEAGPTGYGLHRRLVQEGYGCQVVAPSLIPQRPGDRIKTDRRDSARLAELLRAGELKPIWVPDLEHEALRNLWRAREDAMQMRLKARQQVKAFLLRHGRIYAGKTSWTKTHARWLADQAFEQAADQLAFTEYVLAVQATDGRLGRLDQALVQQASAWRLAAVVSALRTLRGIDTVSAIGLVAEIGDIQRFAHPRHLMSYLGLVPSERSSGATVRRGGITKSGNAHARRLLTEAAWNYRYPARLSQALKTRQQGQPEAVCRHAWKAQVRLCGRFAHLQRRGVHINKVCIATARELSGFIWAIAHSATVPAQP

SEQ ID NO: 81933 - protein, 339 aa, unidentified
MTLFHPIFSLRLPEDITMIFIGIDISKLTFDAAYFINKRYVHKQFSNNPKGFTDFELWMNKSDAEVFSCLEATGIYSFDLAQYLSQQKRNVLVVNPIITHAFFKMELNRNKTDKADAKLIARYCKHAVLSGDFKRNYYQPKGADYETIQRLVTRCDQLEKSKTQENNRLEASTNKHTTRSIKRLQKSIANEIIWIKKTIAGIVKNNENLSQQVELITSIKGMGERTAWSVIAYIGDFNFFANAKQVASYAGLTPKIMQSGTSINKSSLSKLGHKRLRKSLYMPALVAIRHNPSLKAVYERLVHNGKPKKVAIVAVMRKLLILSYGVLKSEKAFDVNYQP

SEQ ID NO: 81934 - protein, 339 aa, unidentified
MDSHKDTLAVSDVDQAGRQQQTQTFPNTRHGHRRLLVWLQGQPGVVRVGIEGAGGYGRAVAMCLVQAGLVVVEVTPSLTVRERRRLRQRGKADPTDALAIARVVAREQDLPPVRRQDLSEDLRLLVDYREQLLGERTRIANRVHADLVALRPGYQRQLPELRSQRAAGLVRGLLRGQVSVRAELVRRRLDQLDRLDAEIRALKARIGDLVQATGTSLVQVHGVGPLVAARILGEVGDVRRFADRHKFAAANGTAPIPASSGRTQRHRLNRGGNRRLNRALYTVAITQARSDHPGRAYLAGKQRQGKTRREALRCLKRRISDAIYRQLLADLQPDPGPAP

SEQ ID NO: 81935 - protein, 426 aa, unidentified
MNEVEDTRLKAFRQFKKEIRGSKEYLIVGIDVAKEKHHAFFGTATGKALVRRLIFDNTIEGFEKLLTQVRAVQVAQSLPKVVFGLEPTANYHKPLGEHLIKCGRMVVLVSGVAVKHNRELLDGRWDKHDTKDSANIVDLISQGKCLFYEYPEQRLRDLRTLLSLKKKLKKQEHGYRVRIRNQLLAQYFPELDRFSGRPEVEPIVRWCLDTSELAGLEFDQFVQRVVPGRKTLAQHQRLQTIQQLAIDSIGCEMGEGAHFEAQVMVDGLRQIRETVKLTDDRIRETCRQFPEYGYLLTIPGFGPDVSAKVIGALGNPFRFQNRKQVLKMAGLDLGAYRSGKTAEAATPVISKRGKADLRYALYQAALIASTHHRPWIEHYTDQLQGRAKEPGIKTKRYVKLSAKFLIIAWTIMKKKEPYNPRYLNPA

SEQ ID NO: 81936 - protein, 418 aa, unidentified
MSAEGKARPACRYVALDIHKHYCVIAGVDRAGRVVLPPVRVEHADLEEWLKKKLQSSDQVVIESTTNAWHVHDLLKPVVERVVVANPIRVKQIAQARVKTDVRDTLILARLLAANLVPDVWVPPLHIRQLRQLLSQRRQFVETHTQIVNRMHSVAHRHHLKHERGKRFNEKTIGWQKDKSLSGMEQFQLRLEMENKVYIEKQIERISREVRKMCHQKPWAEAMPYLMQLPGFGVLTAMTVLAAIGEIERFETSKHLASYSGLTPGVEQSGTKHRGKGITKEGRRELRWALVEAAQMAVKSDPLLKMKFQALQKRMHRNQAIVAIAHHLLELVWYVLTRRQPYRGFTHERIAYKYLTWAWQMDEASREGLTRQQFARYYLMRLGVGHDLTRIALNSKYPRRLASEAEVLAIHPELQQIE

SEQ ID NO: 81937 - protein, 311 aa, unidentified
MIPYTIGVDVAKDTLDAHRLPGGASRQFANDKRGHKALIAWIGSEAAQVVFEPTGPYHRAFECALTMAGLPFVKVNPRQARHFAEATGKLAKTDRIDAALLARMGALLQLEVREPRSEIVNDLKELRHAREALVKDRTAAKNRSKALTIPLLERQNAERLKQIERQIAAIEAEIEARIGADRTLARRFEILKSIPSISSLTAFALLIEMPELGSLDAKQAASLAGLAPMARQSGHWTGRAFIRGGRASVRRALYMPAIVAARFNPDLKAIYAKLSAAGKPAKVALTALMRKLVVLANALLKADREWAPKCP

SEQ ID NO: 81938 - protein, 407 aa, unidentified
MARVFIGVDPHKLSATIEVVDDREVVLARGRFGTDKTGYTAMREYVRTWPQRTWAVEGSNGAGRSLAQRLLADGEHVVDVPAKLSARVRLFDTGHNRKTDAHDAHAVAVVAVRTKSLRVLAYDEQLEVLRMLVDHREELTKRRIQTVNRLQRLLAELTPGKVKKDITALQAKAILSSVRPRDVVGKTRKMLASEQLAEMVALDQKIKASTKELKTLVLAQDSTLMDLTGVGPVVAARILADVGDVARFADRNRFASWTGTAPLDASSGEHVRHRLSRAGNRKANHVIHIAAACQIRLDTPGRAYYRRKLAAGKRPLEAMRCLKRRISDAIYRQLIADAKTALGDATASSIKASPGGHRGASQESSAAGSNPHTGASDQPLPGPAPTTLPAATTDRKRPTRKPLQPAS

SEQ ID NO: 81939 - protein, 299 aa, unidentified
MDTIVVGIDVSKDKLDIAVRPSQDVFSTSRDAAGLDALVARLTPLSPAAVAVEATGGFETVVAASLAAAGLPVVVVNPAQVRSFAQALGKRAKTDPIDACVIAHFAEAAKPEIRPLPDEAARLLSDLVARRRQIIGMIVAERQRQRRLVEKRMQKSIARLLKALEKELSALDQDIDDAVRGSPAWREKEDLLASVPSVGPVIARTLIAELPELGQLDRKRIAALAGLAPWTRQSGRWKGKSFIGGGSAGGAVHGRSRRGAYQSGAAGLQATADRCRQVETRRDRRGGTQALDHPQCRVA

SEQ ID NO: 81940 - protein, 342 aa, unidentified
MYYIGLDVHKKTISYCVKEVSGQIHSEGALQATRAELDSWMKTLPQPWAAAMEATIFTGWIYDHLLPHAAELKVAHPLMLRAIALAKKKNDRIDAGKIADSLRCDFLPECHMASTAIRERRQTLRYRNLLVRQAVQLKNKISGLLMETGVSYNRQKLHKVGYFRELMATNQDVTARLRPLLKLCREALERSQKTEGALVRSLSRDPLLAQRVERLKTIPAVGPITALTWALEIGDVKRFPSLKQVISYCGLCGDEKSSANIAKRTRLSKQRNKHLQTILVEAAKMAPRHSADLALIYEKEKQNGNANRATLAVARKIVAYLLAVDRGERDFVALENYKRTAA

SEQ ID NO: 81941 - protein, 347 aa, unidentified
MLIIGCDFHPGFQQVAIFDNLTGEIQEKRLQHRAEAEQFYRGLAGQEVRVGMEACGHYPWFERLLAELGFELWFGDAAKVRASVVRKQKTDRRDAEHLLDLLRENRFPQIWVPSLEVRDVRQLLVHSHKQVQARTRTKNQLQAMALSQGVQKKYKLWTKAGREEMEQLPLLPYAAQRRKQLLQSLDGLEAEISELDRRVADAARQRPEAVRLMTHPGVGPVTALALVLTLGPADRFESAKQVGSYFGLIPSEDSSGGKQRLGRISKQGSSFLRFLLVEAGQTAARLDPQLKRFYRRLAARKNRSVAKVAVARKLATRLYLMLREDWTYTQLCQAVMQVSPSHSVAGQ

SEQ ID NO: 81942 - protein, 349 aa, unidentified
MVTIGVDLHKRTHTLVVADPAGRQLATKTVPATVAGHVDALRWAKGWPERSWALEDCRHLSRRFEADLVRAGEAVVRVPPKLMAGVRRAARTRGKSDPIDALAVARAALREPNLPVAQLEGVAREVQLLLDHREDLVAERTRIQNRLRWHLHELEPGNEPAPRSLNRAWVLRALEARLAESPGVVARLASALVARCRQLTAEITELEAELALRTIELAPSLLALPGCGVLTAAKLIGEVAGIGRFRSRAAFAMYNGTAPIPAWSGNPDRHRLNRSGNRQVNAALHRIAITQMRLPGPGRDYFEHRRAEGDTKKEAIRLLRRRISDQVYRRLRLDEHRARPLADGLEAAA

SEQ ID NO: 81943 - protein, 400 aa, unidentified
MRVVFGIDVSKASSEVAILVNGEKVHGYTMSNDAIGFSRLLGDLKTVHKPEIIFEATGVYSRRLQAFLDEHGYAYTRLNPLEAKKQPDSLRVRKTDQIDAEKLAQSQFVLNRKTTYVQKEVYQNLRDLSRFYQNLTEDIVRAKNRLHKVLQVTFPELENILSTPTGEQYWNLVITFPCKDFVLELSNDELSKSIRLSTSKRISDKRVAYLAEKLIALANQSYCAVKKTSSILEEVRYYAKELLRLSEQRQAVLDEMVELAQPLPEYNILLSIPGIAETTATSIIGELGDIRRFQSANQINAFIGIDLRHYESGNFLAKEHITKRGNPYARKILFKCIHNIASASHTNPCHIADFYEKRKRQSQTTSTKPHTIASIHRLIRTMYYLIMHNKLYDYASTQNR

SEQ ID NO: 81944 - protein, 485 aa, unidentified
MKSRSSKPRRNPNTKAHPAKGMIRPASAMPVVHPHAAGVDVGATEHFVCVPEDAVAPGHSPVRSYSAFTGDLDKLVEWLRECKVKTVAMESTGVYWIPLCQKLEAAGMEVVLANARHLRQVPGRKTDVKDCQWLQRLHSYGMLSGSFRPADEFCRLRTLLRHRENLVDGCGRQVQYMQKALNYMNVHLHHAVSDLNGQTGLRILDAILAGQHDPKVLVQLRDDRIKRSTPEQMEAALQGDWRQEHLFVLRQAREAYRFLEEQIAQCDRQIEQVLAQIVIEPASAPAASPPADPVASAEPTAKKKKHRTRKIGHGLKKDLTPELERICGVDLTRVIGLNVLSVMIILSEIGVDMSRWRSAKAFSSWLGLNPGNKISGGKLLSSRTPHVVNRVSILLRTLATAVGRSDTWLGVFHRRMRARLGPAGANTATARKLACLIYHLLKYKEAYIDVDVLIYSQKIQRQRLGRLRKTAEELGYQLLPLQQAA

SEQ ID NO: 81945 - protein, 420 aa, unidentified
MRNAGIHANSLLEVRRMYNAVGIDVSKGKSTVAVLQPGGTVIRNPFDVSHTSQNLNELADYLDSLDGTTKIVMECTGRYHEPMVKALSEAGLFVSIVNPHLIKNFGNNSLRKVKSDPADARKIARYTLDNWTELRQYSGMDNTRTQLKTLNSQFSFFMKQKVAAKANLIALLDNTYPGVNKLFDSPTREDGSEKWVDYAYSFWHADCVRKIGLKAFTERYKSFCKKHHYIFQQDKPEKLFNASKELVAVFPKEKTYKLLIQQSIQQLNLASEHVERLRREMNELAATLPEYSTVMGIYGVGKTYGPQLIAEIGDVSRFTHREALTAFAGVDPGVDESGQHKSKSNRASKVGSARLRKTLFQIMTTLLQNAPEADPVYRFLDKKRSQGKPYYVYMTAGANKFLRIYYGKVKEYLRNLEQTE

SEQ ID NO: 81946 - protein, 367 aa, unidentified
MSERTRFLGLDAHALTIAVAVAEEVGAPSEHGVIPNDPSSVRRLVGRLGGPGVRLVACYEAGPTGYALHRHLQALGVECMVVAPSLVPTRSGDRVKTDRRDALKLARLLRSGDLTPVWVPDEEHEALRDLVRARADAKADELRAKHRLSKFLLRRGIRPPHGMRAWTTRHRTWLARIRLQESCAQIVLEDYLSVVRAADDRVRRLEAALLTAVPDRHRALVAALQAFRGIAYLTAVTIVAEVGDLRRFATAPQFMAYVGVVPSEYSSGASRHRGRITKTGNAMLRHVLGEAAHHCRLQPRVSTTLRRRQQAVPTAVVELAWRAQTRLHQRYRHLSARLGRPKATTAVSRELAGFVWAVGQQLEVPAA

SEQ ID NO: 81947 - protein, 364 aa, unidentified
MSSVHYVGMDVDKEKIVLARLGAGRTGETEEHVMANTPGAVRKYFTALLAGAEVHASYEAGCFGFGLYRQLSAMGVAVVVAAPGLIPRRPSDRIKTDRRDARSLALALRAGQLTGIHVPTAQDESVRDYLRMYEDLRGDLRVCKQRVLHFLLRRGIRYDQGGPWTVKHKNWLSRLEFCDPIDRKTLDMYLSTIQELEGKCSEAAEEVEQIAAQERYREQAKKLTAFKGIKTLIALSFVAEIGDFRRFSSARQFMAYLGVVPSEHSSGNKRRQGGITKAGNSHLRRLLVEAAWHYRSYHPSSRVLTERRKGVDPQILTFANRAGRRLSRKYMHLLLRGKRSQLAVTAVSRELAGFLWGAMTGQVA

SEQ ID NO: 81948 - protein, 387 aa, unidentified
MIAHYIDEKFQKEFTIQNNKNGYNYLLNYLNRVNQPKLIFESTGIYSRAMVRFCRVNQINYIELNPLEAKFKTSSLRSWKTDQSDAHKLAQIAPFLNDSDSLNNTNDDIYFELRERARFHLEFENEQNRLKVEIIEILHQTFPGLEKLFKNRYSMIALNIAEIFTHPDFVQQNDMESIISTILKSTDKGLSQRKAESYGETLFKLANDSYPNVNSSSFLVKKAQLLIQKLKKSIGQLSQLDKEMIQLAQELDCFEIIYSIPGIGDLTAAMIIGELGDISRFKSNKQLNAFVGIDIKRYQSGETHYRDTINKRGNKKARRLLFLVIMNIIRGQHRYNNHIVDYYYKLRKQPNEKSHKTAVVACINRLLKTFHYLIMKHKLYDYEMSPH

SEQ ID NO: 81949 - protein, 399 aa, unidentified
MTGTPPNVYAGIDTHQATNHVGIVNELGKKLGDKEFPTTSTGYKDLLKFIVAFGTLLAVGIEGTASYGAGITAYLRTQKVTVREVIRPNRQTRRGGKSDPIDAYAAAKTIAADADDLPIPKLLGGAIDGLRVTQRARRTAVKARSAAMTQIQNFLTTAPDTVRQKYAPFKGDALYTALAATRPNDGDDLGLVLRRLARRITYLSEEIDEAEARLAVQATDIAPALMAATGVKAVTAAELLVTVGENPERITSKEAFAALCGTSPIPASSGKTHRHRLNRGGVRQANAALHRIVITRMAHDQRTKDYVARRTTNNTKSKKEVIRCLKRYVANEVYTRIVNPPEVLAVDDLRPLRLSMKITLQDVAGQFGVWPAKISQIERAVTRDDEFVVNYREFLLRTI

SEQ ID NO: 81950 - protein, 404 aa, unidentified
MELKPLYRCVAALDVHQAKLTVCVLQEDAEGELQVELREFGGFKRDRQAMAEWVASFHPEEVVMESTGIYWKSPYAALERCGIRALVVNARHVKQVPGRKTDVGDAQWLAILARSGLLRGGFVPPANFRELRLTSRQMQKLTGILAAEKNRLHKVLTDAGIRLAVVVSDIHGQSARAMVKGLIAGESPEQVLKLASKRLKSTEEELLDALDGELSAEHRFVLGELMDHIEDLEQRIARFSGHLLQGLAPQQGLLQALQTIPGLDERGAAMLLVEIGDDMDAFGSGEKLASWAGVCPGNHESAGKRKSGKKRKGNPYVRRILCEAANAAARTRSALAELFKPLLIRRGRKRAIFALAHKILKIVFVLISRGDYYRDATVDYEAMSVERNAPRWMRMLRKYGYISA

SEQ ID NO: 81951 - protein, 414 aa, unidentified
MSGSAFPMPAPAPLAYVVGIDIGMESCMMCGLTMEKRQVIKPSPFANQAEGFTGLFERLERLGASPDQILVGLEATSRYGENLYHALLKRGYRVCLLHPAQMHAFAQQRGLRAKTDQVDATTIARALLSGEARFGYVPTEQVAIYRELVRLQQQLSEDVVRYKNEIHALLVVLFPEFTQVFADPTRPTALAFLKRYPSAQAVAQAEVGVLSQVLHELSPKHYGRQTAERLLDVAKKSISSGVAISARSTSLRILCDQLEHTQANLKQLHQEIETLLDQDPKAKGVLLIPEFGVMTVAVLRAELGDLDRFARMDQVVAYVGMDLQVKQSGKWIGQTKLSKRGSGRVRRILYLAALRSIWLANSPFGAYYHRLVDRGMKKGMAVVAVMRKLLIVAAHLILTEEVYEPGKVAALSVR

SEQ ID NO: 81952 - protein, 344 aa, unidentified
MHIASIGIDLGKTTFHLVALGERNKVLVRKKFSRAQLLAYTANLPSSLIGLEAGAGAHFMGAALREQGHEVRLIPAQFVKPYRKSNKNDFIDAESIAEAVTKENMRFVQIKTQEQLDVQAMHRVRDRLVQRRTALINEIRGFLLERGITFAAQPIYLRKNLPTVIEDAEQNLSPRLRWLLQRMWQEWKQVEIDIKAMTDEIERISNENALCRRLRQIPGFGPLVSTATVAAIGNGAAFRRGRDFAAWVGVVPRQYSTGGKQKLFGISKRGNVYLRRMLIHGARAVLLRVKYDTEGFGQWVHRLAQHAPRNKVVVAIANKLARIAWAVLSTGKDYQHQPLQITAA

SEQ ID NO: 81953 - protein, 424 aa, unidentified
MKVTYQTCCGVDVHKSFLVATIVKTTGGIEPSYQKKRFSTFNNSILEFKQWLLDNDCHDVCMESTGKYWVPVFNLLEDDINVVIANPKWVKAVKGNKDDTKDSKWIGDLFRLGLVKGSYIPCKKVRILREYTRYRYKLVSCRSSEKNRYQNALTVCNVALDSVVSDIFGKSSTSIIDYLLEQSGSSINHEEIASKLLRSLKSKEDAVIESVEGYQMTDAQKYRMRLVRAHMDYITAEINDVDKMIENMISSNTDFENAVQFLCTIPGVKRDSAITIISEIGTDMSQFSSSRRLCCWAGLTPGSNESAGKRKSVRFTRAGVYLKPALVQCAHAAVKSDKSPYYKKKYESLVKRRGKKRAIIAIARMILTAIYQMLSTGEQWNPSDLYKIAMPVALVEKQKAKAIKQARKLLQREGLLPPDEPFAS

SEQ ID NO: 81954 - protein, 372 aa, unidentified
MNYNTVYVGMDVHKESFTLCSMTIEDEKASHYQKTEADYKKVLKYLEFLRTIYGDNAKFICGYEAGCLGFTLYHQLISQHVECIILAPTTMLEQRSKKRIKTDKRDAEIIAKCLAQHNYSPVHIPTATDEQIKEFLRMRDDHKLALKKIKQQILAFCLRHNYRYDGNSHWTAAHLCWLKSLQPEALYKETLNEYLLTYTTLNDKIERFDKRIEELASKDEYKESVQKLRCFIGVRTHTALSVLVEVGDFNRFASAKNFASYLGLVPGENTSSDDRNLLGITKAGNRHVRLLLTEAAQSYARGQIGYKSKDLKSRQSGNSAQVIGYDDKANERLRRRYYKMVLGQSKKHNVAKVAVARELACFMWGMMTEHIS

SEQ ID NO: 81955 - protein, 428 aa, unidentified
MDELNRNRLEEFRQLRQEVRHSEEYLIVGIDIAKDQHHAFFGTATGKTLLRRLVFSNDHEGFRKLLDHAEALRVRHGLKKVVYGMEPTANYHKPLGEYLIVLGRTVVLVSGVTVKRNRESLDGWWDKHDAKDSANVADLISQGKCLYYEHPSAELRGLRGLLSLKRRLKKQEHGYRVRIRNNLIAQYFPEMDRDYDRLGAEGLSIMRWCFPPSQMTVLDVDPFIERVTSRRIRIEKRRRLEGIWEKAGESIGCDGVPGVEHEARVMVEGLKQIREMIKETEDKIEELCKEFPEYKYLLTIPGYGPDVSAKVLGAIGDPDRFQNGKQVLKLAGLDLSADRSGKDSAKAIPQISKRGKADLRYALYQAALIASTRNQDFMRYYTRKLQSREREKGIHTKMWVKLSAKMLLIAWTLMKRKEVFDPAYLNVE

SEQ ID NO: 81956 - protein, 275 aa, unidentified
MQRPEYYVGIDVASTSFYATVGKTIKDEWCLLEKPRKFENEYDSLPQFLDWMQQHKIKPQNAIICMEATGVYNEVLAHSLVANGYALAIQPPLEVQRAFKPVGHKSDPVDSSQIAEYAYRFFDELHLWKPREEVLEQIKTLLATREQFSKQKTAHLNALKALQRKVVRTPLAEQVHEKEISQLKVHIYAIELEIEHLIDQDPTYRQFVGLLMTIPGVGLLLAANLLVTFQSNPQCFQPKSLAAFIGICPYQHQSGSSVHGVTTSRHYGPPALRRL

SEQ ID NO: 81957 - protein, 416 aa, unidentified
MPEHYDWFLGIDWGYDAHQICLVDAAGQVHDTQSVEHNAAAVDGAIAWVLTRTAATPSQIAVTIEKPRGALVATLLERGFPVYAINPKQLDRFRDRFSAAGAKDDQRDAHVLGDSLRTDRRAFHRVPVDDPLILPLRELAHAEADCQRELTRLANQLRDQVYRIAPPLLRLCPAADEPWFWTLLEHAPTLAEQQRLTRTQVLTVLRSHRIRRLTADHVLAALRAPAFAVAPGVHDATREAISLLIPRLRVVDAQRKRCVVRQDALLTELRERPAEADPKEHCDVEILESLPGVGRMVTVAMLTQAAQPLATRDYDRLRAHIGTAPITKASGKSRLVQMRTACAERLRAAAYHWGRVSIQQDASAAAYYRRLRARGHTHGRALRSVVDRWLRILVAMLRHRTLYDPKRFVTSATVHV

SEQ ID NO: 81958 - protein, 296 aa, unidentified
MNTKTNQSINVGVDTGKFQLDIYIRPLDIFFTVKNDEMGIKEAVKTIKKHKPERIVIEATGRLEMPFIIACAKAGLPFTIANPIQVKRFAGVIGQRAKTDKLDAQMIAHYSEVIKPALSKLKPDTMQAMSDLASRRNQLLGMQTMEKNRLQNLPKSLAMTIKPGLTMFKTQIKKIEDKIVKLIESNPEYQAKNMILQSMTGIGKIAAAPLISNLPELGHINSKQASALIGVAPMNRESGRFKGKRKIQGGRPQVRTVLYMAMMSAMQSNPVFKATYQRLCAAGKPKRWPLLRVLER

SEQ ID NO: 81959 - protein, 353 aa, unidentified
MKYVGIDFHKNYSFITEMDEAGTIGYQTKLSNDYDTLKSYLTDLRPHTKIAIEATCNWYYFYELIEDHDVDVVLAHPLKTKAIASARLMNDKVSSETLAHLLRADLLPAAYIPDQKTRDIREVLRLRAFLTILRTRVKNRVHAILLKNGIPCPYSNIFGKRSLVWLKQLALRPCYQNAITSCTRLAKTLNEELDGLNETIEALAYDHPYAQILETHPGIAHYSGLLIATEIGDITRFPNAGKLCSYAGLVPSMHASGGWARLPNKVLNGCAGSSSKPRPMQSKSQTITRNYITASLINTAKQVPGLRSPAASAGQSMRCLNLIDHIKKDNSGQRLGVITTRKVLGSDCATGVR

SEQ ID NO: 81960 - protein, 374 aa, unidentified
MESYYLGIDVGKFEHQATLVNEQKEMVGQSIRFANNIDSFTNLIDQIKKGIPEKSNIQAGMESTGHYWLNLDAFLKRSGIENVQIINPIETQKISKTRIRKVKNDKVDSFEIAKIVCDRKNATAIKQNEKLVKLKRLTRFCDKMKRQEKFIKREIVNLLEVVCPEFEGLFNNIFLKTPLSILEKYSDLRKLGHVKKEAFAELLKKNSRGRIGEAKSELILQTINNSVGKNYWDEFSVMQIKMLLDNFRLIEKQVDQLKKEIEKFSDQFEDKVYVNSVVGVFSFSAAVYLAELGDIERFKSKHQLTAFAGIDASVFESGEYKRKQGNRISKRGSKYLRKQLYYAAKTAIIFDPEMKKFYEKKKKEGKHYNRPVAF

SEQ ID NO: 81961 - protein, 385 aa, unidentified
MATSTTSRIEQDSLPQPTLYLAFELGQQTWKLGFTIGVAQQPRERTIPAGVLETLQQEIARAKQRFGLPENTRVVSCYEAGRDGFWLHRSLVAHGVQNHVIDSASIEVNRRQRRAKTDRLDVRKLLTMLLRHTAGEKKVWSVVRVPSVDEEDRRQLHRELTTAKQDRTRVINRLKGLLAGHGVQLALQGDVDAQLEQVQQWDGSPLPSALRTRLKRAWQQVGFLTTHIQTLEAERRALWRRREDPVIAQVRQLFTLRGIGVNSAWLYVMEFFAWRDFQTPKQVGALAGLTPTPYQSGQSRRELGIAKAGNRHIRAMAIEIAWAWRRFQPDSHLSQWYERRFGAGSARLRKLGIVALARKLLIALWRFVKTGVLPEGGVLKTAPSQ

SEQ ID NO: 81962 - protein, 314 aa, unidentified
MRVSKSIVGVDVAKAELVIYLADPDLLTSITNEKPAIKRWLKTLPGPTAIAVEATNIYHVDLVELAYESGHDVYIIDGFQLSNYRKGVGGRSKTDASDARLLGRFLKNEGEDLRPWTPPPAVYGKLQSLLRRRASLIQAKTSLTQSWANDTSLKAVFATFVKSIDRLDLLVQKKLKEILREAGLLEEVARCQAIEGIGFLTATALVMAYNRGDFTSGDSYIAFLGMDLRVSDSGQKNGRRYLTKRGCSEVRRLLHNAAMSACRSNAWKEFYNHHLNCGKATTQVLVMLSRKLARIAFALMKNQSEYQPKGAVIA

SEQ ID NO: 81963 - protein, 355 aa, unidentified
MTSTKYIGLDVHKESISIAVMNSVGKVVMECVIETKASTIVQFIDGVRGDVRVTLEEGTWAAWLYDLLKPYVTEVVVCNPRKNALLKDGSKSDRIDARKLAEQLYMNKLKPVYHGEHGLRTLKELARSYLTITKDLTRVMNRLKALYRSWGIPCAGNEVYAPRHRSEWLSKITEAGVRRRAEHAYQQLDVLRLLRQEVRRDLLLEAKKHKAWKLLRQIPGIGPIRAALLVALIQTPHRFRTKRQLWTYSGLGLETHDSAQYRVVEGQLKRSKKSVTLRGLNKDHNHDLKDIFKGAATRVSSSSGPLRDFYEALLAKGRKPTMARLTLARKIAAITLIVWKKEVRFDANYLKPQAA

SEQ ID NO: 81964 - protein, 474 aa, unidentified
MREHKKAKAKTKSELSKTIREQEPNAAGIDLGAEEIWVAVPADRDQNPVRRFEAFTEGLLAIVQWLVGCGVRSVAMEATGVYWIPLYQLLEDAGLKVCLVNARHVKNVPGRKSDVRDCQWLQYLHSVGLLLGSFRPAQTICATRSIYRYRQNLLSLAGQHLQHMQAALEQMNIKLHHVIDDLSGVTGQAIIAAILSGQRDPVQLAKLRDRRIQASEQKIVKSLEGDWRKEHLFVLAKAWAQYQEVQKQIQDCDRELLEYTRELEACTTVGKPVKVVRLEAQLLGAEPVSNPAPKKKARRKTSKNQPEGPWQGELERFFGVDLTVIPGISVLTTLTLMTELGNDLSAFKTEHHFASWLCLCPDNETSASKVLRRGTRRSQNRVRQALRMAASSLHHDKSYLGDKYRRLRARLGAPKAITAMAHQLARIIWILITRQVPFDLNLFAEQQRLNDQRWLKRLAASARQMGYQLTPVAA

SEQ ID NO: 81965 - protein, 347 aa, unidentified
MRFYNQPHRYYCGIDLHVKTMYVCILDSAGQVLVHRNMPSTPAAFLEVVAPYRDGLVVAVECMFTWYWLADVCAAEGIAFVLGHALAMKAIHGGKAKNDKIDSHKIAVLLRGGMLPQAYVYPAAMRSTRDLLRRRLHLVRKRGELLAHIQNTRAQYNLPAFEKRLAYPGNRDGVVEHFPDPSVRKSIEVDVTLIDQYDALVNDLELTIVREAKRHDADAFHRLRSVPGIGKVLALTILYEIHDIARFGRVQEFASYARLIKCAKESGGKKLGTSGAKMGNVHLKWAFSEAAVLFLRHTTDGKTLLVRLEKKHGKGKALSILAHKIGRAVYYMLSRGTVFSMEKFLAA

SEQ ID NO: 81966 - protein, 337 aa, unidentified
MSIYVGIDVHRKRSQVAVVTEDGKVQLNKNVVNGSEPMLRLIGDLPAGTPVAFEAAFGWGWLVELLEDYGFDPHLVHPLRCKAIASARLKNDKVDAATLAQLLRADLLPEAWIAPAEVRQLRALLRHRAGLVRLGTQQRNRIHAVVADFGYDRSGSYLSGPGRGWLAGLDLPATSREVVADCLAVIDGLAPAIDRIDGELRAHAKADPRVKTLTTLPGVGQFTALVMVAEIGDISRFPSARKLASWAGLTPTVRGSDRTVRHGHISKQGSAWLRWVLNQAAQTAKRSPEFAATYAAIAKRRGKKIATIAIARKLLTRAWHLLNEMQATNASTQLRRP

SEQ ID NO: 81967 - protein, 337 aa, unidentified
MEQYVGLDVSQETTSISVRQDGRRVWRGKCPTDPKALSEVIRKHAPHAVRVVFETGALATWLYHVLQAEDLPVVCIDARHAKAALDMAPNKTDANDADGLAQIAEIGFYREVRVKGYGPMLTRTLVGARSQLLRISVQLSNQIRGIMKTFGLIVPKGAGRIFERNARALLETNEAVARVVLPLLETWRVVRARAAELDRQLIAAARTGPSYRLLMTIPGVGAITAVSFVAAIGVPENFKRSRAVGAWLGLTTRRYQSGETDYDGHISRRGDRHLRALVYEAAVAVLTRARTDCALRSWGLKLKAKVGFKRAAVAVARKLSVIMHTMLKTGAAFAAAP

SEQ ID NO: 81968 - protein, 338 aa, unidentified
MKRYAAIDRHANNGVLVILDERDRTVLQRRLPNNLEQICQALCAHREAIEGIAVESTYNWYWLVDGLMEAGYRLHLVNTTAVQQYDGMKYREDTHDARWLAHLLRLGILPQGYIYPKAERCLRDLMRKRSQLVRARSQQIVSVENALSREVGTHPSSNRIKRWQESDVDDLPLAELSQLAVKSNLAVMHCADEQIERLEAAILAKAKLRPEYQYLLTVRGIGQVLSLTIALETGDVKRFPTVGDFSSYCRCVGSEHRSNGKKKGSGNVKNGNRYLAWAFVEAANFAVRYDPTVKRFYQRKCARTKPVVAIKAVAHKLARACYHVMREQVPFDVQRAFA

SEQ ID NO: 81969 - protein, 344 aa, unidentified
MQSMYYIGLDVHKRTISYCVKEVSGRIYAEGSVPATRLDLNRWMKTLPQPWTAAMEATIFSGWIYDHLRPHAVDLKVAHPLMLRAIAAAKKKNDRIDAGKICDCLRCDFLPECYMASTAIRERRRTLRYRNLLVRQMVQMKNKIAVLLMEAGVSYNKQRLHKAGYFRELVASNPDIDEGLCSLLRVCREMVVRLERTESALVRSLERDALLRDRVERLMTIPAVGPITALTWALEVGEVQRFSSIKKAVSYCGLCGEEKSSANSVQRTPLSKQRNKHLQTTLIEAAKMAPRYSAGLALLYDKERRKGNANQATLAVARKLVAYLIAVDRRQRQFEVVEASRTAA

SEQ ID NO: 81970 - protein, 450 aa, unidentified
MKQTKGYIGSLQRKQQVSGKRIVGIDPAKDSHAAVVLDENRMVTGNPFTFKTTHEGYNIVLWKKLDQILGNYGPDDLVFAVETACALWRTLVEYLSDLGYTVLLVNPLTTYHTRPLMNNDYSKTDPKDALLVATNAHNGNFVQYKKHTADINSLHRLSITFEKVQKDRQAVILRMRAFMDEVFPEYLKCLSVDIDTSLYLLDKYFLPEHFQNLNIQEHEWPIRRISNGNHKAATLQKLKEHARNSIGRNVEGEEATLRLILDSWIAEMRLLNKSKKTIKAAMIELAKKTEHFEILESVPGISDLTAARFIAECRDLDSFDHYKQIEKMAGSNLRLCDSGIYSGKRRISGMGNRRLLKLLYLMTCNTAKFNPEVRIKFLKRQLKKKSYRQNIFASSSVLLRLLMSLIKNRKKYELRDDSLNTLEKLELKYNPDGKKEKNKGSKKKAAKKAA

SEQ ID NO: 81971 - protein, 424 aa, unidentified
MAKKNKTDMGTNAPEVGVLYERCAGIDVHKEKISVCLLLGNKKEIREYGTMTVELLECIEWLEESGCEMVLMESTGSYWKPIYNLLEAYEMPTQVANATAVKAIAGRKTDVKDAEWLSMLVRYGLVKNSFIPSRDMRELRELVRYRQSIVQERAREVNRIQKVLEGANIKLGSVVSNIQGTSAMSILRLIATGETDPILLSLQAKGSLKKKIPELQRALKGSIGQHQQIMLVQQIEHYDFLSKMVSDLDEEIKKKLIMEIPTIAQLSKIPGIARRSSERILAEIGTDMSRFPTADHLVSWAGLAPGLNESAGKSKSTRSLPGNNHLRTTLIECAWVAIRLGTNFFSARYRRIAPRRGGRRAAVAVARSMLITIYHMLKNGTPYVELGADYFSKQHAEKSAIRSLRTLENLGYIVHISHPTAITT

SEQ ID NO: 81972 - protein, 345 aa, unidentified
MTDILKQVVGIDVSQKELVVSLGRVTRSLEPEIYAFKTFANKLSGFAALEIWVTRNTDQQAPVRFVMEATGVYHEKLAYHLSEQNWEVSIVLPNKICNFAKTLETKTVTDKTASQAICQFGLGKKLNIWQPPKKIFRDLKQLTRERDQIIAERTVAKNQLHAENAEAFPNNRSIARLNERIQLFNRQEKEIRYEIAEIIKQDEDLVERIKNVTTIPGVAKLTTVIVLAETNAFDMITSRKQASSYAGFDIIEKQSGTSVKGKPKMSKKGNKHLRKAMYMPALAAIRHDERFKAIFVRLVSKHGIKMKAAVAVQRKLLELIYTVWTTNTAYDPNYLQRVIENDKAA

SEQ ID NO: 81973 - protein, 310 aa, unidentified
MASHEFIGVDVAMDWIDVCYLSNGRHERIKSTKQSLAKFAKTANDAVVVLEASGGYERPLIEALIKAEARFIRVNPRQAREFARATGKLAKTDKVDAAILARMGKALDLVPPPIPDPDRVRLADLVARREDLVAVIQAERNRLGTSRDGWIRREIQRLVAILEDHLDAVEKEIARHIASSGSLLEQARRLRTAPGIGPALVAVILARLPELGRLKAKQIAALAGLAPQACDSGLSRGKRRVWGGRADIRRALYLAGFVASRFDPTLAAFRARLQDSGKPPKLAITACARKLLTIINAMARDATDYASAVR

SEQ ID NO: 81974 - protein, 321 aa, unidentified
MTYVGIDVSKATFVVAYSSAKTGRAKTFKNTVKGVHEFIQTISAAEHHCVLEATGNYSALLVYLLSEAGITVSLENPLKIKNFARAMLTVTKTDEIDARLIALYGERMQPAPYKLRSESILILKQKRTVLRQLKKQLVATRNLKSSMEVLPFFDPKCKKTIEKTIVFLEKQIKGMEEELASLAQGEYKKQMDLLTSIKGIGITLATALIVATGGFTYFNNAKQLTRYLGLSPTYQQSGTSINVKGHINRNGDSSLRSQLYVAAFSSLRCNAECKACFDRLRSNGKPGKLAVIAVANKLVRQAFAVVTHGKPYVDGFISEKP

SEQ ID NO: 81975 - protein, 428 aa, unidentified
MADHLNNKPFGAWIAIDIAKDFNAVLSETKAGKRQHFRMANSAADHDRFIAFLKSLPPPCIIGFEATGNYHRALGHRLVAAGFEVCFISSVASARYREVMFNSWDKNDPKDAAVLLELLKQGITQRYVDPLIAGHHDLQELSKTYYQVTLSRTRLQHSILTHYLPLYFPEMGKWWNSTRADWWINYLLRFPIPSAVTKHSQEAFCEIASPVIGRKVNKAAKLIELYETALHSIGLPVEADSLACKTFQIQLRRYQEINACRKQLEETAQAVLADNPDSAILQSVPGIGPINALTILAEGGDLRRFSHHRQFLKYCGFDLAKNQSGNYRGQEQISKRGNARLRLALWMAVNTAIAQPENSFQQKYSRYIKGAPQDKDLQRKARTAVAAKMARVVYGLVKSKQMYQGYYEKALPSGSIPLCRAVEAARTS

SEQ ID NO: 81976 - protein, 346 aa, unidentified
MNNLNVLGVDLAKNIIQVSVITSAGKELQNKALTRNKFSEFLARQKPSLVAFEACATAHYWSRIAHRHGHTPKIIPAKAVSPFRQGHKTDSNDALAVAEAACRPNIKEAPMKTVEQQGIQAIQRSRELLVHDRTALSNHIRGLLMEFGIVIPQGFAALHRRIPEVLEDAENELPDLYRPTLNLLYGRLITIKDDIDVLTEQITTLVKQNVACDRLTKLEGVGPISSVLLYATLGTGEAFANSRQFSAYLGLTPKQYSSGGKTMLIGISRYVANKRLRAVLIQGARAYVHRLKDPKTPKERWLRALIQRAGYGRAAVALANKNARTAWALLTQGQEYRREYEVSLAA

SEQ ID NO: 81977 - protein, 376 aa, unidentified
MSPARATIQEGPVMQNSITWVGMDVHAENIVLAALRDSSDTVLFRAEFPNTPKGRERLAGKLAENAPVRCVYEAGPCGYELRRFLEGRGIECDVAAPALIPRKPGDRVKTDRKDAEKLARCHRLGELATIFVPTPAQEALRDLLRTREDAREDLLRRRHRLSKFLLRKGRRYTEGVRWTTKHWDWIRAQTFTDHNTETVFREYIVAIEQEVERIRRIELQIVEESRSPEVGNAIARLRALRGVDTITAMTIITEVIDLNRFRSPRELMAFIGVVPRERSSGGRERRGSITKTGNAHIRRVLIESAWHYQRLPAGTPKTILVRREGQPPEVIETARKAELRLHRKFMKLLGRGKPKGIAAVAVARELAGFIWALGRG

SEQ ID NO: 81978 - protein, 350 aa, unidentified
MLIIGCDYHPGFQQIAFVNTETGELEERRLAHREEAEQFYRELKDKNLSARVGMEASGHSRWFERLLSQFQFELWIGDAAEIRTKRVRKQKTDRQDAQLLLRLMVEDRFPRIWVPDAENRDLRQLLWHRHRLVQTRTRVMNQLHVVALNEGLRRKKALWRPVGRQELESITLAPWASRRRQDLLELLDQLTPKIQQLTHALEEEVEKRPVARRLATHPGVGPLTALAFELVIGTPERFHCGKQIASYVGLVPTEESSGDRRRLGHISKQGNVLLRFLLVEAAQVTVRSLQEWRSKFFHLSMRRGRKIAKVAMARKLAVHLYWMWRQGCDYGQFGKLGSHAGAPGNPDGVE

SEQ ID NO: 81979 - protein, 322 aa, unidentified
MAMLSFGGIDVSKDRLDIMVLPDEQCSWVSNDAAGWAELVEQLRGSSITAIGVEASGGYERGVVRALLAAGMSVRQINPFKLRQFAKASGTLAKNDRLDARMIASFVAIMPTRPAQRQTPMIEQLAAMLTVRRQLSDHKVATENASRLLEGAMLQRLSRRRIAGLTADIDLLDQRLVEIVTADPALAHRFRLLTSMPGVGAVLACTLIALLPELGQMSRKQVAALVGLAPYDFDSGKLKGRRCIWGGRARVRHVLYMAALSASNWNPGLKAFHDRLEATGKKPKVVIVAVMRKMITTLNAMLRDGTTWVDRYSGRRSASTAR

SEQ ID NO: 81980 - protein, 314 aa, unidentified
MSSSVFIGIDVSQARLDLAVNDGQKWSLPHDESAMTTLVDQLATLHPTLVVLEATGGLEIPLTSALAAAGLPVVVVNPRQVRDFARAKGLLAKTDALDAQVLAQFAERIRPQPRPLPDTEARALAALLTRRRQLVEMLSAEKNRLLSASSSIRKSLRAHITWLERELQHTDTELTATIQQSPVWREKDELLRSVPGVGPVLTSTLLANLPELGTLTNKQIAALVGVAPLNRDSGTLRGRRTVWGGRAQVRAVLYMSAIVAARFNPVIRAFYRRLCAGGKAKKVALTACMRKLLTILNAMLKHRTSWRQMEAQHA

SEQ ID NO: 81981 - protein, 414 aa, unidentified
MEVLYTRCCGLDVHKASVTACCRWKDEVGQSHKEIRRFGTYTSQLRELANWLRQQQVEQVAMESTGSYWRPIWNELESAGLPLMLANAQHVKTVPSRKSDVQDPEWISDLLQHGLIKGSFVPDRKMRDLRDLTRMRSKVVDDHTRVVNRIQAVLEDANIKLGNVVSDILGVSSRSMLQGLIEGRSPGELAELARGRLRSKLEELQQALDGHFRREHAFLLKRLLMQTRFLEQQEQALRREIVHRLDEQARQAIALWDTIPGVNEAVAWVMVAEMGTRVEQFPDAHHAASWTAMCPGNNESGGKRRSGKTRKGDSWLRAALCEAAWAASRTKGTYLSALFRRIAARRGKKRAIVAVGHAILIIAYQLLKKQEPYRELGENYFDNINPEKTASRLIRRLQRMGYQVLITKEALETT

SEQ ID NO: 81982 - protein, 343 aa, unidentified
MLADDVEFVIGVDTHKQTHTAAVVDRVGGVREILELRAEAAGYRRVLAAATRHEGRRVWAVEGTGSYGAGLSCFLLEAGEVVVEIDRPARPARRNGAKSDALDAVRAAREALAREHLSEPRRRGDCEAVRVLVGTRNGAVVARTKALNHLQALVVTAPEGLRCRLVGFSNAQLAKRCSRMRVRDDQSIELQATVRALRACARRVLACGEEADELERHLERVLRDCVPELLDEPGVGPISAAAIYVAWSHAGRVRNDAAFAALAGVAPISASSGQTVRHRLNRGGDRQLNRALHTIVLSRLIYHAETKTYAQRRLAEGKTTREIRRCLKRHLARRVYKLLEHKT

SEQ ID NO: 81983 - protein, 360 aa, unidentified
MAKARTLVGLDVHATKIVAVVLDADTGELTSFAMKGDTLAAAGFCAGLPRPVRVAYEAGPTGYGLARELAKRRIDCVVAAPSKIPRASGDKVKTDARDAELIARLLLAGKLHQVRVPGPEEEALRDLVRARETLRLDLMRARHRLSKLLLRHGVQFDDGRAWTERHRAWLKTVVLEWPAAQATLLDAQGSIEALVHRREQLEREIVAILPSSPWSREVGRLRCLRGVDTLTAVGLCAEIGDFERFARAEQLMSYVGLVPSESTTGNNRRLGSITKTGSAHARRLLVEAALHYRKTPTLRKTLAERQKDQPPEAVAIAWSAQQRLHRTWARLEARKKRRTLIAVAAARELLGFCWAITQIE

SEQ ID NO: 81984 - protein, 392 aa, unidentified
MDSPPPRHHSATVAFEEANGSEGETMKKHSSKHDSLSSTDVELCTTICVDLAKQVFQLAGEDATGRVIYEDRIKSRQAFHDFLLKLPTTVAVLMECGPGAQAWARLLQAKGNPVRILPAQRVAEHRSGAKNDRNDCYAILRAGRDTSIASIPIKSTTALAIQALHRIRRGNIKRHTALGNQIRGLLLEHGVSMPQGDAAINKHVPQALKDASLPLPDLLRELLDELLMDWLSLGERITVLSRRLEATAQEDKVAQRLITIRGVGPIIATAIVAKQTDPSRFASGRMYSAFFGIVPDQHSSGNKIRLGKMSKRGDGYIRSLLIQGAHSVLSQLRPDSDQPDDRRLLRWLSRLGRKEAAIRLANRNLRIIWTLLQSDQVYQRKPNEKPEAAMSL

SEQ ID NO: 81985 - protein, 394 aa, unidentified
MGKMYVGIDIAKDRSSACGIEEGGRTLFELTFTMDGAGFAELLKTIEANGGTPGNVVAAMESTACYHINLYSFLSAKGIDAVIINPLLIANYAKLSLRRTKTDKKDAKTIARFILAHKDSVTQLAISQDMQDIRDMARERESLCYQISAAKVEIQRVLQTTFPELAAMTNPLTKVMLHFIQRFPSARLVSIAKPSAIEKTLKEKPCSCRLRFTSKDLIEAARTSIATVSPAKELILSGKIETLIHLQKRRDELTKALTKYCESTIVEDLRIVTSISGINNTMATALLAEIGQIGNYLSHKHLIAFAGIDPTVYQSGKYEGASRISKRGNRHLRRVIWLMTISVIHHNSVFRDYFLKRRNEGQPFKKAVFATAHKLMRVIFAMLSKKTSFVAECV

SEQ ID NO: 81986 - protein, 340 aa, unidentified
MNIVFLGIDLAKNVFQLCGLNQAGKPVYSKRTGRKELLQTVANIPACLIGVEASTGAFYWQREFEKLGHKVKVISPQYVKPFVRGQKNDGNDAQAIAVALMQPTMQFVPPKSLEQQDIQALHRARQRIVNHRTATVCQIRGLLLDRGITIGAAVSRVRRAVPLILEDAENGLSLRMRRTIAELYDLFNDLGRRIHFFDKEIETVFRQSEACQRIAKVKGIGPKTATAVVAAIGKGTEFKNGRHFAAWLGLVPRQHSSGDRQVLMNMTKKGDKHLRTLFIHGARAVVRVATNNNDGYLNQWVNQLKERRGFNKTTVAVANKNARIIWSMLRNDTEYQTVES

SEQ ID NO: 81987 - protein, 342 aa, unidentified
MYYIGLDVHKKTISYCVKDASGQVHQEGKVGATRWELDDWMKTLPQPWTVAMEATIFTGWIYDHLLPHAQQVKVAHPLMLRAIAAAKKKNDRIDAGKIADCLRCDFLPECHMASTAIRDRRRTLRYRHLLVRQIVQMKNRISGLLMETGVSHNKQRLHKVKYFRELLTTNEEVNESIRPLLRVSRDSIVRLQKTEYALVSSLQRDPLLAERIKQLRTVPGVGPITALTWALEMGDVSRFPSIREAISYCGLCGDEKSSADKVMRTPLSKQRNKHIQRVLVEAAKLAPRQDHALALVYEREKQKGNANRATLAVARKMVAYLLAVDRGQRDFVPFADPRSAAA

SEQ ID NO: 81988 - protein, 349 aa, unidentified
MRFYTGQHRFYCGIDLHARTMYVCIVDQAGNKLVHQDVAANPKAFLKVIAPYRDDVAVSVECMFPWYWLADLCAEHKIAFVLGHALYMKAIHGGKAKNDKIDSAKIAHLLRGGNLPIAYVYPKGMRETRDLLRRRMYLVRHRAEAIAHIQNTNSQYNLEPFGKKLKVVANREEMNIAPRFADPSVRKTIEVDLALIDKYDEMIGDLELYLIRTAKVDDVQTYHQLQTIPGVGKILALVLLYEIHDIRRFPAAGQFLSYARLVRCAHESAGKKKGSGGKKIGNAHLKWAFSEAVCLFLRCGERAKKWLARQEKKHGKKKALAILAARLGRSLYYMLRKEEAFDEQRFWGK

SEQ ID NO: 81989 - protein, 350 aa, unidentified
MDYFAGLDVSLETVSICIVNAAGDILLEKKIEAEPAAIIEVLKDFGCPLKRIGLEAGPTSSWLYSELRGIGYPAICLECRHVKAGLSAMRNKTDRNDARGIAQLVRLGWFRQVHVKSEDAQRIRMLLVNRQQLLTKALDLENSVRGSLKVFGLRVGTVTRRTFEARVLELVAEDRSLMAITEPMLRVRRVLIAEFERLDRLCRMLARRDPVCHRLMTVPGVGTVVALTFRTGIDAPERFSRSRDVGAHFGLTPRRYSSGQTDYDGHISRCGDAMVRTALYQAANVLLHHGRWSSLRSWAMRIAKRGSVKAAKVALARRLAVVMHRMWVDGTDFRWSAVAAAAPAATAIAR

SEQ ID NO: 81990 - protein, 417 aa, unidentified
MTSPEVIHPRCAGVDISKKDAKVCVRIQGRGGRSTTSTITTWGSMTGQILGLKEHLLDEHVDLVVMEATGDYWRPFYYLLEDDGLNIILVNAHDARNVPGRKTDVSDAAWLADLGAHGLVRASFVPPPPIRELRDLTRARTIITQERTREIQRLEKLLEDACIKLSSVASNITGVSGRLILQALIDGQTDPAALAEMAQRRLRSKIPELTQALNGRFTEHHRYMTGLYLHRIDAHTADINDLSARIEAAMEPFRFARELLVSIPGFSTTIAEIFIAETGADMSAFATAGQLASWAGTSPGSNESAGRVKSTKTRPGNRYLKGALGIAALSCAKSKNTYLGARYRRIASRRGPAKALVAVEHSILTAAWHMLTTGELYNDPGADYFTRQTPVKTMARAVRQLESLGYQVILEPLQQTG

SEQ ID NO: 81991 - protein, 354 aa, unidentified
MLIIGCDYHPSFQQIAFVDTETGEFQEERLLHREEAEKFYRDLAGQGRKGRVGMEASGHARWFERLVAELNLELWMGDASKIRAKRVRKKKTDREDARHILQLMRKDDFPQIWVPSWDNRDLRQLLWHRHRMVQMRTRIMNQLQAVALNEGLRCKKRLWREKGRKQLEAFQLAPWASRRRRDLLELLDRLTPTISELTQQIEREVEKYPAAQRLMTHPGVGGLTALAFVLIIGEAERFECSKQISAYLGLVPEEESSGERRRLGHISKQGSGLMRFLLVEAAQVTVRSDPEWRSKFFHLAMRRGRKIAKVAMARRLAVRLYWMWRNQWDYQQLKKFGPHTGQPGTGVAVQQTSA

SEQ ID NO: 81992 - protein, 344 aa, unidentified
MKLYAGIDISLEASSLCLVDETGAIVKEAKVPSDTEALVAWFKALKPAPERVGLEAGPLSQWLYAALKQAGFNAFLMETRHVHDAFASMPVKTDRKDARGIAQLMRLGWFKQVHCKSELSQEMRALLTGRGQVQSKLYDIEMSIRGILRGFGLKVGKTTPRTFEGRVRELSTGNDKLTFVSEALLKARAALQQQFGTLDREARRIARDVPAVRLLMSTPGVGAVVGLTFVAAVDDPARIEKSRNVGALFGLTQRKYQSGEIDHSGRISKCGDASVRTALYEAANVILSRPIKGAGALRSWAMRIARRTGPKKAKVALARKLAVILHRMWRDGVPFDAAKAAHAS

SEQ ID NO: 81993 - protein, 373 aa, unidentified
MRKTIMIGCDLHDKTMLLKIAEGCEAPETRSVKNTTAGRTKMIEGLGQRAAAAGGARVLFAYEASGQGFGLYDELTAAGIECHVLAPTRIARSQRQASQKTDEKDAQQLLELLRAHVLAGNELPSVWVPDPTTRDDRELVRMRLELAEKMTMVKSQIQSLLKRNHIRRDAGSGKGWTRLFRSWLKCTLVESPSSPLGPAARLALASLVRQLDFLEEEQARLDEGVNALASTPRYAAAVEEMTSLCGVGVLTALVFLTELGDLSRFANRRQLAAYLGLAPRSFESGNATDRKGHITHQGSSRVRKMLCQATWARVRWDRQEQQAYERIVARNPKKKKIAVVASMRRLAIRMWHRGQAPPGTLSRGRVLAMAAHP

SEQ ID NO: 81994 - protein, 459 aa, unidentified
MRKVSRRGVAAGRAEGKSLCARLAPSSGAQGSNGIQRRKGRPRMDKQEREFRLRGRGNRVKEGGEMMRFAGIDIGAERHMVAVLDEQGEVLCRSSPFGEDASGYARLFELLGPSADCLVALEATGHYWRNLFVALIAKDYAVAVLNPLRTARFAEEELRRTKTDAIDALGIARFAQQKRPRVAQLPDSVTEELRELERLRERVAQDFADRLRQLHRAVDLGFPEFTRYVRTLESQLAATILSRYPTATSFRGVSVKKLARIVYDGSHKIGEELARNLIEAAEKSVGAHHSEPYRRRIKYLCEDLDVLRRRLKDLARDVERKLDDHEVGKLLMTIEGLGPLTAACLIAELGDPARFDSPGAIASYVGVIPRIRQSGKKRFTKGPAIPLGNARLRKSLFMVVLQMVRRNAWLRQYYERLRAAGKPGKVAIIAAMRKLLTAVWSVATHRRPFVPIMPARVAT

SEQ ID NO: 81995 - protein, 305 aa, unidentified
MGIDVSKETLDVFFLNQHQQFENSSSGFKKIIKKLKTFADVLVVMESTGGYERPLAQSFAKSNIPVAIINPRQIRDFAKSLGILAKTDSLDSKVIALFAEKIQPKANVAYDESQNRLTELNSRRRQLVDMITAEKSRKDKVSPEMQKSIKRIIKQLEIELKKVNDSIDRLVKQNSEYARKAELLQTITGVGAVTANCMIAELPELGKASAKEISALAGVAPLNRDSGKMRGKRMIFGGRATVRNSLYMATMVATRFNTKIKSFYQYLCTKGKAKKIALIACMHKLLIIMNAMIRNDTAYGQKMAN

SEQ ID NO: 81996 - protein, 387 aa, unidentified
MPQRDDLSRSLVPFQQDGTLVAVVELSRSSWLVAGLVPGIGRHPLKKLDPSEGALLALLRRWRDEAAGAGRPITRLAVAFEAGRDGFWLARWLRARGVEAHVIHPTSVAVSREHRRAKTDRLDTGLLERAFLGWLRGEPGHCTMAAVPTLEEEDAKRPSREREGLVGERTRIVNRMKGALARLGVRGFKPTLRNAAERLAALRTAEGAPLPPNTLAELRRDMARLRLVREQIAELEAARLERLRQAPEDRPHAMVRLLARVVGVGLETADMLVREVLSRELRDRKALARYAGLTGSPDESGARRREKGLARVGNARVRRGMLQLAWRFLRFQGDSHLARWYRARTADARGGTRKTMIVALARKLLIALWRLVTTGEAPEGVVLRPAG

SEQ ID NO: 81997 - protein, 429 aa, unidentified
MRKKVENKNSGRRDKPKVDWKALDIVHPNAAGVDIGGSEHWVAINPELDEKPVRCFQCFTEDLQQMADWLIERGVRSVAMQSTGVYWIPVFEILQQRGLEVYLVNARHTKNLPGRKSDIAECQWLLKLHTFGLLNNSFQPSDEVRRARTLWRHRGGLVAQASSTIQRMQKALTEMNIQLSNVLSDLSGVSGMRIVRAILDGQRDPKALAALADPQVKASKQVIAKSLEGNWRQELLFVLGQEVEMYGMYQDRIAACDRELQQQLRVRASKVDLQAQPLGPRPKGKRARGNAPKFDLRSELYRISGVDWTQVDGIDVQVAQSVIAEVGVDLEAFPSERNFASWLGLCPTNDSSGGRVLNRRTPKVVNRAKVAFRQAASSLIRSQSYLGAQYRRLRTRLGAPKAITAMARKLACLFYRLLKQGKQYVDKGA

SEQ ID NO: 81998 - protein, 341 aa, unidentified
MMTDYSLRVGIDISAYRVSATWGTTPDDEQPVVVVEQSSTGYRTLIQQLRQTGHEPAHCQIVMEATGTYWMRLAYALHEAGFIISVVNPVQAHRLAQAQLRRAKTDAIDARLLMELAFKLDPTPWTPPPPLYDALYQRLRQRDAFLDMRTQERNRLHALRQWPDAQQAVVERYEAHLAFLTEQIDTLQLEIEQLLRSDSTWASATHFLLSIPGIGPITAAWLLVATLNFTTCETVEQLVAFAGLAPYPRQSGSTLHRTRGVGRGGHRRLRSALYMAAIASVRSNPIIRHFYRRLRQRGKPAKVALCACARKLILIAWAVVAKRQPFDPEYQKQSLLALSTP

SEQ ID NO: 81999 - protein, 809 aa, unidentified
MKYKRIAIDTAKHVFTLHGVDAQERPVLRRNLKRAEMEVFFGKLAPTEAVMEACGGAHHWGRVLSRLGHHVRLLPAQYVKPFVKRAKNDRADAAAISEAAARPSMPSVAVKSAEQQANSMILRHRAMLIAQRTAAINALRGHAAEFGVIAAKGTAQVEALLHKLANEAAVPAVAKAMFAQMGTHIASLTQQIEALERELLALHKADPVSQRLAAVPGIGPITAITLSLRVAPEHVVSGRHFAAWLGLTPKEHSTGGKPRLGKIGPRSGPMQRQAVSALSKAGNERLRMLLVVGATAVIRHARPGRKTASAWLLGLLTRKPRKLAAVALANKMARTSPTKFTHRANDSACGAEITLIRWRGIDPSCDGDDMSIREPALFGDRRLEAGWVLLQDRLLETAQQGVQVRTLGGNRANEMRIRRFLHNPSVTPENMIETALAHTSTLVSGRHILAIQDTTSLRDDGKQSGHYLHPMIAVDADDGTLLGVVAASFLLRRGAQAIHCNKRPFAEKESARWLEATQEAAKLATAGASCVTMVADRECDIYDEFALRPVATELLIRCHHNRMLADGTRLFAGTRKLVKLGDIIVPVPAAPGRAARDAKLALYVREVILHRPKRNHAAEAAKLPPALTLTYVEAREINPPKRVEPLHWRLLTTHRVTTLAEAQQIVAWYKARWTIEQVFRVMKTQGFDIEAVTMQDEAAFENLATATLIAAVKVMQMVHDRNGTAQRPLTDVFRAEDQPVLQAVCARLEGKTAKQKNPHPPDTLAYATWVCARLGGWTGYYGKPGPIVIYAGLARFTAMLDGWTIGRLQ

SEQ ID NO: 82000 - protein, 366 aa, unidentified
MKRKVYVGMDVHKETIQIAYLTSNSKEILKEQQIKHNEVQIKKFIKKLKTEWNEIYCCYEAGVTGYPLYRYLKSLGVNCILVAPGKIPRQNTDKIKTDKRDAIKLARLMRSGELESIHVPSEEDAAVRDYLRSRDSLRLDLGRNRQRLMKFLLRKDIKYSTTKYWTVSHYKWLNNLHFNNEILQETFNDYYSRVRVQEENLKAMDKKIQEIAESEPYREKVGILRCFRGVDYLTAMFLLCEVNDFKRFKTAGSFMSFLGLVPGEYSSGSKRKQTGITKTGSPRLRRILTEAAWQHRFPGTGSKIITARRSGQPALVVALSEKASLRLHKKFRNLQRKNSSSDDNGSFKRVIRISLGGNESCSLKLE

SEQ ID NO: 82001 - protein, 350 aa, unidentified
MKYVGLDWAYRQAQWCALAPGGEIASEGRVAADRDGLARLVFELGDEVKACVEMMSGALWVRDELVACGWQVEVADARKVKTVAPLAAKTDKVDARLLAELSRRDLVPALWLPSLDERALRERLRRRMHLVRLRTSAKARIAGLQTQWGVRVSLHRLRHADGIELLERAGMPAVWRRSVSECLAVIDFLDARIEPLDQELKPFAHADPRAVLLDTIPGVAELLALTIAVEVGEIGRFAGPEKLVSYGRLAPRVHQSGQARPRSGPLSKSGSRLLGWAAVEAAQQAWRESNPWHDLYTDVARRSHNKNSAKAAVARKILIAAWHMLSRNEPFNPAPRTTSVSASSRFALAA

SEQ ID NO: 82002 - protein, 309 aa, unidentified
MVFDVTDSDGNYYQFKNNEFGFKKFTKLLNIESHCVMEATGYYHYQLAYHLLESGIKVSVENPLAVKRFIQMKLSKIKTDKSDSKLICEYAGQVALKLWQGNSKTEIECLQIVRALSVYTKQSTMLKNKLHGESVLGNPSKVVLTSLKRSLRQLQKEIKYLEDKLLILVKQTHQDLFTRLKTIPGIGPKTAIMLVVLTGGFDRFSSASELCSYAGLTPVIRQSGSSVKGRPRISKIGNQKLRNLLFMCSFNACKYNKACRDLYDRIVAKGKSKKLALIAVCNKLLKQAFAIAKSGLIYDDTYKSTLVKN

SEQ ID NO: 82003 - protein, 375 aa, unidentified
MTTIARLGIDTSKSLFQLHGVNEREQAVLRKQVRRGQFLAFIAKLGPTEIGLEACGASHHWARQLQALGHVVVLLPPQHVKPYVGLNKNDKIDAAAICEAMSRPKIRERFVAVKSAEQSAAQMLLGTRDGLLRRRTQLSNTIRGHAAEFGLVTPKGLAHIEPLLERIAADQTVPALAQELFATLGQEFTDLAPRIAQLDKKLKAFQRSNELCRRLVEVPTIGPVIASSMAVKISTPAAFRSGRRLAAWLGLTPKDHSTAGKMRHGGITRAGDEGLRAALVSGATAYIQQVKRGRTRPSPWLAQLLKRKPEKLAAVALANKTARIAWKLMISGQRYDRARAEAREGLGAAQHGGFAPSPSLQPHSADQRASAMTAA

SEQ ID NO: 82004 - protein, 349 aa, unidentified
MNFYTNTHPYYCGIDLHTRLLYVCIIDNENNILVHEKIDDSPDKLLALLKPYLGNIVVGVECMDCWYWVSDFCEEHNIDFILGHALYMKAIHAGKTKNDKIDALKIAKLMRGGNFPLAHAYSKEHRSIRDALRRRTHIMRMSAQLKAHVASTVSQYNLPVLETRLDLRNSPDREKMRHFFPDEAVQKSMDLNLNIIETMVSELYKIEHYVKTQAQTHCATDLHILKSFPGIGKILALTILYEVGDIKRFSSVQKFASYSRLVKCKAESAGKTHGTQGNKIGNAHLKWAFSEAAVLCLKGNDNAKRYLAKLQKRMSKAKALSALAHKIGRCTYFMLKNQQVFDEERFLNG

SEQ ID NO: 82005 - protein, 356 aa, unidentified
MSRDIKYIGMDVHQEAVVIAVLNSSGKLVMESIVETKASSILQFIHGLRGELHVTWEEGTWAAWLYDLLQPQVERVLVCDPRRNALLKEGSKSDKIDARKLADLLRTGMLRPVYHGEHGLRTLRELGRSYQTLSQDLNRVMNRIKALYRGWSIPCAGTQVYAPRYREEWLRKIEHAGVRRRAELLYQQLDGLQQLRRTLRPELLTESRKHKAAKLLRQIPCIGPIRAARLIALMQTPHRFRSKRQLWTYSGLGIETRDSAQYRYVRGELQRTKKPQQIRGLNQNHNHEMKEIFKGAATRASCGVGPLRDFYVALLAKGMRPEMARLTLARKIAAIALTLWKKEERFDAEQLKPQAA

SEQ ID NO: 82006 - protein, 323 aa, unidentified
MLIHYIDIAKRNFVIAVSSLSKTKTETNNPKGIAHTIEYLKKHKVALVVMESTGGLEIPAAKAIRRAGIAVIIANPRQTHQFAQSQPLTKTDAKDAKMPAFFAQMTAQKEDSQTMPYQPPTEAEEVLEALVNRRNQPADMRTAEKNRLHQVHETQVGSVKQLIAHFDRLIDELDKQIDDHTHTHFDGKAQVAEQIKGIGSITTATLMAMLPELGRLSHKRIASLVGIAPHPRESGETKFKSRCFGGRSAVLKALYMATVAATRFEPLIRDFYQRLLSEGKPYKVAVTVCMRKLLTISNARMRDYFAENDTAENDTAENGIRTA

SEQ ID NO: 82007 - protein, 394 aa, unidentified
MKLVGIDVGKNSHHFCVMDKETGELNVTPSSFPNNKEGFDFLINSLKPYSKKSILLGMEDTGHYHVALLKFLLSNGYTVALINPKTTDLTRKMEGGITKNDKLDTITICNVLDTPERKKQYRITKVDRFDLYEQRQLTRHHHNLKEELNLYCNRLQKSIDLVFPEFNTLFSSKYGVVYMNLLKTFGSAEAIASTDIRTIRKCFEVKGRGGRISLTPEKLKECAKNSIGISSEVETIQIKHLVNQITLIKEQIAEIDKKIEEFSIKNNSPILSIPGISHFSGTSILAELGDIGNYSKPSQIIKFAGVAPYHYESSQYNAQHTAITKKGSKYLRKTLYQIILPVINNNPVFKKYYRLKISQGKGHRCAQGHCIRKLLRIIYHLLETGQSFDPALLR

SEQ ID NO: 82008 - protein, 318 aa, unidentified
MITQKNQNEINVGVDTGKHQLDIYIRPLDIYFTVSNDEKGISEAIGTLKNHHPTRIVIEATGRLEQAFIMACAKAKLPFVIANPAHVKKFAGAIGQLAKTDQLDARLIAHYGDAIKPPLSELKPDMMRCMSDLLSRRRQLMALQTMEKNRLQIMPKALSGTIKPILTVLKNQLSKIDQQLLKLIESCPQYQAKNAILQSMPGVGNVVAFNLLSNMPELGYLTNKQAAALVGVAPINRESGAYQGQRRIRGGRHQIRTVMYMAMMSAMQCNPVFKVTYERLLAAGKAKKTAIIACVRKMIVILNSMVRDGAFWNPEMAK

SEQ ID NO: 82009 - protein, 347 aa, unidentified
MNEQRHYVGLDVSLETTSICVIDDAGAIIWRGKCSSDPDAITATLRQHAPGAVRVGLETGQLSNWLTLSLRRRGVPVVCMDARHAKAALSLQINKTDANDAFGLAQVVRTGWYREVAVKSMDAHTLRMLLVARSRLVSQRQATANTIRGLLKTFGLVVVRGSKGLFPVRVREQIAGNPALIAIIEPLLAVWYAIREQVMMLDRQMLARARNDDVARRLMTIPGIGVVIALAYTAVIDDPARFRRSVSVGAYLGLTPRRYQSGEVDTTGHISKCGDSLLRGYLYEAAAVLLHRDARASTLRSWGLGLAKRIGMRRAKVAVARKLAVIMHRIWSDRSEYRWTAIPPTAA

SEQ ID NO: 82010 - protein, 342 aa, unidentified
MLYCGLDLHAKESYLYVIDQRGRRIMSRSIPTQARCYKEWLGPLVRRKLMVVVEASTMTGWAVEQLRRVGAEVVVVDPRRVRLIAETRRKNDRADARVLAELARTGALPPPLTLPSEQARVLRARLAVRRGFVAQRSAILCRAGALLRSVGIRVSTRGLQRPGQWDKLLRRRDLPQWLVCLLRSLREAVEVVERMIDSVQEQYQSDLKDERVKRLQTIPAVGPIASLTLVASVDRAKRFTSSRCIGSYAGLVPREYASGDTFRRGHITKEGRSDLRTVWVEVAHVALRMKKHPLGPWARRLVYRRGRKVAVVALARRMLCMAFAMLRDGTVFEASRLQPINA

SEQ ID NO: 82011 - protein, 387 aa, unidentified
MTAVVIGVDPAKRSNTIEVMDSRETVLVTARFDNTNADYRKIRTLVKRWPDRVWAVEGATGVGLHLAQRLISDGERVVDVPSKLSTRVRAIDSGHGRKNDPTDAHAVAVVGLRTKGLREVAADDQMVALRPLSERRRDLVRSRTQAVNRLHQVLMELIPAGAQRHLNAAKAKELVATVRPRDVAGKARRQLAVDLIDDVGVFDRKITTVDTRIQEAVAASGTHLTDIVGVGPVTAATILGEVGDIARFQTADQFASYTGTAPIEASSGEVVRHRLSRAGNRRLNSALHVVALSNNRYDPHGKAYYERKLAAGKGSKGSMRCLKRRLSDVVFRVLVQDRALVNPGGQMGATLTASAVDQIPKANTSDKPQPGSRTEATPTKRLTEAAS

SEQ ID NO: 82012 - protein, 347 aa, unidentified
MRFYTQHHKHYCGIDLHARQMYLCILDQAGTVLLSRNIAATAQAFLAAVKAFRDDLVVAVECMFTWYWLADLCQREGIAFVLGHALYMRAIHGGKAKNDRIDAHKIAALLRGGTIAQAYVYPPEMRATRDLLRRRNHLMRKRSELIAHIQNTASQYNLPPFEHRIAKKHQRVGLLEHFPDVQVRNSVGLDLAVIDHYDELLPKLERHIRACAKGHDSKAFTLLRSIHGADLIIPLIILYEVHDIARFPRVQQFLSYCRLVKPTRESAGKIYGHAGGKIGNAHLKWAFGELATTFLRANPRAQQLHERLKKKHGKGKALAILAAKLARATYYMLSRGKVFDPDKFYQD

SEQ ID NO: 82013 - protein, 341 aa, unidentified
MKLSTLGIDLAKNVFQLHGVDHEGHTILRKKLTRAKFVQFVIQLEPCLIGMEACSSSHYFARLFTRYGHEVKLIPPQYVKPYVKTNKTDAADAEAICEAVTRPNMRFVQIKTEEQQAVLALHTERGILIRERIACANSLRATLAEFGITIAAGQSHLTRELPAILEDSENGLSPFVRTSIYRQSKHIRELEEQVKQVEEALASWYRTQEACQRMAKIPGVGMLTATYVVAAVGNARQFSTAKQFASWLGLTPKEHSSGGKQQLGGISKRGDGYFRYLLVHGARALTAWVNRNGAVEENSWLQGLLERKHYNVAVVAMAAKTARIMWSMLSHNTEYQPRQLA

SEQ ID NO: 82014 - protein, 342 aa, unidentified
MNQYAGIDVSLECSSVCVVDANGKILREARVASEPEALIAWFRSCGFELERIGLEAGPLSQWLFAAMREVGLAVELLETRHVRKAFEAMPVKSDRNDARGIAQLMRLGWFRPVHCKSMSAQETRTLLTARKLVQSKLRDVENSLRGILRGFGLKVRKTTELKFASRIEELVAGHPHLQVVAKALLAVRAVLRKEFAAFQKQTRKMAQSDARTRLLMSMPAVGPIVALTYASAIDDPARFTSSKQAGAHFGLTPKKHQSGETDYTGRISKIGDGSVRTALYEAAHIMLTKPVKGCSQLKSWAMRIAKRAGMSKAKVALARRLAVIMHRMLADGTPFYPAAAAT

SEQ ID NO: 82015 - protein, 482 aa, unidentified
MKSRPPEKVKKATDHATRGHWNEMNRKQRRDMMRKIQSEDLRLEVVHPDAAGIDIGNESHYVAVPPSRDSQAVRRFGCTTVELKAMAQWLKQCRIRTIAMQSTGVYWIAVFDILEQAGFEVYLVNARDTKNLPGRKSDVQESQWLMKLHTYGLLRNSFRPSQEIRTMRTYWRQRHDLVQAAASHIQRMQKVLTQMNIQLANVLSDISGVTGQAIIKAILAGQRDPHKLAELRDPRVRASEEQIARYLEGNWQEDLLFVLKQEQQGYEFCQQQMAACDRQLEQYLQQSEDRSQGTRLPEEMRKGRLQKKKGNRPQFDLRAELFRMTGTDLTQIDGLDVMTATTIVSEAGWDMSKWADEDHFVSWLRLCPDNRISGDKVIGKGRLPTNNRAGIALRMAASTLRMSNTYLGAQFRRFRTKLGSPIAIKAMAAKLARLVYRMLRYGMKYVDQGAQFYDAQHRKLQVTQLKWKAAKLGFRVVEAPAA

SEQ ID NO: 82016 - protein, 451 aa, unidentified
MAKRRGKKIKKVKMLHTIKANAAGIDIGATEIYIAVPGDRDPQSVRHFDTFTADLHAAAKWLKACGIDSIAMESTGVYWIPVFQILESYGFEVVLVNARHVKNVPGRKTDVQDCQWLQYLHSVGLLRGSYRPPQEVCAVRSLLRHRDGLVKTAASHIQHMQKSLTQMNLQIHNVISDITGVTGLAILDAILSGERDPQKLAALKNGRIKATEDTIAKSLEGDYLPEHVFTLKQSLQVYRHYQQMIAECDREIESHLTNIDSRIDVDKNPPPTLTSSSRMGKGNEPNFDLRTHMYRILGTDLTQIEGISAVTAHVFFAEVGCDVLKFPTAGNFASWLNLCPGNKISGGKVLSSHTLPGKNRFAKALQMAAMSLWRSHSYLGNYYRRKRARDGAPSAITDTAHKLARIIYHLVKTGKQFDESVFNAQEEVHQKRTLKNLENRAKSMGFQLVPC

SEQ ID NO: 82017 - protein, 397 aa, unidentified
MIAVGIDISKAKSTVAVIDSDGTVLASPFTMAHTQPEMEAFVSYLKGLGEPTTILMEYTGHYHYPVLKKLQDEGFPVCIVNPYQMKKYGDVEIHKAKTDKKDALRIAAYALEKSYKLVPYSSMEQKYEDLKFLSRQYSQRITYVAKLKVQLIALLDQTMPGITRILPLNSRNPEKCALLLFIKRFKSFDEIQRIGKARFLASYDVLAKKASERSASSKGLSIYELAVDSITTRGEDPYIWLSQNQCVDLLSATQNAADEIISQMRNIAETIPEYKVLRAMHGVGDRLGPIILAEIGDVHRFHSGKALNSYAGNDAPPYQSGQFESRNHHISKRGSSTLRKACYEVMQALKLIKPQDDPVYLFMLKKEQEGKPFNVAKMAGVNKFLRIYYARAMELYK

SEQ ID NO: 82018 - protein, 348 aa, unidentified
MEKIIRIGIDTSKSVFVLHGVNTAEQAVLRKKLRRRQVLDFFGKLEPTRIGLEACGAAHHWARELTALGHEVVLLPPQYVKPYVQRGKNDAADASAICEAMSRPRMRFVPVKTAEQQAALMLMGVREQLIARRTQLANMIRGYAAEFGVTAAKGLDKIEPLLARIATDGAVPELAKELLATLAEQYAELKPKLHRIEAQLLAWHRQNEVSRRLAEIPAIGPIGAVLLAMKVSNPRAFGTGRDFAAWLGLTPKDHSTAGKQRLGIITRAGDEALRCTLVLGATAVIQQVRKARGKPSPWLIALIKRKPPKLAAVALANKTARIAWKLMVSGERYDRNHAAAAQTARIAA

SEQ ID NO: 82019 - protein, 312 aa, unidentified
MHELFVGIDVSKDKLDVHVRPSGEYITLGTAPAGLHDLVERVQAWGPALIVLEATGGYEVVVAAALASAALPVAVVNPRQIRDFARATGQLAKTDALDAAVIARFAEAVRPPVRPLAPPAAQALGELVTRRRQLLEMLGAERNRQAQARDRQVQRQLGTHVRWLTKALADLDRDINDTIRSSPVWRATDDLLKSVPAVGPVTAHTLIAQVPELGQLGRRQIAALIGVAPLNRDSGPLRGRRMIGGGRASVRQVLYMAALVGVRYNPRLAAFYSRLTGAGRPKKVALVATMRKLLTILNAIVRDQRPWQPQNA

SEQ ID NO: 82020 - protein, 454 aa, unidentified
MRKPQVVPDEDHEVIYERVAAVDVAKASGVVCLRTPDPARPGRFVNRIWDNVPAMRAQIAELGAGLLRCRVQMVTLESTSDYWRIWYYVLESTGLAVQLVSASQAKNLNGRPKTDKLDAMWLARLTQQGMLRPSFVPPAAIRRVRDFTRARQDLVAERTRCLQRVEKLLEDAMIKITSVAKDGMKAKSVVAMVAALAAGERDPRALADLARGPLRARRDQLAQALDGMFDSHHGVIARALLDQVAFLDRQITVMEDQALAALAAVPESWGVDADGQAGPQAGTSPGSPVLAAAHRLAEIPGISLWLAIVIIAEIGLTMAVFPTPAHLVSWMGLCRSAASSGTRHGKGKPKKGNSYARAAAGQAAIGAARTATFLGERYSRIARRRGKAIAQAAVARSIMIIAWHLLNDPQARYRDLGPDFYASRINRDKKIRNHIRGLQALGLTIAITGDEQAA

SEQ ID NO: 82021 - protein, 344 aa, unidentified
MSSVTLQTVFVGLDYHASSVQVCVMSGDGKMLLNRSCANDWRAVVGAVRQRCGGEVDVQAAIESCCGAASLADELIGHAQWSVNLAHPGYVARMKQSPDKTDFSDARMLADLQRVGYLPKVWLAPEEVRELRRLVHYRQTLTKERKNLKLQIRATLREARQKHPAVVNPWTKAWLAWLDSSAQLSPNARHITDCRLRRLVALYKELGQIDKRLERQTKDDPLVQKLLTIKNIGPVTATTLRAEIGRFDRFRTGKQLARFCSLSPRNASSGQKQADAGLIQAGNQELRSLLIEAAHRLIRCDERWAALAARLSSRGKPACVVVAAVANRWVRWLFHQVQPARLAA

SEQ ID NO: 82022 - protein, 527 aa, unidentified
MARRLVGIDLGIASSHTVRVLDETGQQVCRRRCEPTVASLTRIEDAASLGAPPGTVLEVVLEPTGPAWLPVAVFFASRGHRVFRVSSAKSADLRRFLSKHAKSNGIDAETLARLPLFSPGGLLPLELADAEHAALDRRVRACDRLTRAASEHKTRIKDLVRQLLPMTPLIEDIGVADLAVLERWADPRTLLRIGPSKLKSLIVKASHNHHGAERAEQWRNAAAAAVELYGEHPAVAWQDLAAEVATEVRLLKAIQAELAVHSARREQAYRWADHGQLARSLPGIAKVGGPVIAAAIGRAERFPTGAQFKSYAGLAPRASETGNTDRKGQPMSKAGSSLLRTTFFRAADTARKQDPQLAKIYYTQMVERGANHVKALCVVAAHLAERAWAVMARGMPYVICDINGEAVTAQQAKTIIAEHWTVPPQVRARRRSTKTAKAGKAPQKSTLDKPSQTGGHNRGDLPHQTIVQHGPQQVKKPAPKDVGRQDHRPDAGELRGADGLCSIQAARAERVGDVNVEHAQRSEHERR

SEQ ID NO: 82023 - protein, 338 aa, unidentified
MASVKGDIIMYYVGIDISKRFVDVCLLADGMKGKRKTKTLPNGPNAVQALAEWLTRQKCDPGQAHIIMEATGGYHEHLAYGLHQSGIAVSVINPHRLREFARGMGILTKTDKVDAYVLACYGGLRQPEGWSPPSPEIRKLKALLQHRDSLLSDKQRIENRLSTLASTQAPEEVVASLDSMVRHVKSELERIERLIEDHIDKHPGLKNDLKLLKSIDGVGDQIGWNMLATIRGGHFRSAEQVAAYLGVIPVERRSGTSVRGRARLSKIGPPAMRAKLYMGAIAAISHNRHVKAQYERLLLKGKAKMLAVGAAMRKLVHLCYGVLHTQQRYDKNYGLVVS

SEQ ID NO: 82024 - protein, 365 aa, unidentified
MANEVRYVGLMDISREESSLEHYAGLDVSLKEILICVVDHDGKTIARGACPADPEGVADWFRNRSLMPRRIVHESGLLSIWLQRGMTRLGLPTTCIDARKAHKSLSARLNKSDAADSEGLAQLARTNWFTPVHVRSEEADRLRSLIGARERLIRLRKDLEGHIRGVLKTFGIRMIGVGQGRQRQASRDQLAAAGETDPILRTIADGFIAAHSTLCQAADDLDKAVKKNAKADPVARRLMTIPGVGPVNALSFIALVDNPDRFSRVSDVGAFLGLTPKRHQSGEMDWSGRVSKCGDGTMRGLLFEAASCLIRQVKRFSPQKSWAVRLAGRRGFRKAAVATARKIAVLMLTVWKSSADYQWTKEATA

SEQ ID NO: 82025 - protein, 332 aa, unidentified
MKMNQQGGVASGGDRPNAGVDVSKHHLDVCVGDDARRVANEAEGWGELTAMLKAAQVDLVVVEATGGYERGLVCALQGAGVSVARVNPRQARDFAKSMGVLAKTDQVDARTLRDFANVLARHEARHRYITPMLESARELLAELMTRRRQLVDMRVAEHNRLEHAGKRAAGSITSVIKMLDKQIATVDRHIDDHMDHHFRSQRELLDSVKGVGPVTILTLTAALPELGRLGRRQIAKLVGVAPLADDSGSRQGKRRTWGGRAGVRAVVYMAAIVAMRHNPVIRAFYERLVKAGKPKKVAIVACMRKLLTILNAMLRDQAMWDATRHVQLAPNA

SEQ ID NO: 82026 - protein, 451 aa, unidentified
MEQATRFVGMDVHKDTIVVAVTATGEVGKAMAYGTFPNTTAALEKLVKRLRQAGSGPIKFCYEAGPCGYGVHRALTKMGEDCMVVAPSMIPRKSGDRQKTDKRDADGLAVLHRGGLLTAVWVPDAAHEAMRDLIRARLAAIRAVRAARQQLSAFLLRHERIYPEGRTAWTKAHRGWLVDQSFAHPAQQIVLEECIEAVRSGEQRRDRVDGYLHAQIPTWSLFPLVQNLCALRGLDTIASAGLAAAIGDPSRFASAPDFMAYLGLVPSEHSSGPKRHIGAITKAGDVHARTLLIEAAHSYRFPARITRHKLTAVEAVPEAVRTIAWKAQTRLCQRYRQMMAKGKPRQVVVTAIARELAGFVWSIACITSDPAATGDVVNGPCNEATTYLMGVEIDSDKVTAAGRSAVKRGQQSPAEAGRFRAPRRQSRAGVPNRTGRSAQTKMAAAEASLTG

SEQ ID NO: 82027 - protein, 312 aa, unidentified
MAELSFGGIDVSKDRLDVLLLPEGLCFSVCNDAPGWAELIVRLRPLAVSAIGLEPSGGYERGIIRALLAAGLSVRRINPNKLRQFARARGVLAKNDRLDARLIAEYVAIMPTRVLQRDDAIERLAEIVTMRRQLCDEHVAAMNQATHLEDAMLRRISKRRLLRIEADILLLDKRLAELVAADPHLSHRYQLLISMPGVGPTLAYTLLATLPELGQIDRKQIAALVGLAPYDFDSGKLKGHRCIYGGRKPVRNVLYMAALSASRYNPALKAFSNRLAAAGKKSKVIIVAVMRKMIITLNAMLRDNTEWHPAAA

SEQ ID NO: 82028 - protein, 334 aa, unidentified
MENIALIGIDLGKNSFHIHCQDHRGKAVYRKKFTRPKLIEFLATCPATTIAMEACGGSHFMARKLEELGHSPKLISPQFVRPFVKSNKNDFVDAEAICEAASRPSMRFVQPRTESQQAMRALHRVRESLVQDKVKTTNQMHAFLLEFGISVPRGAAVISRLSTILEDNSLPLYLSQLLLKLQQHYHYLVEQIKDLESQLKRKLDEDEVGQRLLSIPCVGTLTASTISTEIGDGKQYASSRDFAAATGLVPRQYSTGGRTTLLGISKRGNKKIRTLLVQCARVFIQKLEHQSGKLADWVRDLLCRKSNFVVTCALANKLARIAWALTARQQTYVA

SEQ ID NO: 82029 - protein, 342 aa, unidentified
MQQSRTLYVGLDVHKESIAVAYIAQEYHADVVSLGTIGTRQCDIDQLIRQLQSKTSHLVFVYEAGPCGYGLYRYLTTKGHRCWVVAPSFIPKKAGDRVKTDRRDAMQLARLMRSGDLTPVYVPAVDDEAIRDLSRAREDTLRDLKAAKLRLKAFLLRHDIRSTGRANWSPAHLRWLSEVVCPTPAQQIVCQEYVQTVTEQTERLGRLELELHEQVKTWRFAPVVEALQALRGVQCTVAVTTVAQLMNYRGLTPSEYSSGARRQQGSITKTGNTHARRALVEGAWAYRYPAKVSRHLQLRLEKLPAAIQAISWKAQVRLCTRYRQLMAKGKNANQVVVAIARE

SEQ ID NO: 82030 - protein, 344 aa, unidentified
MKYVAIDVSSKSFVVHAIDRKKRLIFQGEISPVKSALLKLIEDLGPEPMKVVFEAGNQMKWLAETLQGIDKIDLHVVHPNELKWISKSSSKTDKVDARKMAELARGDLLPRKVHIVEGPVRRLRELTSARQTVQGKRVALINSIRALLLQEGVRLTEKFFGRTDWRERLDRVAVSDTGRIVITAYMQAIDALQETEAELTEKIVAVKDDRLELLESIPGIGLLTSRVLLGALDEAVRFDDRKAVAKYGALTPTIYQSGSVTHLGRINRDGRHEVRRVLLQCAHTVARMKSFESRPLRQFFERLMKRRGKKIAIVALARKLLTIAYGVLKNQAHYDPARLTPYPV

SEQ ID NO: 82031 - protein, 447 aa, unidentified
MSNTIIRFVGLDVHKRVVEACIIEQSGNVVHRERFALNRRTLELFASKVLQPGDHAALEATTNCWAVADALRPHVAKVVVSNPLTTKAIAQAKIKTDKVDAHVLAQLLRCDFLPEVWQPDEATRRLRELTGRRSALVSQRTMMRNRVHSVLAMRLIEAPKKLFNSDGLAWLKGVELDAQGRMLVDSDLRQLAFLDGEIAVLDKELVQRGYASDAVKLLMTLPGVDVGTVQALLAAWGDFTRFRDADHAAAYLGLAPSTKQSAEHCYHGPITKRGNSTARWMLIETAQHLDKHPGPLGVFFLRLMRKKCRNVAVVAGARKLARIAWLMLHNNQPYRYAIPRSTETKLAKLRVKATGKRRKGGTAQGAKRQALLPGGGRTIKSLAALCASEGLPQPQPLSAGERRTIAAAGCETYVAEVAATQVVPRRSRSGKLTGSSSLLQESGHGRD

SEQ ID NO: 82032 - protein, 429 aa, unidentified
MTRISVGVDVSKNRSTVCIMDQDGKVIMRPFLVWHSTEELDFLADTLKRLNGEVRVIMESTSIYQYPIALHLKEKGIFISIVNAYKVKKFANTDFRGGKTDKKDSRTIASYGISYWYKLVEWQIPKDTYFNLDLLNRTYMNAKKHRQIILQELQHYIDCAMPGMDKELRSLNLSTKKDFMLDFVEKSWHRDEIVNMTEAEFTEVFTAWAKKKGYRPVEGKAAKIYAIAKSCIPYYPANPTVKTILQCIVDKLSGVNRTLVTIVTQMIEEAKKLPEYQIVREMPGVGDPLAARFFGSVGDIRRFKNSKALVAYAGIDSPPDESGDFSSTHRHITKKGSKVFRDTGYEIMMALRAQKRTWEKVRKNPEVYDYMLRKEAEGKPPKVAKIAALNKFLRIIYARIKELYDNMALAERAKAKTKSKTKAKTKATA

SEQ ID NO: 82033 - protein, 402 aa, unidentified
MNAVGIDVSKGKSMVAIMRPFGEIVSTPFEIKHTSSDINSLVKLIKSIEGESRIVMEHTGRYYEVLAHQLSEANLFVSAINPKLIKDFDNDSLRKVKTDKADSVKIARYALDKWQNLKQYSVMDELRNQLKTMNRQFGFYMKHKTAMKNNLIGILDQTYPCVNSYFDSPARSDGSQKWVDFASTYWHVDCVRKMSINAFIDHYENWCKRKKYNFSKSKAEEIYGKAKELVPVLPKDDITKLIIKQAVDQLNSASITVESLRTLMNETASKLPEYPVVMAMKGVGTSLGPQLMAEIGDVSRFTHKGAITAFAGVDPGVNESGSYEQKSVPTSKRGSSDLRKTLFQVMDVLIKTHPQDDPVYQFLDKKRAQKKPYYVYMTAGANKFLRIYYGRVKEYLASLPES

SEQ ID NO: 82034 - protein, 403 aa, unidentified
MDFYVGIDVSKFKHTIAIIGEDGEIRKKSFDISNSREGFDSLLNELGLLGQKEQIKIGMEATGHYMNCLVRCLNSNGYQVQIYNPSLISRFRDSESVNLAKTDSLDAMLIAKYAATHPFTSSPQISYLIGEIRKITRAKYFLFGDRTACYNHLLRYLDEIFPEFVPFFKKNEDGTRKNMGRNLFDSPTIRFLLSEYTSASKMAKMRIETGETLRRMSKGAISFNRFNQLRELAKRSIGYSTEVDEQIVRNLIDQVRMIDEEIDNLNEMLSPLMDELNSPLLSIPGIGVNLAAMIIGEIGDINRFSNPEKLIKFAGLDVKIYQSGTINHKGRIRKRGSPILRYALSLSVQKLRIHSPVFSEYYYSKIKQGKATNVAIIATTRKLIRVIWKMMMTNQVFENVKRD

SEQ ID NO: 82035 - protein, 408 aa, unidentified
METLHRRCAGLDVHQKEIVACRRIVSGRKVRSELGRFPTTTQGLLALSAWLAETKITHVAMEATGVYWKPVWHVLCHDFSLVLANASHIRNVPGRKSDANDATWIADLLAHGLIRASFVPPQPIQDLRDLTRTRRELTREIVRHTQRIQATLEEANIKLASVISDILGWSGRRILKAIVSGQSDPRRLAELGHPQLACTREELAAALEGRLRDHHRFLIGQHLKTIEQIEATIAEFDARLESALAPFRGAAERLNDLPGVSDNVAQTVIAEIGVDMSAFATADHLVSWAGMCPRLDESAGRRRSRRLRKGAPWLKPVLVQAALAATKVKNSSLRARYFSLKPRLGHKKAIIAVAAAMLRIIYHMLKDGIFYQDLGPDYRRARNPERAARSLANRIRSLGFVVEIKKAA

SEQ ID NO: 82036 - protein, 366 aa, unidentified
MKKNSTVQVFGNEILKGQKVTIGLDLGDRWSFYCVLDEAGKILLEQKVATTPEAMKQTFGKIPRSLIAVETGTHSPWVSRLLTELGHELLVAHAQKVELITKSNRKDDRHDARTLARLARIDPQLLGPVRHRSAKAQIHLTVIRARAELVSARTALVNAARGLVKSYGQRLPKRGTYQVSRELATGLSAELRDVLGPLLKEVESLNERIQEYDERMEKIAKEEYPEVSLLQQVKGVGTQISLTYVLTIEDPYRFPKSRAVGCFLGLRPGRRNSGESEPQKGISKEGDRYLRTMMVQGAHYILGPFGEDSDLRRWGLKLAERGGKNAKKRAVVAVARKLAVLLHRLWVSGEVYEPLRNSQKAMRAVA

SEQ ID NO: 82037 - protein, 403 aa, unidentified
MNNVAGIDVSKGKSMVSVLRPFGEVVAKPFSVGHTGSELKELADYLKSLDGETRVVMEHTGRYYEPVARFLHEEGVFVSAVNPKLIKDYGNNTLRKVKTDKADSRKIARYGLDNWAELRQHTPMDTIRMQLKTLNRQQSLYSKTKTMMKNNLIALLDQTYPGVNALFDSPVREDGSQKWVDFATTFWHVDCVRNMSLTAFAERYRKWCKRHGYNFSQSKAVEVHAGAQDLIAMLPRDALTKTMARQAIDALNAVSASLERLKAEMQALAAQLPEYPVVMAMHGVGDSLGPQLMAELGDVARFTHRNAITAFAGVDPGADQSGTHEAKSTRVSKSGPPELRRALFLVMDCLLKTQPQDDPVYRFMDKKRAEGKPYLVYMTAGANKFLRIYYGRVKEYLAQLENS

SEQ ID NO: 82038 - protein, 328 aa, unidentified
MSKNVFYVGVDVGSEEVWAALPGLKPRQFVHAKRGLLALHCWAKRHAAGAILHFCLEGSGVYSVSVASCWVGLPETEVSVVNPAQIAAYARAQLRRCKTDQVDAIVIQQFATTQNPPAWQPASTTLRQLYELVQLADQLKAQRQQWQNRRHARGYIPDLPVAVTKTHQAIIRSLDRQLDHVNQEIKQLCTMTEELAQQVALLTTIPGIAQLSAVQILAYGQNWLTHRTAKQLAAHSGLAPHPKQSGTSLHSPGSIDRRGNVRLRKALYMPTLVAVQHNPLLRRTYQRLCQRGKPKKLALVACMKKLLLIARAILITKIPFNPSLSPLT

SEQ ID NO: 82039 - protein, 345 aa, unidentified
MEPMYYIGLDVHKRKISYCVKDGAGKVYSEGSLAATRLDLDVWMKTLPQPWSAAMEATMFTGWIYDHLKPHAAALKVAHPLMLRAIAAAKKKNDRIDAGKICDCLRCDFLPECYMAPTAIRERRRTLRYRNLLVRQMVQMKIKISSLLMEAGVSYNKQRLHKAGYFRELLATNPDINEGLKPLLQLCRETVVRLQKTESAMVRSLERDSLLMDRVERLMTIPAVGPITALTWTLEVGDVQRFSSIKKAISYCGLCGAEKSSGSMVQRTPLSKQRNKHLQTTLIEAAKMAPRNSPELAMLYDKEKQKGNANGATLAVARKLVAYLVAVDRRQKEFLTVQRENRTAA

SEQ ID NO: 82040 - protein, 336 aa, unidentified
MGSYVGIDLHRRRSVIVVLNDDGDRVSWSRIDNTPANLAAEVHAAGADAEVAMEATWGWYWAADVIAECGARLHLAHPLGIAGYANRRVKNDLADATLLADLLRLGRLPEAWVATPEVRELRELVRYRAKLGRLRSGLKAQVHQTLGKEGVIPELDSIWGSGGQRWLNELQLGDAYVERIESLRDLIEVYDRQIRHCDAAVHRRLKGHPGYEAVRALRGVGPVLGAVFVAEIGDIGRFDNPRRLCSWAGLTPRLRESDSHTQRGHITKQGSRLLRWAAVEAVSGAVRDPQIASVKARVGARRGRNIGRVAAARHLLTLVYYGLRDGEIRCLKTDVA

SEQ ID NO: 82041 - protein, 415 aa, unidentified
MKTYILRQPKPVEPQKSVRSPRPKPVAPATTVVLLGRPDATAKGPFLFIGLDVHNDSIAVSLAPSDATEVRRYGIIGGEHEDVLKVAKKLAEAHPGTPLKFCYEAGPRGFALCRCLQTHHWNCILVCPSKIPRKPGERVKTDRRDADDLARLYRAGELTGIYVPEPEDEAMRDLIRARFQVGRQQHRARQQLKMYLLRHNLRYGGQTSWSPAHLRYLAKIKMPFPVQQIVFQEMLNVITEATARLERYDQEIERAVPGWRWEPAVRALMSLRGMALLHAATLVAELGDFNRFDHPGQLMGYLGLVPSEHTTGKDRQQGGITKMGNAPARRALVEAAWQYRAPARLSPHLQKRQEGLPKAITDIAWEAQRRLHHRYTHLTRVGKKKSQVAVTAVARELTGFVWAIARQVKPVGAQS

SEQ ID NO: 82042 - protein, 317 aa, unidentified
MTQTSITTAGIDTSKAKLDIALHGRAGCWQVPNAPSGWRLLAGQLTKAGVTRVGIEATGGYERGVVEHLRAAGFAVLVLQPIQVKAFGRVRLRRAKNDALDAVQIAACAATLDQVKVAPDPRLVQLADNLTFLEQIEEDIKRFKTRLEHIDEPRLRRMVLADIARLKARRLTQIRDIAKQLRAHRDLAARLDLVLSIPGIGERTALALLIRMPELGRISREEAAALAGLAPFDNDSGQQKGQRRIAGGRARLRRSLFAAALPAAFRWNKALIALYQRLTAAGKAHNAALVACARKLLIYANTVVQRGSPWTERPLGV

SEQ ID NO: 82043 - protein, 401 aa, unidentified
MPQLWAGVDAGKAEHHCVVLGADGRRKLSQRVVNDENALLQLISDVLELSDGEPVTWAIDLNAGGAALMIALLTGNGQQVLYIPGRTVHHASGSYRGDGKTDAKDAFVIADQARMRCDLQPVHRGDDIAVDLRFLTARRLDLAADRTRTINRLRAQMLEYFPALERAFDYKESKASLVLLTAFQTPAALRRIGKNRLATWLKNRKVRNSQLVAATAVEAAEAQHTAVAGEKVAASVVAKLAREVTALDTEIAETDALIESRFRDHPHAKAILSMPGIGPVLGAEFIAHTGGDMSVFGSPDRLAAVAGLAPVPKDSGRINGNMRRPRRYCRRLLRVFYMSAMVAARCCPVSKAFYERKRAEGKSHKQAIIALARRRLNVIWALIRDGRTFEITAPPPPAALG

SEQ ID NO: 82044 - protein, 342 aa, unidentified
MLIIGCDYHPSMQQIAWCDNRSGAQGERRLEHSSGEAEKFYRELKQRGVQVRVGLEASGHTRWFERLLAELEMELWIGHPAKIAAQRVRKQKTDRGDAQLLLQLLQEDRFPKLWMPSPENRDLRQLLWHRHRLVQMRTRVKNQLQSIAMSEGVRRQSRLWSKPGRAQLDSLVLPPWTARRRHDLLQLLDQLTPQIAALSQAIEQEAERRPEVLRLMTHPGVGSITALAFVLVLGTPQRFRCGKQVGSYLGLIPSEDSSAGKQRLGHLSKQGNTLLRYLLVEAAQSAVRCDAEWRRRFVHLAMRRQRNIAIAALARRLAVSLYWLWRKSEDPPAAPSSGSHVG

SEQ ID NO: 82045 - protein, 409 aa, unidentified
MYYKQNDKIAQLTEQTLIIGIDIAKNKHVARAQDFRGIQFGKALYFDNSWEGFESLMCWKDELCVQHGKINIIIGMEPTGHYWLPLAHWLREKQIKVVVVNPAHVKKSKELDDNSPTKNDVKDARVISRLIQDGRYSEPNLPEGIYAELREGMNLYEQLMKDFQTIKGRVHQWIDRYFPEYTTVFSKWEGKASLEVLKMGLFPDEIAETEDITILNAIRKAVKRGVGLKKVRQLQEVAGHSVGIQEGKILARFKLKTLMEQYMLIQEKIEEAWAMIEQFLDTIPGVNEMDDIEGIGKVTIAAFYAEVGDLENYTHPEQITKLSGLNLKLATSGKWKGRTIITKRGRPKLRALLFKVILPLVNHNRAFKALHEYFTTRKENPLKKKTILNCIMLQVNSSIVCHWKETSSI

SEQ ID NO: 82046 - protein, 462 aa, unidentified
MPKQDRKKKSPRGKRSQDWEALPALNQNAAGIDVGNTEHYVAVPAGRDAEPVQNFGSFTADLHRMARWLKACGIQTVAMQATGVYWIALYQILEEHGLQVNVVNAHHTKTLPGRKTDVLECQWLQKLHTFGLLNNSFQPAEEIRVLRTYMRQSEKLVAAASTCIQHIQKALTEMNVQLANVISDISGLTGMAILRAIVSGERNPQALAGLKNERIQASREEIAQSLEGNWRQELLFVLEQSLALYDTYQIKIAECNLRLESHLKRMESKTAVEQQPAPKASNTRSHRKQMPWLDLGSQLYRIAGVDLTQIDGIQVQTAQTVISEVGVDMSRWKTEKQFASWLGLCPDNRISGGKVLKRGTRHVVNRAATALRMAAWSLFRSQSALGANFRRLRRKLGAPKAVTAMAHKLARLVYRMLKFGQGYVDKGMEHYEAKYRKDQIKWLAKSAAALNLQLTPLTEVVD

SEQ ID NO: 82047 - protein, 341 aa, unidentified
MEQVTTVGLDIAKQVFQAHGADANGQVVFRKKLPRGKVVAYFASVPRCVVALEACGGAHYWAREIGKLGHEVKLIAPKYVRPFVKRQKNDMADAEAICEAAQRPTMRFVPVKSEELQASALVFRARDLLVRQRTQVINALRGHLTEYGKVVAKGAGHVAKLIDYVEEPLSELPDRARGILRLLIASLTDLDQQIGRLDVEIGKRAKEDPVARRLMSIPGVGPITATAVTALGPAAESFAKGRDFAAWVGLTPRQHSTGGKQKLGATSKMGERTIRRLLTIGASSVVCHAVKRGAPEGSWLARILARKPRAVVITALANKMARIVWALVTKGEVYKAPVAMA

SEQ ID NO: 82048 - protein, 411 aa, unidentified
MRRVIGMDIHRTFAEVVFWEDGKLRPAGRISMTRAGLEGFGRSLGKEDEVVIEATGNAIAVVRVLAPYVGRVIVANPLQVKAIAHAHVKTDKIDAGVLASLRAADFLPEIWLPDANTERLRRLVARRNQVVRHRTRIKNEVHAILHAHLIPPCPHADLFGRLGRIWLTQQVIPDDERAAIERHLRELDRLGEDLGALDREIAQAAIDQPAVKRLLTITGVNLIVATGLVAAIGDVGRFPDPQKLVSYVGLNPRVRQSGLGLAQHGRISKRGRSHARAMLVEAAWAASKAPGPLRAFFLRIRARRGHQIAAVAVARKLAVLCWHLLTKDTDYQWARPALVANKLRAMELQAGQPVRKGNKRGAAYAYNIKELRDREIELARHAEQAYEQFVGKWQRRGNAKQRTGAASEERR

SEQ ID NO: 82049 - protein, 363 aa, unidentified
MDVHKESFTLCSCKYEDEKASHYQRTPASYKNVLRYLAFLRTIYGEDTRFVCGYEAGCLGYSLYHQLENFNVECVILAPTTMLEQRSKRRIKTDKRDAEIIARSLAQHNYSPVHIPTETDNQTKEFIRMRDDHKAELKKIKQQILSFCLRQGYQYDGSGNWTAKHVKWLRSLKPAGLYKEILDEYLLTYTILTDKLNRLYQRIEELASKEEYKESVSKLTCFLGIKTHTALSVIVEVGDFQRFVSARKFAGYLGLVPGQHSSGDDRNGLGITKAGNTHVRRLLVESAQSYTRGKIGYKSRVLRSRQAGNSPQVINYADRANERLRRRYYKMVLKDGKKYNIAKTAVARELACFIWGMMTDNIY

SEQ ID NO: 82050 - protein, 387 aa, unidentified
MTVPGQVFKIIPRHYDIFGGLDVAKKNMAVTFTDHEALMRSLRLPYSSAHLLHYVRKHFPDRRVAFVYEAGPTGFGLHDELVTAGYRCLVVAPSMVPTAPGDKVKTNRLDSRKLSVQLRGGELRSIHVPAPRYRELRHLVQLRDTQVGQLKATKCRIKSLLLCEGLAFPPAPESSQWSARVLSELLELPCSPAVRFELDQLIGTLHFHFNSAAAAQKQIRYFCQNDPELRQSIRLLASLPGIGVIVATHLVARLGDWREISNVRQIAAFLGIVSSEHSTGEKENRGRITRTGDSRLRNKLIQSAWAAIRKDAELRAFYLRIYHRHPKKIAARKAIVAVARKLTTRIYAVLKEQRPYVLRPENLPAPLTAEETVGPRGRLDGPQNEQP

SEQ ID NO: 82051 - protein, 403 aa, unidentified
MNAVGIDVSKGKSMVSVLRPFGEVVAKPFEVRHSASELKELANYLKSLDGETRIILEHTGRYYEPVAQLLHDSGLFVSAVNPKLIKDYGNNSLRRVKTDKADSRKIARYGLDNWVELRQHTPMDTIRYQLKTMNRQYSLYSKSKVSMKNNLISLLDQTFPCVNTLFSSPAREDGSQKWVDFAASFWHLDCVRGLSLASFTQRYQKWCKRHGYNFSSGKAAEIHESTKNQIAMLPKDAMTKMLVHQAIEQLNAASKAVELLRTEMNHLAQQLPEYPVVMAMGGVGKSLGPQLMAEIGDVTRFAHKGSLAAYAGVDPCANQSGTHEAKSTASSKSGSPELRKTLFMVMSVLLQNSLANDPVFQFLDKKRAEGKPYYVYMTAGANKFLRVYYGRVKEYLLSLESAD

SEQ ID NO: 82052 - protein, 450 aa, unidentified
MKLLYRCCAGMDVHKESVSVCVRRRVRGNGKVETEEAVFGTFTQDLERLLQWLKERKVKQVAMESTGVYWIPVWNVLESGKYKVEMTLVNPANVRALQGQKTDRIDARRIAEYLQYGLLRASFVPPRPVRQMRELTRMRVHIQQDRNRVINRIGRLPETVNIKLGSVAKKITCKSGRAILNRLAAESRQPERLAKLALGRLKEKIPQLILALDGRPDEHFRWLLSRLLKKLESLDAELAGIDARLCEQTAEHEEVLRRLCTIPGVEMTTARVLIAELGTDMTQFPSAAHAASWAGLCPGNAESAGKRFSGRTRKGDRYVRRILVQSAWAAARTRDCFLAAVFNRVAHRRGMKKAAVAVAHRILAIAWSIIRNGTEYQERGGDHFDRLHPERTARKLLRRLERIASEIALKRPVGRPRSAPKEPMPISSCERCWHFGIHDCIHLIKRSKKT

SEQ ID NO: 82053 - protein, 347 aa, unidentified
MNITRIGLDLAKNVLQVHGVDERGKALLRKRLKRGEVVAFFARLSPCLIGMEACGSAHHWARELAALGHTVRLMAPQFVKPYVKANKSDARDAEAICEAVGRPSMRFVPVKTLEQQSVLSLHRARQGFVAARTAQANQIRGLLSEFGIVIAKGIRQIEGRVPEILEEAENGLCGMNRALFQRLFEHFRQLDRQVKQLEEQIHAWHREQVDSRRLAGIPGIGPLTASALTAAIGNAREFAHARQLAAWLGLVPRQASSGGKDRLLGISKRGDVYLRTLLIHGARSVLRRTRACPDAAQGWLAQLVDRRNPNVAAVALANKNARIFWALLAHGREYQPGYVGARLPTAA

SEQ ID NO: 82054 - protein, 409 aa, unidentified
MRIIGLDIHRAFAEAVAWDDGKLKRLGRVDMRRPLLEAFAKKLSKDVVVVVEATGNASSVAAVIAPHVKKVVIANPMQVRIIAHAKIKTDTIDASVLAQLYASGFLPEVWIPDEPTQALRRQVTRRNQIVRQRSRLKNIIQSILHSHLIPSCPHADLCGASGRAWLFHQVLPEDERLAVERHLREFDRLDEDLKVIERDLARSALGDEGVKRLMTIPGVDMVVALAIVAAIGDVGRFEQSQKLVSYLGLNPSVRQSGPGPAYHGRITKQGRGHARGMLVEAAWAAARAPGPLRAFFLRVRARRGQHVAAVATARKLAVLIWHLLSKGESYVWARPALHARKLRDLELKAGYKAARGQRGAAHAYNIKSHRDQERRWVEQAETAYARFVSGWNPRGPKRVRTGAATEVRR

SEQ ID NO: 82055 - protein, 357 aa, unidentified
MQRNKLSFKGQNIYVGIDVHLKTWHVTTVTESGYKYSFAQHSDARELFDRLNRKFPDAHFVSAYEAGFCGFSAHYALADLGFESIVVHAADIPTTGKEKAMKTDAVDSEKIAWALKRGELTGIYVKDKQYMDDTNLVRLRQRFVADLSRQKNRTKHLLYTQGVTFPERFRKNRTHWSRNFMSWLRDEVSLLSEEKRSLVLLCDQVENTRRSILAVTREIRRLSTTDKYKENYGLLSSVPGFGLIMSMSMLTELDNDVTRFPNERTFVSMLGLIPTCHDSGEKKAVGEKTNRGSKQLGPLIVEASWVAIQRDKGMGAYYSNCCQSMKPHKAIIKVARKLACRAYAVLKTKTKYKYEQS

SEQ ID NO: 82056 - protein, 411 aa, unidentified
MIVGIDVGSETHYARAFDWRNYEYSKKPLEFSNNEAGFVTFKVWMEELAEKYGKDVVIPGMEPTGHYWFNLGAYLQDNGMKPVHVNPHHVKKSKELDDNNPNKNDRKDPKTIAALVNEGRFSYPYIPTGVYAEIRSLSNLRLQAQEEITRIKNRIARWFSIYFPEIKDVYKNPGAVSGLMILKVAPLPKDIVKLGVDGVNQIWRDAKLRAAGLKRAKTLVTAAEHSIGSQEACDSARIELKILLNDYEIYHQREEELMELIEEKLSEVPYIDKLLEIKGIGMKTVSGFVAEVGDIKRFDNPKQLQKLAGYAIVECSSGKHKGESHISYRGRKRLRYVLYEAAISLIARNTEFKEIHRYYQTRGKNSLKKMQSVIAVACKALRIFYAILTKGVTYDGAKMLQDIKRPQLKVA

SEQ ID NO: 82057 - protein, 329 aa, unidentified
MSVHQQGRETVAASRPCAGIDVSKAHLDVAWGQRFERVSNDAGQWDALVAKFKADEVDVVVLEASGGYESAAACALQAAGLAVVVVNPRQARDFAKSLGRLEKTDRIDAHILRDFAEVIARHAQRERYIRVLPDAQRAHLAALVMRRRQLLDMRTEETNRLHTAHQAARKSVQAIVKAIDKQLAAVNDDIDRHMQQHYKDLRTWLESASGVAQVTSSTMIALLGELGHLPRRSIAKLVGVAPLARDSGPRRGSRVIWGGRSEVRNVVYMATVSATKHNPVIRAFYERLIAKGKPPKVALVACMRKLLTILNAMARDHTVWDPAKHIKPA

SEQ ID NO: 82058 - protein, 341 aa, unidentified
MQITTIGLDIAKHVFQVHGVDATEKVVVRKQLRRSQVIAFFASLPPCLIGMEACATAHYWARELTKLGHEVRLMPAKDVKAYLKRNKNDAADAEAICEAVRRPTMRFVSIKSPEQQSQLMQHRARDLLIRQRTQAINALRAHLAELGIAAAQGREGLKKLLAIIADAKDERLPIDARATLIVLAAQLQALQTLIGSIDKRIMTQHRSNEASKRLETIPGIGVVGATAIAATVTDPKAFRSGRDFAAWIGLVPRQDSTGGKQKLGPISKQGDRYLRRILVVGAHSVLRLVKKNPQKHPWLTQLLARRPFKVVAIALANKMARVAWALLARGGTYRVPALAAA

SEQ ID NO: 82059 - protein, 449 aa, unidentified
MDNYAGVDWASEKHDVLVQNEAGEELFAGSFVHDEQGVRSLCRTLVRMKVTLVAIERPDGLLVERLLDAGLRLLALHPNQVAAARPRFRAAGGKSDRFDAFVLCELARTDHHRFRVLEADSDQTKALRALTRAREDLLRTRVALSNQLRAELERFWPGPIGLFKDLDSLISLAFLERYPSPLDAKSLGEKRLGAFLAHAGYSGRKPAGELLAKLRTAPENRAGQAEIDTRRHVVLALVATLKPLVAQIKELERRIAVAIREHPDGEIFLSLFKDPRSVICAAELLAEIGDCRARYPTRDALAANAGQAAIAIESGKRKTAAFRWACNKRLRDAFCALADSTRHWHPWAQDRYAAARARGHDHPRAIRTLGRAWSRILWRCWQDRTPYDPARHRALQQHVLVTIPASSGPVPDTVATQRMLGAAVTHRAPNGPSAKRLTASRNPLSPPEG

SEQ ID NO: 82060 - protein, 421 aa, unidentified
MDRVVADIINPIACGLDVHSAVVAACLVRPGPRGGPHYEERSFCTNLRGLQELRVWLLEAGCQAVGMEATGVFWIPVYAMLEGHVPMVVGNPNHMANLRGHKTDRKDAKWIAGLIRHGLIRPSFVPPAEFRDARELTRARRQLVNARTAIRNEITRLLAHQGIPLRGEGVLSDLFGVSGMGILEALAEGRPVQDELPHLLHRSVKGKQEAISAALEAGLRDALRPLLAMHLGRLESVAEDIHQVEKLIARQLAPHRAKIDLLMTIPGVNLISACVLIAELGVDMTQWPTPKHLSAWGGVAPGCRESGGVTKRARVRKGNPFVCTTMVECATAAILKKDCHFAGVHRHLCARTGSRMKAKLAIARKLLVIVYHLLTSERPYQEPQRKDLPPKTKERIARRHVQGLAKLGIEVQLPDHPFRDN

SEQ ID NO: 82061 - protein, 497 aa, unidentified
MPTQRTIYSKCNPQLLRIFEQAGHPAKVMCVALDYAKAQHMALFCNGVGDLLKSAFAVDNTVAGADLLLKEVRACAQRKKIDLKHVFCGGEDQPAFAENFLRRLRQERLLVVRVNAWEAKRQRDNFQASNDSLDLLGIARCCLNRRAESVQDWPAPYMNLRLSTRDRDKVVRLRTLISNRIHGHVDRLFPGFLQSQKSGLEAFSRASLDLMQERFSPEQLSRRPSQALAQWLSRRGVDEPEEVAKKLKQLAKETLPPAPDQTVMLQRILTQTVKLYRDLDESIALFDRQTAYWLARTPGALLTSIGGMGVTLAAGWTAELGPSNQWRAVRHLCSYAGVVPRTKQTGGPSKDAVVGTVQARCNKRLKNVVLQTVEKVRQFGPEELRQTAQELEAHGAHTSFAMAKRLVRLCKCLVVTGTIYRPKPLLDPQTPPATLVAHYQATWEKLLSKWRDKADLNDAFAPELPLGQWRNMARELYALELPLPRQRSAAVSGAKTP

SEQ ID NO: 82062 - protein, 355 aa, unidentified
MVGSISEAKSSVSGVTDPYCRTEHCGKIHPYRCDKEVGVLGIDVSKDNLITSRRGKYENNLKGYEKILDMKPCTIVLEPTGVYSIKPSQYFKEKGIRVLQVSPNMLSREKDFRGKKTDFYDAEKLENMVDKAKEYEYNVLRELVTLYLFLKDMEVKQKNRLKRALFLVSDNDKMNKERLKRLASGDFAQEVLYQLEYTPIVLEEVKILAKALFETQEKLKEVKEMIESQVPEDHVLLTIPGVGKLAAGIIIGVVGDIRRFPKPESFVAYCGLDPVVERSGKAVVSKGISRRGNKYLRSLFYFLAQMNCSKNPTLLRFYESHKDKLHGRKLYTALARKWAKVVWSVWYNNKPYEPK

SEQ ID NO: 82063 - protein, 445 aa, unidentified
MTFRIIGIDLAIRGDHLAQIYDDGRPNGRAIRFRHDQPSLAAFVQTAVMGLRADDHIQAIMEPTGMSWFPVAHHLADAGVTVDRVKGKRVKALRRYLSEHAKTDMADAQILAAIPSFGGPRLDPVHIPDPQSHALQRLIKQRSRFQNEIADARRRLLDLIRWASPRLEAVLPDLGTRLSLALLQKWFHPSDVLKARRTTFAKYVGAHAGGNHPRSGPFVETLITGLREAAQYAQDLHGTHIDFSELQFQIATGIENVLKKIQPVEDFEQHIADLYKHLDPQALLLSVPGVGRHLAPTLIGILQNIERFHSEKHLRWFCGLFPRRADSGGVERAGQTLIQGGNNRIKHALYLAADTARKTDPELAELYWRLMTAKGHHHKQALCAVANRIVNRIFSVLKRGKPYEVRDREGNSITLCEAKAITLERYTVGENSRAGRRSNRIEKNS

SEQ ID NO: 82064 - protein, 345 aa, unidentified
MSKHLVRGGDVVGLLAKFAELKAKAHLRTGRMFPIIAIQEAGLDGFWLHRVLEGEGVESHVVDPASIATSRRRRRAKTDKIDGEALIRALLAYKRGEPRVCAMVRAPAPEEEDRRRICRERKTLIAERVEHVNRIKGLLFAQGIRDYQPLGRRRRERLDELTTADGRSLPAHLKAQISRELDRLELLLQQIEAVEAARDALLAQSAEQSSSAPAAMLMRVQGVGPEFAGIIWSEGLFRHFDNRRQIAAYAGLAPTPWQSGAVAREQGVSKAGNPRLRTTMIQLAWLWLRHQPCSGLSQWFHERVKRNGGRLKKPMIVALARKLLVALWRYVTAGVVIEGAALKVS

SEQ ID NO: 82065 - protein, 408 aa, unidentified
MLKIVYPNCCGIDVHKTFVLAVIAITDEHGVTQYFRHRFSTFTKGLGELKQWLEYYSCTDVCMESTSKYWIPVYNVLEDSCSICFAHPKYVKAIRGKKTDKKDAKWIADLFKHDLVAGSFIPPLPIRELRDLVRYHFKLTNFCSSEANRLQNSLTVSNITLSSVLSDVLGVSGSRIIDAILEKPTDEIDLSALIHGRLKSKLSELELAIDGKITDEQAIKIRIIKSHYDALTLCKSDLEKAIIEVAEEFKAQQELIQTVPGCANQFTAIKIISEIGVDMWQFPTAGHLCSWAGLTPTNNESANKKKSVRISKAGHYLKPLLVQIANGIAKSEKYPEHRNKYLQLKKRRGHKKAIIAIARRLLTAIYHVLLKVEPYDSSYYSIEVVQPNRVMTINEAVSFAKSHGFVVS

SEQ ID NO: 82066 - protein, 376 aa, unidentified
MSKSIVESRRFVGLDVHADTIAVAVAEKEGEVRSLGTIPNRLSSIRKLLAKLGEPGSWRACYEAGPTGYTLYWQLTALGVECVVVAPTLVPTKPGDRVKTDRRDAERLARSFRGGELTPVWVPDAAHEALRDLVRAREAAKADQLRARHRLSKFLLRHGRRPSQNIRAWTQRYVDWIRREVKFELFAQQATLEDYLAEVDHMGQRIERLEKAIDEAIEGAPAAMKAVISALQALRGIAKMSAVTIVAEVGQLSRFAKARQLMGYSGAVPSEDSSGDRTRRGAITKTGNAHLRRVLVEAAWCQRYSPGLTRTLRERQKGLPPAVVEIAAKARHRLSARYRRLLARGKPRQQVATAIARELLGFVWAIGVEVERTVAA

SEQ ID NO: 82067 - protein, 315 aa, unidentified
MPKKTATVYAGLDIAKASLQLHFKERQHALANSAAGHKKLLALLKPCPQVQIVCEATGGYERPVVAALQAADRPVSILNPAHVRHFALSQGGRAKSDPLDCALLTAYGRAHQPAPADKPNPALAQMRALVDWRAQLKEQLIRARQQGEHTTDAFIFKQQATLCKHLEKQIDAVEKQLAKLVASSASHQEQVTVLDEMPGIGFLTAITALCHMPELGRLNRQQAAALAGLAPWILQSGPWEGQRHIAGGRAVVRHALYMSAVVLARQKQTTLGKFYHHLRDQGKPAKVALTAVMRKLIVHMNQKLKQHALEKNKTK

SEQ ID NO: 82068 - protein, 312 aa, unidentified
MTAAPLYRLWCGLDVAAKTFTASWTTDRTHYVAPVTLPQTADGIATLHQHLQATGIPAAETLIVLEATGSYWIGLAVQFHAAGFVVSVVNPKQAYYWAQSLPRRGKTDALDARMLTQYAWERQPRAWSPPPAMYHELRQRLTAREALAGLRQQARNQAYALRQWPVVVAAALQAIEQVIAELDTQIAELDAAIVQVLRDGAWAASAELMQTIIGIGPLTTAWVLVLTVNFTLCPSAAAAANYAGLIPLPRESGTSVRGRARLGHDGNARLRTALYRATVNAARFNPIIKRFYERLRAAGKLDPAYGQAAASC

SEQ ID NO: 82069 - protein, 375 aa, unidentified
MRRPVSDGMLYAPKVATKQSRNISQQRLTIGLDLGDRNSCYCVLDEAGRIQLEQRVRTTAKALQEVFGAMPRSRVALEIGTHSPWISRLLSKLGHEVIVANARKVRLIGENRKKDDRLDAQTLARLARIDPQLLCPVKHRSAQAQADLMMIRARASLVRVRTGLVNAARGLAKSYGERLLGGNVRNMNPEKAEGLSPELQRALEPLLSAIEEVSERICEYNDRIEALAQTSYPQVELLKQIKGVGTLIALTFLLTLEDPHRFRKSRDVGCYLGLQPGRRQSGKSDPQMHITKEGDPYLRTLLVQGAQHILGPFGIDCDLRRWGLKLAERGGRNGKKRAIVATARKLAVLLHHLWVSGEVYEPLHNSSPMTIATAA

SEQ ID NO: 82070 - protein, 426 aa, unidentified
MSYKIAGIDVHKRGLAVVVSAVEVYGEYDFARRQFGTSPSQLRALAVWLLAEQVEEVVMESTAQYWKPVWGALEQHWQSACRKREGVRATSGALHLAQAKSNQGPRGRKNDFADAERLVKRLVANELRLSFVPEREQRLWRTVMRTKYQLRRNQVQLHNRLEALLEETHLKLSSVVSDLLGVSGRRILTAVAKGETDPGALAALADPNLRATREQLGDALEACRDLHPLYRRLLQTALDEWEEMEKRIQQLDQEMATLLRAHQDQVQRLAEIPGLGVDSAQQILAEVGAEAATFPTAGNLASWMGGCPGENESAGVNASRRSPKGNRHLRRILNQAANAAVKLRGSIFALLYRRYLPRHGHKKTIAIIAHRLCRLIWMILHRGIRYEERGPAVGKQSARRRAARMVRELRNLGYRVALPGSAVNPA

SEQ ID NO: 82071 - protein, 347 aa, unidentified
MCTFYLGVDLHLKRSYVVLMKEDGQIIDQRGLPNDIMKEYLTKHVPRSTYAVLEATRNWAFMYDLLTEHVERVELAHPKDLKAIASAAVKTDQIDARVLAHLARLNYLPTAYAAPLEIRDLRQFTRHRTWLVGQRTQAKNRIHAVLAGYNLVSPVSDLFGVQGRECLAQWVKDALRPAAVRVIQDNLDLIDTIHQQLEFLEKNIQLSPEEEQAVRLLMSLPGVGKITATTIVAEIGDITRFGSSKSLCNWSGLTPRVRKSDEVVRHGKISKEGSPYLRAAMVRAATAAVKKSPRWRTVHKNLSRRSGKRAARVAVARRLLTVAYHMLQRNEPYQEDYQQKGHSDRGA

SEQ ID NO: 82072 - protein, 483 aa, unidentified
MKNQPPQSSKKGSRQRTSQKPWSEMNREQRREMQRKIQSQDLNLEVMHPDAAGIDIGNEVHYVAVPPNRSSEAVRRFGCTTAELRAMADWLKQCGIQTVAMQSTGVYWIAVFDILEEAGLEVYLVNARETKNLPGRKSDVQESQWLMKLHTYGLLRNSFRPPQEIRTLRTYWRQRGDLVRAAGRHIQRMQKALTQMNIQLANVLSDISGKSGQAIITAILQGERDGGELAALCDGRVQASQEEVAGSLEGNWQDDLLFVLQQEQDGYEFCQKQMAECDRHLEQCLQQRADRSQGASLPVEKRKERRKKKKGNHPQFDLRASLFRMAGTDLTLMDSVDVMTAMTILSEVGWDMSKWKTEDHFVSWLRLCPDNRISGDKIIGKGRLPTNNRVTIALKMAASTLRTSQTYLGAQFRRLRTKLGPPVAIKAMAAKLARLVYRMLRFGMQYVDQGAEFYEAQHRKLQISHLKRKASQLGFQIIEASAA

SEQ ID NO: 82073 - protein, 411 aa, unidentified
MHNRQNYLYVGVDLHKHHHTAVIINCWQEKLGEIQFDNKPSAFSKFLLEVETYVSDGLSVVFGLEDVGGYGRALAKYLVDHEQVVKEVNPALSFLERKSEVMIKKNDSWDAECVARILVNKFNQLPDAKPNDLFWSIQQLVSRRNALVKAQAALKNQLHIQLNHHYPSYKKFFSELDGKTALAFWQQYPSPSCLEGANIKQLTAFLLDVSNNTCSVKKASDILKLVKEDGHTMKEYQETRDFLVRSIVRDIEFKKKEMKYIERELKQLVNLLDYQLETMPGIELVTASALIAEIGDIRRFLNANKLARFAGIAPVYFGSGGKGKTHKSKQGNRALHALFYNLAVQQVQVAKGSKMPRNPVFHAYYQKKLKEGKTKGQALVCIMRRLVNIVYGMMKYKTAYELPVVEEKEVV

SEQ ID NO: 82074 - protein, 355 aa, unidentified
MNDAKYIGMDVHTATISAAVRDSSGNLVMEATLETKAETILEFVHGLRGSLHVSFEEGTCAGWLHDLLKPHVTEVLVCDSRKNALLRIGNKNDREDARKLSELLFLNKLHPVYHGETGIRTLKELARSYLTITRDLTRVMNRLKAIYRGWGIACAGQQVYAPRYRAEWLAKITEAGVRRRAEIYYQQFDALAALRQEVRRELLAESRKHPAMRLLRQIPSIGPIRATLLIALMQTPHRFRTKRQLWAYCGLALRTYDSGEYRFVGGQLKRSKKAVTIRGLNKNHNHDLKNIFKGAATRAAATAGPLQNFYEARIASGLKPPMARLTLARKIAAITLLVWKKGVRFDAEQLKQQAA

SEQ ID NO: 82075 - protein, 349 aa, unidentified
MSQNLNSAVTVIGIDIGKNSFHVVGLDNRGAIVLRQKWSRGQIEARLANLPPCLIGMEACVGAHHLSRKLQALGHDARLMPAKYVRPYSKGQKNDFRDAEAIAEAVQRPTMKYVATKTVEQLDLQALHRVRERLVSQRTGIINQIRAFLLERGVAVRQGLRFLRAELPRILATPPEVLSHRIVRVISDLAEDWRRLDDRIDQLSSEIAVLARQDAGCERLMSVPGIGPIISSAMVAAIGTGDAFSKGRDFAAWLGLVPKQMSTGDRTILGKISKRGNRYLRVLFVQAAWVVLIKPMSWDRHGLKRWIEAAKKRLHRNVLAIALANKLARIAWGVLAGGRTFEANKLQAA

SEQ ID NO: 82076 - protein, 342 aa, unidentified
MYYIGLDVHKKTISYCVKDASGQVHREGTIGANRNELDWWMKTLPQPWTVAMEATIFTGWIYDHVLPHAAQVKVAHPVMLRAIALAKKKNDRIDAGKIADCLRCDFLPECHMASTEIRDRRRSLRYRHLLVRQMVQMKNRVSGLLLETGVSHNKQRLHKVRYFQKLISNQEDVPESIRPLLKLSRETIIRCQKTEYALVSSLQRDPLLAERIKRLRTVPGVGPITALSWALEIGDVSRFRSAKQAISYCGLCGDEKSSADKVLRTPLSKQRNKHIQSVLIEAAKLAPRHSPELALIHEREKQKGNANRATLAVARKMVAYLLAVDRRGKDFVPSEERSTAAA

SEQ ID NO: 82077 - protein, 363 aa, unidentified
MEEGKRRFVGIDLGKREYTMAIIGKNGKMKLHQGKTSTQGRKAMYRLLERSDKVAVEAGNLAFIMAREIKERVGCEVRVLNSAKLPFIWDTPTKTDKEDAMKLAHLIEERRDEKLPIVPLPSEKEMERRKVLACYSREMKGRTRYINLLHALFVHKGHTTIVRKNLATCASRQEAVKQVSGVEREQAQWILKHLELHDSRIKELRDKIRQEAKEDLDMKNVQSIAGVGAIVAYAFVAHVGDASRFSSGKQVSNYLGFVPRLDYSGTIHRQGHISTRGNGYLRGLLVQAGWSAVRSKNGGAMRERYVYKTKVKGMSKKKTVVATGRRLAELMYCVVKNKTTYEVRPWKGVRDDAATLAKIALGV

SEQ ID NO: 82078 - protein, 352 aa, unidentified
MKHYTGCDAHKKYSVFTTISEAGEIFPAKRVEHDRQKFRSFLETLPTGSSIAIESVGNWYWLVDEMEKAGHKPSLVHAGKAKLMMGNINKTDKLDAKGLAILARNGTLPAIWIPPGELRDQRELPRMRLVLVGIRTKLKNRIHATFAKYGITFEEVSDVFGGKGRRLLEQAMAELPPETRHSVEEQLQLIDQVEQSIKQAEKRIHSVIKEDHAMQILKTLPGVGPILAITIALEMGDVERFPTGEKFASYSGKVPRVSSSGGKTYYGKVRPDVNRYLKWAFTEAANAIVLQQHRLGDCHVLRLYWRIRNHKGHAKAVTAVGRHLAEAAYWMLKNDEPYREPGMKKMVGPVRR

SEQ ID NO: 82079 - protein, 349 aa, unidentified
MEKLIRIGLDTSKSVFQLHGVNEREEVILRKKLRRAQLLLWFAKLERTQIGLEACGGSHHLARELKALGHEVALVPPQYAKPYVARGKNDPADAEAICEAISRPKVQKRLVAVKSVDQQAAQMLAGTRDQLIRRRTQIGNTIRGYAAEFGHVVPKGLANIEPMLVRLDEDQQLPELAKEMFGLHKAEHVHVQAQLHRVERRFLAFHRKNELSLRLSQVPGMGPIGATLLSAKVTNAKAFPSGRNFAAWMGLTPKDHSTAGRLRLGGITRAGDEILRSTLVSGTTAGHPSDQARPNTSGALATRSAQAQAAQARRRGPRQQDRPRRLETDGQRRTLRSQEGANLLMPASS

SEQ ID NO: 82080 - protein, 358 aa, unidentified
MQTQNNKLDFSGQNIYVGFDVHLKSWKVTIMTKELTHKTFSQSPKPELLNNYLVKNFPGGTYHSAYEAGFCGYWIHNKLKSLGINSIVVNPADIPTTDKEKVQKEDARDSRKIARSLRSGDLIPIHVPCLKTLDDRSLMRTRSALVKDLVRNKNRTKSFLYFHGIDISESFSGQKVWSKRFIDWLGKIEMSEKSGKDALNAIVGASTDLRASVLRVTKQITELSKTIEYQEQVTLLKSIPGIGLLTAMTILTELETINRFESFDNLSGFIGLVPSTHSSGDNDVVGNITRRGHSVLRTAIIESAWIAARLDPALTKSYHDYCKRMESNKAIIRIARKLLSRIRFVLKNKKNYVCSVVK

SEQ ID NO: 82081 - protein, 345 aa, unidentified
MSKLYVGVDWHKRTSTWVAINEERKKVYEKVWECTPEAVRSAVTSLPAKPDEMKLVVEPVCGWRWMTDLCEETGIDVRIANTIKLRQIADSGQKTDKNDALTLAELLRADYLPEAYKVPTEIYELRMLVRERAHFISQSTATKCRIHSVCTGRGGHVTAEQPLHKAGWDKLYHKESGLFEMFQSLEEINTHVTNLEKRILETITDTKTYKILLSMPGVGPVTASAICAEVGDFKRFHTPSALISYAGIYPKERSSGEMKRYGSISKAGSKVLRYSIIEAAMRVRDTEKSHNLYTHYQSAKARNKTAKQARIVVAHKLLTIAWHLVQRGTMYDDHMVKPAQREITS

SEQ ID NO: 82082 - protein, 356 aa, unidentified
MITIGVDAHKRVHVAVALDAAGRQLGVWKGPNSARAWQELREWAVVFGGQRVWGVEGAWSYGRGLAQHLVVEGEVVYDVNSRWTALGRRSARKRGKTDRLDARAVAAFVRQEGSTLPRVGQEDETAVLDLLVRERENALAEVTRLRNQIHALLMQIDPEYKIGLRNRRVRTRMRLLEGYESPAPATSPLQRERVAAVRRLATRARVAGEQAEVLAKRIRALAEQGFAPLTEMVGVDLLTAGQLAAILGPGRRFEGEAQLAAYAGAAPLEASSAGLVRHRLNRGGHRQLNWILYRIVLTQAQHSEQARTYIARRRQEGKTMREAFRALKRYIVRAIWRLWQLCPGAQPQEVVVSAAA

SEQ ID NO: 82083 - protein, 427 aa, unidentified
MNCSTQNEKIELLTDEWLIVGIDVGSEKHFARMFNNRKVELSRKALGFENDEKGFTQLEGWISNQLRTSGKKFIMCAMEPTGHYWYNLAAYLQAHGMVVVHVSPSHVKKSKELDDNNPNKNDRKDPKTIAGLVTEGRYMIPYMPNGIYASIRELNNMRMRATESLVVVKNRLARWFSIYFPEFTAVFGDLKAKSSRLLLAEAPLPEDVIKLGAEGVNQIFRNAKLRSVGMKKALQIVEAAEHSIGRKENPWAAREEISELLEDLDRYLAREEKLMARLHEEVMKVPNVERILEIKGIGIRTVSGFIAEVGDISRFEDAKSIQKLSGYAIVANESGKHNGQSSISYRGRKILRYFLFQAAISVIGKNPEFAVIHEYYTTRKKNPLKKMQSVVAVACKLIRVFYTILTKGIRYDGQKMLNDIVRPETIA

SEQ ID NO: 82084 - protein, 353 aa, unidentified
MKRDKYMGMDVHQATTVVAVIDAEGKSVLETIVPTAAGAIRRLIESISGPLHVTLEETTQAEWLHDLLQGFVAEVIVCDPRRNKLLAEGSKGDKADARKLAELLRTGMVRSVWHGRQTTRGLKEMVRAYETFAIDTRRTMMRIKALYRSRGIATKGSAVYQQKQRDQWLMHLTEQGMQQRAAWLYEQLDHVRELRKRAKAAVLTEGQRHQAVQLLRTIPQVGPIRAAQIVATAGTPHRFRTKRQFWSYSGLAVVTHTSAEYELRAGRVVRRNKPVATRGLNSNCNRRLKSVFISAATAGGVSHPWQLYLDNLKEKGMKSDMARLTLARKIAALTLAIWKKGESFDPKKLNWTN

SEQ ID NO: 82085 - protein, 320 aa, unidentified
MMAQNDPGVVGIDVAKDKVDACIRAFKLRQTLPSTAQGQRRLVAWLRKHQVNKAVMEASGGYERAWARVLREAGIEVRIVDPKRVRSFALSAGRLAKNDAIDAEIIAWFAETFSQAPSQIHDAAHEELQTLVKARLDLIDLRMRLVSRSEHAAPGLVQKAHAHILKSLTSELAKLEAAISAKIKSMPDFAERAEIIESVPGFAETSSANLVAGMPELGQVSDAIAAALIGVAPYDDDSGRRRGERHIKGGRRWVRNAIYMPCVGAATQNNPVLKAYYQRLLAKGKEPKVALIACMRKLIVILNTMIARRQRWDPSRYVLS

SEQ ID NO: 82086 - protein, 362 aa, unidentified
MTEEQRRVTGGVDTHADNHVAVVLDEVGRVLGTESFPADEKGYKALLVFLRREGEVGKVGVEGTGSYGAGLARYLSAHGIEVIEVIRPNRQVRRRRGKSDPTDAEAAARAVLSGEAAGAPKSRDGVAESLRALRVARQGAIKARTQAANQLRDLVVAAPEQLRARLRSLTTEQRVAIAASFRPARTTTPTEGTKAAMRSIARRYEGLSEEIAGLDTAMASLVKEAAPEGFSDKVGVGTQVAATLLATLGDNPERLGSDASFAALCGASPVDASSGKQLRHRLNRGGDRQANSALWRIVHTRIHHDPRTIAYVERRTKEGKTRKEIIRCLKRYVAREIYKALVVPAARGAHVTKCEVGRAAAA

SEQ ID NO: 82087 - protein, 423 aa, unidentified
MSNIEHDCHSITLNVGIDWADKENVYEIQAEGSKERIRGTVKQTPEDLAEWVMELKKKISGGSKIAVALEQSRGSLIYFLQQFDFIILYLINPKSLAKFREAFRPSLPKDDPDDSGCLLDMLVHHREKLHAWHPDTTETRKLSAFCELRRSSVDERTAIVNKMTSFLKYYYPQALSWAGDLTKPMACDFLDKWPTLQAVKQARPETLRKFYRAHHSTSAKTERRLVEIQKAAANTTDAAIIEPYSLALSNYVQLVVELNKMIATYDKEIERLFAQHPDHDLFAVLPGAGPVMAPRLLTAIGSDRNRYQSAVEIQQYSGIAPITRRSGKSKIVSRRFGRPKFICQSWIEFAQHSVGFSAWAKAYYSHQRSYMKKGRYAALRSLAYKWIRIIFRCWKLNEPYNEQRYLDSLRKHNSPLVALMKIA

SEQ ID NO: 82088 - protein, 348 aa, unidentified
MSNITTVGVDLAKNVIQVCVFYRNQVLSNTKMTPLKFTAWLASQKKSVVVFEACGTSNYWKRKATSLGHDARLISPKLVNSVRQNQKTDINDALAILQASMLPGIKFVSGKSIEQQQLQSILRMRELSVKQKTALNNQLSALLLEFNIRVTPRNGGLKGAIFGALEDAENGFTMTFRHALEQMWLQYLSSIEVINKFDDCLRDLLDENPECKKLTRLEGVGVINAINLYIAFSTDELGVFKDGKGAAACIGLTPIQHSSGGKAKLGTIGKHVKNSMLRSQLVTGAFTYVHQVSRRKARCQKDIWLQSLIERRGKKCAAVALANKTVRTAFSLLRNKTEYKAVRLNMAA

SEQ ID NO: 82089 - protein, 400 aa, unidentified
MHYLGIDWATDKHDICLMADDGTILSQFEITHNMKGFRQLHHLLENLPDVRINIERSDGLLVDWLVQQNYDLFITPPNVLAHRRPTRVKDDKGDAFLLAYLLRLQDLDCRPYSHQSQIVTHLKQLVRAYDHTLNEQRRLNNQLIYNLRQYYPLALTLFTQSYSLILLAFLEQYPTPQEAAQITYFDLETFLRSQKYSHIKRLDLLYKRLKVPMPEASVQDGYVEHIKVLIPLMQMLYRQKADLIKQITQVFRSHPEAEWWLTFPGTRGPLTPTRLLAWIGDNRGRFPTAEVLQATAGTVPITRRSGKSLSVEFRNGCSHPLRNVADDLARQSLRHSGWARAYYQQQLDRGHSAARSYRALANRWMKIVWTLWQRRETYDEAKHVANRSRKGMQLLLADAI

SEQ ID NO: 82090 - protein, 348 aa, unidentified
MNVIGVDYHPSWQQICWMDTETGETDEKKLEHATGEAERFYRQLPGRALIGMESTGNCQWFVELLGRLGHELWIGDAAKIRASEVRRQKNDRRDAALILKLLVEGRFPRIWTPSSEEKDLRQLLIHRYKLVLIRAQVKNELQHLAMNQGVTKRQKLWSKTGEKVLRELPLAPWAGRRREDLFKVRGMLDEQIALLDVAVKEAAEKNEKARLLMTQPGVGPVTSMAFVLTMGDVQRFRRGKHVASYLGLIPREHSSGGHQRLHSISKQGNRFLRMLLVEAAQSAVRYDPEFRREYLHRCHGKPRGVAKVAAARKLAVRLYWMLRTNTAYPGVVRVESSSRVPVVVRSNG

SEQ ID NO: 82091 - protein, 282 aa, unidentified
MGRAAHEGGQSLPTRKVNTRNDTTCVVGIDVATRTLDSALRGNGKTKFTVVDNIPAGHAWLHQWLAERGAPQEHTHICMEATGPYSEAVAIALVEAGWRVSVVNPARIKGFAQGELVRNKTDRADAALLARFCAAMCPSLWTPPSPAWRELHAWVDRLHALKDMHQQERNRLEAHEASGQLLLVKAVQAHLDWLGQQIDELERTINGHIDRHPDLKGEAERLHSIPGSGKTTGAKGLAYAGDVRRVAKAKALAAFIGVTPRQRVSGSSVNGRTMMSRPGHAD

SEQ ID NO: 82092 - protein, 359 aa, unidentified
MASMPSQLDPVSRVVVAGVDTHKDLHVAAVVDTDAVVLGTESFSTTRAGYRSMLRWLRGFGDVRKVGVEGTGSYGAGITRHLTEAGIQVLEVDRPDRSDRRRRGKSDTLDAEAAALAALAGRRTSTPKRKDGLVESLRVLRLTRATAIRSRTKALQLLRMHVVSAPEELRDQVRNLTRMQLLRTCASWRPDTVGFRDPVVATRIALKSLARRILELNDEIADLDELINPLVQELAPQLLARPCVGVEIAGQILVTLGDNPARIRSEASFAMLCGVAPLPASSGKTQRHRLNRGGDRQANRALHMAAISRMRMDPTTKAYVARKTAEGHSKLEIIRCLKRYLAREIYYLMRQPTTLPNAA

SEQ ID NO: 82093 - protein, 341 aa, unidentified
MEQATTIGLDIAKHVFQLHGADAAGHVLFRKRITRVKLLGFLAAQTRCVVAMEACAGAHYWAREIAKLGHHVRLIAPAYVKPFIKRQKNDAADAEAICEAAQRPSMRFVPVKTEEQQANGIVFRARDLLVRQRTQCVNALRGHLMEYGYVFPKGITHVETLVALVEDLQSSLPDSVRVILKLLVDTFTALEAQIAVLDAEINQRSKSDPTARRLMTIPGVGPIASTAITALVPAAEGFPAGRDFAAWLGLTPLQKSTGGKQKLGAVSKRGERTIRRLLIIGASAVVQQASRRGAPKGSWLAQMLARKPKMLVTVALANKMARVIWALLVKGGTYRAPAVAA

SEQ ID NO: 82094 - protein, 413 aa, unidentified
MEQGLITAVGVDVSKGKSMVAVRRPGGQIVMPPIQVNHTAEELAGLAERLQGLGGDIRIIMEHTGMYWRPIAHSLKEAGFFVSVVNAILIHNFSDNSLRKVKTDKADALKIANYGLTFWTELRNFSDEDETRQMLKMQCRLYERTQKISVELRNGLISLLDQTFPGINEILPAHYCTKRGHYKWVDVSKRFWHKDCVKKLSESAFTNTYQKWCKKEGYRFSRIEAEKIYRAAQNTVATFPQNESTKTLIVQAVDCLNAVYESMAVLRTEMKRLASLLPEYEVVMAMQGAGDVTGPKLMAEIGDVRRFTNKNALVAFAGVDAPPFQSGSFEAKSRHVSKRGSPHLRRTLFQVMSVVLQRSSTDNPIYSFMDKKRAEGKHFYVYTVAGAAKFLRVYYARVKEYLLALETKQETAA

SEQ ID NO: 82095 - protein, 408 aa, unidentified
MNAVGIDVSKGKSMVAALRPMGEVALLPQEFLHTAPGLDQMAHAILALGEDTRVVMEATGRYHEPVAAALSAYGIYVCILNPLYIKQSGAGSIRKVKTDKADSLKIAKYGLDNWVDLREHTAMDTIRQQLKLCSRQYNIYMKTEVSLQNNLISLTDKTFPGVNELFSSPARADGHQKWIDFVMTFWHCDCVFRISEKAFTARYEKWCKRKGYHFRAEKAAEIYARSCELFTTLPKDDNTKLLITTAAQQLLAGKMTLAALRAEMTRLAQQLPEYDTVRAMYGVGETTAAQLMAEIGDVRRFPRRSSIVAFAGVDPAITQSGKHEVQSTATTKRGSPHLRKTLYQIVCTYLRKAPVDEPVYQFLDKKRGEGKPYFVYMTAAQNKFLRIYYARVKECLEAFDTQQNTVQD

SEQ ID NO: 82096 - protein, 342 aa, unidentified
MQHVAIDLHDEYSQICVMNEQRELLAEVKVPTRRAALSDFFRQRERSRVIFEAGPHALWVSELLIELGHEVVACHARRVRLIAESRNKNDRVDAELLARLSLSDLELIRPIQQRSRSTLEQRSVVRSRAALVETQKRLRTMLRGLIKPFGVQLPAGKKRALTQAASAELPELARQSVDAILNILHSIANQIGVLNDAIEQLTRDHPTVRRLQTIPGVGSLVALSYIHAIEDPARFGASDVGPYLGLTPSNRSSAGKKLGPKDRGRPGDPYVRSLLVQAAWTLMNSRSESELARWGRALVQRVGPKKAAIAVARKLATLMHHLWLQDQDFRPSPQPHRQAVAV

SEQ ID NO: 82097 - protein, 422 aa, unidentified
MQTLLSQRFTAYVGIDWADTKHDVCLQVAGESRRHFSVIDHTPQSIDRWAKSLFERYGAPIAIALELNKGPLVAALQKYEFFCLFPINPSTLAKHRKAFVGSGAKDDPTDAQWALELLLTYPQRFAQLMPQSPAMRILASLTEHRRALVDERVKVSNRLICTLKQYYPAALELFSNHDSVVFCDFLMRWPTLEHLKRSRQSTFLKFFNEHNARHAQLNQTRWEIITQAMPLTQDPGVIRPSQLYATALASQLKGLICTLKDFDREIQETANSLADYPIFKALPGAGQHLAPRLMVAFGEQRDRFSDANAMQRYAGIAPVTQRSGKKTVVYWRYQCSTFLRQTFVEWAAHSITQSTWAEAYYRQQRAKGCSYQATLRALAFKWIRIVYRSWLASTYDDEKAYLQALTGRGSTLVEAPMEVVSG

SEQ ID NO: 82098 - protein, 346 aa, unidentified
MEYVALDVHKNYTWARVENSQGARLYESRLAHGHGTIKNFVNRWSGGSPVAVETVGNWYWVVDEIEAGGGTPQLVNARLAKLMMGNVNKSDKLDCQGMNRLQRTGTLPTVWIPSSSVRDGRELARTRMVLSRQRTQLKNRIHATLGKYGYTVKGASDAFGKKGREIIEELLLKLPPHTQQALRLILDELDHVTDNLKAIEGHMIEIFSPCPQTQWLKSLPGVADILAVVIWTEIGTIERFNRAEQLASYCGLVSRESSSGGKIRLGPVRRDVNVYLKWAFVEAANSALLNAGRCGYGHISRLYERIKPRRGHGKAKVAVARHLAEASFWMLKKGEPYREPMPSTQR

SEQ ID NO: 82099 - protein, 316 aa, unidentified
MKTQVFVGLDVSKQHLDVAVRPQGRHFVTPNNERGIKQLVKRLAALKPQLIVLEASGGYEFLALAALAEAQLPVALINPLAVRKFAGATGKLAKTDKIDAQVLAHFAEALRPEPRPLPDQAHQALKATLQRRMQVVKMIGQEENRLEKTFIPALRQDIQDHLTWLRRRLKELDRELDDQIRQSPLWRDRDRLHQSITGIGPVVSRAIITHLPEIGILPGKKVVALVGVAPYNRDSGRFRGKRMIRGGRSYLRRLLYMAAVVASRFNPVIRTFYQRLLAAGKPKKLALTACMRKLVLILNAMVKNNQPWNQFLTQAP

SEQ ID NO: 82100 - protein, 382 aa, unidentified
MPGRVRVRACAAQAERLLAWAAAWPQRTWAVEGAGGLGHLLAQQLVAAGERVLDVQPKLAARVRLLAAGDVNKNDPNDARSVAVAALRPAACLPVRADDHAAVLKVWAKRYRDLSRARNQVVCRMHAVLCQLIPGGVSTRITAGQAARILDQAEPRGAAGMARWVLAAQLLTGLRRIDVQRRDVQRKLAVAVRASGTTVTGIFGVGPAVAAAVIGDAGDISRFASRDHFAAYNGTAPVEVSSGGRVIYRLSLRGNRRMNHAIHMAAVTQIRYRHSKGRAYYDKKIAEGKTSKEALRALKRQVSDAVYQRMKADGRRAAAGPGGHPGNGSEASVAGLHPADRLFGQATPGPEPTLRPRPGRSKAAQAGSSRRTRRAVPAHTSA

SEQ ID NO: 82101 - protein, 413 aa, unidentified
MDKIYDICCGIDVHKKLIVACLNHKRKKELREFGATTRELMELAEWLQKNECEIVAMESTGSYWKPLYNIMESYGLHAIVVNPAHMKAVPGRKTDVKDAEWIAELLQHGLLQPSYIPSKDQRELRELVQYRKSLVGERTRELNRLQKMLEGANIKLSGTVTNINGKSARKILEYILSGNEIDEKKYDEMYEEKLIAHNLKASKEEILDDLKGFMSPLQRRMLKELLQHLDELNVHIENLNDEIDNFMKPEEKQASQVIQDVTGIGNTSAQTIIAVIGTDMERFPSDRHISSWAGLCPGDNVSAKKRKSGKIRKGNALLKSTLVLCAHAAVRHKSSYFHAQFKRISTHRGKKRAYVAVAHSILIAIYHILKDGVKYQDLGAEYYNQFNAERKIHAYLKKLKALGWEPPKEAVPA

SEQ ID NO: 82102 - protein, 343 aa, unidentified
MKEDWTIGMDVGDKSHALCVLDAQGTVEVRERIANTKAALQKFLSGYTRCVVALEAGTHSPWISREITRLGHEALVAQPRKVHLISGDEKKCDERDAEHLARLARVDPQLLHPIRHRGEQAQADLAVLRARAGLVRARRLAINLARSLVKGVGARLPACRAEAFAKKAADAVPELLNAAVEPLLTTVAQLTRQIQAYERSVQTLVTRYPEAARRDVIPGVGPLTTMGYLLTVEDPQRFRKSRQVGPFLGVVPRRDQSGDTDKRLRIHKRGDAFVRRLPVSCAHYILGPFGPDSDLRRFGLRLTEHGGRFGKRRAVVAVARKLAVLMHHLWSTGEPYEPLRQAA

SEQ ID NO: 82103 - protein, 389 aa, unidentified
MLFCGIDIAKRQHAVALLDEKGQLVQPILSIPNDRAGFDQLIQALPDPDAVAVGLEATGHYWVALYDALTRQGFSVVVLNPLQVAAYRRSGVRKVKSDRSDAVWIADFLRIANATPTRQDLPVLLQLRELSRFRFRLTDQIGDIKRKLLTILDRVFPEYEQLFSSVFLRTSRALLEQAVSAQEVAEMDLQELATLLQEASRGRFGREKAQQIQAHARRSVGVGFLADAAQIEMRCLLAQIELLEQQRDQIDDALAILMGQIPQHITSIPGIGPVTGAAIVAEIGDVSRFDSVEKLVAYAGIDPSVYQTGQFRASEAHMSKRGSPYLRHALWLAASVAIKHDPQLQAYYQRKRQEGKHYGTALGAVCRKLLARVYIVLKEQRPYVVKPAC

SEQ ID NO: 82104 - protein, 341 aa, unidentified
MSIVGAFDVHRRQLTFDYLDTVAGEVKRGRIAPADREHLREWLARFAGCDDVHFALEGCTGWRYVTEELAAARVTPHLAEPADTAALRGRKRHAKTDKTDSRHLRVHLAAGDLPECWIPPAQVLEARAIVRLYKDLLDERGGWHQRIAATLFHQGVPVTASMSTAQGRAAVAGMALSPAGLQAVETGLRQVGRLTAELEPLRRQLDMISRRQSGCRALRATRFGVGAVTSVAIWAELGDVRRFGNSDDVIRHTGLDITVYSSDGKRSAGHLSRQGPALLRWALYESAKCAARPSAPDHGYYTAARDRRNAGLATLPVARKLARRCYHTLRELGEEAMRPAA

SEQ ID NO: 82105 - protein, 360 aa, unidentified
MRIIGCDLHAGQQTLAMLDTETGEVVNRTLMHEGNQVREFYSELPRPVLVGIEAIGPMQWFLDLLAQLGIECRVGDAAKIRAAEPRKQKHDRRDAELILKLLVEKRFPAIWMPSKELLDLRALLLHRHQWVRLRTQVQNALQAIALANGLRRGPGLWSYDGQAKIAFLPLPPHASLRRSALQAMYGHMEEEIEKLTVQVAEQVEHRSGAQLLMTHPGVGPVTALATDVFLGDAQRFDDGKSLASYVGLIPEERSSGRRRRLGRISKQGNPLLRFLWNEAGAHAARRDPELRRFYRRKLAQKGLGKARVAVARKLGIRLWIMLRDQIDYQEFCRRGQKQSGAACAGMPEVGNGANRHRPVE

SEQ ID NO: 82106 - protein, 402 aa, unidentified
MEQVIIGVDPHKLSATIEVVDDHEHKLGQGRFTTDKAGYAAMRTYTKAWPARVWAVEGANGAGRPLAQRLLEAGEVVVDVPAKLAARVRLFDTGHNRKTDAHDAHSIAAVAVRTKTLRVLQVDGELQALRLLVDRRDALSRRRVQTVNRLQALLAELIPGHGKKDITALQAKDLLASVRHRDVAGKTCRRIAAEELSELVAVDAKIKKSTTELKALVLARDSHLMDLHGVGPVVAARVLADVGDIARFPDRNRFASWTGTAPLDASSGEHDRHRLSRAGNRRVNHVIHIAAVTQLRLNTEGRAYYRRKRAESKKHMEAMRCLKRRISDALYRQLVADAAATAVQGVEAGPGGHRGASYVSSAAGSHPHTGTSDQPLPGPAATTLPAPTPSRKNPRRPLQPAT

SEQ ID NO: 82107 - protein, 385 aa, unidentified
MTIQIQVPRFIPRDYDVFAGLDVDKKSMAVTFADHAGSQRALRMAHQVTPLVNYVRKHFAGQRVAFAYEAGPTGFGLHDELVRRAYTCVVVAPSKVPRAPGERVKTNRLDSRKLAESLRGGQLHSIHVPSAVYRNLRHLVQMRDTHVRQLTSSKLRIKSLLLYEGIAFPEEHEKWTARAMRELQTLPCSETVRFKLDDLLDTLHFHFQAAARATKQIRQYCLDDPELQQSIDLLLSLPGIGWIVGSHLVARLGNPREIKNGRQIAGFLGIVSSEHSTGDKQNRGEITRSGDSRLRNKLIQSAWTAIKRDPELRAFYRRIYQRHPKKVAARKAIVAVARKLTNRIYVVLKEQRPYVIRPDSSIAPLIAEETIGPRERLDAAQNDQS

SEQ ID NO: 82108 - protein, 318 aa, unidentified
MKSVNYSAYIGLDVHKDTIAVAVANPERQGEVRFYGNISSAKDSVIRLMKKLIKLHGSILVCYEAGPIGYGLYRLLLSMNIDCTVVAPSRIPKISTNKIKNDHRDAVALARLLRAGELVDVWVPDMTHEAMRDLVRARSCAKKDTKVAKQRIQSILLRTGKRYEKKMWTVRHRVWLANQSFPIAISVVAELGDFSRFSNPKQIMAFLGLIPGEYSSGSTTLKFGITKAGNVELRRLLYEATWAYRNNAKVGNWLVTYRPDSVCQEAKDISWKAQQRLCFRYRSLVAKGKKSQVAITAVERELLGFMWDIAVSTRSQKA

SEQ ID NO: 82109 - protein, 407 aa, unidentified
MNQIYVGIDVGSCDNAVYIMLPDGSKHSAFSVQNNLGGAQTISKKVVSALNELELTNATIGIEATSVYGDSLMYFLREDGALSQFDKKLHILNPKQVSKFKQAYSDLPKNDPVDAFVIADNLRFGRITAPIFIDDYRYKALQNLTRARFYAVKNLTREKLRFMNYLFMKCSGLAQEKVFSDNYGVAALAVFEEFDTPDDIVEMDVEELAKFIAGKGKNRSPRPLEIAEAVQAAARGSYRLHKTVSDSVNQVMSISISSMRAMQAQIKTLDKEIARQIENIPNTLTSVRGIGSVFSAGIIAEIGDINRFDGQSSLAKYAGLVWSQYQSGKFEGQHTRLIKSGNRFLKYYLVEAANSLVRCDTEYRRYYDLKYKEVNKYQHKRALALTARKLVRLVFRLLKDNRLYIPA

SEQ ID NO: 82110 - protein, 401 aa, unidentified
MQEPLQHNSIDVFVGVDVGKGQHHAVALDRSGKRLYNKALPNDEAKLRALINELKAHGQLLFVVDQPATIGALPVAVARDEGALVAYLPGLAMRRIADLHAGEAKTDARDAAIIAEAARSMPHTLRSLRLADEPLAELTMLCGFDDDLAAQVTQTSNRIRGLLTQIHPALERVLGPRLDHPAVLDLLERYPSPAALAATSEKTLANRLTKLAPRIGKRLAAEIVQALGEQTVVVPGTQAATVVMPRLAKQLAALLQQRDEIASEVERLVHLHPLYPVLTSMPGVGVRTAARLLTEVAHKAFASAAHLAAYAGLAPVTRRSGSSIRGEHPSRRGNKVLKRTLFLSAFAALRDPISRAYYARKIQQGKRHNQALIALARRRCDVLFAILRDGTFYQPQTAPNA

SEQ ID NO: 82111 - protein, 400 aa, unidentified
MLSIGIDVSKGKSTVCGMKPGGEIVYAPFEVQHTREGMSELVSLLRSSGEEVRAVLESTGSYHCPVVTALLENGIFVSVVNSLRMKRFCSQSIRKVKTDRIDAMQIALYGLAYWQELQPTRLPEDTYRELQLLARQYYQMTSLLIKAKVDFNALCDQVLPGMQELMSDHAGRHKLSDFVLRYRHTTHILEMGETRFRKDYCKWAEKKGYRNCERMAVLIFATAQNGIPVLPNAPSTQIVITEAIRVLHTVEASRDAILTQMQALAKTLPEYSLVREMPCIGDTLAPRLIAEIGDVRRFHSKRALIAYAGIDAPPYQSGKFCANNRHISKRGNRYLRKTGYEVMQSYVMHKPANDPIFTFIEKKRSEGKSGKLAMVAGLNKFLRVYYGKVTELYRSSSAIE

SEQ ID NO: 82112 - protein, 326 aa, unidentified
MSKRVVYLGVDVGATELWVSSAGLKPRLFAHSIKGIKSLHHWALKEAGDAVGHLCMEATGVYSRHVAIKLLELTGLEVSIVNPACIKAYANVQLRRSKTDRLDAEVIRDYAESQKPRPWQPASKTKRQLYELAALADSIRASLRQWRNRRHAQGYIPDLPKEVEKTQRAIEKNLEKQLNHVELAINRLCASEPELAQEVMILESIPGIARKSAVQILANGREWLTDRSAKALTAHAGLAPHHYQSGTSLNGRSRLDKRGNVKLRKALYMPALVGIVYNPRLKSCYKRLCDNGKQKKLALVACMRKLLLLIRSMLINKKTFNPNFNT

SEQ ID NO: 82113 - protein, 427 aa, unidentified
MDRDTVNWNERTAFVGFDWASDHHDVIIVNERGTIVEDFRFDDACEGWQLFRTKLGSYANPAVAIETSSGATVERLLEAGCAVYPINPKAAKRYRERKAPSGTKTDRMDAWSLADALRLDGHTWRALKPDDPLTVELRLLCRDEIGLIRQRTALVCQLRAALGEYYPVALEAFDDWTSPSSWAFVDAFPTPEALHQARKRRWEKFLHVHKLYRPETYEKRLALFAQARAFCGSEPAVQAKSFLALALTAQLRALQSHLDKYRERIHELFAQHPDHELFGSLPGAGEKLAPRLLAELGDDRERFDSPQALQCHAGTAPVSYQSGQINKARFRIACQKLLRHTVHLWANLSREKCPWAEAYYRTKRAEGQSHACALRCLGQRWLKILWKMWQTRTSYDAELHQRNQLKHGSWVLNLMTPKTTGLAAGEA

SEQ ID NO: 82114 - protein, 467 aa, unidentified
MKNYDSAGWEPSSGHTRVTRKAVYSLKAMEAYQKGTSKMFELFLSAGIDVGADFSFMSIALPNQSFAGKPVKITHADLKSLERAVKLIREAEEKYGLQTRIFLESTSIYHYSLTNYFSSKGFNVSVINPIITKSSATINIRKVENDKTASQKIALIGLNPKLKTSSLPGQLVLNLRNLVREYYYLVDNRSAYITKLTAILKTAFPRYIGIFSKLTTETSLRLLEKYTSPQAFMKARKSSVVKLIRTASRSGQAYAEEQYAKIIQAAKDALVLGYAVPSHFELIKSHISFIRIYSRQIAAILASMKKFADDNSDELFVKQIRLIETIKGAGFLSAAALMAEIGDFSAFNSPKQLFAYFGLDPSVKRSGNFVGTKNKMSKRGSAIARRAIHTISTVSICKTRAGSFNNPVLRQYYDDKCKAKPKLVALGAVAHKVCNIIFAVLRDNKPFAVISIDEHIREYQRKVSEFA

SEQ ID NO: 82115 - protein, 388 aa, unidentified
MQVVTGQAAAPTAIQTNLRAIFVSLELSRSTWLITSLSPGAAEKMSKHSVQAGDIAGLLRRLAQIKEKARARTGRDFPIITIQEAGLDGFWIHRVLQSEGIESHVVDPASIATSRRRRRAKTDKIDGETLVRTLLAYKRGEPRVCAIIKVLTPEEEDSRRLCRERKVLTAERVLHVNRIKGLLFCQGISGYEPLRRDRHERLEELQTGDGRPLPPHLKAQVNRELDRLELLLKQIKAVEAERDALLVAAHTPAAVPASMLLNIRGIGPEFAAVLWSEGLFRHFDNRRQVAAYAGLAPTPWQSGAVDREQGVSKAGNPRLRTTLIQLAWLWLRNQPHSALTLWFHERVSRNGGRLRKTTIVALARKLLVALWKYVTAGVVIEGAAMTAA

SEQ ID NO: 82116 - protein, 437 aa, unidentified
MMIKLSGSKQLPNIFKGCGSMIYVGIDIAKQKHFAAATTADGEVLIPPFGFSNDAEGFKLLLSKIKSFKKENTLIGLESTAHYAENLICHLFELGYNISVINPIQTSTLRKTNIRKTKTDKVDCLLIIKSMIVNKPRIYSKIDIDSLRLKSLCRFREKIKKAKAKLKIQLVTYVDILFPELQYFFKSGIHTNTCYQLLKEHSSPDDIAALHLTYLANLLQKASHGRFGKEEAFALKGLAKSSVGTGNTAVSIQITQSIAQIELLEQQLADLDRAIESIMLEMDSVILTIPGIGFLNGAMILGEIGNISRFSNPSKLLAYADLDPTVNQSGKFNAKSTKMSKRGSKLLRYALINAAWNVSLNNKTFNDYFNLKRSQGNNHYAALGHVAHKLVRIIFKMPIFRLSKFLSVGIIFLLTIHSWSPCLISCRIHVYINAICF

SEQ ID NO: 82117 - protein, 318 aa, unidentified
MKTTSNQNINVGVDTGKFQLDIYIRPLNIYFTVSNDEKGIKEAVKTIKKYTPERIVIEATGRLEMPFIMACAEANLPFVIANPVHIKRFAGAIGQRAKTDKLDAQLIAHYSEAIKPTLSTLKPDVMRAMSDLVARRNQLLVMQTMEKNRLQILPKELEMTIKPILTAFKNQIEKIEIKIVKLIESNPDYQAKNILLQSMKGIGKIAAASIISNLPELGYISNKEASALVGVAPMNKESGRFKGMRKIQGGRHQVRTVLYMAMMSAIQSNPVFKSTYQRLVATGKPKKVAIIACIRKMVVTLNSMLRDGALWEAPKAIN

SEQ ID NO: 82118 - protein, 427 aa, unidentified
MARAIGLDVHLEFCEVAIAEDRVVRSAGRVETKPDALELFAQSLGRDDRVALEVTGNAWEIARIVEPHVARVVVVSPADTGIRQARAKTDRLDARTLARLLWSGELDAVWMPDRVTWVMRRRLSRRGQLVWTRSRAKNEIHAVLMRCLVGRPPFADLFGVKGRRWLAELELPVEERETVDAGMRQVEFLDTEIAAVERLIARDALASEEIKRLMTVPGVNVIVAASFVAAIGDIGRFHNPRKLVGYLGLDPRVRQSGSGPASHGHISKQGSVRARHALVESCWSAVRQPGPLHAFYQRVRARRGHSVAIVACARKLACLFWVLLTREEDYAYAQPSLTRKKLRLLELAAGAQRYSPAGDGVWHANEAVRAAERELAHQAEIAYQRTVRDYHATQATTKGAGATPGRASSSRQSGKQRGRATVPDPAL

SEQ ID NO: 82119 - protein, 364 aa, unidentified
MKKISKKQRAIAAESKPEKVVGLDLGDRYSHYCMLTDTGELMEEGRIQSTAAALEKQFGNESRMRIALETGTHSPWISRLLESYGHQVIVANARKIPAVTSSESKNDRNDAEQLARMAAFDPKLLHPVQHRGLERQQDLNLIHTRSVLVRARTMLVNSVRGLVKSAGGRLPACSSAAFPEKARTFVPTELKTACGPLLGQIAQINRTIGEMDKQIEGLEKKYPEIAVLRTAPGVGPVVAACYVLTLDSPEAMETNRQAGAYLGLRPRQRQSGDSNPQCGITKTGNTYLRSLLVQSGQYILGRFGPDSELRRWGLKLAASGGKRGKKRAIVAVARKLAVVLLSMWRNRKKFDPFPQAATALAAAA

SEQ ID NO: 82120 - protein, 406 aa, unidentified
MIHVGIDWGRHGHYFVAVSEDGHVLDNGRVEHSFPALEQMRARLSKLEPDARQVRVAFEMHSGGLLQWLRNQDYSLYTIASNSSDSARELFSPSGGKDDPRDASTLAELLRMDAKCMRRHDPLPELSEVLLQWLRMREDLVQARVAIQHQMRAILAEFSPELSKACNNFRCNWQRTLLASYPSQHALRQARWEEIAAICSRCRSAALERVRAAFETEAMPLSAQKLEVIEQELLLLLEDLERLTERINEIENKLEELIADHPRKHLAESLPVRGIVTRATLLAIMARADTLHWEDLVTEWGVVPVTKQSGSHREVRRRKACNHHICRFLTQFAFNTLQFEGSWAREYYDNKKAEDEKKNKGNKGDKRHFTRLRCLAKGWVKILWAMWRDNAEYDEQYHQANRRTAA

SEQ ID NO: 82121 - protein, 421 aa, unidentified
MSNVTEFGKKANNQVHELMENVSWVVGIDIGKEKLSCALMDIKKALICRFDVEGSLAGYNELLNRVKKETKGSGKIIFALEPTGHYWMVLGQFFEDHNQSYVLIHPLVAARSREVHRLNKGKTDSLDARLIGELACDRSITRTQIPEDYWATIRFYAREYMDREKEIAREKNRIVSYLETTLPGFIEIFPKPLCMSGRACLRFLANFREASKGDMEHFEMQIRKHFPGKRLMTSRVRRLYDMLQRGDVLGLRAGRQAMFFRIIHSLNRLEMYEGQEEAAKQAMLDMYKKSEYKEYLDSIWGTTPSVNALILGFMGDPALYDSPASLVKLAGCDPVPNESGKFKGRASISHRGRSLLRKAGDRVSFLLEKRNSVFRAFFNHLMSRQKNKFTKRQARVACINKYFRIVWVLCHYRVPFNPALA

SEQ ID NO: 82122 - protein, 413 aa, unidentified
MDVVHARCCGVDVHKATVVACLIVPGAQGRPTKEVRTFGTMTVDLLQLVDWLVAAGCTHVAMESTGSYWKPIYNLLEGVIDEVVVVNAAHIKQVPGRKTDVKDAEWIADLLRHGLLRASFIPDRPQRELRELTRYRTALVRERSAEVSRVQKVLEGANIKLAVVAKDITGVSGRDMLAALLAGRTDAATMAQFARGRMREKIPQLEKALMGRFAAHQRFLVAQQLAHIDFLDDLIARVSAEVAERVGPFEALIALLDTITGIGRLTAEVVVAEIGVDMTRFPSAAHLCSWAGVVPGNNESAGKRRGGKIRKGSPWLRAVLVEAAHAAGRTKTSYLGAQYRRLVARKGRKRAAVAVAHSILTIIYHVLSDRKPYADLGVDYFDRRDQQALERRLVSRLEALGYDVALQPKETAA

SEQ ID NO: 82123 - protein, 343 aa, unidentified
MGEVSTIGLDIAKSVFQIHGVDAGGAVVIRKRISRAKLLEFFAALPACLVGIEACPTAHYWSRQLQALGHTVRLLPPNYVKAYLKRSKNDANDDAAICEAVTRPSMRFVARKSEQQQSGLMLHRSRQLLVCQRTMLSNAIRGHMAELGMISAKGRNGTAELLEIIADEQDDRIPAAARFSLDVLARQYAAVRAEIVAIEKRIHVWHRSCEESRRLEEIPGVGPIVATALVAEVGDWKEFTSGRSLAAWIGLVPRQHSTGGKERLGRISKQGNRHLRWLLVAGAMAVIRYARQHGTKRPWLARLMDRRPIKVAAVALANKIARMAWAMMVRGEHFKEPKLLPAA

SEQ ID NO: 82124 - protein, 421 aa, unidentified
MNSLSTAKYTAFVGLDWADAKHDICLQAAGSEQREFDCFAHRTERIEAWAQALHQRFGGRIAVALELSKGPIVYALQKYDFLVLFPINPSTLAKYRQAFTPSRAKDDPTDAELALDLLIRHPERFKPLTPQSVPMRKLCLLVEQRRRLVGDKNRFVNRLCDSLKQYYPQVLEWFKQHDTVLFCDFLARWSTLTGVKRARKTTLRTFFKAHNARSEKLIEARLCAIQAAQPLTHDAAVISAHRLLAEILVEQLRVTLKAIDRFDEEIAATAAKLPDYALLFRPLPGAGPVMAPRLLAGFGEDRQRYGGADELQKYSGVAPVTERSGKKTRVHWRRQCPTFLRQTMVEWAGQTVKYSFWAGAYYRQQRAKGSSHQAAVRSLAFKWLRILYRCWQTRTPYDESKYLNALRRRGSPLLEHLGETM

SEQ ID NO: 82125 - protein, 399 aa, unidentified
MIGVGIDISKNKSTVSAIDDTGEIIMKPQEFKHSQNELNKLIQWIKDQEDTVFVVMESTGHYHYPVLKKLYEEGIYVSVVNAYLMKKYGDIEIRKAKTDKKDAIRIAKYAIEKRFSLKKYEGEDEKYNDLKFLSRQYNQIVSIRVKAKIQFNNLLDEIMPGINKILTRTTGNSSKILYDFVEKYEHFDNIKRKGEQKFIKEYSAWSKKKGYRNGAIKALKIYELAQNSITTRSANNSTYIALRNCIKILRETEESSNSILTQMQTIAYTLPEYKIVRELKGVGDKLAPRLIAEIGDVRKFTSAKALNAYAGNDAPPHQSGQFEGTKRHISKRGSSSLRKVGYEIMMALKVTKPTEDNAVYEFMIKKESEGKAKNVAKMAALNKFLRIYYTRVMNLYKTL

SEQ ID NO: 82126 - protein, 360 aa, unidentified
MDKYIGFDIDSKKTVACVVQKGQKDRFTTLKTDIEIMKKFLQQQHKLGEKLHLTFEVGGEAGYRYDALVDLVDDITVSNPTKMTWIYRTSKKNDRIDARKQAILLSIGEVPKVHIPSKEVRQWRVAIQHRRKIVSKICQVKNRIRAILKANGFVKSAQSGSWWKVANRLWMRSFVAEMEIKAEELWRMNLADMLEVLDLLESQLKGVTKYLDGYLKKHPGGKLLMSIPGVGPRTSEAVLAYTDDIKRFKKGKQYCAYFGLTPKLDESGLTKRLGHISKQGPSVVRWLIVESAWRVVKKSPSFRAFYERVMCGQKNRKKIATVAVARKLLSIMRAMQMTGELFNGELVCRECGFINVKNSA

SEQ ID NO: 82127 - protein, 306 aa, unidentified
MKSYLFIGIDISKATLDVCVLSPSDITDSHHHPFCNNAKGFSQLMKWLKQNSEGRAPEEWRVCMENTGVYSFELNFFLHEKGIWQSMENALQIKRSMGVVRGKTDKADSKIIAMYAYRFIDKLKPYVLPTSTLLRLRALFAQRERLVGMHSQLLVASQSIKGYPKELVKDIQDQNEMLLKNLTVQIKGIDKSIKECLQEDKDLQRKSKLIQSVPGIGQQTAAYLLIVSQGMKGFTSARQFACYSGCAPFAHQSGASIRGKTKVHFIANRKMKVLLHMAAMNAITFNDELKAYYQTLGINIILPKIK

SEQ ID NO: 82128 - protein, 340 aa, unidentified
MEIAILGIDLGKNSCSIVGLDAVGAVVLRRRMRREGVIKLTGKLRRCVVAMEACCGAHHLGRDLRAQGHEVRLMSPEYVRPYVKSQKNDDRDAEAIAEAATRPTMRFVELKSEEQLDMQTLHRARDRLVGERTALINQLRAILLERGTTVAKGRRKLEQHLAGLNPPGGLSQRMCVLIEDMRRQWCELDRRIAEFDEELAEWARNEEAARRLMTIPGIGVLNATALTAAIGRADSFARGRDLAAWLGLVPRQVTTGGKPRLVGISKRGNKYLRKLLIHGARGALPTLLESATPLGAWLRGLLARMHKNAVVVALANKLARIAWVVLRHNETFCSVDSATA

SEQ ID NO: 82129 - protein, 404 aa, unidentified
MISVGIDVSKGKSMVCIMKPGGEVLKTPFEMQHTMEEVLSLAALIKSYDEEVRVILESTGYYHLPIVTVLLEKGIFVSTVIALRMQKFCSQNIRRAKTDRIDSINIAMFGICYWDELNQVMPPEDTYRELKFLARQYYQSTAMLIKAKINFGVLCDQVMPSIQKIIHEYRGTQKITGIVKRYLHFDNILKMSKNRFKTDYCKWAQKQGYRNCEQTAEKLYVAAQNGIPVLPNSLSTTIVITEAIRVLHEVEISRNTILAQMQALAKTLPEYQVVREMSCIGDVLAPKLIAEIGDIRKFRNKHSLIAYAGIDAPPYQSGSFNATERHISKRGNRYLRKTGFEVMQSLIQHKPAEEPVFAFIEKKRSEGKCGKEAMIAGLNKFLRIYYGKITELYNSIEEQLNSDN

SEQ ID NO: 82130 - protein, 324 aa, unidentified
MIDGILGIDVSKNTLDVSISSCGKVRTKSFANTSDGWHHLLDWLVAQKIRRVHACLESTGRYSLGIACALYEAGHIVSIINPAQVRDFVRTKLGRNKTDGVDASRIREYCELFKPLPWAPPSEAHRRLGELQTIRSGIIAGLTEWKNRKNSGIVDAEAQALADATILHFTSQIGAVDKAIALAIENDSDLRSKRDLLLSISGVGDTLAGVVLAELPGPDVLHSSGEVVAYAGLNPRQHQSGTSVDRATRISKIGNAVLRAALYMPALSAMRYNPAIVALVTRLKSRGRLKPKQIVVAAMRKLLVLCFGVLKTGKPFDPAIAMGC

SEQ ID NO: 82131 - protein, 336 aa, unidentified
MYSGIDLHSNNSVVAIIDDADRVVAQKRLPNDITKIVGFLARWQDEMAGVVVESTYNWYWLVDGLQDAGLHVHLAHTAAIKQYEGLKHSGDETDAQHLAHLLRLGILPTGTILPREHRAVRDLARKRMQMVHCCTTQVLAVENIMARQLGGRMTSNQIKRLTNDAIDKMPLATDVGLAMKTNIAVIATLQSQIEVLEKRLQECVKPRPQYGLLTSVPGIGQTLATVIFLETGPIDRFAEVGNFASYARCVDSVLISNRKKKGEGNVKNGNKYLAWAFVEAANFAVRFCPEAKRFYERKKAKTNNIVATKALAHKLARACYHILKEGKPFDVTRCFA

SEQ ID NO: 82132 - protein, 412 aa, unidentified
MLKIVYPICCGMDVHKSFVVACIATTNDHGVTTYKSKRFSTFTGDLRRCAAWLSENNCKDICMESTGKYWIPIYNILEATCNIVLAHPKYVKAIRGKKTDKRDAKWIADIFKHDLVSGSFIPPADIRQLRDLVRYHWKLTNFNVGEKNRAQNCLTVSNIKLDDVFSDVFGKAATAITTRLLESNEPFDVKPYLTKNIKKPIEQIQAAVDGKMCAEQAEKLRIIRSHMDSLELCRLNLESLILTTAEKYLPQLNLVMTAPGINSFSAIGIISEIGVDMSVFPSSKHLCSWAGLTPQNNESAGKKKTTRISRAGAYIKPLLVQCALASLKSRRYPEVQARYISLKKRRGHKKAIIAIARMLLTSIYNMLKRNEAYNPDLYRKADRPPTHREVSVEEAVFILQRQGYLVTAPTVT

SEQ ID NO: 82133 - protein, 329 aa, unidentified
MKVQHIIGADLSKKSIDLVCHLLKSHVQVQNTVTGFKDLIQWMRQQKISPSKTIIVMEHTGLYSYCFEHFLHEHQIPFCKVNALAIKRSMGVVRGKTDKLDAVRIAAYGYEKKDKLAVDVPTSDALKRLQMLHSTRERLVKQRASLTCAIKEYRHIGITEKDLIMQTQLQVIKSFDRQIEKLMTEIEIIINEQQPLKQSFYLLQSIKGVGKILALTAIIKTSNFARFANARKFACYCGTAPFEHSSGTSIRKKSRVSHLADKQMKTLLDLSAKSAIQYDKELREYYLRRTNDGKSKMSTINIVRNKILYRMFAVIKRQTPFVENYLQAA

SEQ ID NO: 82134 - protein, 319 aa, unidentified
MKQTEHNRKAAGIDTGKDRLDIAVHGSSERLAVANDGAGHERLIAWLEARRVRRVGIEASGGYEKTVVAALRLAGVQVIVFQPKQIRHFAGFQLLRAKNDRIDAALIAEATASHKENRQAPDPRLEGFAQALTLIEQITEDIARWKTRLEGCRQAEQRAWVGAEIKRLVRARDIERARLLQQIKGHQDLAERYRLILSVPGIGLPTALTLLIRMPELGRVTREQVAALAGLAPFDHDSGRFRGQRRIAGGRGRVRKALYAAAFPAAQRWNPQLVALYNRLKTNGKEHKKTLVACARKLLIMVNAVVTRGTPWIKAGQPA

SEQ ID NO: 82135 - protein, 352 aa, unidentified
MHQGIILSVDYHDRVCVIRWLDPRTRTEIVFTEVPTSAEALSDFVDQAQKAAGRRRVVWIQESTTGWARVKDLLGDRVEFQLANVVQMPQPPKARRRKTDKTDTARIQREYLNGRLPLAYQPPAWWRRVHRLVSFRENLVARRTALRNWINRYLAHETWFDRTGLWTTTGQKQLQALRKQLPAQDTFIIAQKLEELKQLKEQLGVTIKQLLAVFQECPEAQRLDAMPAINVVSAVSIVARIGPVQRFSSVDCLIASSGLAPGIHESDQTRRDGHSGGGGTDRHLRQYLIEATTWAHKARRYAVAYGRVRRRKGSKVARLGVARMLLGSIYKMIKEGVEFEVEPTAAVAAAGS

SEQ ID NO: 82136 - protein, 343 aa, unidentified
MQTITTIGFDIAKSVFQVHGVDSAGEVVIRRQLKRRYVLAFFQKLSPCLVGIEACASSHYWSRELQALGHSVRLMPPAYVKPYVKRQKNDMADAEAICEAVTRANMRFVPTKTPEQQSCLMLHRTRHLFIRQQTAVINSIRAHLAEFGIVAPVGRKGVTELLHVVADPSDKRVPEVARACLAALGTQLLRLKQQILEFDRLIMAWHRSNQTSKRLHYIPGVGPMLATALVASVADPRTFRSGRNFSAWIGLVPKQHSSGGKDRLGSISKQGDRYLRSLFVAGALAVIRYAKIHGTKHRPWLTALLGRRPTKVAAIALANKIARMAWAMMAKGERYKQPVALAA

SEQ ID NO: 82137 - protein, 351 aa, unidentified
MLIIGVDYHPSFQTIAFLTEETGECGEQELNHSDGEAERFYQELKQRGVRVRVGLEATGYSRWFERLLAELGFEVWIGDAAEISRQRVRKQKTDREDARLLLKLLLENRFPRIWVPSPENRDLRQLLWHRHRLVQMRTRIMNQLQAVAMNEGYRWKKKLFSEQGRALLEKLSLAPWASRRRKELLELLDQLDPKIAELTAAVVQEAKQRPEVLRLMTHPGVGPVTGLAYVQVIGTPERFPCGKQIGSYLGLIPCEDSSAGKQRLGHLSKQGNALLRYLLGEAAQAAVRCNPHWRRRYMHLAMRRHKNIAKAAMARKLAVRLYWMWRNGWDYSQLVSFGSHAGKLATGHGVK

SEQ ID NO: 82138 - protein, 346 aa, unidentified
MICLGVDQSKHFSQYTIGDEKGKIFKRVKIGNTSEDIKQLMDSLPQGPKTAALEASRHWGWLHDELEKYVDQVSLCNPLKMKAIAYAKIKTDSIDSETIYHLLRTDLLPICFVPPKEIREIKDQLRFRGFLVMLRVRVKNQIHTLVDRNHVLQPGQRPTAELFCKKGLQCLREVQLPERQRAILNEYLALFEQLNKQIQTGNDWVKELYSQSPEAQQIDTIPGFAIFFSVLVRYEIGDIHRFRAADKLCAYAGLVPSTYASGNRCFQGRITKEGNAYLRWAAVEAAQQAVKSNPVFRELYERIRQRKSSKIARVAVARKLLEWVYRVWKTGKTFQELISQATLMAA

SEQ ID NO: 82139 - protein, 428 aa, unidentified
MSEPSVASQPEPEFAAFVAIDWADKRHVWVLQAAAGNRRESGELEQTPEAIEVWASGLAARFGGRPIAVCLEQSRGALLYALTKYQHLVIYPVHPTMLSKFREAMYPSGAKDDPRDADLLLDILTQHRKRLRPLKPDTVETRTLQLLTETRRVLVDEKTSQSNCLTGTLKLYFPQMLDWFDAVDSPLVGAMLKRWPTLEALQKARPDTVRSFFTAHNCRSLELIQRRLDQIRAAIPAVHDKALIEAAQAMTKVLVELIATLREGIASFDRQIAQAVAAHPDFAIFDSFPGAGPALAPRLLAAFGSQRERYQSAADLQTFSGIAPVTVRSGKSQWVHVRWACPRFLRQTFHEWAAHSIGFCDWARAYYQQQRGRGKDHHAAVRALAFKWIRIAFRCWKDAVPYDDARYMQSLRRRGSPLTAALAKPELP

SEQ ID NO: 82140 - protein, 409 aa, unidentified
MDVLYARCAGLDVHKETVVACVRLAQGGAVHTEVRTYRTTTAELLALGDWLTASGCTHAVLEATGVYWKPVWHVLEATVELVLANAHHVRAVPGRKSDVNDATWLAGLLAHGLVRGSFVPPPAVQELRELTRTRKQLVRELGQHVQRVEKVLESANIKLGVVLSDVTGVSGRRILAALVAGETDAARLAALADSRVRATPQALQEALHGRITAHHRFLLREHLATIDHLHARLAAFDGQIAVVLEPFRRATEHLVTIPGVSQLTAQVLVAEIGIDMTRFPTVGHLISWAGLCPRLDESAGHRRSRRVRKGAPWLKTALVQAAWAATRVRGSYLQAQFQRLKARRGAMRAAVAVAASILTAAYYMLRDDVPYRDLGGAYFEQRDKAKLARRLARRLTDLGYPVQLAPMPA

SEQ ID NO: 82141 - protein, 355 aa, unidentified
MSDEKYIGMDVHQATISVAVMDSQGKIIMESILETKASTILDFFAGLRGTLSVTFEEGTSAAWLYDLLKPHVAKLLVCNPRRNALLKQGNKSDKIDACKLADRLRLNDLKPVYHGETGVRMLRELARSYLTIVKDLTRVMSRVKALYRSWAIPCTGRDVYYTRHRSQWLDKIQEPGVRCRAEQLYQQLDMLQHLRQQARRALLAESRKHTITAKLRQIPALGPIRSALAVALIQTPNRFRSKRQLWTYSGLGLETRDSGEYYYVRGEVRRRKKQVTIRGLNKDYNHDLKGLFKAAAIRASVLPGPFQDFYQRSLAKGIKPTMVRLTLARKIAAITLTLWKKGENFDVEKLKSQAA

SEQ ID NO: 82142 - protein, 356 aa, unidentified
MNALHYIGFDVHKKTISFCVKTAAGEIVEEGSLLAQRGALRQWVSVRPQPWRGAMEATLFSGWIYDTLKPYGEQLEMAHPAKMKAISAGKKKSDTIDARTIADLVRCNLLPACYVAAPRIRELRRLLRYRSLVVSEAVRMKNKMAGLLMETGALYVKEKLHRKKYFASLLEELEEVPESVIDLLRLSRGALEMFQSTQKRLVRELLADPALAERVERLMTIPAVGEITALTWALEIGDPHRFRSGSDAMSYCGLTAALKSSAGKQQRGPISKQRNHWLQSTLIEAAKLAPRWNPQLAALHARELERGHRNRATLAVARKLVTYLLAVDKSRQSFHLRALGPDDQGEKEGTQKIKTA

SEQ ID NO: 82143 - protein, 509 aa, unidentified
MKTKRSKAKKGAAKKTITVPCAEGAEELAVLRPDAGGIDCGAEAHYVSVPPDRVAAGQPSVRCFSAFTEGLDALVDWLKVCRVNTVAMESTGIYWIPLYQKLEAAAIEVYLVNARHVRHVPGRKSDVQDPQWLRQLHRFGLLNASFRPEDLVCRIRSLHRHRDNLVSASGSEIQHMQKALQQMNLHLHHVVSDITGETGLRIIDAMLAGQHDPKELVKLRDRRCSKSTPKQMQAGLVGDYRAEHLFVLKQSLEAHRFYEARIGECDCEIEPLLQELAKKVEAASARLKLDQPESREASTPEVQPPVMTKLKRELREEEKARQEAKAAKRKRKPKANEPRIELTGLLERICGVDLTQVVGLNVATVLLIVSEIGVDMSKWRNAKAFCSWLGLCPANKISGGKVLDSRTRQVVNRVADALRLASQSVGRTDTCLGIFYRRKKAHLGAPKATTATARKLACLIYHLLKTKKAYQEPDPALYQQRLHKSALNKLQRQAAALGYTLLPTTPVAA

SEQ ID NO: 82144 - protein, 400 aa, unidentified
MISVGIDVSKGKSTVCLLKPYGEIVCKPFEVQHTEEDLEELANLLQKLDGEIKIVMEATGIYHLPILTFLLEKGFFISVINPFMMKKFSRNNSLRGAKNDRLDSVMIASYGIEKWYKLKKYEVNARIYTELRLLGRQYHRFMQTHVKHVQELTHLLDYTAPGLKTMFNSWTEHSNRDKLSDFVEKFWHFDLITSLSREEFVEQYLLWAKEKKYHQSQSKAEKVYDLASNGIPTLSSHTPSTQMMIQGAINVLRIVNNSLYHILSRMKELAKSLPEYATVRSMGGVGDSLAPRLIAEIGDVRRLHNGHALIALAGIDPPPYESGQFVGTHRKISKRGSPILRKIGFEVMRVLKSHKEPEDNAVYNYILKKEAEGKNKKLSKIAGLNKFLRIYYARVMEVYQ

SEQ ID NO: 82145 - protein, 356 aa, unidentified
MVKTRIASNDRFVKDFEDHPFCIGIDVHKRSYHVAIRRTDGKTVTWVCPADPEGFVEQIRRLSIRVSTVAYEAGPTGFGLARTLRSAGIETLMAAPSRIPRAVSVGAKTDRLDCLRLADYAAKGMIRPIAIPTPQQEAQRSLERRRHDIVDSLRRCKQRIKGFLLFLGLPEPKETERWRRGADAALLAMPLHPHARLTMKSHLRELAFYQNELSTVEEELRQMAQEHGDVLKCLQSVPGVGEVVATTFILELFDPERFRRAEEVASYLGLAPMVRHSGEKTPSGRLRPAGQTRLRSLLIEAAWMWRQYDPHARNLYNRFLGRMGIAQKAIAAVARKLAVILWRLYVERRHYRSVLV

SEQ ID NO: 82146 - protein, 358 aa, unidentified
MEELVMALDHRWCVGVDLHKDTLTACVFCGCCGEVSFQKIACRCRRQIAEYFAALPRPHTVALESVGFYRWLWEMLEPIVEELVLADATQARALAGRRLKTDREDALNIAQLLAAGRLPRSYAPPIEVQWLRDLTRHRNSFSRQHARILHRVKSIMNANNRPGPARMQSDGLIRYLKAQGEKLPARHVEMLWQCVDALTLTERQIAHTERTIGQVVRRESFREVYGILTSFPGVALVTAATVMAEVGDFKRFPDTKAIGRYAGLNPRVYASGGKQRMGHIAKTGSPDLRWVLQQAAWTAIRYDEHVKRIFLRIAKRAGRKAAAVAVARKLLTWMHIAAKKGEPYRTPGARHTVLPGAA

SEQ ID NO: 82147 - protein, 401 aa, unidentified
MKNLLCQNLGVDVSKDSLDVVFSTLDMKRQVRVKASRKFANTPAGIRQLQRWMESKRAAEVELRILMEATGIYYEQLAWFLHQQGYQVSVILPTKAKRYLQALGHRSKNDSIDAKGLARMGLEQLLPLWQPLSQDIYQLRLLTRQLEDFSNQRTVFLNQLHALHHSAFAVKQVEKSLKKMVRTLEKSIQELEEAIQELICQDPLLAERVEKLLAIKGVGLKTVAVLLAETNGFATFEKQGQLVSYSGYDVVENQSGKRSGKTRMSKKGNAHIRRAMHLPAFSVVRYKEPVFAALHERLLARGKTKMQAYVAVQRKLLILIWTLWRKNQVYDPLHDRRHQKQKEAILSLEAGASLSGVSEADENKVAPLSRATQDEHPAPVGQELSFRLCEDKKNSTKILDF

SEQ ID NO: 82148 - protein, 393 aa, unidentified
MYLVGIDIGKLKHSFCLLEKETGEILVEPVFFENSRDGFNALLSSFKHLPQKDILIGMEDTGHYNLALLKFLLDRNYQVALINPVATDLTRKMQGGISKNDKLDTLTICDVLSSNQRVKSYRISKYSSFDLYEQKLLTREHHNLKEEENQLSNRLQKCIYVVFPEFNSLFKSKCGIVYMNILKEFGSADAIAHADIRTIRKCFDTGRGKNIALTAQELKEAARNSIGFPSSSETTQIKHLVARIELIKEQIAEIDKKIEEFSLQNNSPILSIPGISHFSGTSILAELGDIHNYSKPSQIIKFAGVAPLTYESSQFTAQHTAITKKGCKYLRKTLYQIITPVIQYNPVFRKFYLLKIAQGKGHRCAQGHCVRKLMRVIYHLLSTGTQFDPALLR

SEQ ID NO: 82149 - protein, 379 aa, unidentified
MNGPIYEQSVIVGVDAHKYSHTAAAMDAWGQEKGRLNFTNDSLPDCLSWLKTLGRREDVIVAVEDANSYGCHLVAALAGQKFAVRSVPAVLTERDRRHSTQRDKSDFRDAKRVAKVILSKYEETLPVIASLATSAELAIATELNLLLNERRDVVKECTAIKNQLHSLLHQYYGDHYADEFSKAFNKQAMIFYQANLAQAISVDSLSASKAGKALIAESILRRIQRLKLLQEQSAVILKQITKIGETSKPVVALHENIHGCGLLTAGAIMAELVTIRRFGGRDKLAKYAGIAPTLKSSGSHHRLYTNPFGNRLLNKALHTIALSQIAIKGDDRGKIYYRKKLKEGKTKLWALRCLKRRLINLVFRILKQTEVGSAETAIS

SEQ ID NO: 82150 - protein, 360 aa, unidentified
MGEITRVGVDLAKRVIQVHAVDATGRVIAAKQLQRDGFTAWCAQLPPGCVVAMEACSGSHHWGRRLRAMGMEVKLIAPHFVSPYRLSGKTGKNDAADAAAICEAASRPSMRFVPVKSVEQQSMTALHRLREGYKEERTACINRIRGLLAEFGLVFAQRPEVLRAVLSEVVEDAANELGAVARMALQRAHLHWIELECHIAWCDERIAMHVRNDEQAKAAAQLCGIGPVTASALVATVDDFKQFKNGRQFSAWMGLVPRQNSSGGKAVLGEITKRGDEYLRTLLIQGAKSAVFTAHRRSDRLSRWIVQLRERVGWQKAAVALANKHARILWSMLVNGQSFDPEHVPTKHLMRPTAALPAAG

SEQ ID NO: 82151 - protein, 338 aa, unidentified
MKNAPGFDIFCACIGLGIDVSKASLELVGIENERVWRCELGNNESEIDALAECLKTGRYQGKIVCESTGHYHLLLGLVFARYGLDLRIINPLQSSKHQKARIRKTKTDRVDGYVLATMCETERDLPKAAQLQPKQVLMRLKQGQLHALDKQIQRMSRSTATYVETYEKLGLATDTSAEMLQQVLTQLKVAKRQLQKELEALFIACAQDHEDIDRIRALPGFSPMVAGLVSSVFDRGAKSDRSWVAYAGYDISVRESGTWKGKGRLTKRGNSYIRKRLFCAAWGAMMHYPEVRRYYDSLKAAGRNHVEALCIIARKLLRIAYVVLVKDKTYDAKIAFPG

SEQ ID NO: 82152 - protein, 355 aa, unidentified
MSHWLIPSKTNFYKSMKKVFIGIDFSKLKFDAAIYLFDTKEFVSNDEFENNPEGYLAFMAWVNEKAVCKKSALLFCGEHTGYYSYNLPIALFEKGYDIWLTSGLDIKLSLGIKREKTDKLDAQAIALYSCRHVDKFIAFQPVSEAIVAIKDLLAYRNRLVEIRKMLSTASGELNRVRKTDSSQFICQESKDQIKDLDKKILACEKRIKAVIKQDTVLSVNYKLMTSIKGIGLVNSVLIIVATGNFTLFDDPRKFGCYAGVVPFKHKSGTSVNGKTRVSRLANKAIKASLTLAARNSIRFDPQMREYYIRKKAEGKNDWLILNNVKNKLVHRVFAVVRTGKEYDLNYSNQLKSKAA

SEQ ID NO: 82153 - protein, 491 aa, unidentified
MVTLSDPDLKECTYKDNLALQDTFLSQLWRELMKSKKQSGATRTHSKKRVSNLLKQINLYAAGIDIGSSEHFVAIPEGLDDRPVRSFSCFTGDLERLTDWLVRIGVSSVVMESTGVYWIPLFEMLEERGLEVLLVNARHVKNVTGRKSDVQDCQWLQQLHTYGLLSGAFRPTEEVVSLRSYMRQRSTLVRCCASHIQHIQKALRHMNLLLDNVVSHVTGRTGMDIIRAILGGERDPNVLAEYRNGRCKRSREEIAQSLHGNYRAEHLFSLKQAVSLYDFYQEKIVECDHELEEQLKCFEPKADVEEIPVASSRRTQQAPAFNAREYLFQMAGVDLTQIDGISETTALKVLSETGVDMGRWRTEKHFSSWLGLAPGNKVSGGRVLSSKTTPTANPAAQALRMAAYTLSNSKSYLGAFYRRLRARHGSPKAITATAHKLARLIYSMIKRSSEYVDKGESYYEEQYQGRMLKNLKQRAKQLGYSLQPENQEVTE

SEQ ID NO: 82154 - protein, 431 aa, unidentified
MDDITRFEWFCKLRSQIRGSDNHLIVGIDIAKDKHHAFFGTPKGQSLWRRLIFTNDLTGFNRLIEQANTLMTQHDLTSAVFGMEPTSNYHKPLIHWLTEQGYLVVLVAGKAVKDNRELLDGRWDKNDTKDSANVADLVSQGKCLFYENPEADMLALRNLLSIRRQLKKETHRLRMRIRNGLLAKYFPEMDRHWGSCMTENLAIVRWYLDPRKIATTDFDVFVRHVTNTDRGIRQINRLRKIHEAAGRSIGLPVDDAAEYEAGMQVERFKAVENELEQVMDQIKNICRKLPSYKLLLTIPGFGPYIAPLVLSALANPMRFKSRKQVIRLAGLDLNASRSGKKSQEKVPVISKRGDAELRYGLYQAALIASYHNDAFRRILNRMLEGRQGERGIRTKARVKIAAKMLVIAWTMLKKNEPFNPNYLSAEPDVAR

SEQ ID NO: 82155 - protein, 444 aa, unidentified
MLKSSRETKYEIENLGDVIHPVCCGLDIHKTWIYAAILIYNFEKKQIHWITTRVTSFKKKLDKLAKWLIVNGCKYICMESTGQYWIPVFDALEDAGLKPIVAHPKYLKVLSGKKSDPNDARWIAKAFACGRVVASFIPPKAIRNLRSLVRFMIKISHEATSNKNRARNCLTSLGLKLDDVFSDVFGKSSRSIINYIIAHPGEKFDVAPFVDKACKTPFAMIQDSIDKAIDAKQDAGTLLKLRKALERLDDAEKDIQELKGNITQQMGAYKKQLDLIRTVPGFDTDPFTAMRVLIEIGPDMKVFPTMKHFCSWAGVCPHHDSSAYKVKGRRISRSGTYLKPLLVNIAKAVVRSKNHPEISQRFNRIKNRRGYMKAIIAVCRMFLTAIWNILSKGEPYRADGFMPVNNGNNKAISISQALAYVRSRGYAIIDDNSGALTTTGSQGT

SEQ ID NO: 82156 - protein, 479 aa, unidentified
MSKQKQLEKTEKAKPTKGKRGRRRRKGMCLEDRPIQEPNAAGIDIGAREIFVAVPGDRDEDPVWVFSTFTESLQEMAQWLVQCGITTVAMESTGVYWIPPYDILEQHGLQVCLVNARNMRNVPGRRTDWHECQWLQYLHSVGLLRAAFRPEGEVCAVRSLMRHRNDLASMAHQHVQHMHKALTQMNLQIQHVISDITGLTGLAIVDAILEGERDAAVLAKLRDWRVKASEETVRQSLVGNWRPEHLFTLKQSRQMYRNYQEQIAACDKEIEQLVVKFEPRVNPAEQPLPPDRKQKQRRGKSKLVNPKTGFDVRAESYKLFGVDLTQVPGLAWLVLVLFSEVGRDMSRWKTAAHFVSWLALCPDNDISGGQVLWRGTRRRHNRAGQLFRLAAHGLHHDQTPMGDYLRRMKSKLGPKGATTATAQKIAIIFYTMVKNQAEYDATLWAQRDAQREKRFKEKLQRQAQRLGYKLVPLEEKPAA

SEQ ID NO: 82157 - protein, 419 aa, unidentified
MNEDGNTRGTTRRYVALDIHKYYCVVAGVDREGRVLFQPVRVEHADLEGWLKKHLCSSDQVVIESTTNAWHVYDLLAPLVERVVVANPIRVKQIAQARVKTDIRDTLILARLLAANLVPDVWVPPVHIREMRQLLSQRRQFVETHTQIVNRMHSVAHRHHLKHERGKRFNEKTTGWHKDKTLSSLEQFQLQLEMENLTYIEKQIERVSKEVRKMCHQKPWADSMTYLMQLPGFGVITAMTVLAAIGDVQRFESPKHLASYSGLTPGLEQSGTKNRGKGITKEGRRELRWALVEAAQMAVKSDPVWKTRFQEMLKRMHRNQAIAAVARRLLELVWYVLTRRQPYRHFNQERIAYKYLTWAWQMDEAARDGLTRQQFARYYLMRLGIGHDLTRIALNPKHPRRISSEAELLALRPELKHIE

SEQ ID NO: 82158 - protein, 337 aa, unidentified
MPALTIGLDIAKNVFQVHGVDRHGKTVVQRKLRRAEVLKFFAKLESSLVGIEACHGSHFWARELTALGHTVRLLPTQYVKPFLLGGKNDANDAAAICAAVTRSGIHFVAIKSAEQQSLQSVHRMRQRLIQERTAKSNQIRSMFAEEGVIFAVGLPQLRKGVVELVNNPDARITALLRRLGSMYLEQLKALQQWLDELAAEIAEIFKSNEACQRLATVPGIGPVIATALVSSVGDPSQFRNGRQFAAWLGLTPRQKSSGGKTRLGGITKRGDTYLRTLLVQGARAVMHFVNRRDDRHSRWIKAVMQRRHVSIAAIALANKTARIAWAILTGNGCFRVA

SEQ ID NO: 82159 - protein, 407 aa, unidentified
MKHVVALDVSKGKSTIAIYDGYRQCEFEGELHHTRAEFERLHKRMAEITKVDGRAPDIVFEATGVYSKPVEAFLKDSGYAYCRMNPLEANLQMAKMRRHKTDLSDAHELAKTHFQVERKNTYIQDDYYEQMRAMTRYYDEVDEEMILLKSRMHSILHLSFPELEKLITPSSALFLNIVQLYPHPALLLDHSKTVIKNRLKANTRKNLSLTRAEAKASVLLEAARNSYPATKPNDIRCDQVRDYASRIADLMEKKDTLVKQMTELSEGRKEYLVYRSIPGIGDSTACRLIGEIGDVRRFKNAKQLNAYAGIDIMRYQSGNTQYRDRINKRGNKHLRKILYFMICAMLMAKGKTNHFVDHYYKLKKQPQRKPHKVAIIACINKFLKVTFQLLTHGILYDYESALPAQKS

SEQ ID NO: 82160 - protein, 317 aa, unidentified
MSFLGVDLSKETFNAHLLSERSEAKKVFPNVGKGFAQLVAWLRNQHPSDLHVCMEATGAYWEHLALHLHGLGYRVSVINPARIKAFAQSELLRTKTDEVDAALIARFCKTQSPELWAPPAPEIRVLQTLVRHYSHLKATRAQQSVYAQSSDSPVVAASTKEVIATLDAQIKEVERQIRKHFDNNPHLKRRRDLLTSIPGIGKVTASTLLAEIPHIDHFESARAIAAYAGLSPRHWRSGTSIHGRSRLCKTGNGRLRRALYMPALAAIRWNPTLQAFSDRLAAIGKHKLLIIGAVMRKLLVIAYGVLKSGVPFQEHYA

SEQ ID NO: 82161 - protein, 439 aa, unidentified
MNKRVYTAIGIAHVQIDKILAAREPDLQVVAGVDVGKTQLLLSLRWSDGRFDKPWTVANPEQIPDLIQSLKSLGGQHKLMVAMEPTGTYGDALRQALSDARIPLHLVSGKRAHDYAEVFDGVPSQHDGKDSAVVAELCALGKSSPWQWSPGDERCQRIGLMVDQMQAANQLKAIWLGRTEALLGRYWPEATRRLQLSSGTMMRALSHYGGPAPLAQDAAAPERLREWSAGKFKPERLGRILACAQRTLGVRQTPIDQQRVSWCAGHALAAHLEVGRCQYRLRRLGAEHPVIAVQGRTIGIPTACLLWNELGDPRQYHCAAAYRKAMGLNLKERSSGQHQGQLKISKRGSGPVRHWLYLSVLRLIRNEPVVRRWCRRKLRRGHTTKMSLITALMRKLSMSMWTVVNRDEPFDLQRMLGPAHSEQRAKKLTALKGGAAAIG

SEQ ID NO: 82162 - protein, 324 aa, unidentified
MLPTLGIDISKDSFHVELSVNEKLRHRKFSNHKEGFAELRAWLTKHKVAQVHACLEATGPYSEQLALYLHEQGHAVSVVNPAQIKAFGKSELSRNKDDRPDAGLIRRFCEKQQPPRWAPPPAHLRELQALTRHLENLNETRQQQQNRLEATSTKSVIKSLRKLVAHLGAEILRTEQQIADHIDSHPDLKQQCQLLTSIPGIGQRTAAKLLAELEGINQYQSARQVAAYAGLTPRNNRSGKLRGRTRLSKTGNSRVRKALFLPAIVARQHNPIVNAFCCRLAQRGKTKMQIVGAAMRKLIHIAFGVLKSGKLFDPNHELLLNPVS

SEQ ID NO: 82163 - protein, 309 aa, unidentified
MNEIYVGIDVSKDSLDVTALPSKEKWRYANDEVGIGKLVARLKKLSTLLIVMEPTGGLEAMVAAALAAEGINVAIVNARQIRDYARATGKLAKTDKLDALVMAEFASVIKPQPRQLRDEESEEIKATVSRRRQLLGMLTAEKNRMAIARKNLKPNILAHIEWLKKEIADLDRDLRRRIEGSPIWRVKDDLLQSIPGVGRVLSATLLAELPELGKLNRRQIAALVGVAPFNRDSGIMKGKRSVWGGRASIRAVLYMATLASTRYNPVIRSFYQQLLVRGKAKKVALVACMRRLLTIMNAILKYQRAWRYV

SEQ ID NO: 82164 - protein, 372 aa, unidentified
MAADKTRARVDGCKMNAIVAGIDLGDRESLATVLSPIGDVADRFTFPMNEEGYAFFAGRVPKNARVAFESTIMAYPIMRALRTRGYGDVTVAHPKTLAWIVRSKKKNDRVDSLKIAKLHMAGMLPESHLLDRDQQIVRDLLVQRVKLGVEIGRLKNGVIGYLKREGVYDSLLKSKDNFSVKRRVAIRGLKFEDKRDLVLGTMMDRLDFLEKQCAPLEDGVRENAKLSVDVKLLMSITGVDYYLASLTSSFIGEVERFPSDDHLASFLGIVPVSRDSADVKRRGKMTKDGSSIARWALSVMVDTVMQHNQPIGDYYQSAKKRTGSGKLAHVLTMRKLTRMLYHMLKARENWKWENPLLTERKMSRLTDGGDIS

SEQ ID NO: 82165 - protein, 352 aa, unidentified
MIIIGVDFHPEFQQIASVDTDAGEFQEKRLAHREEGENFYRALAGKKVRVGMEASGHARWFERLLSELQFELWIGDAAEIRTKRVRKQKTDRQDARLILQLLLEDRFPQIWVPSWENRDLRQLLWHRHRMVQARTRIMNQLQAVALNEGLRCKKRLWRERGRQQLESFRLAPWASRRRRDLLELLDRLNPTIVELTRAIEQEAEKCPPAQRLRTHPGVGALTALAFVLIIGEADRFHCGKQVASYLGLVPLEDSSGNRRRLGHITKQGSSILRFLLVEAAQVTVRSLPEWRSKYFHLAMRRGRKIAKVAMARKLAVCLYWMWRKGWNYEQLTKFGSHAGQPGNRHGVQSNTE

SEQ ID NO: 82166 - protein, 482 aa, unidentified
MKSKPEEKTKKAANHSTPHHWDEMNRKQRREMMRKIQSADLRLEVVHPNAGGIDIGNESHYVAVPPDRDSQPVQRFGCTTAELKAMADWLKQCGICTVAMQSTGVYWIAVFDILESAGLEVYLVNSRDTKNLPGRKSDVQESQWLMKLHTYGLLHNSFRPSQQIRTMRTYWRQRNDLVQSAGRHIQRMQKALTQMNIQLANVLSDISGVTGQAIITAILAGERNPRKLAELRDPRVQASQDEIARYLEGNWQEDLLFVLKQEQEGYEFCQKQMAACDEQLKQYLQQREDCSQGASLPEETRKGRLSMKKGNRPQFDLRADLFRMTGTDLTQIDSIDVMTAMTILSEAGWDMSKWATEDHFVSWLRLCPDNRISGEKIIGKRRLPTNNRITIALKMAASSLRKSKTYLGAQFRRLRTKLGAPIAIKAMAAKLARLVYRMLRYGMKYVDQGTEFYEAQHRKLQIKQLKWKAAKLGFRVVDAPAA

SEQ ID NO: 82167 - protein, 331 aa, unidentified
MNAVGIDVSKGKSMVTIMRPFGEIVSSPFEIKHTSSDINSLIELINSVEGESRIVMEHTGRYYEVLAHQLSEANLFVSTINPKLIKDFDNDSLRKVKSDKADAVKIARYALDKWQNLKQYSVMDELRNQLKTMNRQFGFYMKHKTAMKNNLIGILDQTYPGVNTYFDSPARSDGSQKWVDFASTYWHVDCVRKMSLNAFIDHYQNWCKRKKYNFSKSKAEEIYGKAKELVPVLPKDDITKLIIKQAIDQLNSASTTVESLRTLMNETAFKLPEYPIVMAMKGVGPSLGPQLMAEIGDVSRFTHKGAITAFAGVDPGVNESGSSTCLYVSAS

SEQ ID NO: 82168 - protein, 325 aa, unidentified
MQTQTIYTGIDISKSFFDVAVPNGEQYSYYKFSNDALGFEALLKVLCVGNQVLMEASGPYYLRLACYLDNRGIRVSVINPLVIRRFCQMRMSRAKTDKKDARMIAEYGKAERPGLWQPPQRHVIALQQMEALVSNLNKEYTALSNQLGSFISSGMLDKQLESTINKELIHKQVLINKLTEKMQQIAEAHYSAILVNLQSIPGMGKKTAMMLIVLSGGFNRFDDYRKLSSYIGLCPRIFESGTSVKGKSRICKMGMSRIRAMLYICSWSAKRCNKACRELYERLLAKGKAKKLALIAVANKLLKQAFAIATNQTKYNENYSKYICF

SEQ ID NO: 82169 - protein, 405 aa, unidentified
MDILIERACGMDVHKDSITACTMTPEGKEIQTFSTKTVFLLQLIDWIKKHGCTHVAMESTGVFWKPIVNLLEAEDIEFLVVNAQHMKALPGRKTDVKDAEWIAQLLRHGLLKASFIPNRYQRELRELVRYRRSIIEERARQHNRIQKVLEGANIKLGSVVSDIMGVSSKDMLHAIADGEEDPEKLASFARRTLKKKKDELELALRGYVNPHQRMMLKTILGHIDFLTEQIERLDQEVAQRVISDQEDIERLDSIPGIATRMAEQILAEIGTNIKEQFPSAAHLCSWAALVPGHNESAGKRKSSKGKKGNKYLKSALTEAAHSVGASKNYLGAMYRRTLARKGRKRAAVVVAHAMLRIAYYLLTRKEMYVDLGEDYFDKQKLGAIVRNSVRRLETLGYNVTISEVS

SEQ ID NO: 82170 - protein, 342 aa, unidentified
MNYYAGIDVSLKCSSIAVVDANGEIVREAKVATDPMVVIEWFRSYGLQMERIGLEAGPFSQWLYAGMKEADLAVELLETRHVRNAFKTMAVKTDRKDARGIAELVRVGWYRPVHCKSMDAQETRTMLAARKLVDQKLRDVEMSLRGLLRGSGLKVGKTTPTRFADRIKELVSGNATLQIIAESLLAVHQVLLREFKSFEKRVRIMARDSAEARLLMTTTGVGPIIALTFAAGIDDPGRFKKSKAVGAYFGLAQRKYQSGEMDITGRISKAGDAGVRTALYQAAHIMLTKPVKASALKSWALRLAKRVGMSKAKVALARKLAVVMHRMLVDGKPFNPAAGAAA

SEQ ID NO: 82171 - protein, 409 aa, unidentified
MKLLYARCAGLDVHQKVIVACVRIATDTGEGEHQLATFGTTVPDLVALSAWLTGYQVTHVAMEATGVYWKPVWHVLETDFTLILANAQHIRNLPNRKSDVNDATWIADLLAHGLIRSSFVPPAAIYELRDLTRTRKQLSRETAQHTLRLQKVLEDANLKLTEIVTDILGLTGRAILQALIAGEQNAERLADYARSPRLKASRAEFVAALQGRVTAHHRFLLKLHLDQITALEAAVRTLDARLGEMLAPFRHAVTRLITIPGVGDVVAQVIVAEIGIDMERFPSAGHLLSWAGLCPGLRESAGKRLPVRTRRGGWLKTMLVQAAWAAVRRPHTYLHAQFVRLRSRRGPKKAILAVAASILTAAYHMLKHDVPYADLGSAYFERRDKAHVANRLIRRLQHLGFTVQVAPAA

SEQ ID NO: 82172 - protein, 405 aa, unidentified
MIEPIVKRVAGLDVHKMVVVGTVLLDQEDGSIKQETREFGTFKRDRRQMCQWLKDQDVELVAMESTGIYWKSIYATLEKAQILTYVVNARHVKNVPGRKTDVSDSQWLAALARVGLLRPSFIPTNDLRELRIISRQRIKINQTLSAEKNRLNKVLDDAGIRLGGVASDIDGVSAQKIIEGIIDGKPVEELIACARGRLKAKTDDLRACLDEELSKRHIFLLKALQKHIQFLKSELEDIDAYLFAAMSPYQKQWEILQTLPGVDKVAAMVLIIEIGIEMERFGSADQLSSWAGMCPGNNESAGKRKSGKTRKGNQAIRSILCEIANAARRTKSQFKGKYESLVIRRGHKRTIIAIGHKILRVIFVMLKNEKPYFDPGIDYEELNVSRNAPRWLQALNKFGYLPQKV

SEQ ID NO: 82173 - protein, 344 aa, unidentified
MVTFGVDAHKRTHTIVAVDGRGTPLGQITVGTTSKDHLGLLRWAARFGAERRWAVEDCRHLSRRLERDLLSAGERIVRVPPKLMAHVRDSARTYGKSDPIDALAVARAAQREPDLPVARLDGPDRELRLLVDHRESLVAERTRLICRLRWHLHELDPGWEPKARSLDAQRTLDEVQARLQQQTGVVARLARDLAHRCAELTAVINALEKEIAQLVEKLAPALLALPGCGPLTAAKIIGETAGVDRFKSRDAYARYNGTAPLPVWSSNKARHRLSRTGNRQLNAALHRIALTQARWHPPAKALIDRRKNGGNSGREAIRILKRRLSDAVFQALLHDQTHALTPAA

SEQ ID NO: 82174 - protein, 347 aa, unidentified
MKEQNNRSEFTIGLDLGERRHRFCALNGKGEVVEEGTLGNDRVSLGRLSARYRGALAVMEAGAHSPWISRYLERLGWEVIVSNPRKVRAIYQHERKSDRRDALMLARIGRMDRALLYPIHHGSEEAQQDLLRIKLRDSLVRARVALINSVRFSLKSLGYAVRNPSSERFHKVAMEPLPEGVREMIAPSVQALAELSARIAVLEREISVLARTKYPQTLWLQQVPGVGAITALYFVLKIEDPKRFKNVRAVGAYTGLCPRRDQSGESDPQLRISKRGDAYLRRLLVSAAQYILGPFGPQSALREYGLRLAADGTPRAKKRAVVAVARKLCVLLLSLWKNQTPYQPYPA

SEQ ID NO: 82175 - protein, 350 aa, unidentified
MVTIGSDPHKSSHTLVGVDGNGRKLAEQTVKALPEGHLEALRWASQWPERVWALENSRHLVRRLERDLLVAGEAAVRVPSRLMAESRKKGRQRGKSDPIDALAVARAALREPGLPVAQLEGVSREVRLLVDHREDLVGDRSQMQNRLRWHLHELEPGYRVPAGALSRVATLNRLGVLLAGHSGTVAELARELLGRIRELTVRIDQLESQLGQLVRPLASSLLALQGCGVLTAAKIIGEVGNISRFRSKAAFARYNGSAPIPVWSGNDDHHRLNPGGNRQLNAALHRIAITQARSSGLGRAYLDHRLQEQDTKKEAMRALKRRLSDEVYGRLLTDERTRLSDRETPDAQAA

SEQ ID NO: 82176 - protein, 393 aa, unidentified
MEVLYLRCCGLDVHKETVVACLRVVSGGKVDTNVRTFETTTAGLIALSEWLAEKGCTHIAMEATGIYWKPVWHILADGEFELILANAAHVKNVPGRKTDVTDAAWLAELLAHGLIRASFVPDTQTQELRTLLRTRKQLVREKASHILRVQKTLEDANIKLDSVITDVMGMSGRAMMEALIAGESDPGKLARLANYRLKTSQEKLREALRGRVTKHHRFLLRLHLNQIDALDAAIATIDRQVEAGIAPFRAAVEQLSSVPGIRDIGAQVIVSEIGTDMSRFPSEGHLISWAGLCPRNDESAGKRRSNRSAKGCPLAQDHTRAMRLVGCAQERQLSAGPILAAQGAARPEEGDHGRRCFHPHRNLSHAQGWNPVSGPRLQSLSEPIQRPADQPPD

SEQ ID NO: 82177 - protein, 368 aa, unidentified
MQSVCAFVGLDVHKETISVAVADVGRAGEVRHVGTIKNDPTAIGKLARSLARRHGVVEFVYEAGSCGYNVQRQLSTMGMICRVCAPSLTPRKPGERIKNDRRDAIILARLHRAGELTYVWVPDALHEALRDLVRARHAAGQDVRRDRIRIQAFMLRCDLRFEGKAWSRRHRMWLCNRTFAHPAQQIAFQTYLNALEHDEARKAGVEEQIRELLASSPWAKQMQALQALKGVGPIVAATILAEVGDFSRFAHPRQLVAYFGLAPGEHSSGGTVRPRGITKAGSSIARAVLCEAAWSYRTTPKVGQWMKERCPPVSQDIAALAWKAQLRLHKTYRKLTARGKRSVVATAAVARELLGFIWSIGQRVPLGA

SEQ ID NO: 82178 - protein, 430 aa, unidentified
MKSNTQNAKIEAITEKTLVLGIDVGSETHYARAFDYRGIEYSKKPFKFSNTEAGFVTFKEWILDLKDRHEKEKVVPGMEPTGHYWFNLGKFLQDNEMKPVLVNPHHVKKSKELDDNNPTKNDRKDPKVIAGLVREGRYMIPYLPDGVYADLRTASNIRFQLQAELTRIQNRISRWFNIYFPEYKTVYGKPDAKSGMLILKAAPLPEDILTLGIDGVNQIWRDAKLRAVGKARAKTLIEAAEHSIGSKEGTVSARMEIRMLLEDYESKNMRLQEVMVLIEELVKEIPMAEKLLEIKGVGIRTVSGFLAEVGDISRFNNPKELQKLAGLALVENSSGKHKGKTTISRRGRKRLRYLLFEVAMSLVAKNPEFRELHNYYTARRLNPLKKMQSLMAIAAKLIRVFYAMLTKDVDYDPKKMISDIKRPTVYLQAA

SEQ ID NO: 82179 - protein, 376 aa, unidentified
MQNDITLFVGLDVHKDSITVAYALGSGEVELLGKIGTSARDIDRLCKKLQSKARHVKIVYEAGPLGYDLQRRLAAKGFDCMVCAPSLIPRKAGDRVKTDRRDAVKLVRSLRADDLTAVHVPTVEDEAFRDLARVWAAARDALKRARQALKSFLLAHAVRYTGTANWGPSHRRWISSFSFGNAWQDLAFSELRRAIEDRFAQCERLESALREAVTQWRFYPAVLALQTMRGIQFTTAVGLLSEIVDVTRFAHPRQLMAWLGVTPSEYSSGGSRRQGSITKTGNSLARKLLIEAAWSYRHTAKVSPEIQQRHEGVPKVIVDRAWDAQLRLCGRYRRMVAKGKNKNVAVVAIARELAGFIWDIGRLGIEQAINTPKPAV

SEQ ID NO: 82180 - protein, 401 aa, unidentified
MATMQDNGERVKRFRELKATLRTNRSRLLVGLDIAQAEHVVHLRHAHTRVVVPSLTIPNTTRGFAALWTAITRAQRATGCREVVCGLEPTGTYHQAVATFLAAQGADVVFLSSSVAYWNRRTQDGTWDKSDRKDAVNCVDLLEQGKVLFYSQPTGPLADLRRLVKVLRRARAELASCKARWRTTLRPALAPMGEPLPNRLRVELPPGLQAWERPARGHPAHPQGRLPLGLATACQDLGAQVTAVQARIAAIEQALAPVAERLPAYHLLRTIPGIGPTVGAILLAEIGDIGWYTTFSQLRKLAGLDIVRVQSGQFAGQQRISKCGRRLLRWALYQAAVGLVRTAAGRARLATLQAKRRGDRFGGFKAMVELAAKQLRLVWGVWRSGVPYEPRRIGRLQRQPR

SEQ ID NO: 82181 - protein, 372 aa, unidentified
MDAPFLKRHLDAKVEMSLNHIPKGAPEMKIKTIGADLAKNVIQIHGTDLHGNTVLRKQLKRDQVIAFFAKLEPCLIGMEACGSAHHWARKLQQLGHTVKLMAPQFVKPYVKTNKNDMADAEAICEAVTRKNMRFVPVKNVEQQAILSVHRARQGFVKARTAQSNQIRGLLAEYGIAIPVGISHITKDVPKIMEDGDHDLPGSFKQLIGRLIEHFKELDKQVGELEAQIKQWHRENEASCRLAKIPGIGPISASALAASVGDGKSFKNGRQLAAWLGLVPRQHSTGGKSTLLGISKRGDSYLRTLLIHGARSVVRVATTKNELTGSWLQGLLGRRNANIATVALANKNARIVWALLFNERKFRPDHVPAGAGA

SEQ ID NO: 82182 - protein, 342 aa, unidentified
MEVTTIGLDIAKNVFQVHGVDAEGTVVLRRQLRRSRVLPFFEKLPPCLVGIEACATAHHWGREIAALGHDVKLMPARYVKAYVKRNKNDAADAEAICEAVTRPTMRFVPIKTPEQQALLMLHRTRKQFVRQRIALVNALRAHLAEFGIVAGVGRNGVEKLLQMIAADDEPRLPRAARECLLALSDQLALTKQQIRQADQRILVCHRENELSRRLEEIPGVGPLIATALVASVPDPHAFKSARDLPAWIGLVPKQSSSGGKERLGHISKAGNRYLRSLLVIGAYSLIKRAKQLGGTHRPWLAELMARRPTKVAAIALANKIARIAWAIMTKGTRYREPLPQAA

SEQ ID NO: 82183 - protein, 419 aa, unidentified
MVTEDVEWFAGIDWASQTHQVCLVDAGGKIVGERGFAHGGAGLAELCSWLLTMTRAAPTAIAVAIEVPHGPIVETLLERGFQVYAINPKQLDRFRDRFTVAGAKDDRRDAHVLGDSLRTDRHCFRRLSAENATVIELREWSRMSEDLQQERNRLANRVREQLWRYYPQALAISDDLAADWFLQLWAAAPTPATARRLRESTVGGILKRHRIRRITAAEVLASLRQKPLTVAPGTAEAASAHIRTVAQRLTLVNRQIKQAHHRLDALSDRITENEGDSDAMGQKSEQRDVTILRSLPGVGRIVLATLLAEASEPLRRRDYRTLRTLSGVAPVTRRSGKYCIVVRRQACHMRLRSAVYHWARVATQHDQHSRHRYAELRKRGHSHGRALRSVGDRLLAVACAMLTRQTPFDPDQPLKQMAA

SEQ ID NO: 82184 - protein, 342 aa, unidentified
MKQYVGLDVSQRETAICVVGEMGQVIFEGKVKSDPGALTSLLRKYAPHAERIGFETGAMASWLWHELRRVDLPVVCIDARHAHAALSVRMNKSDQNDARGLAELVRVGWYREVKVKSEESQKIRAILVARFRLVTIRRDIENQVRSLIKEYGLLFPRAIGLQFRHQVHELLGDDHQLLSVIAPLLSIHENVCQQQSKFDDEVRRLAKQDETTRRLMTVPGVGVVTALTFRHTIDDPSRFRSASTVGAYLGLTPRRNQSGETDTNGKISRWGDRLLRTYLFEAATVLLYRTKKWSCLKAWGMKLAKRIGMRKAKVAIARKIAVILHCIWVDGTSFDWGQAKEA

SEQ ID NO: 82185 - protein, 341 aa, unidentified
MHPTTIGLDLAKHVFQVHGVDAAGKVIIRKKLRRSELVEFFKKLPACLVGMEACGTAHYWGRELASLGHDVRLMPPAYVKPYVKRGKNDEVDAEAICEAVTRPTMRFVPIKSAEQQSILMLHRTRDLFVRQRTMLVNSLRGQLAEFGLTAPQGIWRIPELHALAQDTDNSVLPEPARACAELIMMQIEDLQAKIKAIERTLMARHRANEMSLRLATIPGIGVITATAMVATVVDASAFKSGRHFAAWFGLVPQQNGTGGKVHLGRISKKGEPYLRRLLVLGATAVVRYARNKPEFAGWVNALLARRPARVVTVAVANKLARIVWAIMQRGGSFRERSFGIA

SEQ ID NO: 82186 - protein, 466 aa, unidentified
MFKDTKSKRFSSKKNKYLKKSIELPLHLAHINKMAAGIDVGSSTHFVAVPVGCDEVNIREFSSFTTDLHTLADWLAKCKIETVAMESTGVYWIPLFELLESKGFEVKLVDARHVKNVSGRKTDILDCQWLQQLHTYGLLNGAFRPEELVCGLRVYMRQRAMLTEEAAMQIQHMQKALSQMNLQLHNVINDLTSDTGLRIIRDILVGQRNPKILAQHRDRRCKNPIELIEKSLCGNYKESHIFSLKQAVELYDIYCNKMSDCDVEIEKTLFEFEQKKKVPDDLKNHDLSIKPNKSKHKPLFNVQSHLERITGVDLTEIPGINAITGLKIISEIGTDMSYWKNSKHFASWLGLCPGNKVSGGKILSGASKKTSNRTASALRMAASTLYRSSSALGAFLRRLKSRLGPMKAVTATAHKLAIIIYNMLKEGVGYTELSADYYDQQYRDRTVQNLKSRAKALGFELVAAVK

SEQ ID NO: 82187 - protein, 415 aa, unidentified
MRIAIGLDVSSKQTSVSVVAEPQREVDSCTITNDLLGFDKLLKLIHQYSDQDTEQIPEVVFEATGVYSRRLKHFLEIHAVPYMQLNPLQAKHDLSMIKGLHGRKTDRMDALGLSQSQLILNRSKSFVEDPVYMALKDLDRTYQEAVQDLVTNKNRLHRYLQLTFPELEHVTGTTDGIFYWRLVQTFPHPQILLKSRQNFDAFVETLRHLTPYPTSEQRAKSIADKLGKVALTAAPAVSAVPVELEQVQYIAGELIRLSARRKHLIKEMCSLAIPLPELKIFESLPGIGVTSAVTLLAELGDLTRFKKSNQVNAYVGIDLRHYESGDYTASDHISKRGNPYARKILYRVINCMVSSAARSNKPNHIVDYYKKKKQSSSAVGTKKIAIASVSRLIRTLYSLVINNQTYVYRIATKGR

SEQ ID NO: 82188 - protein, 425 aa, unidentified
MNYKQNEKINQVKESTLVVGIDIGSTTQYARAFDWRGIELGKVFPFSNSREEFESFKAWMQHLQDKYKKLDAIVGIEPTGHYWFDLGAYLEDEGILLVMVNPYAVKQTKELDDNSQSKNDRKDPKVIAKLVTEGRYSAPYTPDGVYADLRIMVANRKRLIREMTQIKNRFARWFAIYFPEYTDVFGDYEAQSSMLLLKKVCTPEAIVELGAEKINQIWRDAKLRAVGMKRATTLCETAKRSIGLKKGSSAARYEMKLLLEDYEYKKAQLDAVMEEIEKLCRKIPESEQMLAIKGIGVITVAGFLAEVGDVRRFESPRQIQKLAGLSLRENSSGKHKGQTTISKRGRSKLRAVLFNAAIPLIAKNPEFKSLHEYYTTRANNPLKKKQSVIAISCKLIRVFYAILANGVTYDAQKMLSDIHRQPQAA

SEQ ID NO: 82189 - protein, 336 aa, unidentified
MKNEIKSIGIDVSKNTLDICILEDNNSKEKYMKIENNYQGISGLVRKLKNCKFDKQTLPLVFESTGDYHILLGVILRESGLNACIINPLITKRFNASNIRKIKTDKQDSKTLAQIGLQNKECLDKFIGEREDIILKKKLSVLHTIATKMRAMKASINSLKEVHKSLDTQEDEDIERLEETFNLFRKSVKSLEGEIVKYIVNKKEVQSRSRIKGVSEKTASVIGIHIKDKKFENKRQLIAFTGLDVSVCESGMMKRKGKLSKRGNAQLRSTVVQCAWGLKMHNESFNKLYEYHKKQGKHYYTCLIILARKLLSVIFGMLKNGSEYDSELVKKELSYC

SEQ ID NO: 82190 - protein, 403 aa, unidentified
MNSVGIDISKGRSMIAVMRPFGEVVISPFEVRHTDSELSELARQLKSLDGETRVVMEATGNYHAPVAKLLHDAGLYVSVVNAKLVHSYGNNDLRRVKTDKKDSVKLANYGLDRWLTLPRYIPEEDTRLLLKNCYRQYRQYSKVQTVLKNNLISLLDTVFPNANRLFSSPIRGDGSEKWVDFVAEFWHSRCVSEKSERAFTCKYLHWCRKQGYNFSEAKAHTIYAEASGHIGVMPKSETTRLLVEQAVSQLRATSTALAALKHEMQSLASMLPEYPAVMDMFGVGPTLGPQLIAEIGDVRRFYSKKALVAYAGLDAPPNDSGDVTGRHKSMSKIGASSLRRTLFLVMSVYLQNAPLDESVYQFMDKKRAEGKPYRVYMMASANKFLRIYYATVKAYLESLEHTA

SEQ ID NO: 82191 - protein, 394 aa, unidentified
MDRALVGVDISKDSFSAAGLDGEGKECFSGFYSMDFDGFCKFLEILTTRCQDLQKVLVGMESTGCYHINLFSFLTSRGIQAVVINPLLIANFAKRSLRKTKTDKKDAKTIAKFLMENREEISQLSISQDLQDLRDLARERESISHLITATKVEIKRVLRTTFPELESVGDLFTRSMLRFLKEYPSARRVKMARLKDLAKVLNQPQVGNKLSFSVEDILRAAHSSIATVSPAKEVILQGKIATLVHLQGRLAELTKLLTDFCKATRVEDWKILRSIKGVGPKTAVPFLAEMGSIENFSSHKKLIAFAGMDPSVCQSGKYIGKSKLSKRGNRNLRRAIYLMASAVVSQNAFFKAYFLKRKREGLTPQRVLLATAHKLIRVIFAMLSQRTYFQAKMA

SEQ ID NO: 82192 - protein, 404 aa, unidentified
MYLFGIDWSEKQHWVCIMTESGKILSLFSIDHSVSGFNRIEEERQKLGVAAEDCLVALETNHHLLVDFLWTRHYTIYVIPPRAASRYRDRYRQSGANSDASAAITLAHILRTDRDYHRPWQPDQLLTRQIQAKVALIEDLRQSIQRLGNQLRALLFRYHPQTLELFSDLTAPITLRFVLAYPTPQHCRDLTLEQFQTFCRAHRYPHPSRLPKLYACLQTPTPQPSPETVQAYQEEAQTLAALVLQTVQVREQALKRLKQLFAQHPDGFIFASLPGAGQLLAPALLAKFGDRRERFSSPNAVQALAGTCPVTVQSGKKRLIRFRQACDKDFRRIAQQFAVASVNQSAWAAAYYQQVRPHCDSDSHAYRCLANRWLAIIWKMWQSRQPYDEAYHLRQRAQRRQPRL

SEQ ID NO: 82193 - protein, 323 aa, unidentified
MAKRITICAGIDTGKRKLDVALDGSSEQMQVENTPEGYMGLVEWLRRQKVKRVGIEASGGYEQAVVAELRRKRFVVVVFQPAQVRAYAVFHLQRAKNDRIDAALIAACTAATKKIHPAPDPRLLPFAAHLTMIEQIGEDLAKLKNRIESCRHERIQKLWKEQIALLAKCRRAEFKALVAAIRKHRDLAARLDLIYSVGGSGMPTAVSILVRMPEIGQITREQAAALAGLAPYDDDSGDHVGVRHIEGGRERLRRALYTAALPASFRWNPQLMALYNRLIAAGKGHKRALIACARKLLVIINAVVARGTPWLAEPPKIASAPVT

SEQ ID NO: 82194 - protein, 342 aa, unidentified
MEEVVTVGLDIAKSVFQVHGVDAEGRVVVRRRLTRAKVIPFFEKAPRCRIGIEACATAHHWGRRLAALGHDVKLMPPSYVKAYVKRQKNDAADAEAICEAVSRPSMRFVPVKTPDQQSVQVIHRTRMTLMRHRIELSNTIRAHMAELGLVAPIGRLGLQGLIEIVRDDSDARVPTSARTCLKMLADQLDLVNRQALENDRMVLADARSSEVGRRLMAVPGVGPVLASAMVAAVPDPRAFRSGRNLAAWIGLVPKQNSSGGKVRLGGITKQGNRYLRQLLVVGALAVIRYAERHGTKRPWLVQLMARRTTKIAAVALANKMARMIWAIMASGEAYRDPAPRAA

SEQ ID NO: 82195 - protein, 377 aa, unidentified
MLKIVYRVCCGMDVHKSFVVACIASTNEYGVTTYKSKRFSTFTRDLRRCADWLSENNCKDVCMESTGKYWIPIYNILEPTCNVVLAHPKYVKAIRGKKTDKRDAKWIADIFKHDLVAGSFIPPADIRQLRDLVRYRWKLTNFTTGEKNRAQNCLTVSNFKLDDVFSDVFGKAASAITTRILEDPTEKITDVSGFRTKGMKATNEQVLAAVDGEMCEEQAEKLRIIRSHMDSLELCKLNLESLILSTAEQYLPQLNLVMTVPGIQSFAAIGIISEIGVDMSVFPTSKHLCSWAGLTPQNNESAGKKKTTRISRAGAYIKPLLVQCALCAIRAKQFPELRNRYLALKKAPWAQESHYCHCQNAPYGYLQYAQEERDVQP

SEQ ID NO: 82196 - protein, 350 aa, unidentified
MNEYNMYVGMDLGDSMNNVCVLDNAGDILWECQVRCTQEGLTAMFDSMAPARVAIEASTHSPWVSRLLSELGHEVLVGNPRKLRMIYRNARKCDAHDAQMLARICRMDPALLCPIQHRGRQAQVDMTVLKSRNALVETRTRLVNHVRSLVKSVGERLPSCQAEAFHRKMGAFIPEDLKSALLPMLEILKKVTEKILAYDKAIAELSVQRYPECEVLQSIQGIGPITSLAYVLTIEDPTRFEKSRDVGAYLGLVPRLDQSGNMDPQLRITKTGCAYLRRLLVSAAQYILGPFAQDSKLRKWGLELCARGGKNGKKRAVVAVARKLCVLMHRLWMDGTFWEPFPEQCQEGVT

SEQ ID NO: 82197 - protein, 365 aa, unidentified
MNFIGADLHKKSITLCVMDEKLKVTARKTVPCDQPDQIVESFRQFRPFKVVVEATASYLWFVELLEPLAEEIVLANPKKLRVIAESTKKTDRLDAQVLAEFLARDMIPRAYMPTPRQRQHRALVRHRQYLRGRMTSVRCKIHHVLADYNADRKDLFSARCGKGYFKQVPLSDADSFVIKQLWSEWEDHQARLLAMTKKIKAFIAKAPAREKEARAILKSAPGVGFVTAEVVLSEIGDVSRFGNAKKICAYAGLVPAVRQTGGKKSKDLHITKQGSGLLRWALVESAWRLVKSSPKWSALYSRLKKRCGSKRAIVAVARELLCVLYAMLKTSTPYKIIPAATPAEPPEPTRKRLVRVSTAAQAVTP

SEQ ID NO: 82198 - protein, 422 aa, unidentified
MKRLLERCAALDVHKKQVTVCVRLLAADGGIEEIVAEFSTMASQLLALRDWLNELGVTHVAMEATGVFWKAPYYALEDDFELLLVNAVHVKHVPGRKTDTKDAQWLCQLLECGLLRSSFVPPKPIRELRDLTRYRKSLIQERSREANRLHKVLEDAGVKLSCVATDVLGVSGRLMLDALVSGTRDPEVLAELAKGALRKKLSALREALAGDFKPHHALIASHILAHLDYLDETIGTLTQEVEQRLAPFARKAELLTTITGVAARTAQAILAELGPDMSRFPTDRHAASWAAVCPGNDESAGKRRSGRTRSGNPHLRAALVEAACAAIRTKDTYLRAQYEQVKRRRGHKKAVTAVAHSILIAAYHILKDDVPYEDLGGDYFARRADPQRLTKRLVAQLERLGHNVTLQATSTATADGLAAAPA

SEQ ID NO: 82199 - protein, 342 aa, unidentified
MKHYAGLDVSLEETFICVVDESGKRVWRGATKSDPQTISRVIRKRAPKLVELGFEAGPLCTWFWHEFKEMGLPVVCLDARHAKAALSMQVNKTDANDAYGLARIVRTGWYRAVEVKSIESHVVRSLLAVRSQLVGIRTRLSNQLRGILKTFGLVVGKVSGRSLESRVRELTAGNLMLKDVVESILNVWRTIYDQLAVIDKKLRQFSHSNEVCRRLMSVPGAGPVTAAAFMAAIDDPDRFKRSSSVGAYFGLTPKRYQSGEVDRSGKISKCGDSRVRSYLYEAAGVLLTRVKKWSKLKAWGVRLATRVGLRKAKVAVARKLAVILYRIWVDNSKFQRGDAPSL

SEQ ID NO: 82200 - protein, 324 aa, unidentified
MTAVVGIDIAKQTFDIATLQSNGKYRTKAKLPNDLKGFETLQQWLLKHAEPQAWIVMEATGIYHEALAEWLFKQGYRVCVLNPAQPAFYARSQLQRVKTDKVDAKLLTDYGSRHLAELRSWKPEAPEIRRLRALVHRLKDIQELEQIERNRLESTQESKVRVSIQSVLDHLKKQTDETLKAIKQLFDDNDDLRGKRDLLTSIDGIADRTAALLLAELGDIQRFNSSKAVTAFSGLNPRLQESGKHKGHVRISRMGPARLRAGLYMPAVSSLTHNQAIREMGERMKAKGKAGKQIACAAMRKLLCIAYGVLKSGRPFDPALAIAR

SEQ ID NO: 82201 - protein, 348 aa, unidentified
MLHVGLDLSRRRLDYCLLGGEGERVEAGAVAPDADALAGLVRLVELRHGRRAVRAVIESMNGARFVHDVLERCGWEVQIADAQRVKGLAPLACKTDRIDARVLAELARRDLVPAIWLPSFGQRQERERARWRLHLVKHRSSLKQRVHSSLMAFGHPCPVSDLFGTRGRALLERLDFPEPWRGDVLAAVALIDELDRQITGIEKDLKALGADHPYVPLLVTVPGIGWVLGYTIAAEIGDIERFASPKKLCGYTGLCPRVYQSGDCDRRGPLAKHGPKYLRWALIEAATNAAKHPLYRDRYRATKARIGRQRGAKVAQIQLARTLTEAIWHMLTRNQPFAPAGAAFPLAA

SEQ ID NO: 82202 - protein, 410 aa, unidentified
MKDTIFVGIDVSQTTNTVHVMNSSGSKLWHQTFYNSLDGSHEFMDRLLETQKKEDAAFLSFGLEATGCYGDLLSIFLRETDLIPRACKSVRILNPRQVHRFKGSYAELPKTDDIDAFVIADSLRFGRMGLKGTVVEEKYLALQKLTRSRFQVAKDLSGEKNRYLQSLFLKFSAMAQDSPFSNNFGETALQLITAFESVDQIAYTSIEDLAIFLNQHGKGHFVDPESLANEIQKAARSSYRLPKAVADSVNQVLAMQTQTIRFYEQQLREYDKLIQDYMTGIPNTLTSVKGIGPVYAAGIIAEVGDVTRFKDQAALANYAGLSWSRHQSGKFEAEQTHLIHSGNRYLRYYLIEATNSVRKHDPELRRFYALKYKETAKTKGKRALVLSARKFVRVVYALLRDNRIYIPRED

SEQ ID NO: 82203 - protein, 381 aa, unidentified
MPDVSSAAPAQVTTWVAIDQHKLSLVAATLPASGGEPEVVRLENSERAIRRFVGRLGGPEGLAVAYEAGPGGYQLHRLLSGMGVACDVIAPSLIPIRAGDRVKTDRRDAKKLVRLYRAGELSFVQPPSPAQEGLRDLVRARDDLRCARTAARHRVVKQLLRHGHIYREGKAWTQRHEAWLASQRLTDPLAQAALQHMLCHLAALDTQIAAVDEQLERVATTEPWADPVRWLCSFRGIATRTALGLLAEIGDFRRFAAPRELMSYLGLTPSEYSSGQQQHRGHITKTGNRHARRLLIEAAWHYQHRPRQSARAAKLSPHIPPEVAARAWQAQVRLHHRHRALTQNGKRSTVATTAVARELAGFIWAAMTNTPLRDAEEAAAA

SEQ ID NO: 82204 - protein, 364 aa, unidentified
MKKVYYIGLDVHKDNTQMAVLEMKGKEPIAIKVIDSDPSKVAKAILPYHKEGKVYVGYEAGCMGYTLYRVLTEMKIDCQIIAPNKVFKGGTNEKIKTDKRDATAIAWMLRREEGGSIAVPEREDEAARDLLRCRSDMQDDLKRAKQRMHKFLLRQGHIFESTRYWTGKHKEWMKTLVFEMPLDKAVFEQYLATIESIEERVARLDVQIQEIAETPRYAERVRIFRAFRGVDYIIALSLVCEIGDFKRFPTAAALMSYLGLVPSEYSSGKKRIQGGITKTGNGHIRKLLTEAAWHYARPVQVSKRLAKRRVGTSESVISCADKAMNRLHKKYMKLVLKGKSKQAAVTAVARELSGFLWGVMTSAA

SEQ ID NO: 82205 - protein, 323 aa, unidentified
MMSTQYNYAGIDIAKRNFVIAVSSLSKTKTETNNPKGIAHTIEYLKKHNVALVVMESTGGLEIPAAKAIHRSGIAVIIANPRQTHQFAQSQSLTKTDAKDAKMLAFFAQMMMQKEGWQTMLYQPPTEAEEVLEALVNRRNQLVDMRTAEKNRLHQVHETQVESVKQLIAHFDRLIDELDKQIDDHTHTHFDGKAKVAKQIKGIGSTTTATLMAMLPELGRLSHKRLASLVGIAPHPRESGETKFKSRCFGGRSAVRKALYMATVVATRFEPLIRDFYQRLLSKGKPYKVAVTACMRKLLTILNARMRDYFTENGTTENGIQTA

SEQ ID NO: 82206 - protein, 344 aa, unidentified
MDNHTQYSGFAGVDLAKKVMQIHFVTGDGEITDKQVKRAEFLDFFRNRTKCLIGMEACGASQDWARKLEAMGHEVHLMSPKAVKPFVSGQKNDYNDAIGIYKAMFNGVRRVPVKSTEIRDLQTLRRIRSQVTKDKVKEINHVRGLLAEYGIVMGKSITAFNKGISSALESLKERGYVSPLVAEELQTTVESIKTKIERQKRLDREIEQLARGCKNYENFLKTPGVGPFTAAMLCVLLCDPAIFANGRQFAAYIGLAPRSRGSGGKNFIIGIPSKFNCDSESRAVFVECAQALARYKNKSPWVDGILRRKPKKVAVIAIANKLARQVWAMANKGESFKQMTILTA

SEQ ID NO: 82207 - protein, 461 aa, unidentified
MAKQPGKRTQDGSRADATAGLPPLNLHAAGIDVGGAEHYVAVPADRDDEPVRRFGSFTADLHRMARWLKDCRIKTVVMQSTGVYWMALYDVLEGHGLEVNVANARHTKTLPGRKTDVQECQWLQKLHTFGLLNNSFRPPEDIRVLRGYLRQRENLVSAAATCIQHMQKALTEMNIQLANVISDISGTTGLAILRDIVRGERDPHRLAMHKNSRIRASRKEIARSLEGTWRQELLFVLEQSLDLYQTYQEKIQTCDQRIDEQLRSMESKIDPLSEPIPEPRRGKDARGHQSGFDLRGQLYRITGVDLTRIDGIEVQTAQTIISEVGVDMSRWKTEKHFASWLGLCPDNRISGGKVLKRGTRHVVNRASTALRLAASALLRSQSALGAKFRRLRSKLGAPKAITAMAHMLARLTYRMLKFGHDYVDRGIAFYEAKYQQQQLQRLAKQAAALRLQLVPLTPHVS

SEQ ID NO: 82208 - protein, 365 aa, unidentified
MQKISTTRTNGRKIFKGQLTIGLDLGDRSSSYCVLDEAGKILLEQKLPTTQETMKQIFGRMARCRIAMETGTHSPWVSRLLTALGHEVIVAHAQNVRLIVKSRRKDDRIDARTLARLARIDPELLSPVRHRSAQAQLHLTEIRARAGLVSARTALINAARGLVKSYGERLRKCGSFQVSREIGSGLSTELREALQPLLREVESLNERIQEYDRRIEKMAKERYPEVALLKQVKGVGDVIATTYVLTIEDPHRFRKSRDAGCFVGLQPGRRNSGDSEPQLHISKQGDEYLRTLLVQGAHYILGPFGEDSDLRRWGQKLAERGGKNAKKRAVVAVARKLAVLLHRLWVSGEVYEPLRNSHKAMSAAA

SEQ ID NO: 82209 - protein, 370 aa, unidentified
MELLHPHCAGLDVHKDTVVACVRHMADGKVTTEVKTFNTTTRGLMELSDWLSAQGVTHIAMEATGVYWKPVWHILSDGEFDLTLANAAHVKNVPRRKTGVPGDRSSSLGWKTDVNDAAWLADLKAHGLIRASFVPDQPTQQMRDMLRARKQFVRERSSHTQRIQKTLEDANIKLDSVVTDIVGLSGRRMIEAMIDGETDPEALAALAHGRIRATRAELEAALRGRVTAHHRFMLKLHLDHLDAVNAAIARIDKEVDANLEPFRVACEMLTTIPGVSSLAAEVMVSEIGIDMGRFETAGHLISWAGLCPKNDESAGKRRSNRSVSPSKSNPWLPDGGFVSLKGTTSVVPQVQQNKGLASAPAVCPFRPGPR

SEQ ID NO: 82210 - protein, 377 aa, unidentified
MKNVRFVGLDVHAETIAVAVAEANGEVRSLGMIPNRPESIGRLVRKLGKPEQLRVCYEAGPTGYVLYWQLSELGVKCEVVAPTLVPVKAGDRVKTDRRDAEKLARSYRAADLTAVWVPDAAHEALRDLVRARWAAKRDQLRARHRLSKFLLRHGRRAPESISAWTERHLQWVKTQVSFAHHAQELTLSDYLHEVEHAAARVVRLERSIDAAIETLPVKMRTVIEALQSLRGIAQLSAVSIVAEVGELSRFAHPRQLMGYSGAVCREHSSGPRIHRGPISKSGNAHLRRIVVEAAWAYRHRPAIGKSLAARQQRSSAAVVELAWKAQQRLHRRYARLMARGKNKQQTVTAVGRELLGFIWAIGVQVEQALAAPVRRAA

SEQ ID NO: 82211 - protein, 405 aa, unidentified
MDIIVNRGCGLDVHKETVVACIMGTGIKKEVRTYSTMTNDLLRLKQWLGEKEITHVAMESTGVYWRPVFNILEDSLEVMLVNARHVKNVPGRKTDVQDSEWLCKLLRSGLVRGSFIPPKEVRQLRDLTRYKRKLIQTMSAEKQRIQKILEDANIKLSSIASDTFGVSGMRILEELMKGELRAEEMAELSKGRLRKRREKLKEALVGTMEEHHKFMIQVSLRHIKMMEELLATVEQRIQEKIDRSFKEEYELLKTIPPVEDSASAILAEIGVNMDRFPTDMHLSSWAGLSPGNNESAGKKKPGTTTHGNKHLKTILVEIAWVGSRMKGIYLKAKYQSLVGRRGKKKALVAVAHKILLMCYHILKDKVSYKELGANYLDERKKDRIAKSYLKRLTNLGYTVTLQGAA

SEQ ID NO: 82212 - protein, 305 aa, unidentified
MSKARLDIGVRPLPSRESFANDEVGIRTLVKGVRELQPALIVLEATGGVERQVVRALASEELPVVVVNPRQVRDFAKATGQLAKTDRIDAEVLARFGEAVRPELRSLPDVCSQELRALVARRRQITEMIVAESNRLSGASKRVRKRIDAHIRWLEAELDRADKDLDQNIAQSPIWREKEDLLKSVPGIGPVISRTLLAELPELGRCNRKQIAALVGVAPLNWDSGIFRGRRAIWGGRSAVRAALYMAALVASRRNSVIRDFYRRLRNTGKAPKVALVACMRKLLTILNAMIKHKTHWSVNTVQAT

SEQ ID NO: 82213 - protein, 321 aa, unidentified
MEYIGMDFHKQYTIATRIRENGSQEWCRLANTPASFSEYFAGSQSTTSVVFESGRNWPMLYELLEQEADHITMAHPLKVKAIASARIKTDRIDSKILAELLAADLIPESHLRNESTRTELKVLRQRAFLTKQRTMVRNRLHVLIDEQPYELRKSRPDAQRLWSKAGMAWLTHLQLPNPVQHDLLQAMLRVEANLRQEIETSNRLINELFLNNTHAQLLETIPGLGKFGALLVSNEIDGIERFSSAKKLASYAGIVPSTYASGGKCYHGRITKTGSKWLRWILLEAVQPAVRAHSEIAQPIMKVINGVLVSRKLVLPQQDTC

SEQ ID NO: 82214 - protein, 349 aa, unidentified
MIARPDAACFVGIDLHKDTLTACVLRGRDREVTYVKLACKCRDQIRSFFAAMPQPSAIAIETVGFYRWLWAELEPLAGQLVLCDARGARALAGRRIKTDREDALNVALLLADGRLPLAWAPPENVQVLRTWTRHRNGLTRQHAKVLHHVKSILNRLNFPGPVRLDAAALQRYLLAGVERFTADDLTMLWQHQRRLVEIEQDRAQSERRISELMRAPEFSRLREILESVPGVGLVTSATVIAEIGDFSRFADSKAIGRYAGLAPTVYASGNSSRLGHISKTGAPDLRWVLQQAAWTAIRCDAGFKKTWLRIAKTAGKKAAAVAVARKILVLMWTLQRKDEPSKSRDPVAA

SEQ ID NO: 82215 - protein, 340 aa, unidentified
MSMVPLSVGFDYHDDAIRVCVMNDEGCTLVNRSVPNDVEAVIDMVSRFGSLAICAVEACCGASDFADHLRQATSWDVRLAHPGYARRLKQSPDKSDHDDAELLADLVRVKYLPEVWLAPTATRELRRLVRYRQQLKRNRTEIKLQMRALLREERIKVPANAWTKAWHQWLTECEELSEATRWVLTEQRERLAEVEARMKRVTEELDKHTAEDRTTAELQKHNGVGFVTAVTLRAEIGQFRRFANGKQLARYCGVTPCNASTGKRQADAGLVRAGNRELRAVLIEAAHRLAQHDPKWRAFRDQLRERKPYNVAMAAVANRWIRWLYHQMIQVETERWGQAA

SEQ ID NO: 82216 - protein, 344 aa, unidentified
MEDFDVAGIEVSSESFLVRVVRHGRLGSPQTFPNTVEGRLAILRLLTRSGARVRVCLESTGLYGLDLALALHEKAVMEVMVANPRSVRHFGEAMMQRSKTDPLDAALLCEYAARMPFQRWQPPTLTARQLCAITRQIHALTVMSTMDKNRLHAANLSETTPKIVRDELERNLAAQKASIGRLTRAALKLIDTDPELKRRFALLVNGPQKAPGIAQTSALQILGELVLLGPDFNVHQWVAYAGLDPREYQSGKSVHKKVRISKVGNAHLRRALYMPALVAVRCNAYFRAFYQHLLAKGKLKMVALVAAMRKLLHALYAMMKYNQPFDGSKLFPNACPPLSEATRA

SEQ ID NO: 82217 - protein, 431 aa, unidentified
MNCNTQNEKIELLTEKWAIVGVDVGSEKHYARVFTNRKIELSRKAFGFTNDLDGFQAFERWIAAIVGTYKLKFIMCGMEPTGHYWFNLASYMKSHGMMVVHVNPSHVKHSKELDDSNPAKNDKKDPKTIAGLLCDGRYMFPYMPEGIYAEIRELNNLRLTASQNLVRVRNKLERWISIYFPEFHTVFKGNDSKSGRLLLEEAPLPEDVCKLGSEGVNQIWRNAKLRGVGKKKAEQIVKAAENSIGRKECAWTAREEIAELLEDLDKYRIREERILANLYEKVMKVPNIELMLEINGVGMKTTAGFIAEIGDISRFDDPKRIQKLSGLAIVSDDSGKHTGQSSISYRGRKILRYTLYQCAMSVISKNPDFAAVHEYYTTRSQNPLKGMQSVMAVACKLIRVFYTILTKGVRYDGRKMLGDIKRPALAEAHAS

SEQ ID NO: 82218 - protein, 336 aa, unidentified
MKKNFDYYVGIDVSKLTLDVTVLFEYNNSTKTVYYKLENSEKSIAQFVRKLLVSNESGQGLFCFENTGIYSLPIAFYLYENKLSYWQVPAMEIKRSKGITRGKSDKIDSRDIAFYACTHTHKYRPGMMPAKSIRQLRLLFTEREKVLKALALFESTAENRNFVPKDVFKAVESANKSVINKLKQTIKCLEEKMLSIIASEDQLNRQYKLLLSIPGIGMQTAIYSIIATKGFESFDSWRQLACYAGVAPFPYESGTSIRGRTKVHPLADKKLKSLLNMCAMTAIRYDKELKIYYERKVKEGKSKMLVINNVRCKLLARVFAVIKRQTPFINTCKFAS

SEQ ID NO: 82219 - protein, 368 aa, unidentified
MDTLFVGLDVHKLSISVTTAEDGRDGAVRFCGEVANTPEQVRKLAGRLSRSGSRLEFCYEAGGCGYGIYRQLTEMDHGCLVAAPTLIARKPGDRIKTDRRDSQMLALQHRAGGLTAVWVPDEVHEAMRDLVRARGDAMMALMRARQQLLAFLLRHGRTYPVGKPWTLRHRRWLAGQAFEQDAHRIVFQDYVEAVWAAQDRREQLEARISAMLAGWSLSPLVEALRALRGLDTISAVSFVAAVGDLGRFENPRRLMAYLGLVPSEHSSGDRIRRGGITKTGNREARRMLVEAAWSYRYPPRVSTGKTDVVSRQPKVVRDVAWKAQVRLCDRYRRLSAGGKRPTVVIAAIARELSGFIWAIGQEVRPAAP

SEQ ID NO: 82220 - protein, 342 aa, unidentified
MQIAVLGIDLGKNSCSVVGLDSTGAVIKRRRMRPENLVAFTEKLPACIVAMEACCGAHHLGRTMSSQGHQVRLMSPEYVRPYVKAQKNDDRDAEAIAEAATRPTMRFVELKSESQLDVQTLHRARDRLVGERTALINQLRAVLLERGVTIPQGRRKLEQHLDAMMASDDDHSLSPRVRRLIDDMRAEWLELDRRIAAFDNEFAAYARSDADARRLATIPGIGVLNATALLAAIGDGQTFARGRDLAAWLGLVPRQVTTGGKPRLVGITKRGNKYLRKLLIHGARAALPSLATSATPLGGWLRALMQRVHKNAAVVALANKLARIVWVVLRRGEEFNAAAVTA

SEQ ID NO: 82221 - protein, 348 aa, unidentified
MMIVLGVDAHKRNHTVVAADGLGVQVGVLTATATAEGHLRLLAWAGQFESRRWAVEDCRVLSRRLEADLLCAGERVVRVPPGLMADARRGGRTRGKSDPIDALAVARLALREPDLPQACLDGESRLLRLLVDHRESLVAERTRAQNRLRWRLHELEPGWDPPASSLSSPLTMRKLQDALAGYQGLVADLAREEVAHIAELTRRAVDLQRRIVGQVSGLTPSLLRLPGCGPLTAAKLVGETAGIGRFATPDKFAAWAGAAPIPVWSANSERFRLNRGGNRQVNAALHRIAITQLRCHPPAQAYLKKRLAAGSTKAEALRALKRHLADIVYHHLQADTATPGRQPQPAAA

SEQ ID NO: 82222 - protein, 324 aa, unidentified
MSDSILGIDVSKETLDAYCARGQRKQGRTFANSPDGWKLVRAWLKAMGSKQAHVCMEATGRHSLGVALALHEAGHVVSVVNPAQIRDFARTKLGRNKTDKVDAALICEYAALFKPEPWTPPSPAMRRLCELQTMRAGIIRSRAEWKNRIGSGLGDSTATKLAAATIDHFTSQLEAIDRAIGETIKQDAELRGRCDLLLSVIGVGETLAASLMAEMPEPGVLRRSGEMVAYAGLNPSHHRSGTSIDRPTRISKIGNATLRSSLYMPALSAMRFNPAVAILVARLKSAGRLKPKQIVVAAMRKLLVLCFGVLKTGKRFDLAIAMPA

SEQ ID NO: 82223 - protein, 394 aa, unidentified
MKLIGIDIGKNKHFFCVMDQQTGEIISQPVSFSNDKEGFDFLVQKIKSYPKDSILIGMEDTGHYHFALLKYLLDLQYTVALINPKTTDFNRKMQGGITKNDKLDTINICDVLDTPERKKQYRITKVNSFDLYEQKQLTRHHHNLKEEENVYKNRLQKCIDIVFPEFNKLFNSKYGIVYMNILKMFGSAENIANTDIRTIRKCFEIEGRGNRISLTPERLKECARSSIGISSSAEVIQIKHLSAQIELIEEQLTEIDKKIEEFSIQNNSPILSIPGISHFSSTSILAELGDISNYSKPSQIIKFAGVAPLHYESSQFNAQHTAITKKGSKYLRKTLYQIILPVIRHNPVFNKYYQLKISQGKGHRCAQGHCVRKLLRIIYHLLKTNQQFDPQLLR

SEQ ID NO: 82224 - protein, 311 aa, unidentified
MYVGIDVSKQRLDVVVRPSGERFSESNDDRGVRRVVSRLKALGCARIVLEATGGYEVMAAAALYAGGLPVVVINPRWARDFARSIGQLAKNDGIDADILARYAQLPELKVRPLPDEQTRELQALCTRRAELIDMIVAEQNRLEHAPQRLHREINGHIDYLRKRLKHLEHDLDQMVRNSPLFAEKSALLSSVPGVGPVLCLSLLARLPELGRLNRAQIAKLVGVAPLDDDSGKRRGVRMISGGRADLRRVLYMAALSAIRANPVLREYYVHLRDQGKEGKVALVAVMRKLLLILNAIIKTNTPWRPPCPQIG

SEQ ID NO: 82225 - protein, 443 aa, unidentified
MAEFVNGKAPEPDFAAFVGIDWADQRHCWKLLVTGTQASESGELKQTPEELSQWATTLHHRFGGRPIAVALEQSSGALVYQLSQYPHLWLYPVHPATAARYRQAFYPSGSKSDPADTGLLLELVVHHRDRLRRLAPDTPETRLLRMLVEQRRQVVDEKTRWNNRLKAALKMYFPQVLDWVDIDTIMGCDLLERWPTLQQLQHAHPGTLRKFFREHNSRSESLITERIAAIYQATPAVKDPALLEGESAIAATCVAQIRTLLASIAKLDHQIQPLASQHPEASLFAELPGAGAALQPRLIAAFGTQRDRYANAAELQAYSGIAPITASSGHSRWVHVRWACPTFLRQTFHEFAGCSISRSEWARVFYDTKIAAGKSHHATVRALAYKWIRVLFRCWKDGRPYDERTYLQTLAERNSPLNWGPGASIKPVWKTVGGFKKLSTENS

SEQ ID NO: 82226 - protein, 413 aa, unidentified
MSVTDAPEPARPTGGVDWAKDDHAVAVVAPDGEQTLRFSITHDAAGLRSMIKRLLTAGVTAIGIERPDGPVVDALRQAGLTVYVIPPGQLKNLRSRYGSAGNKDDRFDAYVLADVVRTDRRRLRPLLIDTPATTALRQTVRARKDLVVHRVAVANPLRAHLQIYFPGVAGLFADIDSDITLRFLDRFPTPDKAAWLSPRRLTAWLTSVGYSGRTPPETLHARLRDAPRGATGPAADTAAAVTTAFVAVLRTLTAQIQALAARISEQLDLHPDQAVFTSLPRSGRVRAARLLAEIGDARGRFPTADSLACLAGVAPSTRQSGKVEVVSFRWGADKQLRDALCDFAGDSRHANPWAADLYQRARTRGHDHPHAVRILARAWVDIIWACWTTHSPYDPDRHGALQRILNQDQPSAA

SEQ ID NO: 82227 - protein, 346 aa, unidentified
MENLIRIGLDTSKSVFQLHGVNAAEQPVLKRKLRRREVVPFFSKLEPTLVSIEACGGSHYWARTLEGLGHQVRLLAPQHVKPYVKRGKNDAADAAALCEAVSRPDMKFVAAKSPQEQAALMWSGLRDRLIKTRTQLSNAIRSYAAEFGLVAPKGLDKIEPLLTRIAQDEALPMAAREAFALHGREYARLQAELRAVEAKLMAWHRGNQDSRNLAEVPGIGPIGGTKLAMKKTDAMACQSGRYFSAWIGLTPKDHSTAGRQRLGGITRAGDPALRSVLVVGAMAVIRQAERNPEKASPWLRAMLKRKPKKLVAVALANKNARIAWKMMKTGERYDPKRAAIPIAVAA

SEQ ID NO: 82228 - protein, 434 aa, unidentified
MISHLPHDNCWVIHLSEANKMTDQDNANLNAVYVAIDVAKNKHDILIRYTNGKQHSFKIYNTMAGYQKLIDAAKKYSNEMIICGFEPTADYHRNLAYWLSTLGCEMRLISSLSCARAREMLYKTWDKNDRKDTHVIMYLLENQHSQPFYDPLLENIMDTQEICNTYQQVSLARSRCWHSLLNHYLTLYFPEIERFLHNSRSEWFCRFLLKFPTPNSITRYRQDTFIKRAWDVVGRKVSKQGFLENLYELAGNSIALPVEINSPAVETFKLQIARYMDLTKHRSQLEAQADQLLSSRKDYQLLRSLPGIGPVIATIILAESGDLMRFKHYRQYLNFCGFNLCSKQSGKHVGKYCLSKRGNARLRYAYWLAANSAIRSTENSFRNKYTRYIKQDPENADLKRKARTAVAIKMARVAHAIVKKGQHYQGYYEYRCET

SEQ ID NO: 82229 - protein, 339 aa, unidentified
MELYGAIDLHSTNCHLAMVDGQRNRVFYRKFPNRKETVLNALSPFGTQIRGIAVESTYNWYWLVDALMERGYRVHLVNTTQVIQYSGMKYGDDRHDAFWLATLLSLGILPEGYIYPREERPLRDLFRKRAHLVRVRTALLLSQQNMILRNRGLKVSAYELKRFGHDGVVSLLQGDPELALAAEANKAVIDLLTIQIDRLEKAIRVRMVPREGFTKVMSLPGVGDILAMAILLETGPIDRFKQVGDYTSYSRKVPGVWLSNGKIKGRGNTRNGNRYLAWAFSEAADHARRHHALSRAFYQRKLAQSNAAVAHHALAHKLARAAYYIMRDNVVFDEGKMFR

SEQ ID NO: 82230 - protein, 417 aa, unidentified
MAVVMIGIDPHKGSHTAVAVDHTETALAQIRVRSGPSQLERLLAWASAFPERSWAIENATGLGYLLAQQLVAAGEAVYDVQPKLAARVRLLGTEATNKNDPHDARSVAIAAMRSTKPNQVQAEDHAAVAKLWSKRHRDLARATNKVACRLHSLLCDLVAGGVPDEITPAKAAKLLASVTVTDAVTAARLELGQELLNDLVRLGGQMKEANKRLAAVVAASQTTTTKVFGVGPVVASTVIGITGDVTRFANRAHFASFNGTAPIDVSSGGKNIYRLSLRGNRHLNHAIHMAAIVQIRFRHSPGRAYYDRKIAEKKTHKEALRCLKHRISDALYDRMVADAQRSGRGVDGGPGGQTGNDSVSSAAGSHPEKPTLRTSHSRTRSQATTVRTPATRRSAASKRKITRPKTATSPRTARKAS

SEQ ID NO: 82231 - protein, 350 aa, unidentified
MMIIGCDLHTRYQQIAMVDTETGEFVERRLEHESGEARTFYAGLRGAVRVGIEATGHTAWFEAMLAEFGHELWMGDAAKIRAAVVRKQKTDARDAAHLLDMLCTNRFPTIWRPSLAERDLRQLLWHRQKLVWMWGAVKNQMHALAMGEGVCRKKKLFTAKGRTELEGLKLGRWASYRRQELLRLFDELQSSVKKLDQAVELAAKNEPLAARLMTHPGVGPITSLAFVLIIGPVERFDRSKQVVSYLGLNPQEHSSGGRQRLGSISKQGNPMMRSLLVEAGHTAARLDPQLQRVYQRLKFRRGASVAKVAIARKLAVRLYWMLRSTADYAQLVRMRGSSWATLVEDSPSLG

SEQ ID NO: 82232 - protein, 408 aa, unidentified
MQVEHPVCCGIDVHKDTLTACLRRVEDNGQVHKEGREFATTYTSLLALSDWLVEQHCPVVAMESTGVYWKPVYHVLAGTVEVFIGNAHELRSRPGKKTDKRDAAWIAELLAHGLIRPSFVPPPESCALRDVTRTRVALVQTRSQSKNRVHKLLEDTHLKLGSVVSDLFGVTGRRMLAALVAGERDPQVLASLALGSLKHKRPQLELALTGQFTAHHGTLLGLLLELIEMLDRQIATLDQQIGALVAPLQAPIAQLDSIPGVDIIAARDILAEIGTDMRRFGDAARLASWAGVCPGNHESAGKRYRGKTRKGNRYLRRILVQCAWGARKTPTFLGRTFRRLEVRIGKKKAALAIAHKILVIVYHLLAAGTCYEEARYDQYNPRQEARERQRAIKALERLGYTVTVARAA

SEQ ID NO: 82233 - protein, 439 aa, unidentified
MPRYVGLDIHKQFIEACFIDEDGKPLGRCRIAVSRESIQTFVPKCLQSCDRVVMEATTNTWEIAELIRPRVAKVAIANPLKVKAIAEAKTKTDKVDAEVLAQLLRCNFLPEVWIPDGATRLLREMGAHRAGLAADQTRIKNRIQSLLAQRLIPIPVRVLFNGCGRNWLSHLELDTQDRARIDGYLRVLDQIESEETNLRKALAQLSFDNGQIRLLMTLPGVGPAGAQALCAAWGDWRRFKDGAHAASYLGLTPSTRQSAGHCYHGSITKAGNSLARWLLTQAAGQVSEHPGPLGVFFRRIRKRKNYNVAVVATARKLVTIAFLMLKNNEPYRYSLPAPTQRKLSAFRVEATGSRRPKSKLRLPMQRREPETRVQSIPSLDEVYRSENLPPITKAEALPRGEQRMLQQMGIDHLPQRLQTVQTRTYRSTKTAHAQKRKHL

SEQ ID NO: 82234 - protein, 368 aa, unidentified
MNNGSTVIGLDVHKQTVVAAVLPPGADRARESVTIENDPTAVARLVRRLAARGPVAFVYEAGPCGYEVQRQLTALGHPCAVVAPALTPVRPGDRVKTDRRDAETLARLYRAGELTPIRIPTRAEEAARDVVRVREDVLADRLRARHRLAKFLLRQGRVARETKAWGVAHRAWLSTQRFEWAALQQTFAAYLRALEEVEAHLAVLDQQVADVAQQAPYRTLVQALRCLKGIATLSAATLAVETQEFRRFTRARAFMSDTGAVSTERSSGGTVRRGSITKVGNAHLRRILVEAAWSARHGTGVSRALSARRQGCPAEVVRIAKKAQARLHRRFWRLTSRTKPAQVAVVAVARELAGFVWAIAHQVPEASA

SEQ ID NO: 82235 - protein, 412 aa, unidentified
MNAVGIDVSKGKSMVAVRRPFNETVAKPFEVRHTGSELKQLADYLKSLDGETRVVMEHTGRYYEQIAQYLHDAGLYVSAVNPKLIKDYGGGTSLRHVKTDKADARKIAGYALDRWAELRQHTPMDTIRYQLKMLNRQCGLYTKTKTMMKNNLIALLDQTYPGVNALFDSPVREDGTQKWVDFAASFWHVDCVRGMSRTAFVQRYAKWCKQHRYQARAGRAEEIYEHSQDLIAMLPKDAMTKLLVRQAIDALNAVSATLERLKAEMLKLASLLPEFPVVMAMRGVGDTLGPQLMAEIGDVARFAHRSAITSFAGVDPGANQSGTHEAKSVRISKSGSPELRKALFLVMDCLIQTKPQDDPVYLFMDKKRAEGKPYLVYMTAGANKFLRIYYGRVKEHLASLKGNPVPEPEGHT

SEQ ID NO: 82236 - protein, 341 aa, unidentified
MPIVTVGIDLAKNVFAIHGVDEAGKVVLRKPRVMRDQLVAVIAQLPPCLIGMEACSGAHHWARVFQQHGHTVKLMAPQLVAPYRMSGKRGKNDAADAAAICEAVTRPSMRFVPAKDEHQQATLCLHRTRQGFIEERTATYNRLRGLLSEFGVVLPQSPEKLRKSIADHLDDLPGWARQSINDLLEHAGHIEDRLVIYDRAIAGIAREDERSRRLMQLRGVGPTTASALLASIGSGHDFKNGRQVAAWIGLTPGQYSSGGKERLETITKAGDAYLRSLLVLGARSMMASLGEKQDRLSRWVRSLVERRGYWRAAVAIAAKNARMAWAILKYGEDFKLEPSNA

SEQ ID NO: 82237 - protein, 424 aa, unidentified
MREEGLSVAEEIEWFVGIDWASQSHQVCLVDARGECLGERAVAHGGPGIEELCDWLIARTGATPEVIGVAIEMTQGPVVEALLERGFCVYGINPKQLDRFRDRFTVAGAKDDRRDAHVLGDSLRTDRHAFRRLSNDEPVIVKLREWSRMADDLQQERTRLASRMREQLWRYYPQMLELADDLAADWFLDLWNQAPTPAKAARLRQTTIERFVKAHRLRRWQAPEVLRILKQKPLSVAPGVVEAASDHIRTLTVRIRLVNQQLKAAHRKLDELCAQLIPSEENEPGQQCEQRDVVILQSMPGLGRIILAVLLAEVWQPLRRRDYHALRSLSGVAPVTRRSGKTCVVVRRYACNKRLANALYHWARLATQHDALSRRRYAALRQRGHSHGRALRTVADRLLSVTCTLLEQQTLFDPAYEGRDAAGA

SEQ ID NO: 82238 - protein, 391 aa, unidentified
MVCVGIDVAKDKHDCCILDSDGTVRADCFTIPNNMDGFKQLLQTIRDCTKKSDKIKVGLEATGHYSYNILGFLLDNGLPTYVINPLHTNLYRKSLSLRKTKTDRVDARTIATMLLSDVDLKSYTDIAYHNEELKSLTRYRFDKVQERAKLKQSVSRLATILFPELEQLVSSIHGTSIYALLSEYPGAKQISEVHLTKLTNLLTTASKGRYGKEKAIQVREAARASIGSVMPAKSLELKHTIKLIQELTSEIDEIEDSIQQIIDELNPPILSIPGMGVNSAAVILAEIGDFSNFSSPDKILAYAGCSPSTYQSGKLTNCYAHMEKRGSRYLRHALYNATKYICYWNPVFAEYLAKKRAEGKHYNVALSHATKKLVRLIYALQKSGKAYLTAA

SEQ ID NO: 82239 - protein, 408 aa, unidentified
MNAVGIDVSKGKSMVAALRPMGEVALLPREFLHTEVGLEQMAYAITTLGEDTRVIIEATGRYHEPVAAALHKYGIYVCVLNPLYIKQSGGGSIRKVKTDKADAMKIAKYGLDNWVDLREYTPMDTVRQQLKLCSRQYNLYMKTVVSLQNNLISLTDKTFPGVNELFSSPERADGHQKWVDFVMTFWHCDCICRVSEKAFTERYQKWCKRKGYHFSTEKALDLYAGSCGHFTTLPKNDNTKLLITTAAQQLLAGKMTLAALRAEMTRLAMQLPEYNTVRAMYGVGETTAAQLMAEIGDVRRFPRRSSIVGFAGVDLGVDDSGKHSAKSVPTTKRGSPHLRKTLYQIVCTYLRKAPANELVYQFLEKKRAEGKPYFVYMTAAQNKFLRIYYARVKECLAAFDAQQDTTQS

SEQ ID NO: 82240 - protein, 343 aa, unidentified
MKRQNVIGVDLAKNVIQASVVTPAGKEQINRAFTRKQFAEFLVRQSPSLVAFEACATAHYWARVAQSYGHSAKILPAKAVAPFRQGHKTDPNDALAVAETAQRPNIKEAPMKTIEQQGLQAIQRSRELLIQDRTALSNHIRGLLMEFGIVIPKGFASLHRRLPEILEDDENGLPDLYRPTLNLMHGRLITLKADIEVLNEHISTLVKQNAACQQLTHIEGIGPIGSVLLYATLGTGEAFANGRQFSAYLGLTPKQYSSGGKTTMIGISRYVANKRLRAVLIQGARAYIHRLKEPKTPKQRWLWDLIQRAGYGRAAVALANKNVRTAWAMLTQNTEYQRYPLAA

SEQ ID NO: 82241 - protein, 373 aa, unidentified
MGQRAQKEEPAMKKNITCTAVKVTKASATVAVGVDIGDMQCQVCARDKAAGITLERKVRTTRAGLALVFEHLPPCRVVIEAGSQTRWIAEAITAMGHTVRVVNPRKMRRIYESDSKSDLQDARELSEAALDRWDRLPEVKLRSRESQQKLSVLRTRDALVRSRVALVNLVRSLLKQGGVKVPKCSTEAFPKKASALVPEEFSVAVAPALAQIASLTAQIKALDVWIEAQAALDPNIRCLRQIQGVGPVTAAAFVWTLDDPARFERSRSVGAYLGLRPRRDQSGETDKQLPITKAGNVYLRTLLVGCSHYILSKKGPDTALKQFGLRLAERGGKRAKRKAVVAVARKLAVLLHHLWATGEVYEAFPEARKRRAA

SEQ ID NO: 82242 - protein, 357 aa, unidentified
MRFYTKQHPFYCGIDLHARTMYVCILSQDGEVVLHRNMPASPDALLKAIAPYREDMVIAVECIFTWYWLADLCAQERLSFVLGHALYMKAIHGGKAKNDKIDSQKIAVLLRGGMLPQAYVYPAPMRATRDLLRRRMHLMRKRAELLAHIQKTNSQYNLPEIGKKLAYKGNRDGVAERFLDPAVQKSVEVDLALIDHYDRLLSDVELTIVQTAKQHNAQALYRLQSVPGIGKILRLVLLYEIHDITRFPRVQDFVSYCRLVKCAKESAGKRYGTSGKKIGNAYLKWAFSEAAVLFLRNNAQGQKFLARLEKKHGKGKALTILAHKLARAVYYMLTRDTVFEMDIFLNGYGSRAGEPAA

SEQ ID NO: 82243 - protein, 347 aa, unidentified
MVAETADFVVGVDTHGQRHWFALVEARTGALVREWELPACVKGYRRALELAEELAAGRRLWAVEGTGSYGAGLARLLIDAGEQVREVERPLRRGHQGRLKTDSLDALRAARAAFERRLATPRAGGAREALRVLLATREQAIDVRRVGLNQLRALLVTAPDGLRQRLSGLSPRRLPARCARLRLPAGAGEAEQASVLTLRLCARRVIGATREAEALEREIERLVQALAPGLLAEPGVGPISAGFLLLGWSHHGRLRSEAAFARLAGSAPIPASSGKVSRHRLDRGGDRRLNRALHTIVRARRRNHPPTIAYIERRVSEGKSSREAVRCLKRYLARHFYRLLEQTAAAT

SEQ ID NO: 82244 - protein, 347 aa, unidentified
MKHSAGLDVSVKETAICIVDEVGKVVRETKVVTEPEAIIALLNSAGLEYERIGLEAGPLSQWLVNGLAEAGLPVICVETRHMKAVLKAQQVNKSDRNDARGIAQMMRVGLYKPVHVKTLASQQERMLLTTRKLLRDKLQDMENELRGTLRNFGLKVGVVSPGRFEARIRELVAGHLRLEMIVTPLLAVRRVLREQLAKLHKMVLDQVRGDKLCRRLMTVPGVGPVVALTFRATVDQAQRFTRSKTVGAHFGLAPRRFQSGEMDYDGRVSKCGDAMMRTALYEAAQVLLTRTQKWSWLKSWAMQVARRRGARKAIVALARRLAVVMHRMWIDGTEFRWRKETNAAAAA

SEQ ID NO: 82245 - protein, 343 aa, unidentified
MQTVTAIGLDIAKSVFQIHGIDAGGQIVIRRKLKRRYVLMFFQKLPRCLVGIEACASSHYWSRELVALGHTVRLMPPAYVKPYVKRQKNDAADAEAICEAVGRANMRFVATKTPEQQSCLMLHRTRHLLIRQQTAVINSIRAHLAEFGIVAPVGRNGVEALLTIVGDANDQRLPDIARACVAALGVQLRALKAQILEFDRMIMAWHRSSETSRRLDEIPGVGPALATALVASIADPRIFRSARDFSAWIGLVPKQHSSGGKDKLGSISKQGDRYLRSLFTAGALAVIRYAKIHRTRHRPWLTALLSRRPTKVAAIALANKIARMAWAMMAKGERYKEPVALAA

SEQ ID NO: 82246 - protein, 344 aa, unidentified
MWIIGCDYHPSFQQIAFVDQATGEYGDLRLEHKGGEAERFYRSLAGQQVRVGVEATGGMRWFERLLGELGIELWVGNPARIRAAAARKPKTDKEDARLLQRLLLEKRFPRIWVPTIQQRDARQLVLHRHRLVQTRTRAKNQLQDMARNEGLYAKRRVWSQTGQKELMALPLSPWATVRRQDWQELLGDLNRRIDPLDRALQQEATQRPEVQLLMTHPGVGPVIATAFVVTIGEPRRFQTSKQLAAYLGLVPMENSSGKGRQRLGHITKQGNSLLRGLLTEAAHIASRRDPEWRRKYMRLAMKKNRSIAAVAVARCLAVRLWWMWKLGLDYGQMKESRSHAEQLA

SEQ ID NO: 82247 - protein, 400 aa, unidentified
MRVIFGIDVSKASSEVAILVNGEKIHGYTIPNDAIGFNRLLGDLRTVYQPEIVFEATGVYSRRLQAFFEDNSYAYIRLNPLESKKQLDSLRVRKTDKIDAEKLATSQFILNRKPSYVQEALYQELRDLSRFYQNLTEDIVCSKNRLHKVLQVTFPELENILSSPTGKQYWNLVMAFPCNSFVLELDDATLRAIIRQSTSKRISEKRVTYLVDKLTKLANHSYCAVKKTSPMMEEVKYYAGELLRLSEYRQSVLEEMITLAQPLPEYEILLSIPGIAETTATSIIGELGDIRRFHSANQINAFIGIDLRHYESGNFLAKEHITKRGNPYARKILFKCIQNIASASHTNPCHIADFYEKRKRQSQVTSTKPHTIASIHRLIRTMYYLITHNKLYDYTSTQNR

SEQ ID NO: 82248 - protein, 309 aa, unidentified
MKEDLVYLGVDIAKSHLDAAIGNEKWRFANEAVGHRELIRWIKAMKTSVQVICEPSGGYERALVRALVSAQLAISLVPANRVRQFARAAGILAKTDHIDAKVLCLFAEAMQPTPISASQLEQEHLRELESQRRHLTHLLVMEQNRGARLSELAVRRLNRTLINQIKKQIEQLDLLIKEHIEQSGDLSRKAAKLTAISGVGARTAALLLAQMPELGQLNRREIAALVGVAPFNRDSGRMRGKRAIYGGRRPVRHGLYMAALVAARHNPVLRTFYQRLRAAGKPAKLALTATMRKLLIVLNSSLKPDLSYA

SEQ ID NO: 82249 - protein, 313 aa, unidentified
MPPIPVFVGIDVAKATLDVASLPSGLQAHIPYTDGELQALTARLAAVGPILIVCEATGGLEGPLVGALAAAGLPVAVVNPRQVRDFAKATGTLAKTDALDAAVLARFAAAIQPTPRPLPDAATQVLAALVARRRQLVEMLTMERNRLGSAPQVLRAELQAHIRWLERRITDLDTDLTHAIRTSPVWRVQEEILRSAPGVGPVLATTLLAHLPELGTVPGKQLAALVGVAPLNHDSGAWRGRRAIWGGRAQVRAVLYMGTLAAVRHNPVLREFYARLRAAGKLPKVALVACMHKFLTLLNAMLKSQQRWNPTHV

SEQ ID NO: 82250 - protein, 340 aa, unidentified
MNQVVTIGLDIAKSVFQLHGVDAAGAVVLRKRLTRSRMLPFFEKQAPCIVGVEACGSAHYWARELSRFGHEVRLIPPSYVKPYLKRQKNDAADAEAICEAVTRPSMRFVPIKSCEQQSIMVAHRTRSILTRQRTQLSNAIRGHMSEFGLVAPIGRIGLELLIAILNDAGDVRVPTTARTCLLMLVSQLRLVNEQILASDRCIIACARSTEVGRRLMEIPGVGPLLASALVATVADPKAFRSGRNLAAWIGLVPRQNSSGGKERLGGITKQGDRYLRQLLVVGAVSVLRFAQRNGARRPWLVQLLARRTPKVAAVALANKTARMAWAIMTSGERYREPVAA

SEQ ID NO: 82251 - protein, 351 aa, unidentified
MRHLAQAQHVATYGIDIGKNLFHVAGLDQTGHPQLRTKFKRDTLLQFFSNVPVAVIAMEACPGSQWLARKLQAYGHTVRIVPAQFVKPYVKSNKNDSVDAEAIAEAATRPTMRFVTVKRVDQVDVQALHRARDMLVYQRTALISQMRGLLLEYGVALRAGAGAFKLDLPLVIENAENELTPSMRQLLGMLSQHLDELESHIHQLSEEVAALADRDDVARRLMTIPGVGALAATALLAAVGDARQFKRGRALSAWLGLVPAQYSTGGKPTLLGVSKRGNSYVRRLLIHGARSCVTHMDRTRNRLGAWLDQLSQRVHFNKVTVALANKIARMAWVVITHPGALYQRNDPRFAL

SEQ ID NO: 82252 - protein, 355 aa, unidentified
METAYDGRQVVGMDLHRRRSVLVRMTEDGRRLGVARITNSPAELRREIAKAGKSPRVVLEGTYGWYWAADTLAAAGAEVHLAHPLGVKAFTYRRVKNDERDAADLADLLRMGRLPEAWIAPPEVRELRELTRYRCRLVGLRTSCRNQVHGVLGKLGIPPACTDIFGAAGSAWLDQLGLPQPYAGKVTSLRQLAGELTTEITMLSEVIADLLAGHRGYQVIQQLPGIGPVLAAVIVAEIGEVSRFHTAAQLCSWAGLTPRHRESDTKITRGHITKQGSRLLRWALIEAIQHAPAGSLPGAVKQRIIARRGKQAKNIAKAAAARRLLTLVCYGMRDGQIRCLPATAGSPPPTAPQAA

SEQ ID NO: 82253 - protein, 386 aa, unidentified
MQVNDLSRSLVAFDQNSTLVAVVELSLKSWLVAGLVPGLTRQPLKRSPPDGEALAALLDRWRSEAVKSGRRIERVAVAFEAGRDGFWLARVLRARGIEAYVIHPTSIPVPREHRRAKTDRLDTGLLMRAFLGWLRGEAKHCSMAPIPSLAEEDAKRPNREHEKLGAERTRILNKIKAALVRLGVRGFKPNLRNAAERLEALRTPEGLPVPPNTLAELRRDLGRLKLVREQIKEIERARERRLKQAPQEGAHPMVLMLARLKSLGVETADRLVHEAFYRSLRDRRAVARYGGMTGAPDESGAKRREKGLARAGNGRVRKAMLQLAYRWIMFQKESALTQWYQRRVAGAKGDVRKTMIIALARKLLIALWRYVTEGEVPAGAVLRPAP

SEQ ID NO: 82254 - protein, 341 aa, unidentified
MTEVSTIGLDLAKNVFQAHGANSSGAVLFKRKLRRDQVLSFFAAQRGCLVAMEACPGAHYWAREIANLGHEVRLIAPAYVKPFVKRQKNDAADAEAICEAAQRPTMRFVAVKSEDKQASAVVFRTRDVLVGQRTQIINAIRGHMAEYGIVARQGPSHVEQLISQIEDGSSCIPEAARSCLAVLVETLRGLQTRIAALDAQITARAKRDDVAQRLMSIPGIGPLIATAIEALAPPVETFRSGRDFAAWIGLTPLQRSTGGKERLGRISRMGERTLRRLLIIGASGVVRWAKRKGVPPGTWLARMLARKPPMLVIVALANKTARIVWALIARGGIYRAPVAVA

SEQ ID NO: 82255 - protein, 414 aa, unidentified
MLKIVYRICCGMDVHKSFVVACIASTNDQGVTTYKSKRFSTFTGDLRRCAAWLSENNCKDVCMESTGKYWIPIYNILEPTCNIVLAHPKYVKAIRGKKTDKRDAKWIADIFKHDLVAGSFIPPADIRQLRDLVRYRCKLTNFTTGEKNRAQNCLTVSNFKLDDVFSDVFGKAASAITTRILENPTAKITDVSGFRTKGMKASNEQVLAAVDGEMCEEQAEKLRIIRSHMDSLELCKLNLESLILSTAEQYLPQLNLVMTAPGIQSFAAIGIISEIGVDMSVFPTSKHLCSWAGLTPQNNESAGKKKTTRISRAGAYIKPLLVQCALCAIRAKRFPEVRSRYLALKKRRGHKKAIIAIARMLLTAIYNMLKKNEPYNPELYRKGDRPPAHREVSVEEAIFILQRQGYLVTAPTTA

SEQ ID NO: 82256 - protein, 409 aa, unidentified
MQVIHPRCAGLDVHQKQVVACIRVVSRKKVVQEVRTFDTTTRDLLALSDWLASHGCTHVAMESTGVYWKPIWHVLDGAFELVLANAMHIRNIPGRKSDVNDATWISDLLAHGLIRSSFVPPVQIQELRDLTRSRKQFVLESARHVLRLQKVLEDANVKLTEILSDVMGKSGRAIIEALISGETNPEVLAGLACGNRLKATREEFVEALRGRVTPHHRFLLKLQLGQIDSLDSAVRELEVRMGEALSPFRESAELLKTIPGVSDTVARVIIAEVGLDMGRFPTSGHLISWAGLCPGMNESAGKRLSSRIRPGAPWLKTTLAQAAWAAIRTKGCYLRAQFHRLKSRRGPKKAIIAVAASMLTAVYYILKNHVPYRDLGFDHYDRIDKTKAATRLVNKLKNLGFDVALSPAA

SEQ ID NO: 82257 - protein, 333 aa, unidentified
MSYKYYIGIDISKEKFDISIFGEDAHQSFSNDAKGFKAFIDSLTHPSNAYFVTCEATGGYEIDLMTFLHEQGFAMHRVDTLKSSHYMRSLKSYSKSDMLDSEALARYGKERHESLSLFIPLEEDIVKLQALSTHLAGLVKLRTSEKLRLQSPKNRHNEQVQSSLKSHIEFLNNQIQTIEEEILRIINGHEKLKKIKETVMQVKGVGPKTMLMLVAHCPELGKISRRQIASLAGVAPHPRESGKQEGYRSTRGGRSVLRQALHMACLSAVRHNEAIKVFYDRLISKGKKKMVAAVAAIRKMIVIINAKVRDLLAGKDPFAVGCPAKKSKTKRAA

SEQ ID NO: 82258 - protein, 344 aa, unidentified
MVTLGGDSHKQTHTVVAVDDNGRQLAEKTLPATCAGHLEALQWAARWSERKWALEDCRHVSRRFEAELLAAGELVVRVPSKLTGGARKVARTSGKSDPIDALAVARAALREPDLPVAKLEGAGREVRLLLDHREDLVGERTRIQNRLRWHLHELEPETAIPARRLSRYHILAEIEQRLERHQGVVAQIARELVVRIRELTRCINQLEAEIGHRVGALAPTLIQLTGCGALCAAKVIGEAAGISRFRSRAAFAMNNGTAPVQASSGNQQRHRLNRGGNRQLNVAMHRIAITQLSRPGPAKEYLAKRLAAGIRALKRRISDEVYRRLLRDERESSTSDVTTCVAAA

SEQ ID NO: 82259 - protein, 405 aa, unidentified
MCILSPDNKIFAQEKIYHDETSINRANALLQKAERLFFSKPVIVMESTSHYHLILFQFFSEHGYDVIVVNPLQSNSMKDFSIRKRKTDRVDAFKLAMMYRTKTLRPSQIPQTATRALRQLCRHRAELLNDVSSYKNRLTALLDQTFPGYDKVFSDVGGVTSCAVLVRFPTPTILLVEEESELVEVIAAASKSGYSFAKKKAGLLISAAQKAQTLGIHSCADETLIVCTIQMLRTLSESVLQIETAIDNLLAQIKEMRNNVSLLQSIPGIGSHSAALLLGEIGDISLFKKPKQLAAYFGLDPTERQSGSFRGTKNKLSKRGSPYARAALHMGVVNSICKRGKDSAANPVLLSYYEKKCKNKPAKVAQAASMHKLVFIIFAVLRDQKPFELKTPEQHAVEQGFVKAA

SEQ ID NO: 82260 - protein, 337 aa, unidentified
MIVIGVDVHKHSLTAVAVDELGRALAEWGGPVGGEVVGWAGALGEERLWALEDCRHVTRGLEQTLLGEGERLVRVPPRLTAPQRRRGRVRGKSDSIDALAVARAALQEPLLDGPRPGEETLRELKLLVDHRDDLVAERRRCQQRLRWHLHELDQRFAVPLGALDRTVWIDRLGRQLGRREQTTQVRIARDLLARCRTLTRSIVELDRELQTRTKTIAPGLLELAGCGALSAAKLLCEIGPIDRFRTDAQLARHAGVAPLDASSGEHQRHRLDRGGNRQLNCALHRIAVTQGRVHAPARAYLERKQNEGKTRREAIRCLKRQLARTVYTTLKNEPLLT

SEQ ID NO: 82261 - protein, 356 aa, unidentified
MMEKQSLTINVEREETKMKITTIGLDLAKNVFHVVCFNDHGKEIKKRMLRRNQVLEFFTQLPPCQVSMEACAGSHYWGRQLRALGHNVKLISPQHVKPYLRGNKNDYNDARAIAEAAMRPDMPVVGIKTVEEQDMQALHRMRSQCLRDRTALSNSIRGLLGEYGIVFAKGVPTLRKKIPEILEDAENGLSLGFRNLLVRRYEQLVELEDHIAFYTKELEGLSRQDEACQRLQTVPGFGPIVASAFRSVIGDGRTYARGRDAAASIGLVPRQCSSGGKNVLLGISKRGNKYLRKQLIHGARSVVLQAANKEDSLSCWINRIRKERGWNKAVVALANKMARIGWAVLRYRSQYQPASR

SEQ ID NO: 82262 - protein, 341 aa, unidentified
MTDITRLAIDTSKSVFTLHGVDVADRPVLRRNLRRRELLAFFERLPPVEVALEACGGSHHWGRALLALGHRVRLIPPQYVKPFVKRSKNDRNDAEAISVAAAQPSIGSVAVKSAEQQAAAMLLSVRELLVRQRTQLVNAMRGHAAEMGVVAPLGEKGVSELQAEIATADDAAVPAAAKQAIALLGREAERLETRLRAIDATLMQQHKANPVSRRLAAIPGIGPIGALSFAVRVDPKQFASARHFAAWLGLVPRECSTAGKQRLGGISRAGDERLRQSLVLGATAVIQHAKPGRPATSPWLLNLLGRKPRKLAAVALANKMARIVWAMMTSGEAYRPRPAAA

SEQ ID NO: 82263 - protein, 430 aa, unidentified
MKSNTQNTKIEAITETTLVLGIDVGSETHYARAFDYRGIEYSKKPLKFSNDEAGFVTFKAWILDIKEKHGKDKVVPGMEPTGHYWFNLGKFLQDNEMKPVLVNPHHVKKSKELDDNNPTKNDRKDPKVIAGLVREGRYMIPYLPEGVYADLRTASNMRFQLQAELTRIQNRISRWFNIYFPEYKTVYGQPDAKSGMLILKVAPLPEDILTLGIDGVNQIWRDAKVRAVGKARAKTLIEAAEHSVGSKEGEISARMEIRMLLEDYESRNTHLQEVVALIEELVKKIPMAEKLLEIKGVGIKTVSGFLAEVGDISRFNNPKELQKLAGLALVENSSGKHKGETTISRRGRKRLRYLLFEVAMSLVSKNPEFRELHSYYTTRKLKPLKKMQSLMAVAAKLLRVFFAMLTKGVDYDPQKLVGDIKRPAVYLQVA

SEQ ID NO: 82264 - protein, 309 aa, unidentified
MDATYVGIDVSKDRLDVHVQPTGEAFAVARDGEGLAALIERLKPLSPHLVAVEATGGFEMTVAAAIAGAALPLAVVNPAQVRHYAQALGRHAKTDRIDAEVIARFAAATRPEPRALPDEATQALAELVTRRRQIITMMVAERQRATRLPKRLKRSCERVVRVLEKELAALDLDIDTTVRGSPAWRAKEDLLASVVGVGDITARTLIADLPELGTLDRRQIAALVGVAPFTRQSGQWRGKSFIAGGRSSVRAALFLATMAAVRHNPTIRAFRQRLLAKGKPKMVAMVACMRKLLTILNAILRDRTPWQPA

SEQ ID NO: 82265 - protein, 402 aa, unidentified
MAAGQLWAGVDVGKEYHWVCVVDDSGAVVLSRKLVNDEQPIRDLVAEIDQLADEVSWTVDLTTVYAALLLTVLAAADTPVRYLAGRAVWQASAVYRGGEAKTDAKDARVIADQSRMRGADLPVLAPDDDLITELRMLTAHRADLVADRTRTINRLRQQLVAVCPALERVAALTSDRGWVVLLTRYQRPKAIRNSGVSRLTKILTDAGVRNAASIADAAVTAAKAQTVRLPGEEVAAGLVAELAQGVIALDDRIKATDADIEGRFRRHHLAEVITSLPGIGFRLGAEFLAAVGDPAKIGSADQLAAWAGLAPVPRDSGKRTGRLHAPQRYSRRLRRVMYMSALTAIRCDPQSRAYYQSKRDQGKKSIQATICLARRRTNVLYALIRDHRTWQPDSPPITTTAA

SEQ ID NO: 82266 - protein, 459 aa, unidentified
MGRKQSQVSAWEGLKVIHPNAAGLDIGSEEIWAAVAPDRTAEPVRKFGTFTPDLQALADWLIACGVDTVALESTGVYWIPVYEILEARGLQVYVVNARHVKNVPGRKSDIQDCQWLQGLHSVGLLRGSFRPEAEIVALRAYLRHRATLIEYRAAHIQHMQKALQQMNVQLTQAVSDITGVTGLAIIRAIVAGQRDPQQLAALRQPGVKKTEAEIAKALTGNYRAEHLFALQQALALYDFYTAQLAACDAEIERQFANLKPASDDLPPLPPTTKRDTHSKNAPRYDARSYLYRLTGVDLVAITGLNESTVQEIISEIGTDLSAFPNDKHFCSWLTLAPHNDISGGKRLRSRTLPGHNRAGQAFRMAAQSVAKSPNSAFGAFYRRMKARLGAKQAIVATAHKIARAFYHILKHRTPFHDLGGEEYERRAREREIKNLQKRAAKLGLVVTETPVAPALAGSF

SEQ ID NO: 82267 - protein, 340 aa, unidentified
MVEYVGLDVSKEETCFCVKDEAGMILALGKVASDPEAIFEALRELCHCPGRIVVETGTQSGWLVRELRGRGLAVDLIDARQAHAVMKLQHNKTDAKDAALLAEIARTGFCRPVAVKSEAAQRYRILLKSRAHVVDQRRRVENTIRGLLGSVGLRFPKGVAKFAERVRRALEAQPDLGAAVLPLLSVRASLERSIERLDREVGQCAKDNPACRLLMSVPGVGAVTALAFVATIEDPRRFSTSRAVGAYLGLTSRRYQSGEMDYSGRISKHGDAMLRSLLYGAANSLLTLVHRAHPLKDWARGVKRRTSHKKACVALARKLAVILHRMLMTGEAFRWPPRSN

SEQ ID NO: 82268 - protein, 315 aa, unidentified
MADVDIGIDVSKDRLDIAVEPDGEIWQATNDLPGITSLVERLLALQPTTVILEATGGFELPLTGALLAACLPVVVVNPRQVRDFARATGQLAKTDAIDARVLARFGGAVRPELRPLPDEATQELAALVARRRQLVEMLTAEKNRLRLAARAVRRDIQQHIRWLERRLSDLDGDLAQQVRSSPSWRERDDLLQSVPGIGPVSSVTFLAQLPELGRLNRKEIAALVGVAPLNRDSGTLRGRRVVWGGRSHVRAALYMATLTATRHNPVIRSFYTRLLAAGKPRKVALVACMRRLLTVLNAISRDRATWQPLPFQDSC

SEQ ID NO: 82269 - protein, 411 aa, unidentified
MVKENFIYVGIDLHKETHTAVMIDCYNQKLGEITFPNRPADFPKLVTKVKKCNTDAKEVVYGLENAYGYGRPLAVWLIDKGYFVKDVNTAISHRQAKHRGAMYRKSDSDDAEAIALATLNMLDKLPDACPNDAYWSLGQLVHRRDNIMKQRTRLVNQLHEQLCIAYPSYKQFFNDISRPTALYFWEHYPSRKYLKGKSVEDLRTELVPVSHNRCSTKNCEKILDAVASDKVKNNAYQDARDMVTLSIVSDLQHYDSQLAEVDKMLEQMYKMLGCTLTTIPGVNVITAVKILAEIGDIKRFSNANKLAQFAGIAPLHLSSSGKGKDVATKQGNRRLQATIYFLAIQMVQVSSKGTPRNSVVRAYYEKRKAEGKTSQQALICISRRLISVIYGMLKNGTEYRMPVVENAGEKL

SEQ ID NO: 82270 - protein, 338 aa, unidentified
MAVKVIGLDIAKHVFQLHGADAKGKAVLKKRLRREQVTDFFGSIPRCTVAMEATQGAHYWARVLTTFGHEVRLISPQFVKPYVRGQKNDMQDAAAICEAASRPEMRFVPQKSIAQQDMQMLHRIRSRLIANRTQVGNQIRGLLAEYGIVVPLHLSQLRKHVHALASEPHAQLTAFAQLLFAGLYEELCQLDDRIQAMEERIDDAFRADEACQRISRVEGIGPVIATAIVAAIANGRAFRNGRQLSAWLGLVPRQYSSGDKQRLLGISKRGDPYLRTLLIHGARSVVYRSIHKSDARSRWIADKQKRLGTTKACVAVANKNARIIWAILAKDEHYRKAA

SEQ ID NO: 82271 - protein, 455 aa, unidentified
MKASVFARPEERKINQNLKMNQTKLNRKTTAADRGDFAALIGLDWASQRHALCLYDCATGKRENSTLEHTPEAIAQWAQGLEQRFGGKKIALCLEQAKGPLIYALLEYRFFVLYPVNPATAARYRQAFKTSRAKDDPADAQVCLELLLHHREKLTPWLANDGTTRELSRLLEARRSLIDLRTLLTNMLRDALKSYYPQALELAGQDLFAPLGCQFLLKWPSLEQLQKARTESVRKFYYAHNCRRMDVIEKRLQGIGQMKPLCRDRALIEPALIQVKMLARQLLQLGTALTEYDSRIEHLFAQHQDASIWQSFPGAGPTLAPRLCCAFGSERSRYQSALSIQEYSGIAPVQEKSGKNQHWIHRRWARPHFVHQSFFEYASQSALHCPWAKLFLKEQIARGKTYPTAVRALAFKWQRIMFVCWRDRVLYHETTYLQSLKHRGSHLARKLDQELPKAA

SEQ ID NO: 82272 - protein, 391 aa, unidentified
MSMYFVGIDISKYKHDCCIISAADQQIVSKFTITNDKDGFEHLLLSLNSLSNPEGIKIGFESTAHYALNLELFLENAHHSFMEVNPVLIKEYKKSTTLMRTKTDSVDCESIARWLMTVEYKPHSKGFYHAYSLKSLTRLRDRLIRQRSFYLVKITNVLDHTFPEFKPFFNERLSKTAIYLLENYGSAEKMAHMNSASYDKLRCISRGKFSIQQFLRLKELAANTVGVNNSIFDIELNSLLTLYNSLCKEIKVLETEITRLIEEVHPHYMSIPGIGPISAAVIYAEYGDISNFSNPGQMLAFAGIEPGIDESGTESHGGRMVKHGSSQLRYVLLNACLPLIRFDITFATYYAKKRAEGKKHRVAITHVAKKLIRVIYALERQDIDFNAQKLR

SEQ ID NO: 82273 - protein, 398 aa, unidentified
MDVMYPRCCGLDVHKKTVAACLIISTEGPEPVKEIRTFRTMTADLLALADWLQEAGCTHVAMESTGVYWRPVYNLLEGQCELLVVNAQHIKTVPGRKTDVKDAAWIAELLRHGLLRGSFIPSKPQRQLRELTRYRSTLVQDHARTLNRLQAVLEDANLKLASVVTDIYGVSARAMLAAILSGERDVETLADLARGRLRAKRAQLKEALEGRVTAHHSFLLTEHLSTLEYLDEAIARVSGEIDQRLTAEQEAIALLDTIPGVGQRAAEILIAEIGTDMGRFPSAKHLASWAGMCPGNHERGGKRLSGKTRKGNRWLRQILVEIAQVASKTKNTYLAAQYKRLAARRGKKRALIAVGHTVLIIARSYWIPGSYVTSNSMSAGSNALPRLRTLCTNSKNPR

SEQ ID NO: 82274 - protein, 337 aa, unidentified
MKYCGIDLHSNNSVVIVSDEEDRIVFHKRLPNDLRQIAGAVEPYREELVGVVIESTYNWYWLVDGLMDAGYRVHLANTTAIKKYEGLKYSGDFADAAYLAQLLRLGLLPEGYIYPREQRGARDLARKRLQLVRYRTAQILSIENTLARQTGARLSGEAVKRLTAEQVEALGFVPDVTLALESNRAVSQVLQQRIEVLEQRLKERVSLRPDYRLLKTAPGIGEVLATTIMLETGTVARFAQVGNFSSYCRCVDSRRESNGKKKGEGNAKNGNKYLAWAFVEAAHFALRCCPEAKRFYERKKRKTNTIVATKALAHKLARACYHMLREQKPFDVSRCFA

SEQ ID NO: 82275 - protein, 342 aa, unidentified
MKITTAGIDLAKNVFQIHGVDAQGKAVLRKKLERSKMTEYFVRLPPCLIGMEACGSAHYWARKLTAMGHTVKLMAPQFVKPYVKTNKNDAADAEAICEAVTRRNMRFVPIKTDEQQAVLSLHRVRQGFVKARTAQANQIRGLLSEFGEIMPQGIAHIAKRLPELMEKQDLPGTFRDLLQRLYDHLKELDKQADELDAKIQQWHKASDASKKLAEIPGIGPITATALVASIGDAKNFKNGRELAAWLGLVPRQHSSGGKSVLLGISKRGDTYLRTLLIHGARAVIRFAENKPVTSWLNKLLERRNKNVAAVALANKNARIAWALLTHEDRKFRADYAPAVAGA

SEQ ID NO: 82276 - protein, 368 aa, unidentified
MGQKSSKLYVGLDVHKESIDITIAEEGGEVRHHGQIGGDANALWRAVRKLESSGRKLVFVYEAGPCGFGIYRGLMKRGHVCWVVAPSNTPRRVRDRIKTDRRDSAKLAGLARAGELTPIYVPDVSDEAMRDLVRAREDAVVMQRQARQRLAALLLRNDVRYGGKTAWTAAHRRWIADVRLAQPAQRLAFEEYVQAVEEARVRVERLTGYIVQEVAQWRWLPVVNALQACRGIQLLHAVRIVAELGDLSRFSHPRQLMSYLGLIPSEDSSGERRRQGSITKAGNGSVRRALVEAAWAYQYTAKVSGLIARRQVKVPKAALDIAWKAQVRLCARFRRLAARGVSRNKIVVAIARELAGFVWAIAQEVKPV

SEQ ID NO: 82277 - protein, 350 aa, unidentified
MSSVASFYVGVDLHKTVVQVCVLAGDGSTVCEKRLLVHDLSEGEALFSFLEPYRTGGRFSVEALGLNRWFVNEMLKRGFDIVVCDPLKLNLKMLGRKTDRRDAMEIARRLQLGDIDRNALTWYADDETYGRRKVLRSRHAQLEIRQQVLNQIRALLNAYKITGFAGDLTSKRMISRLSTLDLATEDLTVALQSWVSMLVSLGESISLLDQQIRVMDRGGLVDHLKCNLESVGQLTAAVLVHELGDVKRFTGSRAVAAYAGLVPRVNQSADTAHHGRLTKRGNRELRHVLGEWAVRLLTWDERVKAWAQPRLKRSHKNKVRMALARRLLIGVYKMLLTGEMFSMERCLGHK

SEQ ID NO: 82278 - protein, 377 aa, unidentified
MHSENIAAYVGLDVHKETLAVAIAAPERLGEVRYYGTINNEAQAVRRLFQKLQGLYGNILSCYEAGPCGFGLYHQLTAMNIKCQVIAPSRIPKSPTDRIKNDHRDAISLARLLRAGELTPVWIPDLTHEAMRDLIRARAAAKRDSRVARQRILSMLLRTDKHYAGKHWTGKHRTWLANQSFSQPSQQIAFQHYCQSLEQIEDRILQLDQEISRLLPEWSLCNLVCQLQALKGVGQLIAITLVAELGDFSRFSNPKQLMAFLGLVPGEYSSGNSIRPRGITKVGNSERRRLLYEAAWSYRTPAKVGAWLIYYRPDSVTQYSKDIAWKAQQRLCSRYRSLTAKGKKSQVAITAVARELTGFMWDIALAAQSSFSQQKQN

SEQ ID NO: 82279 - protein, 338 aa, unidentified
MEAYAGIDLHSSNSYIGIIDEQDRRHFSKRLPNSLTQILVALEPFKRDLEAVVVESTYNWYWLVDGLQEEGYKVHLANPSAIKQYEGLKHTDDKWDSFWLAHMKRLNILPEGYIYPKEERPIRDILRRRLLFVRHRTAQILSLQSTISRNLALKMSGSAIKKLKQEDAKDLFDSPFLVLTAKSNIAVIQFLTKTIKAIENAVKSEAKLRKEFQLLKTISGIGDILSLTIMLEVGDIDRFPKVGNYSSYCRCVKSARFSDGKKKGENNRKNGNRYLSWAYVEAAHFAIRFSQEAQKFYQRKMAKTNKIVAIKALSNKLARASYYIMRDQVAYDESKLFS

SEQ ID NO: 82280 - protein, 376 aa, unidentified
MKKSTLKAMRFVGLDVHAETIAVAVAEPDGEVRSIGTIPNRQESVSRLVKKLNGSGAWEACYEAGPTGYALYWQLAKLGIVCTVIAPSLVPMKAGDRVKTDRRDAERLARSFRAGDLTAVWVPDTAHEALRDLVRAREAAKRDELRARHRLGKFLLRQGRRPPDTMRVWTKTYLQWIKAKVRFEEPTQQWVLNDYLNEVDHCGQRIQRLEDLIDEAVKTAPATMREVIAALQALRGIAAMSAVTIVAEVGELSRFATARQLMGYSGAVPSEHSSGERTRRGHITKTGNSHLRRILVEAAWSQQLRPILSRKVKIRQEGLAPEIVEVASKAMHRLHKRYMQLLGKGKTVQQVVTAVAREMLGFIWAIGVSVERRGSV

SEQ ID NO: 82281 - protein, 317 aa, unidentified
MEKITNFFVGVDVSKYWLDVHIYPKNESFKFDNSTVGINKLLKILSYYTIEQVVCESSGGYEDLLLKLCSEVGHKVWQVDPKRIKAFIMSQGIKAKTDKLDAKMIARFASQQYPEYTKHKRSENNEKLRALVRRRADLTEMAAMEKKRLKGPSGYHCKEDIEKMLNVISSSIEEFTLKIKNLIDQDEDMKERKIILESIPGIGHTTAAALIADMPELGTIENKQAAALLGVAPYTKQSGMYKGVETINGGRFAPRCALYMAALTASRYNPAMQSFYNRLRENGKKPKVAIVAVMNKLIVTCNAMIKKKTKWTYTATS

SEQ ID NO: 82282 - protein, 355 aa, unidentified
MTAVPLRFVKNEWRLTMMTSFVGVDLHRNNFTYCIRENGEEKKIGKCEISELKGFASLLGKDTAMAVEATGNTFMFCRFLKAHVGRLVVVNPSQFKVISMSTKKTDKHDAKILAEFLEKDMLPEVRMKDDLQAKISSLTQTREKLVQLRTVLKNKVNNLLAANFIVLKREELSTETGLRKALSFHFDPITDTELFVVVEQIRSLNQSIEKLDKAIEDHGSKMDGFKNLKSIKGIGSKGAATLLSTIGNIHDFRSSKHLAAYIGIVPRVSNSNDTVCHGRITKNGSKTARTALVQCALIAKRYSPYLNAFHESVKSRRGGAKANIALARKFLDIVYKTLKNNWMFEDFSQFKLVKN

SEQ ID NO: 82283 - protein, 345 aa, unidentified
MTNILKQVAGIDVAQKELVVALGRMNQSIEPEIYAFKTFANKPSAFSAMEVWIKKNADQAVSVRFVMEATGVYHEKLAYYLSDQGREVSIVLPNKINNYAKTLEIKTVTDKTASMAICQFGLEKKLDTWQQPKKIYRDLKQLTRERDQVVAERTVAKNQLHAENAEAFPNERSIARLNQRIHLFNSQEKEIKADIAEIVKQDKELVERINNISTIPGIGKLTAVITIAETNGFNLIKSKKQIESFAGFDVKEKQSGTSVKGKPKISKRGNRHLRKAMHMPALTAIRHDKRFKAIFIRLVAKHGIKMKAAVAVQRKLLGLTYILWNTNTQYDPKYLQKVNEKNKAA

SEQ ID NO: 82284 - protein, 378 aa, unidentified
MRWIGLDIHRTSVEAAELRDGEPTVRRFRFCNTPEAWQRFAASLDRDAAVCLEATGNAFWIYDLLACRAREVVVAHPLKTRAIAEARIKTDKVDAEILARLLKADFVARVWVPPKPVRELRSLLGHWCCLVKQKTVLKNQVHGVLMRQGLRCPFTDLFGRAGRAYLQRIRGQLPETEQIIVDSALQVLDRVEAQLEALRRELYRRAQSVPAVRKLLAIPGVDVFTALLVIAELGDVSRFPSPKHVTSYAGLVPSVHQSGSVRYTGSITKAGRRHLRWVLVQAAQKAVRSPGRLQRFYLRLRARKGYHVAIVAAARKLLTFMWLVLVRDTEYLDGREDLRRAKERRLAREGRAYVCKDFWGSDRIDPAAEEVAVAPIGA

SEQ ID NO: 82285 - protein, 360 aa, unidentified
MSDGSKGRPKTTAGLDIGDKYSYLCLIDTESGEVVEEGRLRTNPKAFRRRFASEQPMRIAIEAGTHSPWVSRLLEECGHEVLVANARKLRLIYANKRKTDEMDAENLARLARVDPKLLYPLKHRGQECQAHMAIVRSREALVGTRTQLVNHVRGTVKSFGGRLPKCPARSFHKRASEHIPEALLAALGPILEQIGSLTERIRQYDRQLEAISKEHYPETDLLRRVEGIGPLTALTFVLTLEDPHRFEKSRSVGAYLGLVPATDRSGDSDPQKRISKEGDQMLRKLLVSSAHYILGPFGSDSDLRRHGEKIASRGGKNSKKRAAVAVGRKLSVLLHRLWVTGEVYDPLYNTRRRAQQGEAA

SEQ ID NO: 82286 - protein, 367 aa, unidentified
MKKISTATAKKVEKNASQKLTIGLDLGDRFSWYCVLNEAGEVVLEQKVATTPKAMKEVFGGMPRSRIALETGTHSPWVSRVLNELGYEVIVAHARNVRLIGESRKKDDRLDARMLARLVRIDPQLLAPVKHRSAQAQADLMAIRARAGLVRARTSLINTARGLTKSYGERLRGCNPRNMNLEKAQELSPELKTALGPLLGEIESVSERIGEYSERIEQIGKESYPEVARLKQVKGVGTLIALTYVLTLEDAHRFGKSRDVGCYVGLQPGRRNSGQSEPQLHISKEGDPYLRTLLVQGAHHILGPFGADSDLRRWGLKLAERGGKNGKKRAVIAVARKLAVLLHRLWVSGEAYEPLRNQREVALPAAA

SEQ ID NO: 82287 - protein, 386 aa, unidentified
MPQLNDLSRSPVILEQDATLIAVIEMGQSSLLVAGIVPGVERSPLKKLAVDESALLKLLHRWREEAVQAGHRIKRIVVAFEAGRDGFWLARWLRARGIEAHVIHASSVAVSREHRRAKTDRLDTELLKRSFLGWLRGERDHCKMVAIPTIEDEDAKRPNRERECLVGEQSRIINRMKATLSRLGIRGFNPKLKKAAERLEGLRTPEGESVPPNTLAELHRDMERRRLLRDQIRQIESARLDRLDQAAGEGAHTMVRLLARVMGIGIETADMLVHEVLSRNLRDRRAIARYAGLTGSPDESGKKRREKGLARSGNPRVRRGMIQLAWRFLMFQKDSALAQWFRARTENAHGSRKTMIVALARKLLIALWRFVREGVVPEGVVLRPAQ

SEQ ID NO: 82288 - protein, 341 aa, unidentified
MQIATIGIDIAKHVFQVHGVTAAGEVVIQKRLRRTELLRFFEQLNPCLVGMEACGTSHYWARELTALGHHVKLMPPTYVKAYVRRNKNDAADAEAICEAVTRPTMRFVPIKSMGQQGVLVMHRVRSVLVRQRTMMANALRGHMAEFGIIARQGLKAVRDLGRMIEHPRHPLPATARVALRVLIAQLAGVEERIREIEAQLAAWHRADETSRRLASIPGVGPITASAIAATVSDPSQFRSGREFAAWLGLVPRQKASGTKNVLSGISKRGDKYIRRLLISGAVAILRYSRAKPTPERTWMNALLQRRPAKVAAVALANKNARIIWALMAKKQFYQPSVAIAA

SEQ ID NO: 82289 - protein, 412 aa, unidentified
MNIRVEKACGIDVHQAFLAATILTSTGTKDTREFSTCLDGLLNLRTWILENRCERVAIESTGIYHIPTYTILEGKVETIVANPLQIKNIPGRKNDDIDSEWIAEVCLNGQIKPSYIPCREIRDIRELTRTHVKFTQSRTVLKNKVHKILQRSGVRISGVLSDIFGKSGVTILNGIMDGKLIDQIFNELKDKRIKNKKAEIKDAVKGELSQNDIFVIKECLETVKFLDAKITEFDSRIFQSLTGMQEKLEILMSIPGIGFTIAAAAIAEIGDIRVFSKPKNLVSWSGLAPAVNESAGKSSNGHITKHGNKYLRTILVQAANSIAIGKPNKLRFFYQRIKAKKGHKKAIVALARKLASIIHHLLSNNEKYSEEELKEKQVKLRKFVSIKELNMDEMIEILCEAGYTINKGSTAG

SEQ ID NO: 82290 - protein, 355 aa, unidentified
MERYIGMDVHAASCTLAIISEKGRKLKDFPVETNGQALVEAIRMIPGHKHLVFEEGLQSAWLYETLNPHVDDIVVAGITTSRGQKSDKGDAYGLAESLRVGSLDKHVFKAPRQFTRLRELSRIHMTLVSDTVRVQSRIKSLYRSRGILVAGMNVYAARHRKEWQKQLPSSNQTRAMRLYTYLDFLLEQKKQAEVDLLREAKKHPIAKILETAPGFGPIRAARLVPIVVTPHRFRTKRQFWSYCGLAIVTRSSSDWIQTAEGQWIKTRVPQTRGLSRQHNHFLKDIFKGAATTVITQRNKDPIYHRYERLLDGGTKPTLAKLSLARMIAATVLRMWKDEKEYDPGRACPTAKTRES

SEQ ID NO: 82291 - protein, 374 aa, unidentified
MSHHSEAFVAFDTSKLRNAVAIAEAGRAGEVRSVGEVDSTGVATAKLVKKLAAKYDRLTFCYEAGSTGYGLYRQIRTLGHDCIVAAPSLIPQKPGDRVKTNRRDALSLAKLLRAGELTAVWVPDERHEAMRDLSRARGAAVEDLRGKRQQVSSFLLRHGLHYPGKKTWTKAHTVWLASLKLAHAEQRIAFEEMLLAVRQAQERIERLEQAIRAAVADWSLAEVVTALMAMRGLDLISATTFLAEIGDLSRFQTPRELMAYLGLVPSEASTGDTVRRGPITKTGNRRARRILVECSWSYQHAPRVGKKKLEKVAAAPSVVREIAWKAQCRLCARYRALIRKGKPKNVAVTAIAREFAGFIWAVSREATSAGAAAA

SEQ ID NO: 82292 - protein, 337 aa, unidentified
MKKIKLGIDISKEKLNLCYLSNLEIVREEEVSNDVKTIKKAFKDALKALSGTVEDILVCAEYTGRYIYPLTVACQEMNVFLWLDDPARIKNSMGLIRGKNDTIDAMRIAEYAHRYEDKAARYAIPDTALVSMKNLLSDREFLLSDRKRYQAQLTDQKKYMAPNDFKHKDKRWKEVIKVIDRQIQVIDEEIDSLIAADPVLNRQKELLKSIDGVGERIAINMIAITGGFTRFRNARQFCSFAGLSPYKYDSGSSVRSKAKISKRSNQTMKTLLHMSAVNIATNMEGEYKEYYERKLKEGKHVMSIMNVLRAKLVHRMFSVIRRDAEYTKQYSPASRQL

SEQ ID NO: 82293 - protein, 450 aa, unidentified
MGNGSGVSRGDRNRNARLARLRALVPVSNAIVGIDLADAKQMVVVTDHDSKVLARKTFRCRAWNLGVALDWAAERAASKGWAGVTVSCEPTGHRWRVLGQLAADRLMPFVCVQPMLSSWARRSEDLTFDKPDEKDAVLIARPTAQLRCYVPEPVDATWGRLRHLGARREQLIVEMVSQVQQMRALLECVWPAALDTARQPFRSRTWAAAMTVICQRDGGDLARTRRLGAARFEQAVRRGITRRGGRKPCLRILRQLFTALADPTGVSAHRTGALERVGFLLHDWQAAADKLTDTETRMTGVLDELQLTELATCIPGLSAVGAAAILAETGDPKRFATARALVKHAGLAPREKLSGTYVGRTKLTGQGRPGLRLAAWRAVWGAQRGNAVYAARYQPLTTRQTNRLTPTQAQTVIAAAILRQLHAVITTGRAWDPHIATHGTGHRRQIPIAA

SEQ ID NO: 82294 - protein, 346 aa, unidentified
MLHVGLDLSRRRVDVCVLSEAGELVDEFAAPSGRDGLYGLTRRLAVFDEPLRGVVESMTGARFVHDALSRWGWEVLVADAAKVKALAPLACKTDKIDARVLAELSWRDLVPAIWLPSEQLRAERELSRYRLHLVKHRTSLKNRIHATLFSFGCQREMSDLFGAAGRQLLERLELPDPWRSNVTASLALIDDLERRIDQIQREIKRCGADHQYIPLLLTVPGVGWVLGYTIASEIGDIDRFDSPQKLVGYTGLCPRVKQSGNTDLRGPLSKHGPRYLRWALIEAAQHAAAHPGYRERYQTIKRRLGKQRGAKVAQIDLARRLAEAIWHILTKQQPFAPAGARKRLAA

SEQ ID NO: 82295 - protein, 362 aa, unidentified
MTRAVAEPTRVDDDEIVLGVDTHADTHVAAVVTTLGRLMATRSFPTTAAGYTALLTWARGHGRLHRAGVEGTSSHGVALNRYLLGQEIQVLEVNRPNRAVRRRRGKSDAVDAENAARAVLAGEATAIAKTGDGAVEMVRLFKMAKDSAIKARTQTLNQLRAVLARTDPSLRDSLKGLGQAALLRTCSRFQAGSLVGIEDAAIAVLRTLALRILALTEEIRAHERALTEIITGCAPKLLERHGIGPDTAASLLITAGDNPERLNSEAAFAALCGVNPIEASSGKTTRHRLNRGGDRRSNSALYTIVLTRLGRDQRTRDYAQRRTAEGKSKKEIIRCLKRYVAREVFPIIREALSPAQTSSSTA

SEQ ID NO: 82296 - protein, 416 aa, unidentified
MNELKCWFVGVDWASENHRVRITDGCGKRLGERDFAHGGAGLAEMAAWLTSVTGAEPSAIHVAIEIPHGPIVETLLERGFNVYALNPKQLDRFRDRFSPAGAKDDSRDAEVLADALRTDRRAFRRLALAEPLVIELREWSRMTDDLNGERNRLCNRLREQLWRYFPAMLELEQDLGAEWFLDLWELVPTPDKAMHIRETNIARILKSRRIRRLTAADVLAALRKPPVTVAPGTIEAASAHIRVLIERLRVVNRQLKDAHRQLDRLCGLLAEPTESEPGQANEQRDAAILASLPGNGRIVLATLLAEGWEALQRRDYHALRTLCGAAPVTKRSGKTRLVTRRLACNPRLRNALYHWARVAVQHDARSRAKYAALRQRGHSHARALRSVGDRLLNVACAMLRNGTQFDPSLEGKKNAC

SEQ ID NO: 82297 - protein, 344 aa, unidentified
MESYVGLDVSLKRTSICVVDRTGKVLCEGTVNSTPEAIVEFVKSKAAGAVRIGLETGPTSTWLWTEIKALGLPVICIDARHAKAVLKMQINKSDRNDAFGIARIMQCGWYKEVRVKGLDSHAIKAVLVSRALLVKIKRDLENQIRGLLKNLGLVIGQAKMNVFVVRATELIEDRPELVAAVEPLLKVREGVEKQITDLDRKVMRLARNDVQVRRFVTAPGIGPITALCYLATIDDPTRFKRSRSVGAYVGLTSRRYASGEVDWTGRISKCGDPMLRSYLYEAAGVLLTRVAKWSVLKAWGMRIAKRSGLRKAKVAVARKLAVILHRMWVDGTEFKWSSKEEVAT

SEQ ID NO: 82298 - protein, 354 aa, unidentified
MTASYEYHIGVDYHKSYSHLVVQDSSGKTLRSGRVKNDRQSLGGFLERYRENSHAVVEATRNWMVMYDWLDDICDDVVLAHPLKVKAIADAKIKTDKIDATVLAHLLRADLVPEAWAPTDKARELRVALRERMSYVRLRTMTKNRIITVFDRYPEQTAQLKKLGDLFGKAGRVQLAQVEVSEIDRIQIDRGLDFIGDIDMRIKQSEATIRAMTKANANVKLLKTIPGVGEFFARLIDAEVDDISRFRNAKKLAAYAGLVPSTYSSGGKTYHGKIIKQGNKWLRWAFVEAVAPAIASDPQLRAQYEHLKFRGTNKARVAIARKLLTIAFQILRDQRAYEPRDTSTREGATISRLS

SEQ ID NO: 82299 - protein, 347 aa, unidentified
MSITMIGLDTAKSVFQIHAVNESGKAEIKRKLHRSELRPFFEKQGPCTVVLEACGAAHHWARMLASLGHDPKLIAPEAVKPFVKKGRKNDAADAAALCTAGTRPDVEFVPVKSSEQQGILALHAARSLLVKQRTMLGNAMRGLASEFGLTVPKSIDKLAELMGLVDDDENFPATARQAIRGLFDHCDGLVESIVTFEAEIVAHARRDETARRLATIPGVGPITASLIVATVADIGTFKSARHFAAWLGLVPRQHSTGGKIRLGRITKTGNKEIRRMLVLGATSMVYRAQQWNSAVGAWLRGVLERRPARLASVALANKMARIAWALMTRNEVYCPKGTASTAAAAAG

SEQ ID NO: 82300 - protein, 366 aa, unidentified
MSSVERSHGFIHLGLDVHKDSISAGILRARDETADVVKIGSDPDAVAHLLERFPDPGRVRACYEAGPTGYELHRLLTRHGVHCEVIAPALIPRAPGDKVKTDRRDCRRLARLFRAGELTAIRVPSPREEAVRDLCRARADLLDDLLRARRRLLSFLLRHGRIYRAGTAWTGVHEKWLAAQRFDEPALTATYGHYRAVVAARQADLDAIEAELRHAGTQAPFAEPVRRLAGYRGVAQLGALTLAAEVCDWRRFPTAGAFMAFTGLVPSEYSSGNTARRGHITKTGNAHLRTQLIESAWAYQHRPIIGTVLRARQVDLPAETLARSWTAQLRLCRRFRALAARKNIKGVVVTAIARELAGFLWAEMIH

SEQ ID NO: 82301 - protein, 338 aa, unidentified
MKTYAGIDLHSSNNYIGVIDEQARRVYTKRHDNRVDYILKALAPFKKSLAGVVVESTFNWYWVVDGLQDKGYKVHLANPAAIQQYDGLKFTNDQSDALWLANMLRLNILPEGFIYPKEDRAVRDLLRRRMMFVNQRTSQILSLQSMITRNRGLNFSGESVKNMMDFFVDELFDSPHLRFTAKKNLAAIHFFNEAIKDIEAEVKSQAKLKKGFEMLLTITGVGDILGMTIMMEVGDISRFKGAGNYSSYCRCVESKRLSNGKSKGKNNKKNGNKYLSWAYIEAANFTKRYCPMAKKFYQRKLARSNKVLATKALANKLSKASYFIMRDQVPYDPEKLFK

SEQ ID NO: 82302 - protein, 349 aa, unidentified
MSSKLDSEIAVIGIDIGKNSFHIVGLDRRGAIVLRQKWSRGQVETRLANLPPCLIGMEACVGAHHLSRKLISLGHDARLMPAKYVRPYSRGQKNDFRDAEAIAEAVQRPTMKFVATKTAEQLDLQALHRVRERLVSQRTGIINQIRAFLLERGIAVRQGLRFLRAELPRILATPRDVLSPRMVHVIEDLAGDWRRLDERIEGLSSEIEALARRDVSCERLMSVPGIGPIISSAMVAAIGAGDAFSKGRDFAAWLGLVPKQISTGDRTILGKISKRGNRYLRVLFVQAAWVVLIKPKSWDRHGLKPWLEAAKKRLHHNVLAIVLANKLARIAWSVLAHGRAFEAIRIQAS

SEQ ID NO: 82303 - protein, 430 aa, unidentified
MSSANITNEKPIAAFVGIDWADQKHDIVLCAATSKAQFNHRSIGSDPDALAEWALEMQGRFGSQGRILICLEQSRGALIHFLMGYECFELYPINPKQLSSYRAAFRPSGAKDDPVDGKLLCQLIALHHQSLRPWRPDDEATRKLALLCEKRRKAVDTRTALSNQLKSELKLFFPLALSILDNDLTSALAADFLLAWPNFDSLKKASVNKVRKFFYAHQSRSEPKIQERLKCIEAARPLTRDSAIIETSSIAVRMLAQQLKNLVPFIALYDQLISELFDSHPDSALFNNLPGAGKQLAPRLLTAFGSDRERFQCLLEALTFFGLAPVTEQSGKSKWVHFRWACPKFLRQSFHEFAAQSVRSSPWAASFYQHQRARGKGHHAAVRALAYKWTRILYRCWKTRQPYNPELYLTALLQRGSPYASALNNSTQKT

SEQ ID NO: 82304 - protein, 417 aa, unidentified
MSQSFLFFVGIDWGTENHSVCVLDREGNKVAECQARHSGTGLQQLLDWLRQQTGVAPDQVAFGIEAPAGAVVDTLLEHSYPGFHINPKQLDRFRDRHTVAGAKDDSLDAYVIADSLRTDRPCFHPIQFDDPQIHRLRTLSRLEDDLGQDWSRLTNQLRQQLHRYFPQMLELSPAADEPWLWELLQTAPLPAMAHKLRCSQVQKILARYRIRRFSAQQVREKLQAQPLPVAPGVAEAASEAGLLLILRLHLLAQQRKHVAQCMKGILADLAQDTHKKEHRDVQVLSSLPGVGRIIAATMLVEAAQPLANRDYHALRAYGGVAPVTRQSGKRRQVVMRYACNQRLRNALYHWARVSLQNDDRSRAHYHCLRKKGHSHGRALRGVADRLLAMLVSMLRSGNSYDPQRRSPSQLDAELLAS

SEQ ID NO: 82305 - protein, 418 aa, unidentified
MEEIHPRCAGIDIGKKFAKVCVRTPGVNPHSRRAKERISEVVTTWGSMTNTILALREHLIEQQVTLVLMEATSDYWKPYYYLLEDLPGCEVMLVNARHVKNVPGRKTDVNDATWLAQLGAHGLVRPSFVPPPAIRELRDLTRTRSAVTRERSREVLRMEKLLEGAGIKLSSVASDLTGVSARAMLNALCAGERNPEVLADLAHWSMRGKSGELIEALTGRFSDHHSFLVRAHFDLIDKHDQVISEITERIEVMIEPFRDARTLISSIPGISNRVAEVIIAETGADMSRFPSPAHLASWAGVCPGNNESAGVVKSSKTTHGNAHLKGALGIAAFAASQTKNTYLAAKYRRIAARRGKKRAGVALQHDMLNAIWHMLQTGELYNDPGADFFTTLRPERTKGRALHQLEQLGYTVTLEKAS

SEQ ID NO: 82306 - protein, 486 aa, unidentified
MKTTRERKPEKAKAAAGRAPSKWQRMSRKQRREWTRKIQADDVSLEVVHPDAAGIDIGNECPYLAVPSKRDSEQPVRRFGCVTAELQAMAEWLKQCGIRTGALQSTGVYGIPVYDIVEAAGLEVYLVNARETKNLPGQKTDVQESPWLMKLPTYGLLRNSFRPTAEIRRMRNYWRQRNDLIQSAGRHIQRMQKVLTERNVQLAHGISDWSGVTGQAIVKAILGGERDPHKLAELRDPRIQATPEQMARSLEGNWQEDLLFILRQEHEAHEFCHKQIAACDQELKEYLNQQEDRSQGAQLEEEKRKNRRHNKKGHKPQQFDMREALFRMTGVDLTRIDGIDVMTAATVISEAGWDMSKWRTQNHFVSWLRLCPDNQVSGQKIIGKGRLPTNNRLTTALKIAATSLKQSETYLGAQFRRLRTRLGSPGAIQAMAAKLARLVYGMLRYGMRYVDRGAQVYEEQHRQRQILFLKRKAAELGLKVVETAAA

SEQ ID NO: 82307 - protein, 351 aa, unidentified
MRLYIGVDFHPYQQTVCWMDIETGELRSQVLREIDEVREFYKNQPASVVGIEASSRAVWFEELIFECGHELVVGNPFEIRKRALSRHKNDKRDAETIYTLLMRGEFPELWRRPRESSDILDIISLRSSLVRQRTQVSNRLQRIARECGFRRGSLSTLRFRAMIKAAELGDVQRMRRDHLFRLFDALRSQIDELDEWLEAKAKENGQVQLLMTQQGVGYLSALSMVHTIGDVHRFATTRKVTAYVGLDPLDKQSADRKRKGHISKAGSQHLRHLLGQSANIAARYDKRLQGFYKRLAKKKPKGVAKTATARKLAVKLSIMLRDQITAEEFDARGQRTVDDARKAPGPEMVVT

SEQ ID NO: 82308 - protein, 348 aa, unidentified
MKHYAGLDVSVKETSVCIVDASGKTCREKKVVSHPQDLVAILRDPALSLERVGLEAGPMSQWLFEGLAKAGLPVFCIETRHTKAFLKASQTNKSDRNDARGIAQMMRVGLFKSVHVKTLTSQKRRALLTGRSLLQEKAIALENDMRGLLRNFGLKVGVVSGGTFEEKIRELIEADPDLAEIMEPLLAGRRKLREEFAKLDKKVAHEARCDEVCKRLMTVPGVGPVVSLAYVSTIDIPSRFRHSRAVGAVLGLTPVLNQSGESKRIGHVSLCGDAMMRALLYEAAQTMLTRVVKWCWLKAWAMNIARRHGRKKANVALARRLAVVMHRMWVDGSEFRWTREETAGAMPA

SEQ ID NO: 82309 - protein, 393 aa, unidentified
MRTITLLWHGEASRVEVSTNERDFPIPNQAPVACNGIKVPRWGSHAPSTHSKGKSMAIVTLGIDLAKNVFALHGVGPTGKPELLRPEVRRSKLLEVVASLPPCLIGMEACSGAHHWAREFQKLGHTVRIMAPKFVAPYRMSGKRGKNDANDAAAICEAVTRPNMRFVPVKTVDQQADLFIHRARQGYIEERTALINRLRGLLSELGVVLPLKASAMRREANVVLEDLPGWCNTVVGDMLNHLGRLDERIDEYDKHLRQIAKQNDKACQLMKLAGIGPTTATAIVASVGNAHDFQNSRQFCAWLGLTPGQHSSGGKARLGRITKTGDSYLRTLLVMGARSLLMKAAAHSDPVSRWALKLKERRGFGRAVVAIAAKNARMCWAALRLGDAFRIPA

SEQ ID NO: 82310 - protein, 343 aa, unidentified
MDHFAGLDVSVKETSVCIVDDTGKIVREVKVASEPEALLAVLKNPAYHFKRIGLEAGPLSQWLFSALAEAELPVVCVETRHMQAVLKAQINKTDRNDARGIAQMMRVGLYRPVHVKTLRSQKLRMLLTHRKLLQSKAIAIDNDLRGTLRNFGLKVGMVGTVKFEVRIKELVENLPDLAVLVEPLLAVRRVLREQFVILHRRLLAIVRDNEVCRRLMTTPGVGPVVALTYRATVDVPARFRKSKAVGAVFGLTCSKYQSGEIDRSGRISRCGDEMMRVMLYEAAQSMMWSKKWSWLKAWAMQIARRRGMKKAIVALARRLAVILHRIWVDGTEFRWTREQAVAA

SEQ ID NO: 82311 - protein, 377 aa, unidentified
MNKNSYIAKKILTIKTNTPMQSNKINFKGQNIFIGIDVHLNSWSVTTITPSGYKRQTSHRADALELYAYLTKNFPGGIYHAVYESGFCGYSCCYELRELGIDCVIVHAADVPSTQKSRLSKTDSNDSMRLAMSLSNGELNTIYIPPKEVLGDRDILRYRTIVQKGMSRTRSRIKHLLHTNGVSYPREFREPYKHWTRRFIKWLREDVKLLSGKRLELDFLLEDLEHQRSQLLKATGKVRDLSRTSRYAEDYGNLISIPGIGLITAMTMLTEVTDIHRFSSQKKFMSYVGLIPVMKDSGETIRQNEITPRGNQRIRRMLMESAWSAVRYDAQMAAAFGTFCRRMKKNRAIVRIARILASRTYHILKTRTKYDTALCTA

SEQ ID NO: 82312 - protein, 326 aa, unidentified
MSSFDVSFLSESGSVRHLSGVKNTVHGISKFLLSLPSSAVLCAEHTGVYGDLLLRLCTLNRTCLCFVPGYQIKHSLGLQRGKSDPLDACRIREYAERFYDLLRPCFYPGEEMSELQELYRTRSLLVESRKRLDTLNIGDNCKSSVSLAADHARRAVLAELNTQISGLDHEIEALIQNSSEFSRNYQILTSIVGVGPVTSCELIIKTENFRKLDTAKKCAAYAGIAPYPKESGKMKCGHKISPMGDKQLKTLLFLCARSAKEHNKEIRLYFLKKHKVEKKHFFVAMNNIANKLLRLIYSLIQKQQTYDRDYIQRDPRCVVISDTNKC

SEQ ID NO: 82313 - protein, 483 aa, unidentified
MKNKQPEKTEEAPCRPTQGHWHEMNRKQRREMMRKIQSDDLRLEVVHPDAAGIDIGNESHYVAVPPTRDSESVRRFGCTTAELKEMADWLKQCGIRTVAMQSTGVYWIAVYDILEEAGLEVYLVNARETKNLPGRKSDVQESQWLMKLHTYGLLRNSFRPSQEIRTLRTYWRQRNDLVRAAGRHIQRIQKAMTQMNLQLANVLSDVSGMTGQAIIKAILGGERDPQKLAEFRDSRVKASKEEIARSLEGHWQEDLLFVLQQEQSGYEFCQKQMAECDQRIEQYLKQREDRSAGDNLPEEKRKERLRKKKKGNAPQFDLRAELFRMTGADLTQIDGVDVMTAMSILSEVGWDMTKWKTEHHFVSWLRLCPDNKISGDKIIGKARLPTNNRATSALRMAASTLRLSNTYLGAQFRRLRTRLGAPIAIKAMAAKLARLVYRVLRYGMQFVDKGAEFYEAQHRTLQINYLKWRAAKMGLQIIEAPAA

SEQ ID NO: 82314 - protein, 431 aa, unidentified
MVPMGTQVREVLDCFAKGGVDMANLMVGIDVSLRNHAVQFMNDSGDALASFSIPNDLTGAEILLQRVLESADKYQADLVRIGMEATSNLGWHLAHFLKAKLHQTPYFKAQVFVLNARKVARFKKGYDCLPKNDRIDAWVIADQLRFGRLPHELTSCIQFEALQRLTRTRFHLMQNITRDKTFFLNQVFLKFSGLRQDNPFSSMFGATCLAVLQELEPEQIVSMSITELVDFLKEKGKNRFDNPEELALFLQKLARSSYRLDKAMADPVNLSLAVMLSVIQTMEKEVSKLDKEIEKIMKSIPETVSSVKGIGPVFAAGIIAEIGDIARFPNNNALAKYAGLVWSQYQSGEFESQETKRLRTGNKYLRYYLIQAANQVRRFDSEYAAFYADKYSQALKHKHKRALVLTARKLVRLVFMLLKTKQLYTPPERRG

SEQ ID NO: 82315 - protein, 356 aa, unidentified
MSYDVKYIGMDVHQEAIVIAVQNESGKLVMESVIETKASSILQFLHGLRGELHVTWEEGTWAAWLYDLLQPQVQHIVVCNPRRNALLKEGSKSDKVDAGKLADLLRTGMLRPVYHGENGLRTLRELGRSYQAISKDLTRVMNRLKALYRGWGIACAGTQVYAARAREEWLSKLPQAGVRRRAELLYQQLDGVQALRREVRPEFLAESRKHKAAKLLRQIPCIGPIRAARLIALMQTPHRFRSKRQLWTYSGLGIETHDSAQFRFVSGQVQRSKKPQQVRGLNRNHNHEMKEIFKSAATRASCGRGPFRDFYTGLLAKGMKPEMARLTLARKIAAITLTLWKKEERFDVEQLKTQAA

SEQ ID NO: 82316 - protein, 430 aa, unidentified
MTMLIEEEETPAPAAVRERCAGLDVHRSTIVACATFPLAGGRLKKMWKEFATTAPGLGLLVAWLKELGVTYVGMEATGVYWMPVYAALEVAGGFDLTVVNPHHAKALRKRKTDVKDAEWLAYLVRHDQVNKSFVPAKPFRDLRDLTRYRRSLVEAQSSERRRLIKLLEAADIKLAGVMSDVFGVSGRAILRALISGGHSPAEMAKLARGKLRKKRPLLIEALSVDLDGHRRGLLAMQLARVEAAEADIAVLDQQIATLLAPYKDYVELLTTVPGIDWLTAVIIIAEVGVDLSAFPTDRHFAAWIGVAPGNNESAGRAKPIGARKGNPYLTTALCNAATSAARRHGSFFKATYHRLKSRRGGGRATLAVAHKVAIAVYHILTDGTPFRDLGEGHHDTKNVRRTAGRYVQRLQRLGFVVTLQPIEPATAAVA

SEQ ID NO: 82317 - protein, 466 aa, unidentified
MKLIYRRCCGIDVHKKSVSVCVLPPEGEQGAVKRETFRTFFRDLKRLRAWLKSCKVTEVAMESTGQYWRPLWNVLEGHVDHLVLLNPAHVKGLAGRKTDRRDAEWLARMNEREHLRGSFVAPAELREMRELTRTRVHLLEDCNRMKNRIAQILESGNIKISSVASDLFGLSGRRMLDALIEGKHKPAWMADYACTSLRKKRDQLEMALEGTLTDHQRRLLRRLVRQLQSLETEIVDLTAEIELRAAPWEEMIGRLIEIPGIDRVSAWTILAEIGTDMSVFPDSKHLASWAAVCPGNRESGGKRMSGKTRKGNCYLRRSLCQSAWAATRKKGSYPGTIYRRVRGRRGHQKAIMALAHRMLTIIFHMLRDDQPYRELGTAYNDEKRKAKNTARMVRGLEGMGFRVTLEVLPTPEELREFGSPTAAPETGPSVPRRGRPCKCAERGMVCKHQISPPPPSPPEITEIYSR

SEQ ID NO: 82318 - protein, 426 aa, unidentified
MKKADLLSTLFVGIDVSSRENVVCAIDFEAQKLLRFSVQNNHPGAVEMATKLHEFLSGNRDINRLMIALESTSFYGIHIANYLSSCELLMPFNTHVYCLNPKMIANYKKSYIDLGKNDAIDAFVIADFARVGRITTAPWRGSQFLALQRLTRHRLHIAGSLTREKTYMLSNIFLKFSEFSMLDEDKQPFSNNYGATASSVLTDFLSTEDIANMPIEALIDHICTKGKNRFVKPSHTASLLQQADRNSYRLDKCLYEPLTISIASSFNLISAYVSEMKAINKAIEKTFKGLDPNAYQSLLSIPGIGPVYAAGIIAEIGSIDAFNSHNALAKYAGLVWRENQSGNFRADDTILSKAGNSYLRYYLIEAASHVKNHVPEYAVFYHKKYDEVKTHQHKRALALTARKFVRLIFGLLANHQLYSQSRVSQI

SEQ ID NO: 82319 - protein, 365 aa, unidentified
MTVVGVDAHKRTHTLVAVDELGRKLGERTVTATSDGHLQAVEWAAQWPQTQFAVEDCRHLTRRLEADLLRAGHRVVRVPTPLMAAARRSGRQRGKSDPIDAEAVALAALRHPDLPVACLDGPTRQVKLLCDHRRDLVTERTKLVNRLRWHLHELDPELQIPSRGLRRYCVIDELTVTLAGRPGTVARLARDLLARCRELTVQINALERELRDLVRVLAPSLLAIPGCGVLGAAMILGETAGAARFRSKHAYARFNGTAPIPVWSGNTVRVRLNRGGNRTVNTALHMIAVTQARGVGPGKSYVDRLTTEGKTRTEALRLLRRRLSDRVFTALLADENPAADTSRDAAVHAIGTDADTNEKNLAAAA

SEQ ID NO: 82320 - protein, 375 aa, unidentified
MKSITKFIGLDVSKDKIAAAVAENGTGQARYLGVYPNTLEAVRKLFNRLGRPGELYVCYEAGVTGYALARFLKGLGIKCIVIAPSKIPQTPGPRVKTDRKDALILAEKLRMGELVPVWVPDEADEALRDLVRARKARMEDLKRARQRVSMLLLRLGITKPEKMTLWSERYRAWLRSLELPQKNSQAVLQEYIIAVEETEQGVRRLEQLIQESAADSPHAPVMQALQALRGVQVIAAATIVAEVGDFTRFAHPEQLMAYAGLTPREYSSGGKVRRGGITKTGSPDLRWICTQIAHSYRYAPRVAGNLAKRLEGASPQIQAIAWKAQVRLHRKLMKLIARGKSRPVAVMAIARELLGFVWAIAQEANCEMAMGRRSA

SEQ ID NO: 82321 - protein, 436 aa, unidentified
MERKMLNVGIDFSKNRADVGLFGPNGEIISKHTPFRNSQTGYNLFKEHILEAMKTNDLEEINISGEATSYYWMPFFMTISKDVALNEYDLHPFLLNPKWVSWYKKCFAPQHKTDSEDPLFIAERTRTSQPVHEWTYDESWFMHRLLTRFRFHLKQGLTREKNFYQAYLFVLNSAYTQQKPFRDVFGSTSAHILADLGQLSQFSKMDDHELAEYLQKTSRTNLNDSLENARRLKKVAEESFQLDSGLSDVLQRILNMTMQYIKFIEEMIKEVDKCIAEKAKKLPEVAILRSIPGIGPVFSNGIAAEIGGISRFLAGQKYDQRKKRIRNKNLRDADASVAKYAGLWWPRNASGNFESDQRKLSKTGNRYLRYYLIEAADRLRQWSPVYDEYYQKKFAEVRKFAHKRALVLTARKSIRLYVGLLHRLEPYRPQEVCIRN

SEQ ID NO: 82322 - protein, 329 aa, unidentified
MFRYLIESGEYMEAMVEKCAGLDVHQETIVACVLKGDLNSKPQSKIRTYGTYTKDLEELHDWLVEEDVEQVAMESTGVFWKCVWNIIEDERYEIKLANAREIKNMPGRKTDVKDAQWIAELLRSGLIKGSFVPNVEIRELRDLTRYRRKIIQQASTEKNRIHKILQDANIKITTDISDIFGDTGRKILEKIIEGKEITNEDLIEITSGRGKASLREKIPQIKEAIKGTTREHHKKILKLIYDHLKYLEREQKEIEKLIDEACEEYKKEIELLDSIPGIDQDSAKAIIAEIGVDMNQFPTVKNLTSWAGMSPGNNESAGVKKKRKINKRK

SEQ ID NO: 82323 - protein, 355 aa, unidentified
MDSVKYIGMDVHKEAIAIAVLNSSGKLVMECTIETKAITILDFLKGLRGSLHVTFEEGTWAAWLYDLIKPHVTELIVCNPRRNALLKEGSKSDRIDARKLAELLHSNMLRSVYHGEHGVRKLKELARSYLAISKDLGRVMSRVKAIYRSWGIPCAGKQVYAPRYRSDWLGKIQEAGVRRRAEFYYQQLDALRPLRQQVRQELLAEANKHGAWKLLRGIPFLGPIRAALIIALLQTPHRFRTKRQLWTYIGFGIETYSSAEQRFINGELRRAKKPVSIRGLNRNHNHDLKNLFKGAATVAAAKAGPFKEYYDARVAKGIRPEMARLTLARKIAAITLIVWKKGVRFDAKHLKLQTA

SEQ ID NO: 82324 - protein, 355 aa, unidentified
MLSTKYIGMDVHRESISIAVMNSAGKIVMECVIETKASMILEFINGLRGDLHVTFEEGTWAAWLYDLLKPHVTRLVVCDPRKNASMKEGNKSDKIDARRLAELLRLDHLSPVYHGEHGLRTLKELVRSYLTITKDLGRVMSRVKAIYRSWAIPCTGKQVYAPRHRAEWLAKITEPGVRRRAEFYYQQLDALRSLRREVRRELLEESKKHQAWKRLCQIPSIGPIRAAVLLGILQTPHRFRAKRQLWTFGGLGIETHSSADHRYVEGQLQRSKKPVLIRGLNENCNHDLKNLFKGAAIIASTKPGPFQEFYAALLAKGIRPEMARLTLARKIATIVLIVWKKGVCFDAQHLKPQTA

SEQ ID NO: 82325 - protein, 378 aa, unidentified
MGHDETIIFEKTYGVLTPELRQMCNDMTDRGVSEAAMESTAVYWVPVWNELCVSMELKLVNPYFIKQLPGRKSDIKDAQWIAECLLKNLIRGSFVPEPIVQDMRKLNRRIMDLNEDMTYNCNKLDAALQRCGFRLSNYVSTIKSRSYQSVLQAIINGITDPEELVKMVHGRTVNKHGRDTVKAAVSGLFSKTDITVFRQIKEVIDTIERQIEECQKELTALCREHFPEQYRRIQTIPGVKERAATAIIAETGVDLKMFATAACLVGWCGLKPRNDVSNGRYKSRKVTHGNRYLRQILIEIAWVASRTRNCFFSNFSYIQTTVKKKSKMKIQVAIARKILVALWHMLSKGEDFIDIYLRRLEEQKLMEEKLKSLESKMA

SEQ ID NO: 82326 - protein, 318 aa, unidentified
MLIRYIDIAKRNFVIAVSSLSKTKTETNNPKGIAHTIEYLKKHKVALVVTESTGGLEIPAAKAIRRAGIAVIIANPRQTHQFAQSQPLTKTDAKDAKMPAFFAQMTAQKEDSQTMPYQPPTEAEEVLEALVNRRNQSADMRTAEKNRLHQVHETQVGSVKQLIAHFDRLIDELDKQIDDHTHTHFDGKAQVAEQIKGIGSITTATLMVMLPELGRLSHKRIAGLAGIAPHPRESGETKFKSRCFGGKSAVRKALYMATVAATRFEPLIRDFYQRLLSEGKPYKVAVTACMRKLLTISNARMRDYFAENDTAENGIRTA

SEQ ID NO: 82327 - protein, 365 aa, unidentified
MAYVAMDTHKKTIAVSVAEGGRRGEVRYIGEISSEPAAVAKMVAKLAARHEHLSFCYEAGPCGYGLYRQITQLGHECVVVAPSLVPTRPGDKVKTDRRDATTMAALFRSGELTAVWVPDEAHEAMRDLCRARQMAMQGLRRARQQVLGFLLRQGRTYSAGNHWTGKHRKWLAAQRFDHPARQIAFEEMVQVVDEAEARRDRLARQMEELVPSWSLAPVVTAIQALRGIASIAAITIVAEIGDFHRFANPRQLMAYLGLVPCEHSSGAKTARGNITKAGNTRARRMLVESAWTYRLPARLGEAILKRNQGVTQKVRDIAWKAQLRLCARHRRMTRAGKPANVVNVAIARELAAFVWAIATSPAQPA

SEQ ID NO: 82328 - protein, 410 aa, unidentified
MELLHPHCAGLDIHKETVVACIRHLRRGKVTTEIRTFKTTTEELIALSDWLATEGCTHIVMEATGVYWKPVWHILSDGEFELVLANAAHVKNVPGRKTDVNDAVWLAELMAHGLVKASFVPDRPTQQMRDLLRTRKQFVRERSSHIQRIQKTLEDANIKLDLVVTDILGLSGRRILQALIAGQTVPRTLAALADRRIHATSTQLEAALHGRVTDHHRFMLKLHLDQIDAQDAAIARIDKEVDGNVEPFRVALEMLNGIPGVSSLSAEVIIAEIGIDMSRFETAGHLISWAGLCPRNDESAGKRRSTRMKKGAPWLKTTLVQCAWAAARTKDSYFHAQYHRLRSRRGPKKAIGAVASSLLTTAYHMIKSGTLYEDLGANYFNHHAKDKQALHLMHRLKNLGFNVQITPSTA

SEQ ID NO: 82329 - protein, 356 aa, unidentified
MSGLKHQKEKRIMDHFAGLDVSVKETSVCIVDDTGKIVREVKVASEPEALLAILTNPAYRFKRIGLEAGPLSQWLFSALAEADLPVVCVETRHMQAVLKAQINKTDRNDARGIAQMMRVGLYRPVHVKTLRSQNLRMLLTHRKLLQEKAIAIENDLRATLRNFGLKVGMVGTVKFEARIKELVENFPNLVVLVDPLLIIRRVLREQIIILHRRLLAIVRDDEVCRRLMTIPGVGPVVALTYRATVDVPARFRKSKAVGAVFGLTCAKYQSGEIDRSGRISRCGDEMMRVMLYEAAQSMLRSKKWSWPKAWAMQIARRRGMKKAIVALARRLAVIMHRIWVDGTEFRWTREQTTAAA

SEQ ID NO: 82330 - protein, 338 aa, unidentified
MTIEILAIDIAKNVFQLHGVNRKGRVLLKRRVMRDQLLDVLAQITPCTIVVEACTGAFWWARKFEALGHQVKIVSPQYVKPFVRRQKNDGNDAEAICTAARQAHIPLVPKKTVEQQDIQALHRARQRMVNHRTAVVSQMRGLLLDRGFAITKSITRARRFIPELLADLTNELTPMARDAIAELYDLMRDLDRRIASFDKKIEQVFRGSELCQRIAKIKGVGPKTATAIIAAIGDGAEFKNGRHLAAWVGLVPRQFSSGDRTRLMGISKRGSQHLRSLLVHGARAVVRTAPSKTDLNNQWVNQLRERRGFNRATVAVANKNARIIWAVLRTGEPYRAAF

SEQ ID NO: 82331 - protein, 429 aa, unidentified
MSYRIAGIDVHKKMLAVVVSNVEVESEFQFERRMFGGNPEQLRLLAAWLLEQEAEEVVMESTAQYWKPVWGALERYWKPIREKREGAKRRSGTLHLAQAQSNRGRRGRKKDFVDAERLVKRLVARELTLSFVPDAEQRLWRAVTRKKYQLRRDLVRLNNQLKSLLEETHIKLSSLVSDLLGVSARRMLKALADGETDPAALAALAHQRLRATPEQLCDALGACTDLKPVYRRLLKMTLEQLQLLEQQIGQLDQELATLLHPHQDAVHRLAEVPGFGVDSAQQIIAEVGPTAATFPSEKCLSSWVGACPGDEESAGVNYSHQSPKGNRHMRRLLNQAANAAVKVKGSIFEVIYRRCVPRLGHNQAIGVIAHRQCRLIWLILHNGALYEERGPAVTMQSKYKRTWRMIRQLRQLGYRIDPPNLQPSEAQAQ

SEQ ID NO: 82332 - protein, 354 aa, unidentified
MKILALDCGKYKSVFLDYQTGDGPREFGKVSTRPRDIHDLLVERRPEVFVLEIGPDAGWICDLAAALGIKTKVANTNDERWHWKKSKKKHDRMDALKLAQMEEMGCLPTVHVPEPRVRQWRSLIEYRHGLVDRRTAIKNSIRATFERQGQRLPGGHKAWTARGIEEWRKEARPLSDCRADQLWRGALHEELEQLESVQKSIAVVENKLDELAAADARIEQLRTAPCVGPRLSELVVAVLDDPNRFENGKQIGAYVGLTPRQWQSGQSCIEGHISRAGNPILRELLVEVSWLGVRTNPWMKQVYEDVRRGSEKRKKIAIVAVARRLLVRLWAMLRDGTTWKEPAPRTTALANAGG

SEQ ID NO: 82333 - protein, 379 aa, unidentified
MNHATVSAFPENTLQGALELSKKSWVLAIQFPDRQQPSLYRIDGGDTEGLMSKLTSARDRWAKITGATPSITLCYEAGYDAFWLARLLKAHCIECLVVDAASLQVNRRGRRPKTDRLDVNMLLRAMIAWARGEQHVWSVVRIPSVDEEDLRRSHRERNRLVHERTAHINRIKGLLFAQGIRGHNIKSHGKSLKPDELMTGDGRPLPPRLAHEISRELERLALVQDQLIQIEREFVDTPTSCKDTEKKRILLQHLKGIGPIVSAVMAREVYYRRFDNRRQVAGFLGLATSPYDSGAVERSQGISRAGSGPLRATLIQAAWLWVRYQQKSALTRWFLERTKGQGSRVRKIMIVAVARKLAIALWRYVEHGLVPDGAILSNK

SEQ ID NO: 82334 - protein, 438 aa, unidentified
MKVMHERVAGIDVHKKMIKVAIRSPGDKPWTRKTEILTFRTFYGVLREMARELRARGVTHVVMEASGVYTEPVYYALLEEDFTEVLVVNPAHVKALKGHKTDAKDCARLAELLECGLLQGSYIPAAELKEVRDLTRYRPETVQARTSEIQRLDKTLESAGIKLGSVASDITGKGPAAMIEALIDGERRGKVMADLAKGRARAAGKLADLSMALEGRFTEHHALMCRLILDRIRVHDTAIGGLDKQIAGLAAVWQREIDLLKTIPGSGDVVAWTWIAEIGPAPHQWFGSHEKLASWVSLAPGNYISAGKRKHSRTGDAGTYIKPVLVQAAWAAIRVRGRLQARYNRLVRRFGGPKNPAAKKKAIVAIAHTLLKIAYSVLKSGTPYQDLGEDFYTRRETPAQRQAWLERQIQKLHPGCTVTITISPPPGHAPEAALTPGA

SEQ ID NO: 82335 - protein, 317 aa, unidentified
MNTQINQNEINVGVDTGKTQLDIYIRPLDIYFTVTNNDKGIKKAINEIKKHKPTRIVIEATGRLEQAFIVACAEAKLPFVVANPVRIKKFAGSIGQLAKTDKLDAKLIAYYSEAIKPELSTLKPDTLRKMSDLLSRRCQLMVMRTMEKNRLQMMPKALESTITPMLTVINNQLTKIDNKMAKLIEQCDEYRIKNDIIQSVPGVGNVVAFSLLSNMPELGYITNKEAAALVGVAPVNRESGAFKGKRMIRGGRHQIRTAMFMSMMSAMQCNSVFKATYQRLVAAGKPKKVAIIACVRKMVVILNSMVRDGVYWDPKMN

SEQ ID NO: 82336 - protein, 387 aa, unidentified
MEYKTITAVGIDVSKGKSTIAVRRPGGEVVLVPFQVNHDAAGLSGLVKTLREIDGDIRVVMEHTGMYWRPIALALKEAGFFVSVVNAILIHDFSDNSLRKIKTDKADSMKIANYALAFWQELREYSNEDETRQLLKTQSRLYERTQSAGVALRNSLISLIDQIFPGANHFFGSIPRKSNGHVKWVDFVKRFWHKDCVAGISLAAFSAVYRKWCSNNGYKFYSSDAEKIYRSARGAVATFPKNDSTKLLITQSVDSLNAVYDALYVMRGEMMRLASLLPEFEVVMSMQGAGEITGPQLMAEIGDVRRFTHKGALVAFAGVDAPPFQSGKFDSKSRRVSKRGSPHLRRTLFQITSILLQHSDPANPVFQFMDRKRAKGKHFYVYMVAGH

SEQ ID NO: 82337 - protein, 392 aa, unidentified
MFYVGIDIAKQNHEASIIDSNGKLLDKSISFSNSQVGCNKLIALLERFEANTSNTVIGMEATGHYWVSLYSYLLDLGFTVNVINPIQSDAFRKMYIRQTKNDSKDSFIIAQIMRFGEFSTTSLADEDIMALRQLSRYRLALVDECSDWKRKCIALLDQVFPEYSKLFSDTFGVTSRQLLSKYPTPEDMLSIDTGTLSKLLSEASRGRFGISKASEIQESATNTFGINFAKDAFAFQIKQIIAQINFIEEQLKELETEISTLLHQTNSVITTITGIGDVLGAIIIGEIGDISRFEAAPQLVAYAGLDVAVKQSGDFVGTQTKISKRGSPYLRRAIWLAATVAAFKDPALSVYYQSLRARGKHHLTAIGAVARKMCNIIFAVLRDNKPYVPNIK

SEQ ID NO: 82338 - protein, 402 aa, unidentified
MALASRGPLLPPGEDPMGRRRGYGTIVVFRQKMERPMQSNDLSRSLVAFEQNSTLVAVVELSLKSWLVAGLVPGLTRQPLKRLTADGEALVALLDRWRSEAVKSGRRIERVAAAFEAGRDGFWLARVLRARGIEAYVIHPNSIPVPREHRRAKTDRLDTGLLMRAFLGWLRGETKHCSMAPIPSLAEEDAKRPNREHEKLGAERTRIMNKIKAALVRLGVHGFKPNLRNAAERLEGLRTPEGLPVPPNTLAELRRDLVRLKLVREQIKEIERARERRLKQAPQEGAHPMVLMLARLKSIGVETADCLVHEAFYCPLRDRRAVARFGGMTGAPDESGAKRREKGLARAGNGRVRKAMLQLAYRWTMFQKESALTQWYQAWTQHSCHRTQVAVTRSVRFWRDVV

SEQ ID NO: 82339 - protein, 352 aa, unidentified
MMPDRRDIALEKEEHMTEVHILAIDLAKRSFQVCATAAGGAVLFNRMVSRAKLETVLREQTPCIVAMEACATSHFWGRFAQGLGHEVRLIPPIYVKPFVKRQKNDAADAAAIAEAALRPNLHYVAVKSAEHQARAVAFRTHQSFVGQRTQLINAMRGHLGEFGLVVAQGPTGLKTVAGMIDDDATELPDAVRDIIRLYLDQIAVLTQKIDELHFKLRAAIKVDDSMRRLCTVPGVGPVTAAAIMAFAPDLRTFASGRNFAAWLGLVPRQRSTGGKTKLGGVSKMGQADIRKLLIVGAMSRIRWIVRKGVLPDNWLGRVLGRKPRMVAAVALANKMARMIWAMMTREENYRMA

SEQ ID NO: 82340 - protein, 366 aa, unidentified
MNECAAARVVRVGVDLSKRVYQVHAVDRSGEVVFAKPMSPERFLAWCADLPVGCLVATEACGGAHHIARRMLAMGLDARLIAAHFVAPYRLAGKSGKNDANDAAAICEAASRPHMHFVPVKTTERQGQVALHRLREGYKEERSACINRIRGLLTEFGLVFPKRPETLRRVLIEVLEDGSNELPGLVRLALERAHAHWVELDAQLAWCDQQIDVHVRTDVRAKKALQLQGIGPITASAIIAGVGDFTQFRNARQFGAWLGLVPSQNSSGGKVSLGGITKRGDDYLRTLLIQGAKAAVMTANKRTDRLSRWLLQLKARAGWQKATVALANKNARVLWTIMTHGTTFDADYLPQIPAARQPKPPAAQLA

SEQ ID NO: 82341 - protein, 351 aa, unidentified
MRAKHWVGLDVGESCTRVCVLRKRGPAVLECSTGSSAEDIARGLSMFEIADIDSIVMESGAPGEIERQLKKMGYPVVVLDVRKTHRYLSIRHNKTDENDARGLAEIARLGELSRLSVYSKSYDSEVLRNQLCVRKRLVDTRAEIQTSLRSLLRNHGSQLRRVPHGKAMRPAIEAEFARLQSTGASQIVSQLLPLVDVWETLSGHIKRIDDELACIARLNPVVQRFIQIPGVGPMCAISFYATIDDPHRFARTADVGAYLGMVPRVQQSGASLHRTRVTRAGDAMARGYLVLAAGVALTRAKQSSALREWGLDLRKKVGFSKARMAVARKLAVTMLSMWKADKDFVPYPQRA

SEQ ID NO: 82342 - protein, 391 aa, unidentified
MFYIGVDIAKNNHEASIIDSNGKLVSESFSFSNSIRGLEKFQKFISSFSIDFNNCIIGMEATGHYWLSLYSFLIDLGFSCIVINPIQSDAFRKMYIRQTKNDSVDSFVIAQILRFGEFSVSHFSDEDTFALRNLSRFRFALVDEASDWKRKLVAILDQVFPEYSSLFSNIYGVTSKELLSKYPLPEDMISIPADELAKMLSKCSKGRFGIDKAKEIQEKASNSFGVKFALKSFSFQIKQIIAQISFLEDQIFEIEDEISSMINSLCPVITSITGIGDVLGAAIFSEIGDISRFERANQLVAYAGLDVAVKQSGNFNATDTKISKRGSPYLRRAIWLAACVAAFKDPALSVYYQKLRQRGKAHGTAIGAVARKLTNIIFAVLRDNKAYIPNI

SEQ ID NO: 82343 - protein, 421 aa, unidentified
MTENTKAWSERTAFAGWDWASDHHDVVVVDARGTVVEDFRIDETAEGWQSLKPRLSKYLDLAVAIETSSGAAVERLLEAGYAVFPVNPKAAKRYRERKAPSGTKTDRGDAWSLADALRLDGHTWRPLRPDDPLTVELRLLCRDEIALIEQRTALVCQLRAALHEYYPTALRAFDDWTARASWAFVKQFPTPQTLVAAGKRKWEKFLHTHKLYHSKELYAKRLELFAVADQFCGSAGVINAKSLLAVALVAQLRVLEDHLDQYRKKIMERFGQHPDHGLYGSLPGVGEKLGPRLLTALGDDRARFDSVEGLQCYAGTAPVSYQSGQVRKARIRHACQKPLRYTMTLWANLSRKVCPWAEAYYQRKREQGQSHACALRCLGHRWLKILWKMWQTRTPYDAELHQRNQVRHGSWVIALLPETAG

SEQ ID NO: 82344 - protein, 418 aa, unidentified
MSVLNSLFVGIDVSKNSNQVYAMNFDVKKLLSFSSPNDTEGASKIESKLLECLIKNNYENIVIVLESTGMYSFHIATYLSSSEVLLKYNVLVYCIDPKTSCNYRKSFSEMDKTDPKDAYILADMARAGKVNKLNPVKGPQKLAMQRLTRHRRHISEQIVREKLYVLNNIFLKFSAFDRKYDGIQPFSDPFSATAQEILLEYKSPEEIINTPIEDLTSFISTASKNRFADSKKVAEILTKCARMSYRLDKTAYEPINTAIASSLAILRCLDKEIKHIDKEIATLSKGYNSDEYTCLISIPGIGPVFAAGILSEIGSIKQFDNEEALAKYAGLTWRRHQSADVEHEDTPMTKTGNSYLRYYLCEAASMAVLHNPVYKEYYQKKFAEVKTHQHTRAIALTARKLVRLIYGLLSKNQLYKNQ

SEQ ID NO: 82345 - protein, 352 aa, unidentified
MQQFIGCDAHKKYSVFRAINEEGRLGPAVRISHDRKQFRSYLAQLPPAASIAVESSGHWYWLIEEMERAGHQPRLTNASEAKRRMGKTKKTDKLDAGGLAILLRNGTLPEVWIPPADLRDQRELLRLRMFLSALRTQVKNRIHGTLGRYNLQIEVADLFGVEGRLRLGQRLNELPEETRRSVERELATQDFLELQMEEIEKSLHHVMQAIPEANLLRTLPAVGPILSAVIALEIGDVGRFPAAENLASYAGLVPRVHSSGGRTRMGQVGGDVNRTLKWAFVEAANLIVMQQRRLADTHVLRLYRRIRARKNHQKAAVAVARHLAEAAYWVLRKREAYREPPARKPAVASTHG

SEQ ID NO: 82346 - protein, 437 aa, unidentified
MKALTVLDARAAFVDVGSEHMHVSVAGDEPVVFGTVTSQLHALRDWLKAQGVRSVAMEATGVYWLPLYGVLEAAGMEVRMVNGRQTRNLPGRKTDMKDSQWGATLHMHGLLRAGFVPPADIRRLQDYLRLRADHVASAATSVQHMQKALERMNIKLHDVISSLAGTSGLAVVRAIVAGERAPQALLALCDAQIRRAKAEPVLESLRGTWDAEHIFALRQALQSWDHYQHQIADCDRQIESVLPPHDPERPPLPKLRARKRAGVNSPEIPKLREILAQMCDGRDLTQLPAHTHYGVLQIVGEVGTDLTQWPTEKHFTAWAGLAPGNHDSGKRKGRAKRGRNRTGQLFCVMARSLVRSKDIALGGFYRRMAARRGGLIANMALARKLAAWFWRVMVKGDEYIEKGLASYDAQVLLSKQRALKRLAKELGQQLVPIPQTA

SEQ ID NO: 82347 - protein, 345 aa, unidentified
MKIVGCDLHTRYQQIAMLDDETGELTERRLEHASGEAKEFYTKLTGAVRVGIEATGHTRWFERMLAELGQELWVGDAARIRAAEVRKQKTDARDAALLLELLRNGRFPRLWRPTAAERDLRHLLWHRQKLVWMRNAVGNQLHALAMGEGLCRKKQLFTKKGRGELQALKLDRWASRRRQELLQMIDPIDASLKQFDEAVNQQAAGTPEAVRLMTHPGVGPVTSLAFALLVGPVSRFSRSKQLVSYLGLNPREHSSGGRQRLGAISKQGNPMLRGLLVEAGHTAARLDPELRQDYQRLRLRRGGSVAKVAIARKLAVRMYWMLRRQVNYTQLVRMQGSSRATLVQQ

SEQ ID NO: 82348 - protein, 341 aa, unidentified
MIIIGCDFHPRFQQIAFVDQETGEYGERRLNHPAEAEAFYRSMAGKQVRIGLEATGNFRWFRRLVQELGFAFVLGDPQEIRARDPRRQKHDKRDARHILKLLLEQQFPVVWQPPAENEHLRELLFHRCRMVRLRVRIKNQLDGMAKNEGLLDTRGWSNKRRKQLEALPLSGWDAQRRSDLLDLHDQLDEQIEPLERAVQEAAENHPQCCLLMTHPGVGPVVSLAYVLIIGDWGRFERSGKLASYLGLIPAEDSSGDKRRLGHISKQGNTMLRWLLVQAAVKAQAKEASWRRQYVRLSLNKHHGVAKVAIARKLAIRLYWMLRSGHNYTQMMDRGWHAGQSV

SEQ ID NO: 82349 - protein, 345 aa, unidentified
MQPMYYIGLDVHKQKISYCVKEGGGKVFAEGWIPATRFDLDRWRKTLPQPWSAALEATMFSGWIYDQLKPHAAEMKVAHPLMLRAIAAAKKKNDRIDANKICDCLRCDFLPESYMAPTAIRERRRTLRYRNLLVRQMVQMKIKISTLLMEAGVSYNKSKLHKAGYFRELLATNPDINESLRSLLRQCRETVVRLSKMETALIHSLQQDQLLVERVERLMSIPGIGPITALTWALEIGEVQRFSSIKKAISYCGLCGDEQRSANSVQRTPISKQRNKHLQTTLIEAAKMAPRYSPTLAMLYEREEQKGNANRATLAVARKLVAYLMAVDRGKTHFLVIDQETRTAA

SEQ ID NO: 82350 - protein, 422 aa, unidentified
MEEFRVFVGIDWGSESHEICAVDQRGSKLLTHSVAHDGEAIAGLVDRVLALVDGKPEGLAVAMEAPHGTMVEAFLERGAAVFSINPKQVDRFRDRYSVAGAKDDRLDAYVIANSLRTDRNLYRRLSLDDAAIVELRTLVRAREDFQQDILRLGNRLREQLHRYYPQILELGDVYSDSWLWEVFEMASTPEQARHLKRAKVDAILSRHRIRRVDATDVLRILRKKPVPAAPGVVEAARQHAQLLIPSLRLALQQRRDCDRRLESLLDHLSSSETPSENTSGHQTHRDAEILLSLVGVGIVNGATMLAEAGRLLRDRDYQGLRVLSGTAPVRRQTGKQGKNGRSAPVSMRRACNTRLREAVHHLAHVAAQRDLRTKQHYARLRAAGHSHGRALRGVADRLLAMLVAMLKNGELYDPGRRVALAA

SEQ ID NO: 82351 - protein, 432 aa, unidentified
MPGINKKPMNESNQFKATIGLDWADQKHDLWIRPADGSKSEHLRLEQSPEALHEWAAKLRKRFDTGQVAIGVETSRGPVISALMTYDFMVLFPINPKALKDYRAAFSVSGAKNDRTDAQLIEEFIRLHSEKLKALQPDTELTRKLAGFVQDRRHLVDERTRIVNQLHSKLKTYYPLAETLIGSEMNSLLAAEFLSRWPDLESLMAATLPRIRAFFYKHNSRSAKKMEQRLEAIKTAKALTTDPGIIEPARELVLALAGMLKCLHKSVARLEKTIELAMDQHPDAPIFRSLPGAGPALAPRLLVAFGTQRDRFQSAQEVAQFYGVAPVVIQSGNSELVRIRRRCPKFGRQTFHENASCVAKSEPWGRTYYQQQKKKHDDKHHQACRALAYKLIRIYFSCWKARTEYRSNIYLNALQKHGSPLHNKLNMIVNNS

SEQ ID NO: 82352 - protein, 453 aa, unidentified
MAQRNRSLPLKPPKSRQGLSLTHPNAAGIDIGSASHFVAVPPDRDSEPVREFKSFTADLHALADWLSACGVDAVAMESTGVYWIPLYELLDRRGFKVLLVNARHVKNVSGRKSDVLDCQWLQQLMSYGLLQGAFRPADAVCALRSLSRQREMLLKGQARHVQHMQKALTQMNIQLANVISDVVGETGQKILRAIVAGERDGRVLAAMKNVRIRASADEIAKSLEGNWRAEHLFALKQALALFDFHATQLAECDQEIEAQLASLAIHEDAPKKGKKRGRARNAPKFDLRQRLFQMCGVDLTRIDGIDVTTALAVVSEVGTDMSRFASAKAFASWLGLCPGTKITGGKVMSGKTKRCGNRAAQALRLAAAALRTSQSALGAYFRRMCSRMDKPKAVTAAAHKLARLIYSMLTKGEEYTDQGQDYYEERYRERVLRQLAQRAEKMGMKLVASEQPA

SEQ ID NO: 82353 - protein, 372 aa, unidentified
MTKIVVGVDAHTDSHDAAVLDDCGRLLATRTFRADAGGYHDLLGWVQRFGAIAAFGVESTGSYAAGLVRHLRAQGLEVLEVNQPHAHSRRRRGKSDPIDAEMAARHVLAGSSVVIAKDTTGIVEAIRQLRVARDGAVKARSAALNALTGLIVTAPEQLRQQLLVRNTTRGRATLCARFRPDRARLHEPVHAAKTALQSLARRVIDLDAEITALDRQLTPLVTKAAPATTARLAVSTGHAGALLVTAGQNVDRLRSEASFAALCGASPLPVSTGRTDRHRLNYGGDRDANRALHMIAVCRLRHCERSRAYAERRTAQGKTKTEIIRCLKRYIAREIYHALVTDLLPPTSRRRPAPTVSITCGAGTIGRTVKTT

SEQ ID NO: 82354 - protein, 319 aa, unidentified
MAMNTQAIQIGIDVAKEELVIYRQDLDQVDSLPNTLPSIRRWLKTLPEHAALAVEATGTYHMPLTEQAHRAGHRVFVIDGYQLKHYRESVRARAKTDPCDARLLARYLAREGDDLRAWTPPPKAYRTLQSLLRRRSKLIQARVALQQSLGQEPSLKAPLKRLVAQINRIDQLIQKRMHQAVRQAGLTEQVARCEAVEGIGPLSACALVMAFLRGDFRNSDAFVAFLGLDVRVRDSGKQVQRRRLSKRGDPEIRRLLHNAAMAARRHPYWANVYQRYRDRGLQTTQALVILARKLARIAFALMKNQTTYQEKAKQACGTT

SEQ ID NO: 82355 - protein, 345 aa, unidentified
MLHVGMDLSRHRLDVRVLEPGGATVAEVAVSPTGPELRRLAARFAPEGPVRAVIESMNGARFVHDTLELAGWEVEIADARKVKGLAPLACKTDRIDAWVLAELSRRDLVPAIWLPTPQVRADRERARFRLHLVHHRVQLKNRIHAALIAFGHTCPVADLFGVAGRRLLAQLEFPEPWARDVTACVELIDHLNTQIDQIERELRRDGAHHPYVPLLMTVPGIGWVLAYTIAAEVGDITRFASPKKLAGYSGLCPRVYQSGGSDRRGSLARNGPKYLRWALIEAAVHAAHHDRYRDRYQRTKTRLGRQRGAKVARVELARTLAEAIWHMLTKGEPFAPQVPRPVLVA

SEQ ID NO: 82356 - protein, 418 aa, unidentified
MNENLNLVERVIGLDSHPDSFTAAVLRGATPAAALTEKIFNKVPMSRLQVWAKKNTNPQDLMVLEASGNSFHIVRSLAAIDRKALVLESCQLGKLKEAHANNDKISAVRIAKAYLAGTARVVWVPDPQTQERRDLFHIYKKANKRVTQTRNRLLSYLSDNGVRVRKGMRLTQEQGSQQMRQAKEWSACQRQVLEGLLLELAHAEQQRKHWRGLIAQQVLGDPLLLSMVRLCGVRDVVAFALGAIIGDIKRFAEPRKLVKYVGLNPAFDDSGEGQWAGGIGGHGRKDLRCLLIEAAQSILRSKDPLARWGKKLLRSKGSISLAVAAIARKLTVAVWYLMMGRWTAVEELDERLSSKISTIITRVGAEGLKQLGKTRKAFREEIHQSLKTGRTYQLKPDKKFGPKPTDKSQTLAEEYGLR

SEQ ID NO: 82357 - protein, 375 aa, unidentified
MNNDSTVFVGLDVHKDSIVAAYSVGFGEIEILGKIAPRATDIDRLCKRMQSKASNVVFVYEAGPCGYGLHRQLTAKGYPCMVCAPSLIPRKPGERVKTDRRDAAKLVRALRAGDLSPVHVPTVEDEAFRDLVRAWGAAKQDLKQARQRLKAFLLVHDVRYSGRANWGPAHRRWISSYSFNSPWQQLAFEEHRRTIEDRLAQCTRLETALREMAPQWRFYPTVQTLQALRGVQFTTAIGMLAELGDLSRFDHPRQLTAWLGLTPSEHSSGQRRKLGSITKAGNSHARHLLVEAAWSYRHPAKVSPAIQQRHDGLPKAIIDRAWDAQLRLCKRYRRLVARGKHRNVAVIAIARELAAFVWDIARMTPPAPEPQPYTH

SEQ ID NO: 82358 - protein, 413 aa, unidentified
MKKHTYRAQKVNSINWQQVKEQTLGEALVLAVDVAKSQQYALLTNQDHTKSWMMQWNHLEQTFYLLEQLKTLETPISVVMESTSTYGDSLRYQCRKAGFAIYQANAKKVHDAREIFDGVPSLHDAKSAWLIAKLHKDSITKLWSEPTNEERRMNALRLEYDLHQDQHLRNQNRLEAYMSRHWPEVLALMPLGSVTLEQLIKHYGSPQKVAAEAKQAALNMRSWGKTGLSAEKIAAVIASAITTLGEPCIEAECQFLIALASELEHSRLQKQEAKQALEALVDNDEGLREMGRVIGKVTTAVLVSLHLDPRRFTTPKSYQKALGVNLTEKSSGQINGRLRLSKRGSSVARRFLYMAALRLLIKDPLIDKWYKAKKDDRAKLKTVIALMRKLPLALWHIARGERFDASKLLKIAV

SEQ ID NO: 82359 - protein, 326 aa, unidentified
MEHELHYIGIDTAKEKLDVDVLRPDGRHRTKKFANTTKGHDELVSWLKGHKIDHAHICIEATGTYMEPVAECLYDAGYIVSVINPAPGKAFAQSEGLRNKTDTVDARMLAEFCRQKRPAAWEAPHPLERALRALVVRHQALTDMHTQELNRTETAREVQRPSIDAHLLWLEAELKRLEKQIKDLTDDDPDMKHRRKLLESIPGIGEKTSAVLLAYIGLKDRFAHARQFAAFAGLTPRRYESGSSVRGTSRLSKAGHVSLRRALYMPAMVATSKTEWGRVFRDRLAANGKKGKVILGAMMRKLAQVAYGVLKSGVPFDAARHNPVAA

SEQ ID NO: 82360 - protein, 396 aa, unidentified
MKKNILKFSLGIDVSKADLDCNLSYLTEELEVKVKASRKFKNTPVGISQLITWAKKHMKEADIPVIAVVEATGVYHENIAYSLDDNNFDVAIVLPNLAKKYIESLGYKSKNDKIDAKGLAYMGAERMLRKWERPSKALYMIRSLSRELSALQDKMTVTRNQIHALEHAYQKNTKTYNRLVAHLKFLQKQEVAIKKDIEKTLKKDEDLYAKVENIIAITGVGMNTVATIIGETNGFALIENAPQLVSYAGYDVVERQSGPKKGKTRISKKGNSNIRKALHFPAFNVVKYKVAPFKSFYDRLIENKKLKMVAYTAVQKKLLVIIYTLWKKNERFNPAYTYANDTNVDRERNTAGELKENSAPNQMDALHKITSCGQEASFDKNKDNELNTNHHAQEYT

SEQ ID NO: 82361 - protein, 362 aa, unidentified
MLKQEQQVKKISFEGEQIFVGIDTHKKTWKVSLYHQQTSLKTFTHEPNSKQLVRYLRRHYPGADFHCAYEAGFSGFWLQKQLTKEGIDCIVVNPADIPTSHKDKEFKTDPRDCRKIAIALRSNLLEGIYIPTDAGLEYRKIVRLYHDMSRNYTRYKNKVKAIINFHGIEYPEEFRSENNHWSKRFYLWLKQLTLSTEYGNWSLQWYVEECLRAKEQKRIALAKVRELSKTECLLNNVTCLRSISGIGLVTAMTIITEIEDIKRFKNLDTLCAYIGLVPSTSSSGEKERIGEITHRGNKYLRHVIVESAWMAIRRDPVLLNAYLRVKNKSESNKAIIRVSRKLAARIMYVLVNQKPYEVKYMQ

SEQ ID NO: 82362 - protein, 347 aa, unidentified
MMSSTYVGMDVHQKSTVFCLYNPEAVQDRQFRTRRVPTTPQAYEEVLKPLEGNCSVAYEVGPQVQWVAAIVRPLAAEVQVANAARIPWLFRDGRKNDRLDARKLATLLYLNQLPTVHLPPADISAWRALINYRRALVKRRTGIKNQVRSILRTFGLQCPYRSCWTRRGIAWLRSLTFDHARNLMAGILLQDLARLNDQLHRVEQELDAIAKTHPNVALLRTIPGIGPRTAEAIVAFTDVVRRFPNRKAFGSYFGMTPTEDTSAERVRFGHISKRGPSVVRWVLVEAVHQAVRHCPALATFFDRIHRGKKDRYKIAIVATGRKILTICYAMMRYQIPFDPAKVGGSSA

SEQ ID NO: 82363 - protein, 371 aa, unidentified
MAFYSKYVGMDVHKETIAVSVAEALGGEVRYVGEIANTPEAVVKLVRTLRKGDATLLFCYEAGPCGYGLYRQLLGLGQACQVVAPSLTPKKPGDRVKTDRRDSMTLARLLRAGELTAIWVPDEPQEALRDLTRAREDMKYWQRQAKQRLLAFLLRHGKTFSGKTRWTKAHFHWLETLKFDQPVQQIVFQEYVDMILAMIKRVAALDGQVETAGTESVFAPMIEGYMALRGVNRLTATTIVAEIGDFRRFPTAPGLMKYLGVVPSEHSSGQTKSRGGITKTGNGHVRRVLVEAAWTYRHPARKSPLLQRRAEGTSEAVQAIAWAAQKRLCARYRKFEARGKKKVQICTAIARELAGFIWAISKVLPQPAAKA

SEQ ID NO: 82364 - protein, 356 aa, unidentified
MTWVGLDVHARSTHAAAIDRQSGELRRARFGVGSEPVLAWLAGLPQPIHGCYEAGPTGYTLYRAAQAAGLRVDVVAPSKTPRAPGDRVKSDRKDAELLVRLLLAGSLTAVAVPSETFEAARDLARTREQVRADLARVRHRISKLLLRYGLVYERSGSTWTQEHRRWLARQRFKHAPTELAYLDALTALEGLLARRAALDERLSRLAQEPELWPTVARLRCFRGIETLSALALSLEIGDFARFQRPGQLAAWLGLTPSLHQSGESETRGAITKTGSGYARRLLVEAAWHYARPPRIGVTLRNRQQGQPEQVLQISWRAQQRLYRLQQRLRARGKAGNIAVVAAARELACFLWAAAMA

SEQ ID NO: 82365 - protein, 338 aa, unidentified
MTVYGGIDLHSTNSYIGIVGEENQVIFKNRYRNDLPIILSALAPFKDELRAIAVESTFNWYWLVDGLMDAGYPVHLANPAAMKEYKGLKHKDDKKSALWLANLLRLKILPEGYIYPKEERPMRDLLRKRLHLVRHRTSHILSIKNIMSRNLGATMKSNDIKTLQEKEVERLFQEPYLRLSVMASLSTIHHLTGQVEQIEKVILGQIRLRDDFKGLLTLPGIGMILGLTIMLEVGDIRRFEAVGHYASYCRCVKSTRLSNEKQTGEGNRKNGNKYLSWAYVEAAQFARRFHETVRTYYQKKMAKTNRIVAIKALSHKLTRASYYVMRDQVDYDPARLFQ

SEQ ID NO: 82366 - protein, 350 aa, unidentified
MKVIKKANKNKLNTFTAVEGYDHYIGLDYSQDGYSIGRVTAKMRSPKYISGSSRVEDIQEQLTKLKGKKIMTIEETTSTHWLYVELKDYVEKIVVCDPYRNSLLSEGAKNDEIDAGKLSLLLRGGFLKEVYHSMESYEIRKLISSYEDLIKAGVRLRNQQSSLYRSLGKDYKKRENLSGGPIVDFIETYQKTAIKIYEEEQKKYVKYFEKLRAKTPVIENMSKVSGIETISSIKIYGTVIEAKRFANKNKYWGYCGLVHHQKLSGNRNYGKRKTRYSRLLKSVYKTAALAAIRGNGDIGEYYEYLTATKGYAAHKARNAVARYIAKVTLAMMKNETEYIPYMWKKTEKAA

SEQ ID NO: 82367 - protein, 318 aa, unidentified
MMPASVFVGIDVSKRQLDVAIRPGGRCSVSNDETGIIQLLEQVKAVHPTLVVLEATGGYEISVTGALAAAGLPVVVVNPRHVRDFAKATGTLAKTDALDAQTLAHFAEVIHPAQRPLPDEQTQALAALVARRRQLVDMLTAEKNRLRQASTQIRPSLNAHITWLEQAIQEADRDLAESIRQSLLWREKDELLRSAPGVGPVFSTTMLATVPELGTLTHKQISALVGVAPFSRDSGTLRGKRMIWGGRAQARAVLYMGTIVATRFNPVIRAFYQRLCAAGKAKKVALVACMRKLLTIVNAMLKHRRPWSHAVNTAGAGA

SEQ ID NO: 82368 - protein, 350 aa, unidentified
MDATTVAVDVAKTVFEVAIANRQWHIVARHRFSRRRFTKFLATTPPTHVVMEACGTAHYWGRCAQRHGHTITLLPPAYVRPYVRRNKTDRTDAEALLEAIRSGQIPSVPVKSVAQQALVALHRIREQWMATRTARINVLRGILREQGVLLPAGAGPALRAIPAILEDAENTLANPLCRMISLVYEEVRQLEACIGALERELRAVAEADPVATRLREIPGIGLLTATALVGTVGHIHAFRRARQFASWLGLTPREYSSGAHRRLGGISKRGDVYLRCLLTHGARAVLQAAHRRTKTQEPLTRLHQWALTVQARRGHNKATIAVANKLGRIVWAVWTRDVEFDPRPAFPEAA

SEQ ID NO: 82369 - protein, 316 aa, unidentified
MNTQDHNEINIGIDASQPRLDIHVRPVGAFQSFENNPEGIRRAIQFIKPFKPTRVLIEATGRLEMAFFCAAHKAGLPICVYNPIRVRKFAQANGRMAKTDKLDAEDIAYFGEALKPAPTDLKPEKLRLLSDLLTVRSQCLDMSTMQKNRLQRMPKTVQKPIRNILEKITREIAGIDRQLDELIAEIPQWRERVDQLTSAKAVGKVLAYTLLSELPELGQLNRKQIAALVGIAPMNRDSGRYQGKRFIRGGRHKVRTVLFVSMMSAIQCHPKIKPMYERLVAAGKPKKVAIVACMRKQLTILNTMVKNGTFWDENMT

SEQ ID NO: 82370 - protein, 382 aa, unidentified
MQVTTIGLDIAKNVFQVHGIDAAEKVVVRKQLRRSQVLAFFKALPPCLIGMEACATAHYWARELTKLGHRVRLMPAKDVKAYVKRNKNDAADAEAICEAVRRPTMRFVQTKSAEQQGRLMLHRVRDLLMRQRTQVINALRAHLAELGITAAQGTAGLKELLKIIASDADERLPVDAHASLVVLAAELQAMQTLVGSLEKRIMAQHRGNEASKRLETIPGIGFIGATAIAATVTDPTAFRSGRDFAAWIGLVPRQDSTGGKQKLGPISKQGDRYLRRILVVGAHAVLRYAKQNPEKYPWLTQLLARRPFKVVAVALANKMARMAWALLGPISGSHQGQRSKRPHSKAGYMTAPERFADSQIPLAPRAPSIHDPQAADRAADMT

SEQ ID NO: 82371 - protein, 323 aa, unidentified
MQGKVLLERSAEEPMYVGIDVSKEWLDVYFHPAGSRLRVSNDAAGLRSLKRKLAGLGAVQAIMEATGKFHRVAWRSLAAGGFAVTIADPRRVRALAKGLGFVAKTDAVDARLLALIGAMVCAAATCPPPEALEELQELVNARSAALADAVALGNRCETSQTRLLRTELNRLHAACRKLVAKLDAEIAQRIKADPALARRHAILISIPGIGAAVAAVLIATMPELGAIDGKQAAMLAGVAPIADDSGRHRGYRAIRGGRSLPRKALYMAALSASRHNPALSAFAERLKAKGKKPKVVLIAVVRKLVTLTNTLITQNRLWSPLAP

SEQ ID NO: 82372 - protein, 365 aa, unidentified
MQKISTTRTREKNIFEGQLTIGLDLGDRSSAYCVLNEAGEIVLEHKLATTPEAMKQVFGSMPRCRIAMETGTHSPWVSRLLAALGHEVIVGHAQKVRLITKSRRKDDRLDARTLARLARIDPELLRPVKHRSAQAQLHLAEIRARATLVSARTALINAARGLAKSQGERLQRCHTQQVRRETANGLSAGLREALQPLLQEVESLNERIQEYDRRIAKMTKERYPETALLKQVKGVGDLIAATYVLTIEDPHRFRKSRDAGCFVGLQPGRRNSGESEPQLHISKEGDEYLRTLLVQGAHYILGPFGKDSDLRRWGINLAARGGKTGKKRAVVAVARKLAVLLHRLWVSGEVYEPLRNSQKALGAAA

SEQ ID NO: 82373 - protein, 329 aa, unidentified
MKAFVGVDVCKENLDIAVIVENKVCLSRQFSNSKKGIKSLIGAVKKNFKCEILFGCEATGIYDRLFLSLVNEAFYPVVRINPRFTKNELCAMNLKSSNDKVDAVLIAQRLTRGIDPLWEPKGKELDELEDLITRRSQLILMLQAERNHLERFNKGSFSFKSVMARIKDLEKEVSAITQAIKILVKENEKIRKMTTLARTVPGVGEIISASFVATVGNIRKYENAEQVVSFVGLCPQEKISGKSVRKSHLSRSGDSLFRKLLYMGAVSNIRRENVFHEYYRGLISRGKSAKTALVAIMRKMVRAMFAVLRDEIPFSTERYGKQKLSVNNA

SEQ ID NO: 82374 - protein, 415 aa, unidentified
MEVVHDRCAGLDISKRDAKVCIRVAGKGGRGAQQTVTTWGSMTNQVLALREHLIAERVTLAVMEATSDYWKQFYYLLEDAGFELMLVNARHVKNLPGRKTDVSDAAWLAQLGAHGLVRGSFVPPEPIRQLRDLTRTRTAITRERGREIQRLEKLLEDAGIKLSSVASDITGVSGRAMLEALIDGQRDPAVLADLAKRRLRAKIPALTEALTGLFSDHHGFLARVHLDLIDGHTQAIGEVTDRIEEVIGPFRAFRELIVTIPGISSGVADVICAETGADMSRFPTAGHLASWAGTCPGSNESAGRIKSTKTRPGNPYLKGALGVAAMSAAQSKGTYLGVKYRRIAARRGPMKALVAVEHAMLVAIWNMAHTGALYDDPGPDFYTRLHPDRAKHRALDQLRTMGYNVTLSPLEAAAG

SEQ ID NO: 82375 - protein, 338 aa, unidentified
MPRHIGIDLHRNQFTCCVRLDNGRNYLTDWKLEDLPRFVKKLRPSDEIAVEVTGNTRLFHDAVAPYVKRVVAVDPNQFQVISHSVKKTDPNDARSLALYLEKDLLPEVRMKDKTQAQLASLTQTRDTLVKLRTALKNKINNILSAHGINLEKEALSSEKKLREILALKFDPMIGIELKIIADQIRSLNQSIAELEKTIAEEGSKLEGHKNLTSIKGIGPLTGSILLSVIGDINDFADEGKLAAYFGIVPRISNSNETEHSGRITKRGSKLGRTALVQCALIAQRYSPYLKRHYEKIKARRGTGKAIIALARKLLGIIYRTLKNKWVFEDFPNFVLAEA

SEQ ID NO: 82376 - protein, 449 aa, unidentified
MRNQARMIKSSDGNKLAVVNPNAAGIDIADAEMQVCVPEDRDGDNNRRFGSFTKDLNRIVEWLIGCGVTTVAMEATGVYYLSLFLKLQDAGIEVLLANPADVQNMSGKKTDAADAEWLMVLHRYGLLRPCYQPGNAARQIRNLTRQRSNLIRMADTEVLYMQKAMEQMNIKLSAVLSDITGLSGRRIITAILQGQRNIYELAALAEPNCKASREDIALSLEGTWDAALLFMLKQSLSAYDFFLSQVAECDMGIERLLSLYGAQIEAGDTEMIRCKRKSKRSKNAPKMDIENFAYQLWGVNVFEIPGLKDTAVMHLIGELGHDFVDKFGSAEKFSRWCNLTPNNKISGGKILSSRIMKRKNPVGQIFRTAVAPLARDKGEMGNYYRRIKSRSGALQANVATAHKMAKIFYTMVKTRTAYNASKVGLGERELAERKIAKLERILMKLKNVS

SEQ ID NO: 82377 - protein, 387 aa, unidentified
MVQVNDLSRSLAAFDPISTLVVVVEMSKASWLVSGAVPGVERQPLKKLEPDATALLRLIERWRNEAVRAGRPISRIALAYEAGRDGFWLARWLIARGIEAHVIHSASVAVSRERKRAKTDRLDAAMLMRVFLGWLRGERGHCGMVAIPTMEEEDARRPSRERESLVNERSRITNRMKSALARLGVRGFKPHLRKAPERLAGLRTAEGTGLPANIIEEFRRDMARLALVREQISSIEKTRAERLERAPDTGPHAMVRLLARVIGIGIETADMLVREILSRKLRDRRAVARYAGLTGSPDESGLKRREKGLAKAGNARVRRGLIQLAWRFLMFQKDSALARWYRMRTEGPSGARKTTMIVALARKLLIALWRLVTTGEVPDGVELRPAA

SEQ ID NO: 82378 - protein, 422 aa, unidentified
MSYCPVAGIDVSKQFSDMCILSPDNKIFAQEKIYHDETSINRANALLQKAERLFFSKPVIVMESTSHYHLILFQFFSEHGYDVIVVNPLQSNSMKDFSIRKRKTDRVDAFKLAMMYRTKTLRPSQIPQTATRALRQLCRHRAELLNDVSSYKNRLTALLDQTFPGYDKVFSDVGGVTSCAVLVRFPTPTILLVEEESELVEVIAAASKSGYSFAKKKAGLLISAAQKAQTLGIHSCADETLIVCTIQMLRTLSESVLQIETAIDNLLAQIKEMRNNVSLLQSIPGVGSHSAALLLGEIGDISLFKKPKQLAAYFGLDPTERQCGSFRGTKNKLSKHGSPYARAALHMGVVNSICKRGKDSAANPVLLSYYEKKCKNKPAKVAQAASMHKLVFIVFAVLRDQKPFELKTPEQHAVEQGFVKAA

SEQ ID NO: 82379 - protein, 340 aa, unidentified
MNIKRIGIDLAKNSFSICAFDENDKIVLERTLKRKDLLAFLSNINPCVIAMESGSGAHHWSRQLINMGHDPRIIDPKFVIPYRAGGKSRKNDRNDARAICEAAGRPHMNFVPIKTEAQQAILMIHRCRRQVVAEHTRTANQIRGFLAEFGVVIAKGVTRLKREWFQCRLDHADKLPLMAWEELDGLYAHLLDLHQKILHYERKINALNKEDERTERLMKIGGIGPITASAIVATVGNATVFKNGRQFASWLGLTPREYSTGGKPRLGRISKRGDVYLRTLLVHGARSELMLTHKRNDAKSRWAEYLKLNKSWNKAAVALANKHARIIWALLAKNETYHLV

SEQ ID NO: 82380 - protein, 344 aa, unidentified
MNSTTIAVDVAKSVFEVAVSEQPGQVRERQRLSRERFRRFLTERPAATVLMEACGSAHHWARHAQAQGHRAVLVPPHVVRPYVLRNKTDRTDAKGLLEAFRNEDVHPVPVKSETQQALAALHRLRSTWLATRTARINTVRGVLREFGLILPLGAHHVVPHVRTLLEEADSGVPGLLRPALAAAVEEIRAIEARMRAVEQQLEAGAAQTLSVRQLRTIPGIGLLTATALVAAVGDVQRFPSARHFASYLGLTPREDSTGPRRRLGAISKRGDTYLRMLLIHGARAVLWHAKTKTAPPPDRLRAWALQVERLRGHNKAAVALANKLARIVWAVWRHGTDYMGTPAL

SEQ ID NO: 82381 - protein, 356 aa, unidentified
MVTELVDYVVGVDTHQDEHTLALVQAATGAVLAERTVTSKCRGYAEALRFASQQVDAARLWAIEGAGHYGAGLARYLSERGETVLEVGRSPRGERRLRGKDDQLDAVRAARAALRSEPQRLRSEPLPRPRSGECREALRLLLVARRSAVDVRREALVQLRSVIVTAPDRLRQELRGLPVQRLLERCSRLRRSTAATPDEVAARLVLRTLARRIEAATVEADELEGEILVHVRALAPRLLDEPGVGPIVAAQLLVAWSHRGRVGSEAAFARLAGVAPVPASSGKTTRHRLSRGGDRQLNRALHTVVLHRRHHDPATREYIARRTAEGKSRREATRLLKRYLARHLYRQLQNQEPLLA

SEQ ID NO: 82382 - protein, 381 aa, unidentified
MVPKTTRKTNDTPVSGRLYLALELSQAEWKLGFTIGLGQAPRLRSIQARKLESLKREIEQAKVRFGMPKEAAVVSCYEAGRDGFWLHRYLETHGVKNAVVDSASIEVNRRFRRAKTDRLDVGKLLNMLIRYHQGEPKVWSVVHVPSVEVEDQRQLHRELMALKREQTHHINRMKGLLASQGVVLEVKRDFVEELVEVELWDGSKLGSGLRTLLQREAIRLDLVRDQIHELEKQRKELLKTSSDPAMEQVRRLLRLKGIGMNSAWVDVMEFFAWRGFRNRREVGALAGLTPTPYRSGESAKECGISKAGNRPVRALAIEIAWSWLRNQPNSQLSRWYRKRFAKGGSRVRRIGIVALARKLLIALWRYVEAGIVPEGAQFKPA

SEQ ID NO: 82383 - protein, 328 aa, unidentified
MSINVGIDVSKRSLDVCLLNNQTKSGQRYRKFKNDKGAHSDLNSWLLKTAKCKAEDILITMEATGVYHEPIAFYLHMAGFLVFISNPGKAKKFSQSLGLVHKTDKSDSYMLALYGDAQGSRAHLWTPDSLNVRNIKSLSRRLSALEKDRLRESNRLEASEISDAHERVICSIKRVISLIDEEIASIEEEIDLAIRSDPTMNKNHQLLQSIVGVGKVMSRELVYLFSAKQFSSAKQAAAFVGLIPRLNESGNLKGRTTLSKVGPSRVRAKLFLAAVSASTHNPDIKEQKRRLLAAGKTKMQALGAAMRKLIQICFGILKTQTEYQPQTS

SEQ ID NO: 82384 - protein, 408 aa, unidentified
MEVLYPRCAGVDVHKDLVVARARCVSEPQVDETRSFATTTAALIELQEWLSAQGVTHVAMEATGVYWKPVWHLLEEHFELVLANAQHIKNVPGRKTDVNDAAWIADLLAHGLIRSSFVPPAPIQELRDLTRTRKQLVREISQHTLRIQKTLEEANLKLSSVLSSVVGSSGRAILNALIAGESDPERLAELAQGTARKKRAALIEALHGRITPHHRRLLKLHLDLIGALEAALAEVDADVGKLLAPIRKSARLLTTMPGVSELTAQVVLAEIGVDMRRFPTPAHLLSWATMCPRNDESAGKRRSTRTRQGSPWLKTALVTAAWAAVRAKDTYLQAQFLRLRARRGAKKAILAVAASMLTAIWHMLKDGVEYRDLGADHFSRRNHLQQIQRLVRRLNDLGCEVQLTTQEA

SEQ ID NO: 82385 - protein, 374 aa, unidentified
MGDYSEAFVGLDTSKLRNAVAIADASRGGEVRFLGEIENTLAATAKLVRKLSARYERLTFCYEAGPTGYGLHRQIKGLGFECVVVAPSLIPKRPGDKVKTNRRDALSLAKLLRADELTPVWVPDGRHEAMRDLTRARETAMLDLRTKRQHVSAFLLRLGRPYPESRKTWTKAHASWIASQKLEHPQQRLVLEEMMLAVRQAQERLQRLEQAVAAAVPEWSLAPVVTALMAMRGIDLVSATTLLAEIGDLSRFQTPTELMAYLGLVPSENSTGDTVKRGPITKAGNRRARRMLVECSWSYQHPPRVGLAKQPRVDAAPPAVREIAWKAQCRLYRRYRTLIRKGKLKTVAIVAVARELAGFIWAVARAVTTAPVAA

SEQ ID NO: 82386 - protein, 429 aa, unidentified
MSCPSSRPVGAYPIRAPNRKATVSMHDHEVEVTGGVDTHGEVHVAAAIDATGRILGTESFPSTLSGYRALLRWLRGHGRVVRVGIEGTGAYGAGLARYMAGEGVDVVEVNRPDRQRRRRHGKSDTVDAEAAARAALNGEASGTPKSGCGRAEGIRALRVARRSALKARTQAANQIRDLIVTAPDQLRSRLRDLDTEARVTACARFRPGVVADPVEATRLALRSLARRHQQLSVEIGTLDAQISQLCATLNPALLAAHGVGAEVAATLLVTAGDNPQRMRSEAAFAALCGASPVEASSGKVTRHRLNSGGDRQANNALWRIVLVRMSTDQRTKDYVARRTMDGKSKKEIIRCLKRHVAREMFKLLTNPPALPLGADLRSARTAAGITLATAAEALSTWPTRISELERGLTHDADLALRYETWLQPDKIAA

SEQ ID NO: 82387 - protein, 309 aa, unidentified
MGIDVATATLDIAVRPTAETWRAPNDAPGIDALVMRLGAWAPTLIVLEATGGSQGPLVAALVAAALPVVVVHPRHIRACAQAVGILATTDRSAARVMAHCAEAVTPAPRPLPDAETQELRALRGRRRQRVAMVSAERARLDTAPPSVQDAIQAPIAWLTTPITGLDDPLTHARQTHPAWQAKDDVWQRIPGVGPVLARTRLGQGPAWGPLGAQPLAALSGVAPCNRDSGTRRGRRTGYGGRAEVRAVLSMGALVATRHHPVIKALYERLLAAGKAKKVALTACLHTLLTIMNAMVRDLKRWQPREVPIA

SEQ ID NO: 82388 - protein, 351 aa, unidentified
MSKGVVRSQVSEGSRPLVFAGIDVSAATLAVAVQQQGREGFRQKQFANSGAGHRQLMVWLGKLGLECGCRVRVSLEATGTYSMDVALALDAAEGIEVAVLNPKTVNRFAQTLRRSKTDAADAVALAEYSRRMEFVPWRRPSRCGLELRMLSRHIATLTEEHTRWGNRLHAAQASATTPRCVLDDLKRGRAAIAKRILKLRKEAMAMVSRDAELARRFEQLKSIKGIGETSAVQLLGELAGLDPEMDVRQWVAHSGLDPVQQISGSSVRKQTRISRHGNSHLRHALFIPALVGARHDPHMKAFYELLQARHKTKLQALVAVARKLLHAIFGIFKTGTNYDGAKLFPKLIPTS

SEQ ID NO: 82389 - protein, 343 aa, unidentified
MKLIRVGVDLAKNVFQVHGVGRDERMVWRRRLARDRWLETLLEKLEPGCEIGMEACTGAHHWARRLQEKGFTVKLIAPQFVKPYVKSNKNDATDAEAICEAMARPSMRFVAVKTLEQQDIQAVHRVRSGLIEQRTAKANQIRGLVAEYGLVAPRELGQLRIALPRWLENPENGLSSRFRRLLGALWEDLKALDDRVAALDREICAIARNDPGAKRLQQLRGVGPIIASALVAAVGDAKQFANGRQMAASLGLTRKQHSSGGKERLLGISKRGDRYLRTVLIRGARAVLRTAKHKDDRLSRWVSNLAARRHPNVAAVALANKTARIAWAMLRNGTDYQPELVRG

SEQ ID NO: 82390 - protein, 462 aa, unidentified
MPGREERETWEKSRRQLEGLPVIRRGVAGIDLGSEQHWVCAPTLDRSGREVARFGATTAELIGMAEWLKARQVESVAMESTGVYWIAPHEVLEAQGLQVLLVDTRQLAQVPGRDKKSDPTDCEWIQRLHSCGLLRGSFRPEEAVCMLRTLVRDKANLVAESGDWLRRMQKSLDQMNVRVHRAVSDIDGVTGMAILRAIAGGERDAQKLASLRDRRCSKTQQEIAEQLSGHWREDHLFSLQQALKMYDAVQERIAAYEQEILGKLGAMEREEPHEPTAPPLQNASKARTIKKRGQEAKRQALYRMSGVDMTQIDAIGVETVEVVVSEYGSDLSRFPTEKQFVSHVTLAPRVPTSGGKPVKKKKRNSASTRVAAALRMAALSLRHSQTALGAYYRRIAQRRGGDIAVFAAARKLATLIYRLLRWGQPYVDEGAAAFENRYRQRRIHRLEATAKELGYQLTPVPA

SEQ ID NO: 82391 - protein, 412 aa, unidentified
MDVLYRVCCGLDVHKKTVAACLRSPGPKDRRAEEVRTFGTTTHELLRLADWLTMAGCTHVAMESTGVYWRPVYHILEGSIELLLVNAQHVKAVPGRKTDVRDCQWIAQLLEHGLLRASFVPPAPFRELRELTRSRRQLIQEHTREANRVQKVLETANIKLGDVAADVLGASGRAMLKALVAGERDTEKLAALARGRLRDKAAQLREALVGRVTDHHAFLLDALLSHIDFLEQQIELFDGRIEEQTRPYATALERLDTITGVARRSAEQILAELGDDMTRFPTAGHAASWAGICPGNHESAGKRKSGKTRKGDRWLRATLVECARGAVRAKKSYLAAQYHRLARRRGDKTAIVAVGHSILVAAWHILREGVPYRDLGGDHFGRLNREQLVRYHTRRLADLGVVVPPASAAIPA

SEQ ID NO: 82392 - protein, 341 aa, unidentified
MNACYYIGLDIHKKTISYCVKKIDGTMVQQGKIAAERKSLSRWMEGLPGPWCGAMEATIFTGWVYDFLKPHAVDLKVAHPEMLKAITAAKKKNDQADAEKIADLLRVNLLPECHMLSEELRELRRILRYRNMIVRTAVKMKNKISGLLMETGATYDKKRLHGRKYFDDLLERVEDVPESVKGMLKLNRSSLEMFEAIQKKLVKTLREDKLIRERVQRLMSIKGVGEVMALTWVLEIGDPSRFQSARQAVSYCGLCSAQRESAGKEQRGPISKKRNKHLQTILIESAKLAPRWNSQLAALHEKELTRGNRNRATLSVARKLVEYMLAVERQGKDFEPQQMAA

SEQ ID NO: 82393 - protein, 410 aa, unidentified
MLKIVYPVCCGIDVHKTFIYCCIATTDNKGITTYKSNRFSTFTNQLKRCATWLKEKDCKDVCMESTGKYWITVYNILELSCNIVLTHPKYVKAIKGKKTDKRDAKWIADLFKHDLINGSFIPPADIHQLRDLTRYRNKLTNFIVGEKNRAQNCLTVSNIKLDYVFTYVFGKASSSIINALLLNPSEKITDVSKFRTRGMKSTDEEILAAIDGNICNEQAEKLKIIRSHMDSIEECKANLESVILNLAEKYLPKLNLILSVLGIKSFSAVSIILEIGVDMSVFPTSKHLCSWAGLTSQNNESAGKKKTTRISRGGAYIKPLLVQCALAAVKSNKHPKIRNRYLALKKRRGHKKAIIAIARTLLTAIYNILKKNEPYNPDLYKKSDLPPQHKTVSFDEAVFILQRQGYIITS

SEQ ID NO: 82394 - protein, 347 aa, unidentified
MRFYTQQHGYYCGIDLHARTMYVCIISQDGTVLVEQNIRARPAPFLELITPYRENLVVAVECIFTWYWLADLCDKEGISFVLGHALYMKAIHGGKAKNDRIDAGKIAVLLRGGMIPQAYVYPSPMRSTRDLLRRRLHLVRHRGRLLAHIQNTNHPCNHDDFRKKLTYKANRIGVAEQFEDPSIRKSVEVDLELIAQYDEIIRDLELFIVRMAKQHDADMFHRLRSITGVGKILALTILYEVHDITRFETVQQFASYSRLVKCSRESAGKRMGTGGAKIGNVHLKWAFSEAAVLYLRKNPQGQKYLARLTRKHGKGKALSILAHKLGRATYFVMTRSQNFDDKKFLAA

SEQ ID NO: 82395 - protein, 414 aa, unidentified
MEPVYRRKAGIDVHKKMLAVVVRCQSGEQIEYRKRKFGTTRQEIEHLRAWLEGEGVDEVVMESTAQYWRPVWYGLESHFQLHLTHPLKTRAPRGRKWDFRDAQRLTDRWCSGDLEESFIPGAEQRSWRWLTRTRVGLKDKIIVVRNQVEGLLEQGSIKLTAVVSDVFGVSGWAMLEKIAQGVMDEKVLVAEARGVLRRKEEELKEALGGRLEPVYRMLLKQYMDQVRLLRKQVEEINQALALALKEHLPALHRLTQMPGVDLYAAQELLAEIGPRAAAFPSAEQFASWVGVCPGNHPSAGVCYSHRSAKGNRYLRRLLCQIAWAAVHTKGTFFAGLFARLKPRIEGKGAVWAVAHRMAKVIWLVLHNQVDYQEKGSAPPNERTLMRKFKRLLKEFGHLGLDVRALLEQQLATPA

SEQ ID NO: 82396 - protein, 388 aa, unidentified
MDMIDSFSDAPIQTTISAIFFSMELSRSKWLITSLSPGSGERMSKYVMPAGDVGGLLEQLSAIRLKAETKTGRAFPFVSIQEAGLDGFWIHRVLDREGIESHVVDPASIATSRRRRRAKTDRLDGETLLRTLLAFKRGDPRVCSMVAVPTPEEEDRRRNSRERKALVQERVSLVNRLKGLLFSQGVTGYEPLKSDRRERFVELVTGDGRPIGEHLRGAAERILDRIELILAQLKTIEKVRDSLVAQKPAVDQSPACPAQLMTLRGVGPDFAEVLWSEGLYRHFDNRRQLASYAGLSPSPWQSGSINSEQGISKAGNPRLRSIMVQLSWFWLLHQPDSALSRWFHDRVKLDGGRRKKLTIVALARKLLIALWKFARHGVVIEGAVFKAA

SEQ ID NO: 82397 - protein, 344 aa, unidentified
MNIRKVRPLTTKGKSLCVEDFDHFVAVDWSMKTMAVARMGRQRKEPKVFEHSSNLTALKEYLRSLKGRTILTIEETTTAHWLYVELHDCVDRIVVCNSRHNRLLCDGPKTDKIDASKLCTLLRNGLLKEVYHTSDELYDLRLLVSAYGDLVQAGVRVLNQRAALERGHREESRHAAFIVNPLSKSVELYKQSKEQYEAKFHAISTHNRSIKLILPVSGIGEISAAKVVATVIDAHRFPRANHYLSYCGVVKHEKLSGGRSYGRRKAPYCHLLKSVYKTAAIAAIAGNNPIREYYDHPVNNGVAEHNARHAVARYIARITYGILKTGTPYEPYRWRTQSTKRDVA

SEQ ID NO: 82398 - protein, 397 aa, unidentified
MYIVGIDIAKRKHEAAVIDGEGTVIIKPFSFTNNCSGYNRLLAMLAKAKLPLDEVSFAMEATGHYWLALFTRLQKEGFRVQVINPVQTNSIRSFYIRQAKTDPRDALLIAEVIRFGHFSESTLHPENIYELRELCRGRHAIVSMQADVKRKVVALLDQVFPEYETAFTNMFGDTSMAILQTCPTPKELSEMPFEELCHLIEVSSRKRFRMAKAQELQALARGSFGFAMAGDVFSTMIRLYAKHLDFLKQQVREMDRKIAEIMETLDTPITTITGIGPTLGAYILSEIGDISRFSSAAKLAAYAGIDPTMRQSGEYNGVRNRMSKRGSPYLRHAIWLAASSAVLHDPALKLYFQKKRDEGKPYMASVGHACRKMVSIIYAVMRDNKAYTPCIPNEISA

SEQ ID NO: 82399 - protein, 424 aa, unidentified
MDALVERSAGIDVHKDVLTVCALTGALDRKPQEEIREYSTSAQDLLALADWLGEQGITDIAMESTGIYWKPVWHILAGSEYNFKLLLANARTIKNVPGRKTDKCDARWIAQLTRAGLIEGSFVPPQDIEELRELTRYRKRLISDATAEKNRIHKILKKYNIRIDSYMSDLFSVSGRAILDALIGGEVVTLEKLELVVQGRMRSKIPEILNALNCELGITTREMLDYSYSHLQYLEQLIQKIEKSIDDHLTPYKKQVALLDTIPGVDKNGAAVLIAELGVDMSVFPSAKHCSSWAGLSPGNKESAGKKGRTKAVHGNKALRSILCECAWAASRKRGSHIASKYWRLVKRMGEKKAIFAIGHSLLTIAYNVLKDLSPYKELGADYSEKRKPNHINLMIKKLLKAGYCVIPNPDAIGTAVEVLPEVA

SEQ ID NO: 82400 - protein, 332 aa, unidentified
MVAGTYGSFNKAGSTKMTQISRTAGIDTSKAKLDIAVHGGGEHWQVDNTSVGWRRLAADLSKAGVTRVGIEASGGYESGVVGHLRDKGLTVLVLQPIQVKAYARVHLRRAKNDKLDAALIAACAATIDQPRLAPDQRLAKLAHHLTFVEQIEEDIARFKTRLEHVGDARLHRMVVADIARLKRRRSTELSRIVVALRAHDDLARRLDLVLSIPGLGERTAIALIIRMPELGRISREEAAALAGLAPYDDDSGKHKGQRHIAGGRGRLRRSLFAAALPAAFHWNKALIELYARLTARGKAHNAALIACARKLLIYANTVVERGTPWTERPAAI

SEQ ID NO: 82401 - protein, 355 aa, unidentified
MNDAKYIGLDVHQATISATVLDSTGKLVMESILETKAATILQFIHGLRGSLHVTFEEGTCAAWLHDLLKPHVTKLVVCDPRKNASMREGNQSDKIDARGLAELLRLNHLNPVYHGEHGLRSLKELVRSYLTITKDLGRVMSRVKAIYRSWAIPCSGKQVYAPRHRAAWLAKINEPGVRRRAEFYYQQLDALRMVRQQVRRELLAEGKKHQAWKRLCQIPSIGPIRAAVLLGILQTPHRFRTKRQLWSFSGFGIETQSSADYRSVDGQLQRARKQISIRGLNRNCNHDLKNLFKGAAIVASSKPGPFQEFYTELLSKGIRPEMARLTLARKIATIVLIVWKRGACFDAQHLKPQTA

SEQ ID NO: 82402 - protein, 388 aa, unidentified
MSKPFDLSKSLTALDQDSTLIVVIEMSQSSWLVAARAPGLARDPLKKLPPDPEQLFKLIDRWREESRRAGRVVRRVCVAFEAGRDGFWLARLLRQHDIEAYVIHSTSIPVKRDHRRAKTDRLDTELLMRAFLGWLRGEADHCSMAAIPTLAEEDAKRPTRERESRVNARSRLVNRMKGALARLGIRGFNPKLRKAAEKLEELRTGAGEPLPPNTLAELRRDMAQLRFVADQIKQIEKAREARLEKAPREGAHPMVLMLASIKGVGLETAEMLVAEVLSRKLRDRRAVARYGGLTGSPDESGSRSREKGLARSGNARVRRGMIQLAWRFLMFQKESALAKWFEARTANGPRGVRKTMIVALARKLLIDLWRFVEDGTVLVGVELFDSRA

SEQ ID NO: 82403 - protein, 401 aa, unidentified
MAMRVSKSVIGVDVAKIELVTYQADSDLLALIPNEKPAIKRWLKTLPRPAALAVEATNIYHVDLVELAYQAGFDVYIIDGFQLSNYRKGVGGRSKTDASDARLLARFLKNESECLRPWTPPPAVYGKLQSLLRRRASLIQAKTSLTQSWANDASLKASFAAFLKSIERLDLLVKKKLKDALREAGLLEQVARCQAVEGIGFLTATALVMAYSRGDFNSSDSYIAFLGMDLRVTDSGQKNGRRSLTKRGCSEIRRLLHNAAMSASRTSAWKEFYNHHRSRGKATTEVLVMLARKLARVAFALRANINPEGALWLDQNHRISHTSDAPTGLLLHRSGPGDASLGLRWSGFPVGADLSAKRTVHSLRKVVASAKAFADKSAPTQATRRPVCSCTGVDRATLRLT

SEQ ID NO: 82404 - protein, 370 aa, unidentified
MSQSRTLFIGMDVHKDSIAVAYVAQDHGAEVTYLGARGTRQCDIDQLVRKMQSKAKHLLFVYEAGPCGYWLYRYLPRKGSDCWVVAPSLIPHKPGDRVNTDRRDARQLARRARSGDLTVVYVPKVEEEAIRALSRAREDAISDLKDAKFRLKAFLLRQDIRYVGRAHGGPAHLRWLSEVVCPTPAQQIVFQEYVRAVQEHTERLQRLEQELQEQVNAWRLHPVVEALQALRGVQFTVAVTMVAEIGDLTRFDTPRELMQFLGLIPSAYSSGEQRRQGSITKAGNTHARKAVVEGAWAYRYPAKVSRHLQLRLEKPPKMIQDLSWKAQVRLCTRYRRLVSRGKHATVVTVAMARELVGFMWAIATQVPLTA

SEQ ID NO: 82405 - protein, 307 aa, unidentified
MFVGIDVSKDRLDVHVRPSGETFAVARDSDGLEELITRLRALVPRLIVIEATGGFETVVASAIGAAGLPLAVVNPRQIRAFATACGQRAKTDRLDAQVIAHFAEAVQPEARAIPDESARALGELVTRRRQIIGMMVAERNRRRQLTQPRLLKTVDRILATLQEQLSAIEQDIDTAIRGTPAWREKEELLTTAPAIGPKIARTLIADLPELGTLTRRKIAALAGTAPFSRDSGQWRGQRSIAGGRPSVRAALYMAVLVSIRRKLPLAETYHRLRAAGKPAKVAIVATMRKLLVILNAMLRDGTAWRTT

SEQ ID NO: 82406 - protein, 392 aa, unidentified
MVVSVGIDVSKDKHDCFIVSSEGEVMADAFIIPNTMDGFHYLLQQIRHCTAPQDKIKVGLEATGHYSYNLLGFLLDNGLTTYVLNPLRTNLYRKSLSLRKTKTDRVDARTIASMLLSDAGLKPYTDTAYHNEELKSLTRYRFDKVKERAKLKSSIARLVCILFPELEKLVPSLHIASVYALLEEFPGAKQVANTHLTRLKALLETASNGHYKRDMALEIRNAAKNSIGSQMPAKSLELQHTIRLIRELDREIDEIEEQIQSIMDELHSPITTIPGLGFRMAAMILAEVGDFTRFASPDKLLAYAGMSPSTYQSGQLKNCYPHMEKRGSRYLRYALYNATKYVCHWDPAFADYLAKKRAEGKHYNIAISHAAKKLVRLIFAMEKSRQPYCSAA

SEQ ID NO: 82407 - protein, 424 aa, unidentified
MDKDEDSRLKEFRQLKNEIRGSTQHLVVGIDIAKDNHTAFFGTPAGKTLLRGFVFDNSQEGFEKLLFQADTLKTREGLVKLVFGMEPTADYHKPLGEYLITHGHRVVLVAGTAVKKNRELLDGRWDKNDTKDAANVADLITQGKCLFYELPSLDLRELRGLLSLKRRLKKSEQSYKVRIRNHLIAQYFPEMDAYFSYGEGPATVRWCLDPKELANLPFEAFVRMVSSRSGGEQQRRRLGQIQKKAASSIGCATHPSVAFEAATLLEELRQIHTMLLETDKKIAAVCTRFPEYPCLLSIPGFGPDISAKVLGALGNPYRFDNHRQVLKTAGLDLSAERSGKRSDVTPVISKRGKADLRYGLYQAAHVASTKNRHFMTYLTDKLKGREREQGIGIKMRVKLAAKMLVIAWTLMKKKEVFDPGYLKD

SEQ ID NO: 82408 - protein, 387 aa, unidentified
MIAVGIDIAKRTHEACFMGQHGQQLGKARRFRNTRHGVQALLDDLQQLREPATIGLEATGHYWLALHEALVRAGHTVQVLNPLQTHAYRKTTLRKVKTDRKDAWLIADVVRIGRGRAAYVPDETILQLRELTRFRWGLVDQIGDAKRRALSILDRVFPEYESLFSDVFIKSSRALLQRATTAAEFADADLAELASVLKQTSRNRLGLEKAEAVQAAARDSLGLAKLGGVASFELRALLDHISFLEQQVAACEQQIEPLVATIPQHVTDIKGIGPVLAASLIAEIGDVTRFARLESLVAYSGIDPSVFSSGEFTATETHMSKRGSPYLRRALWLAAISASQSNPDLAAYLQRRLEQGKPWGTAMGAVARKLLSRIYVVLTQNRPYEVR

SEQ ID NO: 82409 - protein, 317 aa, unidentified
MSKATLAVCYQPTDQQFKHLEVSNSKAGFQQLVTACGTQCLFVMEATGTYNLALAYYLHEQGGQVAVLNPLVIKRFIQMHLSKGKSDRKDAQWLLRYGQQQAVKVWQPEEMILVECRQLEQVSEQLLKQKTMVSNALEALQRQPLISKTALKRLQQTLKALTQQAEAVEKELLVLLEQRFGPEIALLCSIPGIGRKTASMLLLFAGGFTRLDNYRQLIAMAGLSPREHSSGTSVRGRVRITKMGGGLIRGKLFMCSFAAKKFNVACQALYDRLVAKGKNGKVALIAVCNKLLKQAFAIVKSGVPYQPDFCSKLAVNP

SEQ ID NO: 82410 - protein, 309 aa, unidentified
MSECIGVDVAKAHLDWVQGPHGEVERIPNTSAGVRRLIRWLEKLDFDRVILESTGGYERILFDALVDQGVRVVRVNPKRVRDFGKGMGILAKNDVIDAKLLALFGTKAEPAERPQKGPRARQLGDLASRRRQLIKTKTIEKNRLEHATGWARRDGKSLVVILERRITKLDREIDRLIALDADQKADFERLQSVPGVGPKVARALLMDLPELGKLDRRCISSLVGLAPYAKDSGQKFGARRIEGGRSGPRTQLYLAAMIASRYNPVLKPMYDRLRAAGKPAKVAYIAVARRLLTILNAMVKNRTYWEAPA

SEQ ID NO: 82411 - protein, 461 aa, unidentified
MLLDVNPVPPLAAPSPAGVPVRVQIGIDAAITANHHVAVRRVAADGTATTTRFMVAPTLAGLKTLSGRLADCPGALAVAEPTSMTWLPLALALSDAGGGLALLGSRHAARLRGAISGKNKSDVIDADVLARAGEVFELTRMRLPDPDQLALRRVVTRRGAAVIDANRYLRRLISLARWAFPDVWNAFGGSLSTAKAVLGRWPHLDALAAARRCALTAVVAEHTRGVSDVPARVEAIRVAAGDWAAFWSGRLDLDALAFDVGEQLSDMAEAAARVERATAQATRYWERLYGDDELLASIPGMGPITAPTVRAFLGDGHAFPDAKAAASYVGITPSNWSSGTVHQPSRAISKEGPAVLRLAFYQAANAARRADPQLAAFYHRLMTGRGHCHTQATVAVARKLVERTWTVLDRGKAYQLLDPDGRPVTERAAKALIADRFTVGQDVRARARAHSAATHRAKLTR

SEQ ID NO: 82412 - protein, 377 aa, unidentified
MSKIRFVGLDVHADTIAVGVAEPNGEVRSLGIIPNRLETIRKLMAKLGPATDLKVCYEAGPTGYVLYWQLTALGIACQVIAPTLVPVKAGDRVKTDRRDAVKLARSYRAGDLTAVWVPDADHEALRDLVRAREDARQDQHRARHRLSKFLLRHGRRPPEGVKKSWTLKHLTWIKEQVHFEQPALEFTLLDYVHEVDHMAERIQRLEKAITEAIQKAPPAMRAVVEALQALRGVALITAVTVVAELGSLSRFPSPRQLMGYSGLVSSEFSSGGRIQRGGITKTGNAHLRRVIVESAWAYQYRPWVGGFLLKRQQGLDQQVKDIAWKAQWRLHTRYKKLLAAGKKKPQIVTAVGRELLGFIWAIAVRTEAQFHTERKAA

SEQ ID NO: 82413 - protein, 307 aa, unidentified
MTISVGIDVAKHSLEWAAGSEGTIQHLRNEPRPLARLVHQMVSLGPERIVVESTGGYERRLVAKLAEAGLPVVVVNPRRVRSFGEAMGILAKNDVIDARLLALFGEKVRPSIRPILQGRDRLLADLVARRRQVVTTIVAEKSRRDTASDPVRRLMAPLLRQLERHLEKLDATIEAELLADTERAELYELLQTVPGVGPGVARTLLVDLPELGHLGRREIASLVGVAPYARDSGKVRGVRRIRGGRASVRTVLYLAAMSASRFNPVLREVYQRLRQAGKPPKLAFVAVERKLLITLNAIARERTAWQS

SEQ ID NO: 82414 - protein, 351 aa, unidentified
MLIIGVDYHPSDQYIAFADTETGECGERRLNHSEGEAEKFYRDLQSRAASVRVGMEATGYSRWFERLLAELGIELWIGDAAEIKTRRVRKQKTDSNDARLLLRLLLEDNFPRIWVPSPENRDLRQLLWHRHRMVQMRTRMMNQLQALAMNEGQRRKKKLWNEQGRAQLEGLPLAAWASRRRKDLLELLDRMNPTIEDLTRAIEREARRRSEAARLMTHPGVGPITALAFTLIIGTPQRFGCGKQIGSYVGLIPAEDSSAGHQRLGRITKQGSRLLRFLLVEAAQAAARGDTDWKRRYLHLAMRRERNIAKVAMARRLGVRLYWMWRNGWEYAELVKFGSNAGQLGTGHGAK

SEQ ID NO: 82415 - protein, 347 aa, unidentified
MSIFAGIDLHSNNAVCGIVDESGRRLERKKLANKLGAIDQFLRPHKERLKQVAIEATYNWYWLVDGLREEGYPVVLANPAAMHQYEGIKHTDDVSDAFFVAELLRLGVLPTAHICERKLRPFRDMLRRRMLLVHHRTSLLLSIKSLYARNTGQTLSQGGVKRLDEEDLPEMFKHPADQFIAGEQLKVVNQLNESIGLIEEAVEACADKLPCYERLKTLPGVGRILALTITMETADIGRFASAGNYASYCRCVGTERESNGKSKGQNNSKCGNKYLSWAFVEATHCARRSDPACRKFYDRKKTRTNTMVATKALACKLSKAAWHIMKNDQDYDAKRVFPFLKEKEASS

SEQ ID NO: 82416 - protein, 410 aa, unidentified
METIVERPAGLDVHKAQVTACVRVPGEGGERVQHLAEFPTTVRGLLTLRDWLAAHRVSQVTMEATGVYWKPVWAILEDDFELLLVNARHVKQVPGRKTDVSDSAWLCRLAEAGLLRASFVPPKPIRALRNLTRYRKTQIAERAREANRLHKALEDTGIKLDCVASDILGVSGRAMLDALIEGTTDPRVLAELARGRLRAKLPALRETLEGRFDRLHALWIGAILAHVDFLDEQIDQLSEAIEEQIAPFGSAVELLCTIPGVQRRTAEVIVAEIGADMSVFPSAKELASWAGQCPGNDQSAGRRRSGRTRKGSKWLDWALEEAALAATRSKDTYLAAQYARLRPRRGHKKALGAVKHSLIVACWHMLTNGELYNDLGGDYFQRRDPEKTTQRLVAQLERLGHTVVLKEVAA

SEQ ID NO: 82417 - protein, 370 aa, unidentified
MKKPATLYIGLDVHKDSISVAHVPDDPRADITYVGRIGTRPADVDRLVRRLEEKAERLVVAYEAGPCGYVLHRHLSRRGVACLVVAPSLIPRKPGDRVKTDRRDAVTLARLLRSGDLSSVYVPSVEDEAVRDLARAREDTVVVLKAAKYRLKAFLLRLGLHYVGRADWNDAHRRYLSRVVCPTPAQQVVYQELLHAVDEQVARLLRLETELRDQVGRWRLAPVVRAFQAMRGVQDTVAITIAAELGDITRFDNPRQLAAFLGLVPSEDSSGPRRRLGGITKAGNGHARRVLVEGAWSYRFPAKVSPHIQKRLEHLPQNVRDIAWKAQVRLCRRFRRMLARGKNPNVVVTAIAREMAAFMWAIAREVPINA

SEQ ID NO: 82418 - protein, 327 aa, unidentified
MTLPPLGLDISKLKFNACLLRAGGKLRHRLFSNDEAGFSHLSEWLTKNGAAHVHACMEATGTYYEALATYLHEHGHAVSVVNPAAIKAYAQSVLSRTKTDRADASLIAGFCSERRPPAWRPPASEVRELKALVRRLEALVEMRVIEENRLSAGGSVAAVRSSVEEHIAYLAEQIKRTEALIRSHIDSHPGLKRQSELLDTIPGIAETTAAVLLAEVPDIKQYRSARQMAAFAGLVPRERQSGSSVRGRVRLSKIGNSRLRKALYFPAITALRCSPFFQQWAAGLRQRGKSKMAVIGAAMRKLVHLAYGVLKTGRPFDPEWAQKAKTA

SEQ ID NO: 82419 - protein, 322 aa, unidentified
MKQQAIHFVGLDVHQSTVVASVRDESGKIVMKATVPTEEKAIVALVRSWPRVHVAFEEGTQAQWLHDVLIDQVERVVVCNVRGKGPLANKDDRIDADGISEKLRVGDLKPVFHGAPEILTLKELVRNYNNLVEDSTRVMLRIKAIYRARAIATPGVSVYRASQRKQWLAKLEGGARVRAASLLTQLDALLELRPKAKGAMIAAARRQPGWKVLRSIPFLGAVRVAQLLAIMRTPFRFRTKRNLWPYAGLAVVKHSSANQVFKNGELQRSKKAPMTRGLNRNHNPALKAVFKGAATAAASAPGRSASTTKPRSAEAWTRTWLR

SEQ ID NO: 82420 - protein, 355 aa, unidentified
MDSKKYIGMDVHKESISIAVRNGAGRIVMECVIETKASTILQFIDGLRGDLQVTFEEGTWAAWLYDLLKPHVTELVVCDPRKNASMREGNQSDKIDARRLAELLRLNHLNPVYHGEHGLRSLKELVRSYLTITKDLGRVMSRVKAIYRSWAISCTGKQVYAPRHRDEWLGKIGELGVRRRAEFYYQQLDALRALRQQVRRDLLAESKKHPVWKRLCQIPSIGPIRAAVLLGILQTPHRFRTKRQLWTYSGFGIETQSSADHRSVNGQLQRVKKPSSIRGLNRNCNHDLKNLFKGAAIVASSKPGPFQEFYTALLTKGIRPEMARLTLARKIATIALIVWKRGASFDAQHLKPQTA

SEQ ID NO: 82421 - protein, 451 aa, unidentified
MNSGTYAGVDWATEKHDVLIADEAGEPLLAATFAHDEAGLSALCRALVRAKVQLVAVERPDGVLIERLLDAGLRVMAIHPNQVAAARPRFRTSGGKSDQFDAFVLCELARTDSHRFRVLVPDSDETKALRALTRAREDLVQMKVALTNQLRAELERFWPAPVGLFSELGSAISLAFLERCPSPIDARGLGEKRLAAFLARHRYSGRKSATQLLEKLRAAPEGRAGEHEIEARRAVVLALVATLRPLTTKISELTFEIAHRVRAHHDGEIFLSLFRDPDSVVCAATLLAEIGDCRERYPTADALAADAGMSPVAVESGKKKVATFRYGCDKRLRGATSTLANATRQWHPWAADHYARARQRGHDHPRAIRTLGRAWCRVLWRCWQDRAPYDPARHRGLQQHITVTIPNSSGRRPDLAATQRMAGATVTRRAARRAEREALDSKPTSANTLGG

SEQ ID NO: 82422 - protein, 343 aa, unidentified
MQTVSTIGLDIAKSVFQVHGIDAAGQVVIRRQLKRRYVLAFFEKLPACLVGIEACASSHHWSRELKALGHTVKLMPPAYVKPYVKRQKNDATDAEAICEAVTRANMRFVATKTPEQQSGLTLHRTRHLFIRQQTAVINVIRAHLAEFGIVAPVGRKGVEALLDVVGNPTDKRVPVIARACLAALGAQLRRLKEQILEFDRLIMTWHRSHETSRRLDAIPGVGPVLATALVASIADPKAFRSGRNFSAWIGLVPKQHSSGGKDRLGSISKQGDRYLRSLFMAGALAVIRYARVHGAKHRPWLTALLARRPIKIAAIALANKIARMVWVLMARGERYKEPSALAA

SEQ ID NO: 82423 - protein, 321 aa, unidentified
MSTNDTTAPTVYLGIDIAKDSLQIDTILPGGPALVDNTPASFKRILKRAATWSRKDLINVHVVCEATGGYERGLLDALHQAGVTVSLVQPKRVRDFANAAGILDKTDAIDASVLSRYGTKMEPRITPPPTAVQRELSALVSRRNQLIDTRVAEQNRASGIVLPELRKMTADLLRYINAQIKRIEKMIARLIASDEELSAKVKRLCQLDGVAITTASSILATMPELGTATGRQMASLAGLAPRARDSGKHKGRRTIGGGRAPARRALYMAAMTAARMNEKLSALYQRIVAKGKPKKVALTAVMRQMLNVMNSLLKNPDFALE

SEQ ID NO: 82424 - protein, 435 aa, unidentified
MQPHTTEMNTTTTANEFAAFIGIDWASQQHALCLYDCATGKRENSTLEHLPETIAQWAQGLEQRFGGRKIDLCLEQAKGPLIYALLEYPFFVLYPVNPATAARYRQAFKTSRAKDDPADAQVCLELLLHHREKLTPSLANDGTTRELSRLLEARRSLIDLRTLLTNMLRDALKSYYPQALELAGQDLFAPLGCQFLLKWPSLQELQKARSESVRKFYYAHNCRRMDVIEKRLHSIASMIPLRRDRALIEPALIQVKMLARQLLQLGMALKEYDSRIEHRFTQHQDASIWRSFPGAGPTLAPRLCCAFGSERSRYQSALAIQQYSGIAPVQEKSGKNQHWIHRRWARPHFVHQSFFEYALQSVLHCHWAKAFIQDQLDRGKTYSTAVRALAFKWQRIMFVCWRDRLPYNETTYLHSLKRRSSHLARKLDQELPQAA

SEQ ID NO: 82425 - protein, 323 aa, unidentified
MAQGGEVGAKFVGVDVCKEWLDIAGGEGSATKRVRRSEGTWRRWLLGHSDRDRLHIIVEATGGFEAVVAEVCDAESVTYSIVNPLRVRQFAKATGRLAKTDRVDAEVLSAFGQATRPRPSRPLSPEKARLRALVERRRDLIQLRTAEKNRLAQSPKETRGSVQEHIAWLDNAISEIDQLVDVALREADELHRAAQHMRSVKGVGPVTAATILALLLEPGTLDRRQIAALVGLAPFANESGPRRGHRRIYGGRAAVRAVLYMSALVASRSNPPFKAMYQRLIAANKPQKVALTAVARKLLTVLNAMARDGSSWKPQDPPQPLAA

SEQ ID NO: 82426 - protein, 319 aa, unidentified
MSNHTIVCAGIDTGKRKLDAAIGHGAGELQVDNTLEGHAALSAWLQRHQVERVGIEATGGCEHDVVTRLRRDGFTVIVFQPSQVRAYARFHLKRAKTDRIDAALIADCAAARKAEDIHAPPDPRIAPFAEQLTMIEQIGEDIARIKTRRATVRGQDIRQAWNDEIKRLTQNKRIRLKQLVAAIRRHPDLAQKLELIASVDSIALPSAVEILVRCPEIGTISREKAAALAGLAPYADDSSDQHGPRHIQGGRERLRKALYNAAFAGAFRWNKQLAAIYKRLTAKGKHHKAALIACARKLLSFVNAVLVRQTPWVSQNQSA

SEQ ID NO: 82427 - protein, 416 aa, unidentified
MNAVGIDVSSRKSTVAVLRPLGEVVCLPFDVTHDIAGLASLAEKLKAIDGETRVVMEHTGRYYEAVAKALHEAGFFVCAVNPLLIKEYGANSLRRVKTDKADAIKIARYALDNWADLRDFTPMDAIRYDLKTLNRQFQLASKQRTASANNLIALLEQSFPGIRKCFDSPVRSDGTQKWVDFAHSFWHVDCVRKQPFPAFCERYRKWCKLHAYFFKLRNAEKVYALAKRAVVLTPKSKVVKVLVQEAANQLISISRSVEVYRAEMDRLAAMLPEYPVVMAMYGVGKSYGPQLMAEIGDVRRFERKQALVAFAGIDPMPNQSGDKNVRSNKSSKRGSPYLRKTLFNVIRTYLQCAPQDEPVFQFLNRKRAEGKPFYVYMLAAANKFLRRYYAKLRDYFASLDTLQPVAPIPTILKATL

SEQ ID NO: 82428 - protein, 349 aa, unidentified
MLADEVDYVIGVDTHRDQHTLAVVNAPAGAVVAETVVRATARGYADALRFAERHACGVRAWGVEGAGHYGAGLTRYLGGRGETVLEVGRHARGERRLRGKDDPLDAIRAARTGLAAEKLTLPRSGERQEALRVLLLARRSAVDVRRVALVQLRSVIVTAPEQLRDELRRLSVTQLIRRCSRFRRSHSRTPNELAIVLALRSLARRIDAATEEADELEREIIGHVRALAPQLLSESGIGPIVAAQLIVSWSHRDRVRSEAAFARLAGVAPLPASSGQTIRHRLSRGGDRQLNRALHTVVLHRRQHDAATRSYIARRVAEGKTTREATRVLKRYLARHLYRVMQNATPLTT

SEQ ID NO: 82429 - protein, 360 aa, unidentified
MRIIGCDLHARQQTLAMLDTETGEVVNRTLLHEGTAVREFYSQLPRPVVVGIEAIGPMQWFLDLLQELEIECQVGDASKIRAAEPRKQKHDRRDAELILKLLVEKRFPAIWLPSKELLDLRALLLHRHQWVRLRTRIQNVLQAIALANGLRRGPSLWSYDGQAKIAFLPLPPHASSRRSALQAMYRRMQEEIENLTEQIAEQARQRCGAQLLLTHPGVGPVTALATDVFLGDAQRFADGKALASYVGLIPREYSSGARQRLGAVTKQGNPLLRFLWNEAGAHAARRDPELQRFYRRKLVQKGLGKARVAVARKLGIRLWIMLRDQIDYEEFCRRGQKQCGAVCAGMPETRFAAHGQRPVD

SEQ ID NO: 82430 - protein, 344 aa, unidentified
MDPIKERRVFAGIDWGGHEHQLCVVDADGRKQLELRVNHDVAGLKELVGQLARHGERVPVALERAEGLLVEHLQAHDHPVFPVSPRISARARERYRVAPIKDDRFDAFVLADTLRHEHQHWRALAVPSPLLAELRALTRDRDRLLETQQATEAQLRSIMEAYHPAPARLFSSMDRQIALAFIADYPTPAVASRVRTTRMSGFLRRNGYTGRVPAQVLAERMRANLLSGSVGTVAGRAHSAKTFAHLLGVMNEALAEFDDAIDSVVAEHPDAEIFASFPGVGPVLTAVLLAEIGEDRTRYPSVQTLLAESGLAPVTRSSGRSRNVRFRYAANTRLREAAMWWAFN

SEQ ID NO: 82431 - protein, 347 aa, unidentified
MSIVDNPDAVIGGVDTHVDMHVAAVVNHVGGVLGVEPFRTTQTGYRQLVSWLRSHGELVLVGVEGTGSYGVGLSRYLTRAGVAVVEVDRPNRQTRHRQGKSDPVDAVAAARAALSGSATGVPKSRDGNVEAIRVLMIARRSAVDTRIETLNQLRHVVFTATPEIRAKFTGLTSIALATKAAALRPRKGDDPVRYTTQVTIRTLGRRVKYLREETKRLNRLLRPLIRDTAPGLLEVFGVGFDTAAKLLVAVGDNPQRIRSEAAFAHLCGVAPIPASSGKTTRHRLNRGGNRQANSALFHIIITRMRHDQATREYVARRLAEGKTMGEIARILKHYAAREVFKHLPRPA

SEQ ID NO: 82432 - protein, 422 aa, unidentified
MLAQTQDSEEIIARVAALDIGKAELVCCVRVPDEGHAGRRLQEVVTYSTMTRSLLGMADRLRCLGVTRVVMEATSDYWKCAFYLLEAHGFDTWLVNAKDVKHLPGRPKTDKLDAVWLCKVAERQMIRPSFVPPPEFRRLRDVTRYRADLVAVRTAEKQRAEKLLEDAQIKLSVVASDIFGVSGRQMLAAMIAGERDPRVLAQMARAAMRGKITALQEAFTGFFTDHHAFLLARMLARVDGIDADIAALDARIEEMTAPFTAAVERLDEIPGINVTIASVIVAEIGIDMSRFPTAGHLVSWAKFAPGVNESAGKKKGQNMTGHGNSYLARVLGNAAVAAGRSDTFLGERYRRIARRRGRKKAVVAIGRSLLVIIWHLFADPGARYTDLGSDFYQTRISPERRRRNHVGQLEALGYKVYLERTI

SEQ ID NO: 82433 - protein, 353 aa, unidentified
MITAKFTRVDLHTRQQTVAMLNVETGEIVEKTLQHEGNSVREFYSTLAGPARVGIEATGSMQWFLELMEELGIDCQVGHPAKIRAAEPRKQKHDRRDAALVMQLLVENRFPSIWMPSREQRDVRSLILYRHQWVRIRTRVQNALQAIALSHGLRRGSSLWSEVGQHAIASLSLTRYTAERRTALQSLYRHLEEQIEDLDREVAELAWERPQARRLMTHPGVGPITALATESFLGEPKRFVDGKAVASYVGLIPSEHSSGGRQRLGGLSKQGNPLLRFLWCEAVGHAVRKDAELQRFYQHKLVQKGLGKAKVAAARKLGIRLWILLRDQIDYQEFCRRGQLRQKHGGAHAGMPA

SEQ ID NO: 82434 - protein, 424 aa, unidentified
MENTAARKRKQVPEGYLIIGVDPHKKRHAAVAITQDFTTRDKFKFDNTREGLETMLCRARMEMVKSGCRGVMFAIETGGHYWRNVSYFLDEQSIPFRFINQFTLKRRREGKDLNRRKNDYRDSEVAAQLLCTGEFTESKLPQGVYAELRAAHNAYRRLVKERTRITNLVKGLLDALFPEFTQVFKDPCALTALSVLYICPIPRVITGMTEDEFVATIEAQHKGRRLMRRKLRALHYSARTSIGIDAGARSVSSEIAFLVDKLELIRQHICIVEGTLVSLVDETEEGKYLLSIRGLNYIAVAGLLAELGCFKAYRSAKQMIKMAGSNPTESESAGKKRSRTPMSKQGRPVLRYCAWTSVIPMLRFNSDFRAWAKQRRERPVHANPLGGREVVGAALNRLLRLAFAMVKNQTYYQITKSELTLVAV

SEQ ID NO: 82435 - protein, 364 aa, unidentified
MLKQEAGSRWSRPEAYQKEVSMSTLYYIGLDIHKRVISYCIKAIDGHFIGEGKIEADRKSLGEWVKGLHGPWIGAMEATIFTGWVYDFLKPYAVDLKVAHPQMLKAITAAKKKNDRANAEKIADLLRVNLLPECHMLSEEIRELRRILRYRNHIVRTAVKMQNKISGLLMEVGVSYSKKRIHGKKYFRELLERVEDIPPSVKELLQLSRSSYEMFRSFQKRLVETLRTNNLIHERVQRLMTIPGVGELTALTWVLEIGDPGRFASIRQAVSYCGLCSAQRESAGKEQRGPISKKRNKHLQTMLIEAAKLAPHWNEQLAIVHERELKKGNRNRATLAIARRLVAFMLAVDKRQADFKLPVEMQAA

SEQ ID NO: 82436 - protein, 364 aa, unidentified
MPLYGGIDLHSNSNQSAVLGEDRKRIMRRKLANDPALILRFWEPYKADLAGIVVESTYNWYWLVDLLQENGYRVHLANPAAIQKYNGLKHTDDNHDAFWLAELLLLGILPEGYIYPKEVRAVRDLLRKRQQLRQLRTCLILSLQNIVTRNGGPKLSAQDLKTLKADRAQVYLQDFPELLLAGSANKACIDALTQQMARIEAVVETKLKLQEPYPQLLTLPGVGRILGSTILLETGPISRFSKVGCYASYCRKVNSRWTSNEKVKGHGNKKNGNKYLAWAFGEAAERARLFHRASREFYQRKLRQKKNAALAHGALAHKLARAAFYILRDKVAFQQEKMFGYSEVALGNVGRDGDPGVKLVKPED

SEQ ID NO: 82437 - protein, 426 aa, unidentified
MGESAKQWSERPAFAGLDWARDHHDIVVVDRYGAIVEDFRIEETAEGWRTFKQRLAAYPGLLVALETRSGPAVEGLMAAGCCVFPINPKAAQRYRDRKVPSGTKTDRVDAWSLADALRLDGHCWQPLKPEDPLTVELRLLCRDEMALIEQRTALICQLRAALYEYYPTSLQAFDDWTMRASWAFIERFPNAQALVAAGKRNWEKFLHTHKLYHSDELYSQRLKLFAAADQHCGPPAVTKAKSLLAVTLAVQLRVLQDHLDGYRAKISELFTQHPDHDLFGSLPGVGEKIGPRLLTELGDDRTRFDSAEGLQCFAGTAPVSYQSGQICKARFRHACQKTLRYTVHLWANLSRAKCPWAEAYYRKKRQQGQSHACALRCLGQRWLKILWKMWQTRTRYDAELHQRNQVRHGSWVMDLLSQPTPGVASS

SEQ ID NO: 82438 - protein, 419 aa, unidentified
MNNIYPVHPKMTRTYAGVDSHRDSHTIVILNCFHERLGEIKVGSTPSEFASFIKQAKKYLQKGTTWAIGFEDVSAYGRAFVKYLVDRGYHVKHVDASKVATERGQVLHKTDSYDAECACRVLINQFDKLPDANPQDKYWILGGLVTRRNAITKINVMVKNSLHTAVAENYPHYKKFFSRLTTDSALAFYEAYPASHHLNNVSLEELTTFLHTASKGRISTAKAELILTTVKRDQVAQVEYQDTKDFTVRSLVRQVKNNLAELDAIDVEIEKVLSHFSYPLTSIKGIDSLTAAKLISEIGDINRFKNAKALAKYSGVAPVTFASGMSKLEMANARGNRKLNEIFYRIALTSVMPIGINKALINPIFYDYYMKKISEGKLKNQALKCVQRRLVNIVFSIMKHKRPYENPTRGYVPAESASA

SEQ ID NO: 82439 - protein, 467 aa, unidentified
MTPHKDSVLDPRPLAPTPMLPQSPVLAEALQVCHPHAAGIDIGEAEHWVAVPPGCDPQPVRRFGTFTADLDALADWLIDCGVTTVAMESTGVYWIPLFELLEARGIQVLLIDPRQAKRAPGRPKTDRLDCKWLQRLHAYGLLAGAFRPDDQVCVLRGYLRHRQMLLTYAAHHIQHMHKALEQMHLKLTQVVSEITGVTGMAILKAIIAGERDPQHLAKLRNPHCYHAEDDIAKALQGTWRAEHLFALRQAVELYAFSHQQITQCDQQINAHLETFGDKSAGQPLPPKARRHKKTNEPRFDARTPLYRMAGVDLTTIEGIEEGTALVILSEIGTDMTRWPSVKHFCSWLGLCPQHQISGGKVLSRRVRPGAHRVTVALRLAARSLHHSQSALGAFFRRMKARLGTPKAITAAAHKLARLVYHLLKHGSAYVQQGLENYEAQYHERRVKTMAKQAKVLGYTLVPLAAQG

SEQ ID NO: 82440 - protein, 399 aa, unidentified
MFVGIDWAKERHDVCVVDPAGKIRGLATVAHSREGFDELLGHLGRWADQGEVLVGIERPEGRLVDRILEAGYPIVLIPTFAMKDLRRRYAVGGAKSDPGDAYVIADVARTDGHRLRRLEPLSEQTRALRSVVRARDDLVHQRVALGNQLRACLEAYWPGATVIFADVCSEIALAFMERYPTPESAVRLGEVRLGSFLKKAGYSGRRPAAELLERLRSAPAGVFGVEAEARAESMRAIARVMRSLNRSIKDLDRAVIAHLGEHPDAEVFTSLPRSGRINAAQMLAEWGDCREAYPEPDAVSMLGGLCPVTHASGKHRDVTFRWACNKRLREAITTFADNSRHASPWAADVYRRAITRGCDHPHAVRILARAWVRVIWRCWQDRRPYDPALHGAAVLLEAA

SEQ ID NO: 82441 - protein, 338 aa, unidentified
MESFVGIDLHKYVSQLAVLRESKSPSQLRFANDVVTVEQVLKKLPEGSKIALEAMGSWWWLVELAQKTGHEVFLSHPKQTKAIASARLKSDKVDALMLAKLLKADLLPTVWIPPANQRHIRELLTHRARLVRQRTAVINELRAVYAKRNIDPEARLQRVRPIVSGAEDLSGYGPRIVEEDLKLLEFINRQIGGLDKELIKIALEDTQAKRLMTIPGVGPVSAVAISCWIGEISRFSNAKKLASYFGLAPRVRQSGDTERHGHITKEGNRMVRMLLIQAALVHTRRGKGPSRKHYLGVLKRRGKQIARVAVANKLIGAIFHMMKEGIDYPDFIRRSGAQ

SEQ ID NO: 82442 - protein, 369 aa, unidentified
MVTHTLHPIIVGFDVHKDTIMACTFDRSSGEVGTARQFNNIPDRIARFVRTLRASGYEPEICYEASSCGYVIYRQLRALGVECAVIAPTSIPRRAGERIKTDRRDAEKLATMYAGSLLETVQVPDLELEQVRALVRCRLTLSEDLTRSKHRTTRLLESRGHVYREGQNWTQKFWAWLNRITLEGADETVLRVWVEEIHYLEGQIIAVDTDLAHEAEGERFRETVKLLGAFRGVALLTALTLATELGDIRRFSSPRQLMAYLGMVPSEHSSGARTHRGSITKTGNTRARKALVSAAWKYAAKPARSRALKKRQEGVDAHVIATAWKAQQRLYKRFHALAFRKPRSVANVAVARELAGFLWAALQPKHTHT

SEQ ID NO: 82443 - protein, 351 aa, unidentified
MKTKNTACPKLFIGIDIHKTSWSIRMATDLFQGKRMTMPSDPENLKRYVEKFYPDHEIQCAYEAGCCGYSAHRAFESFGWQSIVFNPSDIARTGKSQFQKTDGIDADLICRELRDNRLVSITVPDVEREHLRCLFRRRNDLVKDIRQIKSQIKGQLLFMGIRIPQEHDNSYWSHSFRKWIESLSLENETAKSAIRSRLLQFEFLDKSVREVSNELRKYCRTHYKKDYTLLRSIPGIGGIVACGILSELGDLRRFGNFKQLAAYVGLMPALHQSGDNTRSSGINPRGNSIMRSYFVEAAWQALRFDPVMQKYYRTHAGRDSKSILIKVARKLLSRVHSVIKTETPYQIGVIA

SEQ ID NO: 82444 - protein, 422 aa, unidentified
MPVFVPYDEKEFTLVAIDVAKARHDILIQFPSGKRKKLKITSTAKDYHTFIQDLKSLGTPCIVGLEATADYHRTIAYYLQMAGFTVYFVSSLAVARTREALHNSWDKNDSKDTQVILHLLRTGVVQKYYDPLIHQFNDVQEISKTYHQLSLRKVKIQHSIMNHYLPLYFPEVEKYFHTSRAQWFTTVLLHFPNPSAISKYTLEKFLQVAWPIVGRKVNKRGWLVDFYNTAKESIGLPVPESSQAICMFKIILQEHQGLCGRLKEIENLAETYLKENQDYHYLKTIPGIGPILALTILAEAGNIRRFSHFRQFLNFCGLDLCTHQSGYFRGQSKLSKHGNSRLRYAFWIAGSVAIRMRENTFRKKFDSYTKRDPLNADLKRKAYTAVAAKMARVVYSIIKNEQVYRCSFEPVISSGRIASVVP

SEQ ID NO: 82445 - protein, 335 aa, unidentified
MEFEFFIGIDVSKGELDFAVQRGRELLFHREIANEPQAILAFIKELGRLPGFKLTGAVFCMEHTGIYNNHALACLYKKHACICLEAATQIKNSLGNIRGKNDKIDAIRIAGYAYKQREALRLWKPKREMVQQLAHLAATRLRLITVKKQLKTPLKEHGAFSSVKVSRQSQQICSHSLKAIDDDLNRADKAIEQLIKADTELHRLFTLITSVSGIGKVTAVQIIVATNEFKDINNPKKFACYAGVAPFADDSGKIIKKARVSHMANKKVKTLLHLSAIVAIQYNPDLKLFYQRKVLQEKKNKMSVINAVRNKLILRIFACVNQNRPYEKNYCKLVA

SEQ ID NO: 82446 - protein, 499 aa, unidentified
MLPPATALAATTTPIVEAALSTHKSKANPSAAAARARRKARARAQAAAAHQAEVDQVNALPIHHRHAAGIDVGSRSHWVGVGFAARDPSDRVREFPAHTDGLRALAACLHAHGVTTVALESSGVYWIPLYEPLESQGLEVLLVDPGYARQLKGRPKTDRRDAQWIYRLHSVGLLAAAFRPDGPTCVPRAYLRPRGNLVRYAGQHLQHLHKAPEQMNLKRNNVLSDLTGTTGRKIIRAILSGVRDPQRLAALRNYRRRATAAEVAQALTGSYRAEHLFALRQAFPAWQFSPGQPDAVDEQLQAQLAQMKRARPRPPRPPRRGPKANDPRFDVRAALYYVVGLDLTAIEGFGAGTALAVVSELGTDLSKFATVKHFGSWLGLCPQWHKTGGQVRSSRTRPGVNRVAAALRLAAHGLHHSPSALGAYYRRQKARLGAAAATTATAPKLARLLYRALTTGLGYVRPTQAEYEARWRAQQIEALRRRARRLGLEVRAAGGAADG

SEQ ID NO: 82447 - protein, 391 aa, unidentified
MIYVGIDVAKDKHDCFITNSYGEVLFKSFTIPNNRDGFETLFQKVQSVSDDLTKVKVGLEATGHYSYNLLGFLLDKGCHTFVINPLHTNLYRKSLSLRKTKTDKVDARTIAMMLMSDVNLKSYSDTSYHNEALKSLTRYRFDKVQERARLKQSVSRLVTILFPELEKLVPSLHSASVYALLSELPSAEKIASCHLTHLTKLLENASKSRYRREKAIEIRDAARISIGSNMPAKSLELRHTLRLIGELDSEITEIESEIKQIMDQISSPILTIPGISYRMGAMILAEIGDFSRFDSPDKILAYAGASPSTYQSGQLKSSYSHMEKRGSRYLRFALINAAKYVCHWDETFGAYLQKKISEGKHYNVAITHAAKKLVRLIYAMEKSGMPYIKTA

SEQ ID NO: 82448 - protein, 429 aa, unidentified
MIMGFTKPIEHSNLITKEGDLMNPLYVGIDVSSKSNVVYFMLPNGDKHSNFSVANSHDGSTQLVKRICSALTSESLDTVSIGLEATSVYGDNLVYFLREDASLASFNRKIHVLNPKQVNKFKESYNDLPKNDWIDSFVIADCLRFGRINKEVYIGDYHYKALQNLTRARYFAVCNLTKEKQRFMNVLFKKYSTMTQEKVFSDTFSTTALAVYDEFESAEALAYMDLQELTAFIIEKGKNRFPDPDAVAKAIQKAARSSYRLPKTVNDSVNQVLSISITSMKALESQIKEFDKAIAAQMKLLPNVLISIPGIGPVYSAGIMAEIGDINRFDNQAALAKYAGLAWTQHQSGNFEAQNTRLIHSGNRFFKYYLCEAAFSLVRCDKEYSNFYHLKYKEVNKYQHKRALALTARKFVRLVFTLLKDNRLYRPAE

SEQ ID NO: 82449 - protein, 398 aa, unidentified
MKTCGLDVHKDNIFCAIYDGKDYSEVKEYETTLPKIRHMGEYLRSEGVLKIAMESTSTYWVPVWDVLLEMGFELMLVNPFLIKQMPGRKSDVKDAQWISCLLHKDLLRGSMIPSPSIQQLRTYSRKYTKLQAQKTRSLQKMDRLMVMCGFRIGSCMSNLGTKSVMLVIQALIMRETNPEVLERLVYGNTANKKSGKLREALTGNLKEHYRQQLEWEKEEYDLFEKQSQKCLTEMRKICLEHYSEEVDLIKSIPGVSDISAMIIIAETGGDMSVFENSGKITGWAGLRPRNDESAGKYKSTATTKGNKYLRSVLVQVSWAASRIKNGWFKEKFNRLSMRKSRKKALIAIARKLLTVTWNVLYYKVPYNTNLVHIYDPIKVEAKINYHQREMERMQNLLN

SEQ ID NO: 82450 - protein, 354 aa, unidentified
MVARTQNAAPILATIGVDIGKDVFHIVGFDGDGKIGLRRKIKRLALAETFKKLPPCVVGMEACLSAHFVSRTLRALGHEPRIIPAIYVKPFVKGQKNDYNDAEAIAEAALRPNLRAVSEKTQDQLDLQACHRVRSRLVSRRTATINQIRAFLIEQGITVRPGARALRNSLFEILRNRTDEISPRTGQLIVGLYEDWLWLDERIETITKEIEEISQSEANCQRLMSIPGVGPLISTAMVAAIGTGEAFDRGRDFGAWLGLVPRQYSTGGKSILGRISKRGSRYLRTLFIQAAKIILMRPHNWEKYSFGTWLKEAAKRLHRNKAATVLANKLARIAWSVLRNDKTFDMSHSEVPAI

SEQ ID NO: 82451 - protein, 340 aa, unidentified
MSSIQILGINLGKHSFHVVGHSHSGKEVLRKKYNRNQLISFIAKPEPTIIAFKACGGSHWLARKCINLGHQTKLIPPQYVKPYVKGNKNDFIDAAAIAEAASRPSMRFVAVKTEDAQVIATIHRIRDGYIKERTACMSRIGAILLEFGLSLPKGHANMKALFQWLAEQNQELPPSLLNELCSIHEHYSYLSQQIKAQDIKLHDISEHNELARLLKTIPDIGDLTSTLCIADVSSANNFANGRNMAAWLGLVPRQFSTGGKPKLFGVSKRGNKQLRTLFVHGARAVLSRPETTGKVFGQWLVNLRATKPFNVVVVALANKLARIAWAVLQHRQAFKAALQP

SEQ ID NO: 82452 - protein, 338 aa, unidentified
MEQITTIGLDLAKNVFQVHGINGAGKVLVRKQLRRAEVLRFFAELPPCLVGIEACATAHHWARELTRLGHTVRLMPPAYVKPYVKRGKTDAADAEAIAEAVTRPTMRFVAVKTVDQQSVLMLHKVRDLLVRQRTMLINALRGHLAEFGIIAARGPGGVSVAITALHDAQDGLPDLARQVLHGLIDQMRTVGAAITTAEKRIMTWHRASEASQRLATIPGIGPITASAIAATVPDATLFRSGRQFAAWLGLTPRARSSGGKERLGGISKQGDGYIRRLLVIGATAVIRFARQDNASKTWAARLLERKSARLVSVALANKTARIAWAVLARNQSYAAPSL

SEQ ID NO: 82453 - protein, 351 aa, unidentified
MKELMAGIDLHSNNIMVGIMNQEGGRVTHQKLPCKLASILSFLAPYKERLERLAVESTYNWYWLVDGLQAAGYPVVLANPAGFSPYNGLKHADDKSDAFFLAEMLRLKILPLGYVYAAEQRPVRDLLRRRMSLVQQRTALMLSFQSLYTRTTGGSLTLSRLKELEAQEAQRLYEHPANQLIAGLQLEHIEQLDASIERLEKAVLQVARTLPCYSRLKTLPGVGVILGLMITMEIGDIKRFAGPGEFASYCRTVRAQRTSNDKKKGENNRKCGNKYLAWAFVEAANFARRYDAASRKWFDRKAARTNSIIATKALACKLAKAAWFLVAEDTDYDGRRVFPHLAAGPTKNMKP

SEQ ID NO: 82454 - protein, 417 aa, unidentified
MRKARAIVGVDCGEQRHRFVMIDESGERVASCWVENELGKIFQAFDELGSQSKTARLEVVTESIGSLGALVSRAVRGRGDELFLVSTKALRHYRDLEGQPHKSDDRDAYLAARMLLFGMEGLRTPAPVSEDEQALARLIRLRFQLMDQKKGVGLRLRSRLLELAPVMASKDWEGPSHSSRAMVAILQRWPGLEGLERAHQKSIEKLLRKVTRDGDACIKMAKHLREAAKKIGLEGLAREVLTMEMTILVSQLEANHQQLEQVRKREKDLIDAHPVGQRLLTMPSVGYRTAAVLLAEALPQARVRSEAQLATYSGLTPLSRQSGNSSRSRLCRGVNRFLASAHYMSAVNACLRSPIDRSYHAKKRADFKGHPAEFKKATIALARQRHKVIYRILVKDEVYDASRLAASTVERARMTTA

SEQ ID NO: 82455 - protein, 380 aa, unidentified
MRQVCGLDVHKDSVFVCIINENGVVFQEKYGVLTPELEQMLAKMLEYHVEEVCMESTSIYWMPVWRVLENYVSLKLVNPYFIKQLPGKKSDVKDAEWIATCLLKDLIKGSYVPDDLIQQLRQYDRRISDLNAECVRKLGKLDAALQRCNIRISNYVSTTDGKSYKEVVRLISEGTRDPAELTKVIHGRTINRVGKDVILASLTGVISNTDIDVIRQLREEVALAERHKDECQSKMDAICQQYFPQQLKNLQTIPGIKGRSATAIIAEVGTDMSSFEDAAHLVSWCGLKPRNEESAGKIKARSTTHGNRYLRKTLIECSWAASKTQGCYFNKFSYHQVVVRRKNKMKVQVAIARKILTAVWYVMHDNVAYRDYTPDIAPAE

SEQ ID NO: 82456 - protein, 351 aa, unidentified
MRYIGVDVGKNRCQACIMDEEGVVVEEFPFTNTWEGIQALLEKTGDTKSKAVVESTGNLWLRIYEALEGHGVEVKLANPYKTKAIASARIKTDKLSARILAHLLRADLIAECYVAPREVRQVRALLRQRASLVKMRTMVKNRVHSHLDRYGLSSPWSDSFGAGGLEWLRGLELEPVDRCILDTHLRHLECLNSEIGFLDSRIAGQALESEDALLLMTMTGVDYHSATLLACEIGDIRRFPSPKHLVSWIGLCPSLYQSGNSLVMGRMKKDSNGRARWVLVQAARTASRTDPRMRELYQRVSSRKGTGKAAVRVANKMAVIIWHMLTEGKPYMQVKEGLYRSKLKKMKRIAS

SEQ ID NO: 82457 - protein, 373 aa, unidentified
MKKIRFIGLDVHAETIAIAVAEPDGEVRSLGIIPNREESVRKLVKKLGPAEQLQACYEAGPTGYVLYWQLTALGVKCEVVAPSLVPVKAGDRVKTDRRDATKLARSYRAGDLTAVWVPNEEHEALRDLVRAREAAKQDQLRARHRLSKFLLRQGRRVPSGFKVWTQRYQDWVKEHVHFEQPAQEYTLMDYVHEVEHMDDRIRRLDVAIAEAVKLAPPGMQEVIQALQALRGIAQISAVTVVAELGKISRFDRARQLMGYSGAVSSEHSSGKRMRRGQITKTGNAHLRRIAIEAAWAYRHRPAIGPRLRKRQEGLSEEVKEIAWKAQHRLHKRYRTLSAAGKEKQKVITAVGRELLGFIWAIGVQAERNSKRVA

SEQ ID NO: 82458 - protein, 409 aa, unidentified
MVLFVGDDWAQDHHDVEVMDGSGRRLAKARLPEGMAGMTRLHAMIGQALGDAVEDDAVEVKIGIETDRGPWVQALVAAGYLVYPVNPLQAARFRERLAVSGAKSDAADAHMLADMVRTDSHQLRRIAGDSVEAEAVKVVTRMHKTLIWERTRATQRLRHALREYFPAALEAFEDLDAADTLELLAKAPDPGAAARLSINQISAVLHRARRRDIPAKAAAIQAVLRGEQLGQPAVVTAAYATTVRALVALLGTLNEQVKILHGQVETHFGEHPDAEIILSQPGLGVILGARVLAEFGDDHDRYACAKARKNYAATSPITRASGKKRTVAARFVHNDRLVDALMTQAFTSLSNSPGARAYYDRQRARGASHNAALRQLANRLVGILHGCLKTGTLYNETTAWSHHLNTAAA

SEQ ID NO: 82459 - protein, 339 aa, unidentified
MNEVTVIGIDLGKHSFHLHAQDAAGRMVFRKKLSRQQLLRTLANVPSCRVVMEACAGSHWLARQLAGMGHEPRLISPQFVRPFVAGNKNDFGDAQAICEAACRPSMRFVSPRNEAQQTVSAMHRLRERLVRERTATVNQIHGFLLEFGISLPRGAALMSRLPTVLDHETLPPRLVGLVVRLHAQVHYLEEQIRQVVQDLKASLREDDKGRRLLEIPGIGPITASALAVELGDARQFANARQFAASIGLVPRQYSTGGKPTLLGISKRGDRNLRRLLVQCARAVMQHTASRTDALSLWVKTLSTRRHSNVVACALANKLARIAWAVLARGTHYQARALTT

SEQ ID NO: 82460 - protein, 345 aa, unidentified
MAKLIIGIDFSKEKMNFCCMDAQNMSVLMEGEVENSRQGCGEMTKRLRGLRTGLRSCDFLFCGENTGIYSLETAECLTSRKYFVWLENPLQLKLSSGIRRSKTDTLDARMIAEYAYRHQDKAKRFSPCGESLKKLRELHLTRRKLKDCEVALKNFSGSLPKDSLPAAKALRKAMESIKESIRALEKEICGLLMNDPEFKENALLAVTVPGISWVTASAIILDTRNFTRFNTARQYANHTGCVPHEHDSGTSVHRRPRVSKASNRYVNSLLTQGANSLLTHNPQTREYAQKKRQEGKPHGFIVNNIRNKTIHRLFAVIRNRKPFDWAYVNEFQRKQPCGKIKTNAA

SEQ ID NO: 82461 - protein, 337 aa, unidentified
MTRYVGVDLHRRRSVIVVLDGDGTELWTTRIDNDPVTLGLEIEKAGPAPEVVLEATWGWYWAADVITQAGGRVHLAHPLGIAGYENRRVKNDYHDARLIADLLRMGRLPEAWIAPASVRYQRELVRYRRKLSQLRAGLKAQVHAVLGKEGLIPPIGHLWGPGGSRWLDDTTMADAYETRVRSLRRLIKLYDTEITKLDVRIAAEFNGHVGYHAIQAICGIGPVIAATLTAELGDVTRFKSAKHVCSWAGLTPRHRESDTTIHRGAITKQGPPLVRWAAIEAVAKNHGTDHIKQHYRRVAERRGRNKAKVAAARKVLTLVYYGLRDGEIRSLAPPEAA

SEQ ID NO: 82462 - protein, 285 aa, unidentified
MDHTTYGLDIAKRVMQVYWVDHQTGEIGRRTLKRSHLMAFFGRRPGARIVLEACGSGHYWARQLSKLGHEVRLMHAKRVRPFVRGNKDDAADAQAIWTAAQQPEVRWVPLKSEEQQAVLSLHRVRSQWIKVRTQMVNAMRGLLYEFSLVLPGGRLAGLKAISAARAEIEQAVPALMRPVLDVQLQALREVDARIEALQAQLQGLESQLPTARRVRQIPGVGLLGSTALAGVLGADARGYRSGREFAACLGLVPTHRGTGGKVTVGSLSRRGDPNLRLLTALPRQS

SEQ ID NO: 82463 - protein, 324 aa, unidentified
MIDGILGIDVCKNTLDVSISSYTKVRTKSFTNSPDGWRHLLDWLIAQKIQRVHACLESTGRYSLGIACALYEADHVVSIINPAQIRDFVRTKLGRNKTDGVDASHIREYCELFKPSPWAPPSKAHRRLGELQTIRSGIIAGLTEWKNRKNSGIVDAEAQALADATISHFTSQLGAVDKAIALTIDNDCNLQSKRDLLLSISGVGETLAGVVLAELPGPDVLRSSAEVVAYAGLNPRQHQSGTSIDRATRISKIGNAVLRAALYMPALSAMRYNSAIVALVTRLKSRGRLKPKQIVVAAMRKLLVLCFGVLKTGRPFDAAIAMGG

SEQ ID NO: 82464 - protein, 334 aa, unidentified
MDKFYFIGIDVSKKKLDICVMYGSKVLIEEQVTNSTKGVTQAIKHIKKELDITNDMFIICAEHTGQYTYPLICATKAIDCKLWLENPTQIKYSCGMTRGKNDKVDARRIATYAFRFFDKMKCYTRPSEAIIQLNQLQAERSMYVTDLAKYKAILTDQPDFIPKDIYIQKAKRIKVLMASLQQAISALEKKMNEIISTSEMLSRQMSLLTSIDGIGRVIAMNMIIATEAFTRFENARQFCCYAGVAPFSYTSGSSLRSQNRVSLRADKSIKSLLHLAAVAIAHRKDGELKEYFLRKVEEGKNKMTVINAIRAKLVSRMFSVINLKSAVKFSTTLK

SEQ ID NO: 82465 - protein, 351 aa, unidentified
MSRSSFSAVIATLGIDLGKNSFHLVGQDERGAIVLRIKLSRSQLTQRLANIPPCLIGMEACAGAHHIGRQLQALGHDVRLIPAQYVKPFLKGHKNDYRDAEAIAEAVQRPTMSFVAIKTPEQMDLLALHRVRSRLVSQRTGVTNQIRGFLLERGITVRQGLAPLRQALPGILGSSADALSPRLVRLIADLAGDWRQLDERIAAVSAEIEALAAQDDHCQRLMSVPGVGPIISSAVVAAIGTGAGFKQGRDFGAWLGLVPKQESTGDRTILGKISKRGNKYLRTLFVQAAHIVLVRRPHGARLGLWPWIEAAGRRLHRNMLVIALANKLARIAWAVLARGHAYQPRSASHAM

SEQ ID NO: 82466 - protein, 389 aa, unidentified
MIIGIDIAKRNHEATAIDDAGQILGRITFANSNAGAAKLLDFIARLKSEDEKVVFGMEATGHYWLAIYSYLVERDFDVFVINPIQSDSLRNLFIRKTKNDQRDSFIIAEIIRFGRYTETQLSDENTLALRQLCRYRTSLVDQTTELKLQAIAVLDQIFPEYETLFANIFGVSSKALLMEYTTPDDMLSVSAEKLAEVIDKTSRGRFKLEKAKEIQEKARNSFGITIAIDAFAFQLRQLIEQIKFIEEHIKEIEDHIKTYFDTLDSCLPTIPGIGMITAAIIESEIGDINRFASPEKLVAFVGIDPSVKQSGDFTGSQNRMSKRGSPHLRRAIWQAAVRAVQVDPVLKAFFEKKRSEGKAYGTAIGAVARKLTYIIFVIMRDKKTYVPMA

SEQ ID NO: 82467 - protein, 333 aa, unidentified
MVYAAIDIHKRVFQAAVLDADSGQLGQERLPATREALDDWATRWAGKLEAVALEATTGWRWVARELQARGFDVRLCDPGEARALGGSKRRPKTDRLDAAWLARLLAKEMLPEAWLPPAEIQYLRDRTRLRHALAQDRNRWAQRLHALLTHEGWPCGRGRLLTVSGQQWVSALALPEPARASVEAMLTIIHALGEQIELLDRELRRLARSDPRLKALCAIFGVGPVLAAHILAELGAASRFRRARQVVRLSGLDPVVSESANVRRRGRLSKQGSPELRWALAEAAHHACRRTSPDHALYTSAKQRRGTQRATLTVARKIAHRAYHVLADLEQAA

SEQ ID NO: 82468 - protein, 330 aa, unidentified
MMFHAIDLHKRTLEVATLMSGDEGEPQVVQMPACERALGTYLAQWPASRHRVVVETTGAWYWVADLLRSRGAELKLAHAAKVQAITAAKVKTDSVDAVTLLTMLRLNLVPEAHVISPELRELRDLLRMRLRLIEKRTSAKNSIARLLEKYNRASVEALPELAQVQVGFHRGQISLLAVQIKALEKRVHRVLRPNAIVRRLRRIPGIGRLSAWTLYLEIDGIERFATERNFFSYCRLVPGSDNSGGRTRNKRSKAGNRYLKLAFSHAGIRATQRYAEVGAAYRKKLRKKNKPLAQAWVRQQLARIVYHVLKKDVDYDDTFRGVALSRPKRA

SEQ ID NO: 82469 - protein, 352 aa, unidentified
MTDLADLVEHVIGVDPDRDRVTAAVVSVTTQGELAAATFPTTRRGYGQAIRWAKTLTVDERCAWAIESTGSYGAGLAATLAEMGEFVIEFDHPSARASKDGAKSDSLDAVRAARETLGRKTWATPRSRGLREGLRTLIVARDSAKLALVAAINVLKALIVTAPVDLREDLRGLTFGQLVDRCIRLRPDTATEPEHAATELSLRSTATRIKQLTIECRELELAMLPIVREICPALLNEPGIGTLVAAQILISWSHAGRCRDEAAFARLGGVAPLEATSGQNQTRHRLSRGGDRQLNRALHTAILARVKGHPETRDYLARRIAQGRSKRGAMRCLKRYYARHIFRLLESTPTPT

SEQ ID NO: 82470 - protein, 320 aa, unidentified
MTSKGVEKMQNDTIGVDVSKDHLDAHRLADSASRRFANDKCGRKAFVKWCAETPIVRVVFEPTGPYHRAFEHALGAAGVPFVKVNPCQARRFAEAIGKLAKTDRLDAATLARMGAMLELKTRPPRSEALLKLKELHLAREALVKDRTAAKNRAKVLTAPLLKRHNAQRLEQIKRHIAAIEAEILKQVRTDPELAQRFAILTSIPGLSALTAFALLIEMPELGALEPGQAASLAGLAPMTRQSGRWSGRAFIRGGRAEVRQAVYMPALVAARFNPDMNAKYRQLTCAGKPAKVALTAVMRKLIVLANALLKANRNWAPKYA

SEQ ID NO: 82471 - protein, 317 aa, unidentified
MSKHSMVCAGIDTGKRKLDVAIDGRGEQLQVDNTAEGHKRLADWLRRHRVKRVGIEASGGYERAVVAELRRKGFVVVVFQPVQVRAYAIFHLRRAKNDKIDAALIANCTAATKKIYAPPDPRLAPFADYLTMIEQIIEDVALLKNRYESCRDVRIRQVWKAEIARLKKLEKTELKSLVAAIRQHRDLAERLDLIYSVDGIGLPTAVAILVRLPEIGRITREQAAALAGLAPYDDDSGDFVGVRHIMGGRERLRRALYTAALPAAFYWNPQLIALYRRLIGAGKVHKAALIACARKLLVFANAVVARGTPWSAQSYAA

SEQ ID NO: 82472 - protein, 390 aa, unidentified
MDEAGARLAATRLPEGLTGIGQFHELLAEHADDPGEVIIGIETDRGMWVGALVAAGYQVYAVNPRSVARYRDRHGVSGAKSDAADAKLLADLVRTDRHNHRPLSADSSQGDAIQVLARAHQGLIWTRARQSATLRANLLQYYPAALEALPSLGDRDRDRDALAVLGRAPTPTQGARLSLSKIGSALKAGGRQRNIDERARQIQAALRTEQLAAPEAVTQACGAITSATVNVLIELTDQISQLETTLAEHCEKHPDADIYRSLPGLGVILSARVLGEFGDAPNRYTTAKSRKNYAGTSPLTVASGRQKLVRARYVRNDRLYDAIDRWAFAALQCSPGVRAYYDQHRAAGDTHHQALRALGNRLVGILHGCLRHQTLYNEDTAWAHRQLTAA

SEQ ID NO: 82473 - protein, 433 aa, unidentified
MEEAADEPLFCERAAGIDIGKQAVMVTVRVPSETRRGGRAQETREFGTTRRQLLELADWLRSWGVERAGMESTSDYWKPVFFLLEQQGLECVLYKAAQVKALPGRPKSDKLDSVWLAKVTERGSLAGSFVPPEDIRRLRTHTRYRRRLTQARTAEKQRAEKLLEDGHLKLSSVISDIHGVSGQEMLRAVIAGERSPLVLAEMARGVMRRKLAALREALDCSFFTQEHAFVLSMMLDNIDHYSAQIAVLDAKIAVLCEPYQRQVAQLDQIPGFGVTTAQDLIAEIGVDMTVFPTAGHLCSWARVAPRPKESGGRRKGGSATGKGSPYIGAALGEAAASAGRTQTFFGAKLRRLYRHMPKKKAQVAVMRAQLVTAHALLSDPEASYRDLGPGYYDQRAGIERQARGHVRSLARLGYKVTIEPVDPGTGELTAKAG

SEQ ID NO: 82474 - protein, 313 aa, unidentified
MITGKIAGIDVSKHSLDAAVLGAAGGERFDNDAKGAKRLIAWLRRQRAEIVGLEPSGGYEKAAIKALAAAGFDVRFADARRVRLLAEAHNAGAKTDAIDAHFIARFIVETGGRKIELDPVREALADMVKARRDLGGAARRLAQQAAALTHKGARRTLEKQAAALCAAAKAMEQAALAYVRDDSALTNDAQIMQTAPGVGAIVAATMLADMPELGRLTGKQAARLAGLAPYIRESGQWKGRAACGGGRMAPRNILYMAAMAAKRKDPSLKAFFDRLVAAGKPKMVALVALMRKLLTALNAMLRDQKTWTSHANA

SEQ ID NO: 82475 - protein, 389 aa, unidentified
MEARTVYNPPPAAPHDDAVRCVLAIELSKKSWIVAVNTPLSEKISRYTLEACDWRELLKLCERIRTRIARELKKDVELVSCYEAGYDGFWLHRLLEAHGIRNYVIDPASLQVDRRARRAKTDRVDVERLLRSLMAYLRGEPKVWSVVCVPTVAEEDDRRLHRERGRLINERIQHVNRIKGLLAIHGIYDYPPLRHDRMQQLEGLRTADGRTLSPRLKAEILRELQRLELVIGMIKTIEAERDAIASAKIETEHSSAKRIQDLAKIKCIGPEFATTLVGEVFYRSFDNRKQLASYVGLTPAHFQSGETCRDQGISKAGNAKARRVMIELAWLWLRHQPASPLSVWFHDRVGKLKGRIRRITIVAVARKLLIALWRYLEAGLAPEGAILKV

SEQ ID NO: 82476 - protein, 391 aa, unidentified
MEISSDYFCLVGEVVLEPFEVLHTAQNLNDLARKLKALDGETRIVLEATGNYHKPVAFVLHNAGLFVSVVNPVLIHDYDNNSLRRVKTDKKDAVKIANYTLDKWTRLRQYLPEDEARLALKNCYRQYQQAVAIRTMLKNNLISSLDLTFPDANNLFSSPAKSNGCEKWVDFIGEFWHSGCVSSLSADAFAKKYLKWCQKHRYNFTRSKSDEIYSCAVNATSLPKSPTSKLLIQQQVAQLKAVSKSVAAFQQEMLRLSQQLPEFDTVMEMYGVGPSLGPQLMAEIGDVRRFSSKKSLIAFAGIEPQPNDSGKIVGNDKGISKVGSAVLRRTLFLIMTVILQTQPQDEPVFQFMNKKRSEGKPYKVYMMASANKFLRIYYARVKAVMDSECSQ

SEQ ID NO: 82477 - protein, 343 aa, unidentified
MKDTVFAIDLAKSVFQLAVSHHPGRVSKQYRLTRSQLLRFMGKQPAATVLMEACGSAHFWGRELDRLGHRVRLLPVRHVAPYRTGNKTDRIDVEAMLEAGRNEKICDVPVKSIDQQGLTALHRVRSRWLACRTARINTLRGLLREFGLVMPLGARRVVPQVRAWIDDAEVGIPTPIRAVLRELCDEIGELERRMHLVEDQLETIGSHIPAVSQLRTVPGIGPLTGTAIVAFVGSPQRFPSGRHFASYLGLTPRERSSGTSRHLGRISTRGDTYLRMLLIHGARAVLCHAKRPATQDALRRWALALEKKRGHNVAAVALANRIARIAWAIWSRNQEYREVNRQA

SEQ ID NO: 82478 - protein, 436 aa, unidentified
MTVDSRLRFASNQVRLGLFVLAYNLGNFMRRFALPKEVSHWSLSSIQLKLLKIGAKIISHSRMTGLIKDGRPTMLSISTSRAEGRRPMRKLYVGIDLGCKTCAGAVRDSRGKLLETCGFPTSAENLINFVGKQEGEARVLIEECELAGWVYRTLLPHAKSVEVSDPRHNAWIARGKRKSDPIDAAKLAELLRGGFYRAVYHPGDEEMANLKIAVQHYDQMTRTTTRLQNQIKARFRQQGIMTTGKGVYGASGRQKAISMVKSEAIAEMLRQDFRLLDHAQKERAGASRLVTKLSGGLPVIKRLKRIPGVGTISACRFVAYVANPHRFNTKGLVSFSRLAVVKKESGDSIVCGEHLSREGNGAMKALSRTVFNGAMRTTRINGIRDYYLRSLSRTKNETHARLNTQRKILAVMNAVWRDETEYRDNVVTGNGAKRPL

SEQ ID NO: 82479 - protein, 363 aa, unidentified
MQTCERAKTLFVGVDVHKDTHTAVGLSPFGEKLFELTIGNYPQDFAELAEKVKSMAETANLSPRIGLEDCHGFGQRLAEYLDNDGYMVTHVAPILVDHKRKKAAHPEKNDSLDARGVAEVMIQKIDTLPVNKITQDSQIAKDIQELSLDREYLVKEQTRLKNQLHLLLHRIWNTEYRKKFKDPFSVKGLRFWKKSVPKNTSSFLSKNMKRKVKKLEALRLEIKELESDMELLIEKSGHKIHTANGCGIVLAAMIIGEIGDISRFKSPSALAKYAGCAPREHSSGKTHRHRKTRSGNRRLNCAFHRLALSQISRMGNEKAKAYFLRKISEGKSKQQSLVCLRRQIVNIIWMIMKHKTDYNLQKN

SEQ ID NO: 82480 - protein, 359 aa, unidentified
MTSMQDAPRRRRVVVGVDTHKHIHVAVALDELGGRIEARSFAADRSGYEQLIDWASSLGREVMFGVEGTGSYGAGLASAIRRRSIGVLEVLRTDRRDRRLRGKSDTIDAENAARAVLNGQASAVPKSADGTVEMIRLVKVAKDVAVKARTSAMISLKAVLVNAPAELREQLQPLTKMALIRRCAALRPGPVTDPMTAAKHTLRAIARRWLALDAEIKAHEQVLNRLTTELVPDLVAAFGIGADIAAEMLIVAGDNPERVRSEPAFARLCGVAPIPASSGMTTRHRLNRGGHRQANTALYRAVIVRLQYHQPTQAYYQRRTAEGRTKAEIIRCLKRLLAREIWSYLRPLRQARQPIVLAA

SEQ ID NO: 82481 - protein, 334 aa, unidentified
MWHVGIDLHRRTIVLAAVNDAGEAMNPITIPCADTATTINAVRALGPFRAVIEASGTYRWLYDLLRPYGAILLAHPFRLRAMIQRRSKTDKLDAQLLANLLRINQIPLAYIPPEPYQQLRDLVRCRTRLGRELAEAKIHLRAMLARQNREAPFRVPFGVRGLAWFGSQDFGPIENLVRDELLARMRHFGRQLTILDQRLVETAQGFPQTEALLDIYGIALFSALLIVAELGEVERFRTAKQVGAYSGLTSRVHQSGGHCYQGSITRQGSPWLRWVLVQAAMKAIRDDAALKNFYTRVRKRSSAKIARVAVARKLAEICWKRLRHWQRTHAEQAA

SEQ ID NO: 82482 - protein, 347 aa, unidentified
MLIIGCDFHPGFQQVAIFDNRTGEMQEKRLQHRAEAEEFYRGLAGQEVRVGMEACGHYPWFERLLQELGQELWFGDAAQVRASVVRKQKTDRRDAEHLMHLLIEGRFPRIWVPSLEVRDVRQLLVHRHKQVQARTRTKNQLQAMALSHGVQKKYKLWTKAGRAELEQLPLLPYAAQRRQKLLAELDAGEAEIGELDRRVGEEARQRPEAVRLMTHPGVGPVTALAMVLTLGPAERFESGKQVGSYFGLIPSEESSGGKQRLGKISKQGSSFLRFLLVEAGQTAARYDPQLKRFYRRLAVRKNRGVAKVAVARKLATRMYLMLREGWTYAQLNQAVMSVSPSHSVAGE

SEQ ID NO: 82483 - protein, 322 aa, unidentified
MRKYVGIDMAKLDFWAAFSETSKPKKFTNSNKGIQSFLTTLQKNSYSKQKTLLGVESTGGYHLKLCFDCQKSGYRIKVMNPLVVKKQSQTSLRNVKTDKKDALLIRYCLTNKAGYIFNETTVSIVLKSLVRQRDSLATIKLKLRLQQAEIVNKEKCLNQKINSVYEEINKTLSQKIKKLEKELKEHRKDEQTLLRTIPGVGPITAVSFISEVGDISRFNKAKKLTAYVGIDPRVHESGTSIKGKGYITKRGNKILRTRLYNAASVAVQRPNLFQDFFKKKIDEGKPYRVALVATMNKMTHVIHAVWTRGTPFKEKNKTSSES

SEQ ID NO: 82484 - protein, 433 aa, unidentified
MNARLTVGIDFSAQWADASLMAPDGTPLVRHQRFDNSQPGFEAFKRLLLETLSSAACSAVDLAGEATGMYWLPFFLELATDPDLRTYDAALFVLNPRWVKWYKQCLPQTDKTDRHDAYLIADRTRVHRPDTPWQLDLPMLALRCTTRYRRHLVQLLASEKSFFCAYLFLAAAAYQRLAPFSDVFGATSRLVLDDVCTLDALASLPVNALAEHLDALSHHTLPEPPRNATRLQQVARESFRLPTALGLSVHAILHTTLQHITFLEAQIAQVETEIARQLPHFPAIQQLSTIPGIGPVFSAGIGAEIGDVRRFLQGTKCDARGRVRPKTLRDAEDAVAKIAGLWWPRSESGAFAAEDRRMSKAGNANLRYYFIQGADRLRHWEPDYRAFYGRKLREVTQHRHKRALVLTARKSVGLYVGLLHRNEPYRSREARRT

SEQ ID NO: 82485 - protein, 335 aa, unidentified
MEHCGIDLAVRSSSICVTDESGRVLKELVLATEEEALRGVFEGRGQMSCLVEASPLAEWTAKVLEGLGHRVTVIDTRKAKGVIRTKKKTDRLDARNLAKMSRTGWYTAVHRKSARARAMRTYLQARQGVLATALAQGPRIRGLLRAHGIKLGQVADFRYEQKVQQLTLEHTPQIWPMLQPLLRLRAEAIRSAREMQKQIASQLSQDEVGRRLMSVPGVGPLTACVFMATLDEPQRFASGDQVAAYVGLVPSVQQSGEKDIHGHITREGDKILRSHLFEAAHTLLTRKKGTSRLKKWGLKLAKKKGYGKARVAVARKLAILLHHLWITGQSFQAVA

SEQ ID NO: 82486 - protein, 389 aa, unidentified
MTQVDDLSRSLATFDQNSTLTIAVEMSAASWLVAGVIPGIDRLPVKKLQPDPDGLLRLVERWRAEAVKAGRTIARIVLAYEAGRDGFWLARWLRTRGVEAHVIHSTSVAVSREHRRAKTDRLDTGMLIRVFLGWLRGERGHCGMVAIPTLADEDAKRPSRERENLVAERTRISNRLKSALARLGIRGFKPMLRKAPQRLAALRTLEGVPIPPNTVAEMQRDMARLAVLREQIEEIERARLQALQQAANSGPHAMVRLLARIVGVGIETADMLVHEVLTRNLRDRRAVARYVGLTGTPDESGSKRREKGLAKSGNSRVRRGLIQLAWRFLRFQKNSALARWYRARTEGPKGARKTTMIVGLARKLLIALWRMARTGVVPVGVELRQLASA

SEQ ID NO: 82487 - protein, 359 aa, unidentified
MKIVGCDFHPRWQQIAIFDSETGEISEHKLLNGDGAAEQFYRALAPPALVGVEACGNSQWFVDLLEQLGHQVWVGDAAQIRASYVRKQKTDRRDAGHILKLLMENRFPKLWVPTAEQRDLRQLLIHRHKLVEMRTRVKNGLQHLALNRGLQKQSGLWSVRGRAGLEKLPLEGWSAQRREDLLKLLSHLDAQIGELDEAVSRAADQHPQARLLMTQPGIGPITSLAFVLTIGEVSRFPHSGQVASYVGLIPREHSSGGKQRLGAITKQGNRFLRQLLVEAAQTTCRLDEGFRKQYAARCHHKPKGVAKVAAARRLTVRLYWMLKQNVGYPEIAHIESSSRVPLTGSSQVETLNERSRIQQ

SEQ ID NO: 82488 - protein, 342 aa, unidentified
MKIIGCDFHPGFQQIAMVDTETGEHTEKRLTPEEAVQFYRQLQDPVVVGMEACGNTLWFERLLAQLGHTLWLGDAGKIRAMEVRKQKTDRRDAELLLQLLIEGRFPRLWVPNLEQRDLRQLLLHRHKLVGMRSQVKNQLQHLALNQGIQRKSKLWSRAGRKLLEELPLSGWTARRREELLLLLDDLDPKIGELDVAVEQAAEKDAVAQLLQTHPGVGPITALAFSLTLGQIERFAHSRKVVSYLGLNPSEHSSGGRQRLGSISKQGNAMLRSLLVEAGQSAARLVPELKRAYQRLKHRKHCAVAKVMVARKLAVRLYWMWKTQQPYSATRMQGSPTGPVAER

SEQ ID NO: 82489 - protein, 339 aa, unidentified
MSLYVGIDLHANNNFLAVINEQGKRVDHKKLPNDTRLLLEALQSHGEEIEGVVVESTYNWYWLVDSLMEGGYSVHLANPTAVQQYSGLKHVDDKHDAFWLAEMLRLGILPEGYIYPKEERPIRDLLRKRGHLVKIRTSLILSLQNIISRNCGFGLKVNDVKCLKEDRVHPLLEENEDLALAGRVSKETIDFLTRKIQAIEVVIVKRIELKEPYKYLLTLPGIGKVLALTIMLETGALSRFAKVGNYVSYCRKVSSRWVSNEKTKGKGNKKNGNKYLAWAFSEAAEFARRYHAEARAYYNRKMQKTNFMVAHSALAHKLARAAYYVMRDQVPYQPEKLFA

SEQ ID NO: 82490 - protein, 355 aa, unidentified
MNSEKYIGLDVHQATIVVAVLDSSGRLVMESILETEAATILQFFAGLRGTVSVTFEEGTWSVWLYDLLNPHVDKLVVCNPRKNALLKDGNKSDRIDARKLAELLRGNQLKPVYHGETGVRMLRELARSYLTIVKDLSRVMNRLKAVYRSWAIPCAGRDVYYRRHRAQWLAKIREAGVRRRAERLYEQLDMLQHLRQQARRELLAESRKHAITAKLRQIPYLGPIRSALAVALIQTPHRFRTKRQLWAYSGLALETRISAEYRLVEGQVRRSKKLLSIRGLNKDHNHDLKGLFKGAATMASVRPGPFQDFYQASLAKGIKPTMARLTIARKIAAITLTLWKKGENFDADKLKSQAA

SEQ ID NO: 82491 - protein, 336 aa, unidentified
MDTVCATVGIDVSKKKLDIALLVNGKIKTKVLENSVSGHQALLEWLSKSKLALSALHVCLEATGVYSEPVALVLHQAGVLVSLVNPACIKGFGQSENIRNKNDVVDASLIARYCATMKPQLWTPPPLEQRQLRAWSQRIHTLKDIRQQEENRLEALTISRMDDVAEHVKQSIAWLSAEIKKLESDINDHIDGHPGLKHDAELLSSIPGVGMTTVAKILGQLGDIRRFASAKAFAAFVGVTPRQRSSGSSLRSRTVISRTGNTALRAALYMPSLVARQHNPILRQFAERLANNGMAKKAVVGAVMHKLVHLIYGVIHNDKPFDPNYQSKGLAIQDGI

SEQ ID NO: 82492 - protein, 369 aa, unidentified
MAEVREAFIGIDAAKLRNAVAIADAGRDGEVRFLGEVDASPEGMRRLAARLAAKYDRLHFCYEAGPTGYGLHRLLTGLGHHCTVVAPSLIPRKPGDRVKTNRRDALTLARLLRAGELTPVWVPDEGHEAIRDLVRARAAAVETLRVHKQQVSAFMLKHGRHFPRKKAWGARYLRWLQEQRFEHPAQQIVLQEAVEAVRLAKERVERLERTIEEFVPAWSLAPVVRALQAPRGVDLIVAVTFVTEIGDLRRFESPRRLMAYLGLVPSERSTGGSVRRGGITKAGNGRVRHMLVESAWTYRHPPRVGAKKLAQLERVPPKVREIAWKAQSRLSARYRALAARGKRLTVVCTAIARELAGFMWAVAREARTA

SEQ ID NO: 82493 - protein, 336 aa, unidentified
MNAITIGLDIAKNIFQVHGVDAHGKPVLQRKLRRGEVLRLFANIEPCLVGIEACHSSHYWGRELSKFGHEVRLMPTQYVKPFVLGGKNDANDAAAICAAVRRPDMRWVAIKSAEQQSVQSLHRMRARLIQERTAKSNQIRMFSEEGFVFARSIAQLRRSVVQLISQENPRLTTILRRLAAMYLEQLDALDRWLAELQAQLHELFVQREDCRLLASVPGIGPVVATALVGTVGDARQFRNGRQFAAWVGLTPKQRSSGGKTMLGGITKHGDTYLRMMFVQGAQAVLRYVDRRSDRQSLWLKRLLTRRHKNVVVVALANKLARVAWAVLAQRQAYKAS

SEQ ID NO: 82494 - protein, 339 aa, unidentified
MKYIPVGVDIAKHLMQVHFVDEHTGEIIDKQVKREKFLEYFSNREPCLIGMEACGGSHHWARELQKLGHKVRLLKGRFVKAFVMGNKNDVMDARAIWLAVQQPVKSVAVKSEEQQATLGLHRMRQQLVKFRTAQINALHSLLLEFGETTHKGRAALAKEVPEALERLKERLPLYLINMLDEQYQRITELDEHLDHIEKQLQAIARQNETCQRLLNIPGVGPLIATAAVATMGDASAFKSGREFAAFIGLVPRQTGSGGKIRLLGISKRGDKYLRPLFIHGARAAALLTKEPGPWITELKKRRPASVAIVAMANKLARTVWAIAAHGRKYDKNHVSIRPD

SEQ ID NO: 82495 - protein, 343 aa, unidentified
MKLHVLGIDLGKTVFHLVGLDSTGRVVIRKRCSRRQLLVFTGNLEVKLIGMEACSGAHFLGRALREQGHEVRLMPAQYVKPYVQTNKSDYLDAEAIAEAVQRPRMRFVPIKTEEQLDLQALHRVRERWVMRRTAVVNQIRSLLLERGLTLPKGRSHLDEQLPRILEDAELNLSDSFRVLLAQLKLELEQLAARIEEMDRVIQETARENEACQRLTEIPGVGPVTATALIAAVGNGSTFEKGRKLSAWMGIVPGEYTTGGKQKLLGISKRGNKYLRRLFVQGARSVLQQRHKQAPGLSSWLAQLLGRSHQNVVVVALANKLVRMAWAVLCKNERYRAPVLAVTT

SEQ ID NO: 82496 - protein, 340 aa, unidentified
MLTTFGLDIAKRVFQLHTVDPDTGEIQRLKLRRVEMVPFFANRGPCVVAMEACGSSHHWGRQLRSLGHDVRLIATKFVRPFVKSNKTDAADAQAIWEAAQRPGMRFVPVKTEQQQAILVLHAMRDGLVKGRTAQLHQIRAAFYELGIELPEGRHWCVKNLPSAFERLEAKIPAMVIEALRSQLELILNLTARIDELERKLDAYRRMDERCDRLLRVPGVGLLTSTAIVAAVGDAKEFRSGREFAAWLGLVPRQSGTGGKVRLLGISKRGSTYLRALVIHCARAVVARQKQHTAWLERLLRERPWNVAVVAQANKIARTIWALLAHERAYEADHRAVAIDG

SEQ ID NO: 82497 - protein, 389 aa, unidentified
MFYVGIDVAKDKHDCFITNSDGEVLADAFTFPNTLDGFNSFFSMLISVALSTDNIKVGLEATGHYSNNILEFLLAKGLLTFLLNPLATNLYRKGRSLRKTKTDKSDARFITMMLMTEDLKPYVPVSYHIQELKSLSRHRFRLVHERSKFKVSYSRLLHIIFPELSAHVWSASQNSMLYTLLELPSAVAIASCHLTKLTHLIQKYSKGKYSKDKAIELREAAKDSIGSTSPAQAFELQQTIRMILFLQTEIDLLDKQIKSSVEQLNSPIMSIPGISYISAAIILAEIGDISLFNNSAKLLAFAGLEPSTYQSGKFTASHAIMVKRGSKYLRWALLNATRLVCMRNPSFNEYKHKKLAEGKHYFVALSHTSKKLVRVIYHLLKTGNTYHPK

SEQ ID NO: 82498 - protein, 336 aa, unidentified
MSKSYLGIDVHKKWCVYTEIDSTGKVIRQSRFGNTFEEVSTFASSLNSKVHLVLEPVLNYLWLLNQFEPYAGSVHVATPFKVRVIAESKSKTDKYDSRVLAELLRTNFLPESWVPPAEIRLLRGLVRQRYHLVKSVVMNKNRIRHLLFQYGVDLRVFNIASPKARLEIRKLCLPDVTKQTIDQCLKIIAILDDQIVETNRLIWERVKNNPTVDLLQTIPGIGKLRSAVIYAEVGDVTRFHSAKALANYTGLTPIVRSSGDSVWTGGITHLGSRPLRHVLVEASINAVRKSPELNRMFCRILYRSNVQKARVAIARKLAVIIYAMLIRNEPFRTETA

SEQ ID NO: 82499 - protein, 359 aa, unidentified
MDGSKGQPKITVGLDLGDKYSYLCLIDTQSGEVIEEGRLRTTPEALKRRFYSERPLRVAIEAGTHSPWVSRLLEECAHEVLVANPRKLRLIYANQRKTDEIDAENLARLARLDPKLLYPLNHRGEECQAHLAIIRSRETLVACRTQLVNHVRGAVKSFGGRLPKCPAVSFHKKAAGYIPEALWPALGPILETIGSLTQRIREYERQLETISKEHYPETELLKQVEGVGVLTALSFVLTLEDPYRFAKSRSVGAYLGLVPARDQSGDRDPQKHISKEGDEMLRKLLVGSAHYILGPFGSDSDLRRHGEKIASRGAKNAKKRAVVAVARKLCVLLHRLWITGEVYEPLYNAHRRQGEAAAA

SEQ ID NO: 82500 - protein, 320 aa, unidentified
MTSRGAEKMKNDTIGVDVSKDHLDAHRLADGATRRFANTKGGHKALIKWLTETPLYRVVFEPTGPYHRAVERALGIAGVPFVKVNPRQARRFAEATGKLAKTDRLDAAILARMGALLELEARPARSELLFELKELYVAREALVKDRTAAKNRGKALTLSLLKRQNAQRLEQIDRQIATVEAAILQIVEADESLADRFAILISIPGVSNITAFALLIAMPELGSLEAGQAANLAGLAPIARQSGRWTGRSFIRGGRADVRQALYMPALVAARFNPDMKAKYAHLIETGKPAKVALTAIMRKLVVLANALLKANRTWTPRTA

SEQ ID NO: 82501 - protein, 355 aa, unidentified
MAAKEKATKAKSTQSELTSIGVDIGKDVFHIVGFDRDGKVALRWKFKRLALIKEFEKLPRCIVGMEACLSAHFVSRQLRALGFKPRIIPAMYVKPFLKGQKNDYNDAEAIAEAAQRPNLKLVKEKTQDQLDLQALHRVRSRLVSRRTATINQIRAFLIEQGIAVRTGANSLRNSLLAILRNRKDEISSRMNDLIIGLYEDWLGLDQRIETVTQEVEEISRREKNCQRLMSVPGIGPMISTATVAAIGTGEAFERGRDFGAWIGLVPRQYSTGGRSILGRISKRGSKYLRTLFIQAAQVILMRPQNWEKFSFGPWLAEATKRMHRNKLATALANKLARIAWSILRHGKKFDEALAV

SEQ ID NO: 82502 - protein, 316 aa, unidentified
MYLGIDVSKLTIDCYLIADGQNHQKKFQNNKGGFEHLIKWLQSHKVTDKLHCVCEATGTYYEALAEYIYSRYTITVENPRKIKGYAIAELQRSKTDTQDAKLIAQYCQDRKHKLKAWQPPAKEQKQLQEIARYLDYLKQQRATEKAKQHEAPDYIKSHIQTTISNLTAQIQTVKKQLLQFYKDNPSYNNLRKRLKTITGIGEQATAVLLSTYKRHEFKNAKQFTAYLGLDPRKYQSGTSVNGKSRISKIGSSEIRKSLYMPAVVAYRCNAFPEFVGRLKNKGKHIKLILIAIMRKLAVIAFTLLKNGQDFQVERYK

SEQ ID NO: 82503 - protein, 429 aa, unidentified
MTRISAGVDVSKNRSTVCIMDQDGKVIMRPFLVWHSTEELDFLADTLKRLNGEVRVIMESTSIYQYPIALHLKEKGIFISIVNAYKVKKFANTDFRGGKTDKKDSRTIASYGISYWDKLVEWQIPKDTYFNLDLLNRTYMNAKKHRQIILQELQHYIDCAMPGMDKELHSLNLNTKKDFMLDFVEKFWHRDEIVNMTEAEFTEVFTAWAKKKGYRPVEGKAAKIYAIAKSCIPYYPANPTVKTILQCIVDKLSGVNRTLVTIVTQMIEEAKKLPEYQIVREMPGVGDPLAARFFGSAGDIRRFKNSKALVAYAGIDSPPDESGDFSSTHRHITKKGSKVFRDTGYEIMMALRAQKRTWEKVRKNPEVYDYMLKKKAERKPRKVAKIAALNKFLRIVYARIKELYDNMALAERAKTKTRSKIRAKTKVTA

SEQ ID NO: 82504 - protein, 423 aa, unidentified
MPYRIAGIDVHKKKLAVVVADVEVEDEYQFERRWYGSNPEQLQLLAEWLIQQQVEEVVMESTAQYWKPVWGALEQYWKPSCEKREGAGRMSGTLHLAQALSNRGRRGRKKDFRDAERLLKRLVSQELTLSFVPHAEQRLWRTVTRTKYQLRRNKVRLHNQLEALLEEAHIKLSSLVSDLLGASARRMLQALAEGETDPAALAALADQRLRATSAQLRDALGACTELNPVYRRLVKMVLEELQWIEQQIGQLDQEMASLLRQHQDAVQRLAEVPGLGVDSAQQIIAEVGAKAATFASAKNLSSWVGACPGEEETAEVNYSARSPKGNRHMRRLLNQAANAAVKVKGSIFEIVYRRLVPRLGHNKTIGAIAHRICQLIWIILNKGVRYEERGPAVSGNSRRARTSRMIRTLRKLGYRVELQPDPA

SEQ ID NO: 82505 - protein, 333 aa, unidentified
MEYFIGIDVSKSVLDLAVLAEGRILLEERIDNNAKSVRKFLRELQSNTGLAINEIVACMEHTGIYNAHALEVLWKKGIRICMESAVRIKHSQGMQRGKTDKIDALRIAQYAFKNRQDLLFWKPQRLTLQKIQTLLSLRERFIKTKVQLDVPVKESVGFVDESVIRNLSGHNGRVIRQINKEIKAVDCQLQQLINQDSSISVQVDQATSVPGIGPITALNMIITTGEFKKITQPKKYACYAGVAPFEHRSGSSIRGKSRVSKMANMSMKRLLHMSAMAAIRYNPELKAFYARKTAEGKNKMSVINAVRNKLISRVFACINAGRIYQKNYSNALA

SEQ ID NO: 82506 - protein, 404 aa, unidentified
MEVLYQRCCGLDVHQKTVVACAITPEGKETCTFRTMTDDLLQLANWVVAKGITHVAMESTGVYWRPVYNILEALGITLTVMNAEHIKAVPGRKTDVKDAEWIANLLRHGLVRGSFIPDRPQREMRELVRYRRSIIRQRAQVVNRIQKVLEGANIKLSSVASDVMGASGRAMLEAISRGVEDPERLAAYAKGRLKEKKPELQKALQGLVGSHQRTMLQSQLRLITFLDEEVSRMDKEIAERMRPFEETLERVDDIPGMGRRTAEDVLAEIGVDMSRFASASQLASWARLCPGNNESAGKRKAVTTGHGNPWLRDTLVEAAWGAMRTKDSYLAAQYHRLAARRGAKRAIVAVAHTILVIVYSLLKNGGEYRELGGNYFDERDKSNAVHRAVRRIERLGYQVELQPV

SEQ ID NO: 82507 - protein, 434 aa, unidentified
MNNTSPPYDLLIGLDRSDRKADLHLISVVDHQRRSQTIDTSPEALWEWLLQLRQEHPQGRIALCLEQPAAHLMAYLEAYEWITLYPINPITLQKYREAFVTSRAKDDAKDARYLAELLLAHHDKLKAWAPEDSQTRAIQQLVFHRRSVVNERVGLTNRLKDLLKQYFPQALVLCGEDLWRPLATRFLLKWPSLQAVRKAKTEKLKEFYYLNGSRSAKLMEQRLALIEKAVPVTDQTAILDSFILRVQLICRQLQDVVATIKTFDQRIAEAFKEHEDHEIFSSFPGAGPVLAPRLLATMGAQRERFQSAGNVQNYTGVAPVTKQSGGKCYIHRRYLCPKFHRQSFHEYAKESILWSRWAAAFYLQQRNKGSYHHAAVRALAYKWQRIIWRCWQSRKPYEEKTYEAALRKSKSPLVKLFDQVDLGKSPFKNKVNKN

SEQ ID NO: 82508 - protein, 389 aa, unidentified
MVFLMMKLVYSICCGVDVHKKVIVATIVSTDNVGVSTYQQKSFSTINSDIKEFLNWLIENNCYHVCMESTGKYWIPIFNYLENTINVCLTHPKYVKAIKGKKTDKKDSKWIADLYKFDLVRNSFIPPKEIRELREIARYRFKLVCMKSSEKNRIQNSMTVSNIGIASILSDPFGKTATDIISYLLEHSSESFDEQACRKLIKKGARAKSDEIIASLNGYTIESDQTLKFKLARGHLDYLDEMITKTEVELYVRIKPHLKLVKLIATMPGITDISATLLLAEIGIDMSVFEDAKNLTSWAGLSPANNESAGKKKSVRITKAGQYIKPLLVQCALAATKCKKEPYFAIKYQHIKKRRGHKKAIIAIARMMLVCIYHMISEEKPFTQVIIRN

SEQ ID NO: 82509 - protein, 399 aa, unidentified
MFVGIDWAAESHDVCVVDSAGKICGRATVAHSQQGFDELTKHLVRWSQQGEILVGIERPEGRLVDAILEAGNAIVLIPTFAMKDLRRRYAVGGAKSDPGDAYVIADVVRTDGHRLRRLEPLSEQTRALRSVVRARDDLVDQRVALGNQLRSCLEAFWPGAAVIFADVASEICLSFLERYPTPESAARLGELRLGSFLKKAGYSGRRSPAELLERLRSAPAGVLGVEAEARADSVRAMARVMRSLLRSIKDLDRAVVAHLGEHPDAEVFTSLPRSGRINAAQMLAEWGDCREAYPCPDSVAMLGGLCPVTHASGKHRDVSFRWACNKRLRLALTTFADNSRHASPWAAEVYRRAVARGCDHPHAVRILARAWVRVIWRCWQDRTPYDPALHGASVLLAAA

SEQ ID NO: 82510 - protein, 403 aa, unidentified
MALFAGCDWGGESHAICVIDETGAVRWRATIAHDAEGLEKLVQQLAKFGPPADLPIAIERPTGLLVDTLVEAGHPVVPIHPNVVKACRPRYRAVGAKSDPGDSYLLADVLRTDGHRLAQLVPQSDAIKALRALVRARDDLVAERVAIANQLRALLQSCWPGAAEIFAEIDSPIALAFLRRYPTASSAERLGEKRLASFLAQHRYSGRRTVPELLARMREAAKPRIGELEAEAKGELVRALTQVLEPLVAQIRGITSRIEHEVAGLPEGRIVMSLPRSGRINAAQIVAELGDQRARFVSEDHLAAEAGVVPVTYASGKQHGVGFRWACNHRLRAAITLFAGNSRHESEWAADVYRRARERGCDHPHATRILARSWIRVLYRLWQSDQAYDAAKHGAATRIRTTA

SEQ ID NO: 82511 - protein, 437 aa, unidentified
MDIGAREIWVDVGVENDSEPVRRFETFTADLNRMAEWLIGCRVKTVVMESTGVYWIPACQILEDRGIEVLLVNARYAKNVSGRKTDALDCQWLRTLHCYGLLPASFRPAHEIVTLRSYLRHRQMLIQYAAAHIQHIQKAMTQMNLQLHHVISDITGLTGMKIIRAIVAGERDRQKLAAMRDARTHASQATIEKALEGDYRTEHLFALKQSLDAFDHYQKQIAECDRQIAQHIRSLETKAEPGSNLKPARTDKKRQRKRNLMEFNAREEAFRISGVDLTQINGINETAALSLISEIGINMNPWPTEKHFASWLSLCPNNKISGGRVLNRRTRKSANRARDTLCLCAQSLLASRSALGAFCRRICSRLGKPKGLIATAHKLALLIYRMLKYGRDYADIGQEQYEKRFKERALRSLARKAKELGFQLVSNSDLASEKAVP

SEQ ID NO: 82512 - protein, 389 aa, unidentified
MKKRITVKTQKQAKGKTSQTQLKKLAAQQRLTIGLDLGDRQSRYCILNAAGEVISKGSLPTTQTGLNTLFEKMPSSRVALEVGTHSPWVSRQLAQLGHEVIVANPRQVALIGRSTRKDDWIDAEKLARLARVDPHLLYPIRHRGEEAQADLAVLRARAALVEIRTSLINTARGLAKPMGERLKDCDSEAVGPELAKDLSAPGQAVLGPMLQSIAQISEQIHAYDEQIHEMVGRYPEVDLLQPVYGVGELISLAFVLTIEDPNRFAHSREVGPFLGLVPKQRQSGQSEPELRISKEGDRLLRSLLVQGAHCILRRGAPDSDLRRWALAKLQGSDAAGARPEPKGKKKKNRKKQIVIAVARKLAVLLHRLWATGEVYEPLYKTRRAVSVAA

SEQ ID NO: 82513 - protein, 346 aa, unidentified
MTIVEAARAVTGGIDTHGEVHVAAALDEVGGLLGTKSFDATPDGYSALLSWLAGFGEVGKVGVEGTGSYGAGLARFLARAGVEVIEVDRHNRQNRRRQGKSDPIDAVEAARAVLSGSVRGKAKSRDGAVEAIRVLVVAKRSARQARVKALTQMRQLTFTAPDQLQTRIKGLPTPQFIAAAKGLRPTRSSDPVTVATKASLSSLAHRIGELDDEIAQLDARITPLLEAHAPNLLNVYGVGIDTAATLLVTAGDNPERLRSEAAWAHLCGVSPLQASSGKVARHRLNRGGDRQANRALWIIVISRLASDPKTQTYMERRVKEGRSKREIIRMLKRYVAREVYRQLPRG

SEQ ID NO: 82514 - protein, 345 aa, unidentified
MDIRTIGIDLGKTVFHLVGVNARGEVVVRKKCSRTQVLRFTSNLRVCLIGMEACGGAHFLGRALREQGHDVRLMPAQYVKPYVKTNKNDYIDAEAIAEAVTRPTMRFVPIKSDDQLDLQSLHRVRERWVIRRTAVINQIRGFLLERGITMRKGRKHLEASLPGILEDAENKLSGALRALLTQLRIEMQYLHRQIEECDQLIVRIASELEPCRRLLAIPGIGPVIATATIAAIGNGAAFKKGRGFAAWLGVVPGEHSSGGKQQLTGTSRRGNKYLRKLFVLGAHTVLLQRTKQSPGLSTWLASLIARKRKQVATVALANKMARMVWAVLFKGEAYRPPLVPQLNAA

SEQ ID NO: 82515 - protein, 335 aa, unidentified
MRYVGLDVHYGTSTYCVLDENGRELQCETVRGHWPKLRERRKTLTGRWTICFEATCGYGYLYRELSRLAERVVVAHPGHVRLIFRAKRKNDRIDTRKLAKLLYLEEVPAAYVPSQEVQGWRELIEHRRRMMDRQTTCKNAIRSLLRAHGKIAPKGLWTKKGLAWLRQEELSTAAAGLKRDLLRDELQEAQRRVRTVTKALDTFGERQPAVLLLRTIPGVGIRTAETGVAYMDNAGRFTRSSQGGAYFGLVPCQDASAGVNRLGPITRQGPPTARKYLVEAAWQGVYRSPTIRSYFERIQQGHSERRKIALGATAHYLLRCRHAMRVRNQPWHEAA

SEQ ID NO: 82516 - protein, 318 aa, unidentified
MKRRCIIGIDVSKYSLDCFYYPEETIHQEVNTNRGIDTLIRNLKNISPDIIIVEATGQYHRLLVEKLHHSLLPVKVVNQRQVRDFARSLSKLCKTDAIDAKILVEFALSRCIIPDTPKSEHGTKLSALLVRREQLQFLITQEKCHIESTEGQYAHYIEAILDTLKAQLKEIDASISQVVKKDEKFAQDNKIIQSIPGIGPIVSATILTECPEITRIGRKQLAFLVGVAPFNRDSGRFRGQRHIAAGRAKIRKVLYCAMWPCLRWNSTVRNWFEHFLSSGKPYKVAVVACMRKLLMVLRAMLISQRRWHPSLKEDAETI

SEQ ID NO: 82517 - protein, 430 aa, unidentified
MQDTEDCQVTFKRIKAEIRGSTKYLIVGIDVAKDKHHAFFGTATGCTVAKRLIFDNNRDGFERLRAFSADLQSRHALPHLIYGVEPTASYHKPLAEFLIGKGDHVVYVSNVAVSRNRQMLDGRWDKNDKKDAANVADLVSQGRFLYYDRQEDPVRELVTLIRRRIWLRKQEHRVRMRIRNHLVAQYFPELDAHFQAERVVLAVVRNCLDPRKIAAMDSFLFDAGLPQKYFHKDKVYERLEAIWTAAHTSIGCPVPEAAQWEASELVDRLEGLRSEMAQTEARIEALAQSFPEYEFLISIPGFGPIVSATVLAAIGNPHRFNSEHQVLRLAGLDLSASRSGKTSDAAVPVISKQGKADLRYMLIQAAQIASSFDLVIRQYYTQLLKGRELERGIRLKMKVKLGAKFLVVAWTLMKRRKKFDPTHFDPRRLG

SEQ ID NO: 82518 - protein, 378 aa, unidentified
MSSDNRILIAIELSRSTWLVAIRLPRVEKTRLRNIEGGDSEALLALVRELRTQAAAKLGEALDVACCFEAGRDGFWLHRLLTAHGVAAYVLEPTSILVNRRARRAKTDRLDAEGMLRLLATWLGGDRKICSMVRVPTPEEEDAKRPHRERKHLVQERLRIENRMEALLFTQGIRGRPSLRSWERDIAKLRTGDGRVLPCLMQAELNRLRRRLLLILELIREMEAERAKSLLAATDDVAARKITNLQRIRGIGANFSAVLVREVLYRSFKNRRELASYVGMAPMPHQSGGMDRDRRISRAGNPRARTTLIQLAWLWLRYQPGSGLSAWFSARVGALQGRTRRIAIVAMARKLLIALWRYVETGVLPEGVEISAADVAAA

SEQ ID NO: 82519 - protein, 413 aa, unidentified
MRSYTLELLHRLLDSLPSTPISLPAENNYEEVYEYPGLLYSSESRIFLESTGIYHYPLFCYLRDKGFNCSVINPIITKNSTNINIRKVHNDRFDSKKSALVGLKPDLKVSLMPSDLALNCRNLCREYYDLTDNRSAYVNKLQDELRMTFPQYLGIFSMVTINTSLTLLETYTSPSAFLKADKQGIIDIIKSTARFGLTYAQNKYNVIIQAATDANQFGYIIDSNIKRIRLYISFIRKYDEEINNILESLRELVDANEDADFVKQIHLIETFKGAGFLSAVSIMGEIGDFSAFSKPKQLFAYFGLNPAVKQSRKFEGTKVQMSKRGSAIARRVIHTLTLQSISISRNGEAKNPVLREYYLKKCDSKPKLVAMGAVSHKVCNMIFAILRDNKPFKIITPQEHIKQYNAAKCDIAA

SEQ ID NO: 82520 - protein, 401 aa, unidentified
MISVGIDVSKGHSTVCMLKPGGEVVKPPFEMQHTLEEVISLVNIIKGFDEDVRVVLETTGHYHWPVTTVLLKNDVFVCEVNSLRMKRFCNQSIRRAKTDKIDSVKIASYGIAYWHELERMKPANDNYAELRMLSRQYHSTVSLMIKGKVNLTTLLDRVMPGIKDIVFDVRKHNRLNDFVMRYYHFDHIKEMGKRFNTDFCKWAIKQGYRQPERQLEKILSLVQNGIPTLPNTTSTKIIVQEAVRALREIETSRDIILAQMQALAKTLPEYSLVRELNGIADVLAPRIIAEIGDVRRFKNKHSLIAYAGIDAPPFQSGSFTGTERHISKRGNKYLRKTGFEIMQGLVMHKPEGDPVYDFIIKKRNEGKCGKEAMIAGLNKFLRIYYGKVSELYRNIENQSDF

SEQ ID NO: 82521 - protein, 355 aa, unidentified
MSSEKYIGLDVHQATISVAVMDSQGKIIMESILETKASTLLEFLAGLRGSLFVTFEEGTWAAWLYDLLKPHVTEVLVCNPRKIPLLKQGNKSDKIDARKLAERLRLHDLKPVYHGETGVRMLRELARSYLTVVKDLSRVMNRLKALYRSWAIPCAGRDVYYTRHRSQWLEKIPEAGTRRRAEQLYLQLDMLQHLRQQARRELLAEGRKHAITAKLRKIPSLGPIRSALAVALIQTPHRFRSKRQLWTYSGLGLETRDSGEYHYVHGQVRRRKKQATIRGLNKDYNHDLKGLFKGAATRASVRPGPFQEFYQRSLAKGIKPTMVRLTLARKIAAITLTLWKKGEDFDLNKLNSQAA

SEQ ID NO: 82522 - protein, 355 aa, unidentified
MHSVRYIGLDVHRDTISAAVLDSEGKLLMQSVLATRAAAILDFLRGIQGTLQVTFEAGTHSAWLYDLLVRRVAKLVVCNPRKNALLNSGSKSDAIDARKLAELLRANMLSAVYQGENSGLAVQHLARSYTMLTEDTTRVMGRLKAVFRSQAVSCAGKKPYGKRHREHYLAQLGTRGLRQRAECLYQELDALQPLRRQARRELIVECRKQAAAKWLRSVPFLGPIRAALLLGRVQTPHRFRTKRQFWAYCGLALETRDSGEYRLVNGQVERRKKPTLIRGLNWNHNHELKNLFKSAATTASARPGVFREFYLGLLAKGMRPEMARLTLARKIAAITLKIWKKGETFDPEHLKPQAA

SEQ ID NO: 82523 - protein, 346 aa, unidentified
MQITTIGLDLAKNVFQVHGINSAGEVAARKALRRSQMRRFFEQLDPCLVGIEACGTSHYWAREITKLGHEVRLMPPAYVKPYVKRGKTDASDAEAICEAVGRPTMRYVAIKSPDQQAALALHRTRDLFVKQRTQLINMIRGLLAEFGIEIRRGIEQALMLAKRIAAGEMPEIPTLAAKVIAGLAGQVLDLQARLREIEHELQAWHRSNDVAKRLATIPGIGTVCATALAATVTDPHQFRSGRQFAAWLGLTPLQHSSGGKERLGRISKMGDKYLRRLLVVGMTSLVRRAKYKPEAVDPWLADLLSRKPARLVTVALANKAARVVWAIMVRGGAYRIPAGVSVTTSV

SEQ ID NO: 82524 - protein, 355 aa, unidentified
MHSTLIINFICKDMKDLSILQHFVGCDISKDTLDFALYERGKDYRTFEHIQVPNSPDGFKTMRKWLRTLKVRMKDAVIAMEHTGSYSMALSEWCFGKGITFVMLHPLDVRNYGGTSRNKTDKADSQFIADYAYTMREKLKPSVPESANIKQLRQLRNERQLAVRSRTAYINLLKSMPDNVDTRRIEKIIKEFEAQIKQIESEMNTVISRDKAILANYDLLLSIPGIGLVNAVTTIIATGNFTRFQTARQYAKFSCVAPLSRQSGTSVAKGDHVSKAGHNEIKSVLTEGARSAITHDSQIRAYYERKKSEGKCHGCILNAVKFKLICRMFAVVSRQRPYVDVEAYRSRTVKSADSA

SEQ ID NO: 82525 - protein, 361 aa, unidentified
MSDFICVGLDVHARSIQGCAKNFETGEVWEKKMPNQPDVVLLWCLSLPGPCYVVYEAGPTGYELVRVLREHGVAADVLAPSKVLTAAGDRVKTDRRDAQRLAMVAGSPDPPVIWIPDCETEAARDVYRCREDAMLTKKSSMLRLDHFLLRHQRQWDHSTWTKAHVEWLMSQRFEQDCLQTTYDAYLGMVLDQRREVDALDKLIVTQYACLPRWEPVVTALECLRGISTLTAFGLAVEIGDWSRLSPVTIGSYVGLVPSESSSGESRSQAGITKTGNSHVRRLLVEAAWEHLKPYRPTQSPTLQRAWGKVSPVIKTRADHANRRLHDKWMHLEQRHKNRGKAVVAVARELSGFCRDLAIMAT

SEQ ID NO: 82526 - protein, 293 aa, unidentified
MTITTVGIDLAKNVFAVHCVDQNGKTVLVKSRVTRAALPGLIAGLPPCVIGMEACSGAHYWARLFRQYGHEPRLMAAKFVSPYRMAGKSGKNDAADAQAICEAVRRPHMRFVPVKDESQQAMQCLHRTRQGFIEEKTATYNRLRGLISEFGVIAPQSTDALRHIVFEQKNSLPLQVQQCVDDLLEHVARIEDNIAEYDRILSRMAKTDHRSQRLMELKGVGPTTACALVASIGNAHDFKNGRQLAAWLGLTPSQYSSGGKSKLGRITKAGDSYLRTLLVQGARSGTDRGGEKD

SEQ ID NO: 82527 - protein, 337 aa, unidentified
MDYFAGLDISMDETHICVVDREGMVIHESKAASTAQAIADELAKAPSCRRIVFETGRMAPILFHGLSQLGLPVVCVESRQAHQALKSLATHKTDRNDARGLAHLARTGFFKPVHVKSLSAHALRSLIVARKKLVGQRVTLENQIRGLAIVFGIRLPRALTAAFIDQALKTSEGVAGLSAAMRGLIAARTAVMTAVAAIDADMRRMARASAACSRLMTIPGVGQLTALAFVAAIDEPSRIRRSRDVGAYLGLVPRRYQSGEVDYVGGISKCGDRRVRTLLYEAANVMLTRYKGQLKLKDWAFAIARRSTMRKARVALARRLAIIMHAMLRDGTEFTSA

SEQ ID NO: 82528 - protein, 419 aa, unidentified
MDITSGVIIGMDPHKRSATIEVLDERHHVIAGGRYGTDTTGYRDMLTAGRQWSRRTWAVEGANGIGKHLAQRLVADGELVVDVPAKLSARVRVFSTGQGRKTDATDAHSIALVAARAANLQRVGVDGENVALRLLVDRRDELGVLRTQTVNRIHKLLLELMPGGAKTFLTAAQAKKLLATVKPRHVVGRTRRALAAEKITDLAVIDAKIKVAKKQLTELIAATGSGLLELNGIGPSGAARLLGDVGDIARFPTKGYFASWNGTAPIDASSGDNNRHRLSRSGNRRINRVLHIAAIVQIRHDTPGRAYYRRKLAAGKSPMEAIRCLKRRLSDVVYRQMVADAQAAETSVTDLTLPTEVDESTRAQKLVTGPGGQMGASTGSSATGSDPDAGSLEKSLPGPAKPIVATRKRTRKTPVRVGP

SEQ ID NO: 82529 - protein, 337 aa, unidentified
MIVVGVDVHKHSLTAVAVDELGRTLAEHSGAVDAQVIGWARSLDEERLWALEDCRHVTRTLERALIAQGEQLVRVPPRLTAPQRRRSRTRGKSDQIDALAVARAALQEPQLEGPRVGEEPLRELRLLVDHRDDLVNERRRAQQRLRWHLHELDPTLQVPLGALDRAIWIERLARQLAGREQTIQVRIARDLLSRCRTLGRAIGELDRELRARTTTIAPALLQLPGCGPLSAAKLLGEIGPIDRFRSDAQLARHAGVAPLDASSGKHQRHRLDRGGNRQLNCALHRIAVTQARVHAPARTYLARKQAEGKSRREAIRCLKRQLARTVYTTLKAEPALT

SEQ ID NO: 82530 - protein, 488 aa, unidentified
MAHSADTEFSSPVEAPARKAGWVHAHCARLRSPYAAQDKPFASGSTNPDRKGSDIMLKINYMSTLFVGIDVSSKSNVVYAMDFEENKYISSSFGNNQPGADELASMIAECMQNHKNLDTVIVCLESTSVYSVHIANFLSTCETLMPYKPYVFVVNPKTTANYRKSYIGMEKTDPADAFLIADFARVGRTKKLEPWRGSQFIALKRLTRHRMHLSECIAREKTYMVSNLYLKFSELQLLDGDDRPFGNIYGATSSAVLTEFLSPQEIIDLSEEELLAFLAEKSRNRISDISRTSELLRKAARDSYRLDKCMYEPLNVSLASSFNCIQAYQKEIKLIEQAIEKCINGMNPNVFLILKSIPGIGPIWASGMLSEIGDISAFHSSDALAKYAGLYWLKNDSGDFTSEDNQVSKAGNLYLRYYLGEAANSVRRYVPEYADYYAKKYAEVSKHQHKRALALTSRKFVRLVFGLLVKNQLYTGEKLDTELHTGQN

SEQ ID NO: 82531 - protein, 338 aa, unidentified
MSKITTIGLDLAKDVFHVVCCDARGKVVRKRMLKRRQVLAFFANLERCLVGMEACAGSHHWGRELEALGFEVKLIGARYVKAYVRGNKNDYNDALAIAEAVVRPEMRFVARKTPEQQDIQALHRMRRGCIGARTALCNQMRGLAGEYGLVAPKGIATLRRRIPEWLEDGENGLSALFRRLLCEGVERLQELDGHIAFTTREVERLSEHNEACQRLQTLPGYGPIVASAFHGQIGHGEVFRRGRDASASLGLVPRQHSSGGKDTLLGISKRGDRYVRSLVVHGARAVVSRAEHKDDRLSLWINTIREKRGFNKAVVALANKMVRMGWAILANKTVYRAA

SEQ ID NO: 82532 - protein, 314 aa, unidentified
MTKITNDTIGIDISKATLDIHRLSDGKTMSFSNCPAGFKALSRFCAKTAVARVVYEPTGTYHGGLERTLGVHLPLVKVKPLQARRFAQARGVRAKTDAVDAKMLAVMGDAFALEPSKQISEKQYILKELRAFRSGLITDRTRILSRQKTQTLPMTRRQSKARLTQTEKQIVEIDAEIARLIQSSEVMARSMKILRSIPGIGAVCAAAILIEMPEIGGMDRKQVASLTGVAPMTRQSGQWRGKSFIQGGRKVVRDALDMPALVAMRFNPDLKTKYQAMIKAGKPPKVAITALMRKLIELANALIKANRTWVNKTA

SEQ ID NO: 82533 - protein, 342 aa, unidentified
MSDTIIGVDLAKRVFQVHGATMTGHVMFRKKLSRERFRIFMAAQPACVIVFEACGSASYWAREMEALGHEARLIAPQYVRPFVKRQKNDATDAEAIVTAARQPEMRFVTPKTQEQQAKAVLFRGRERLVHQRTELVNALRAVLYECGHVFPIGLSHLKRIDALVKDPACDLPALIIAECQDLLLQIAAKTERIDVKTKTLKALAAKADTSRHLQTMPGVGPLTALAVEAFAPDMAQFKCGRDFAAWLGLVPRQRSSGGKERLGRISKAGQADIRWLLIIGAMTRIMGPARHKISANSWIGRMLARKPKMLVGIALANKMARQIWAMLSKKEDYRDPALATAA

SEQ ID NO: 82534 - protein, 349 aa, unidentified
MVILGIDAHKRTHTVAAIDDAGRQLGQKATVATTTEAHLELVRWADRFGPDRSWAVEDCRHLSRRLEADLIVGGERIVRVPPKLMAHARDAARTYSKSDPIDALAVARAALREPALPVARLDGPSRELRLLVDHREDLVRERTGHINRLRWHLHELDPSWDPTPRSLVRYKQLDVLRARLEALEGMVARIARDLVGRIRDLTVQANALELEIVQRARSLTPSLLELAGVGGLTAAKLVAEVADVRRFRSKDAFARHNGTAPLPVWSANRVRHRLSRTGNRQINAAIHRVAITQMRVHDGAKAYLERRLASGNTKTEALRALKRKLSDVIYRTLLADATLAMATGYGEAA

SEQ ID NO: 82535 - protein, 383 aa, unidentified
MTATRQSSQFIPRDYDIFVGLDVDKNSLAITCSDHGTMQKSLKLPNSANQLLNYTHKHFPGQRLAFVYEAGPTGFGLYDELTAAQHTCLVVSPSMVPSAPRKRVKTNRLDSKKLSEGLRGGQLQGIHVPPQSYRELRHLVQLRDSQVGQLKATKCRIKSLLLYEGIPFPAADGKWSGRVLRELEVIPCNPSVRFKLNRLIDTLQFHFLTAAAVQKQIRRFCKQEPGLQQSVTLLTSLPGVGTITATHAVARLGDWRQINNVRQIAGFLGLVSREHSTGDKENRGEITRIGDQRLRSKLIQCAWTAIRKDPELRAFYRQVYQRQPKKVAARKAIVAVARKLTTRMYAVLTQRRPYVIRPDSSIAPLIPEETVGLGERLDPAQND

SEQ ID NO: 82536 - protein, 349 aa, unidentified
MGEVSTIGLDIAKNLFQIHGVDADGTVVIRKRIGRARVLEFFADLPPCRVGMEACATAHQWARELRRLGHDARLMPPTYVKAYVKRGKNDAADAAAICEAVTRPSMRFVPIKDVEQQSVLMLHRVRDLLIRQRTQLINALRAHLAELGLVAAKGREGLHQLVAVVTECGNEQLPSNARFACQAIVTQLHAVQIEISGLDKRITQTHRANADSKRLDTIPGFGVILSTAVAATMADPKAFRTGRDFAAWIGLVPRQNSTGGKERLGSISKQGDRYLRRLLVVGATSVINCARARPYEYPWVIELLGRRPTKVVAVALANKMARIAWAVLAKGKPYSAPTRSSNAAVPAAA

SEQ ID NO: 82537 - protein, 387 aa, unidentified
MQKLHDNSKASPAAFMQDSTLIAVIELSLSSWLVAGLIPGVSREPLKKLEPNPEDLLKLLHGWRDEAIKAGRPITRIAVAYETGRDSFWLARWLRERDIDAHVIHATSVAVSREHRRAKTDRLDTAMLKRGFLGWLRGERGHCTVAIVPTMEEEDAKRPHREREGLVHEQTRVVNRMKSALIQFGVRNFNPKLRKASVKLETVRTPEGKSLPPNTIAALRRDMERLRIIKEQIKAIEQARLQQFAQKPEALANRMIYLLVRIYGLGLETADLLVHELLSRTLRDRKAVARYAGLTGSPDESGSKRREKGLSRSGNARVRKIMIQLAWRMVKFQPDSALVQWFKQRTENAKRSRKPMIVALARKLIIALWRYANDGVIPAGFRLHSAA

SEQ ID NO: 82538 - protein, 349 aa, unidentified
MEHYVGIDVSLELSSVCVVDAKGAIIREAKVTSEPDALVGFLRGLGVSIERVGLEAGPLSQWLHAGLTEAGFETALLETRHVKAALSAMTVKTDRKDARGIAQLLRMGWYRPVHCKSPGAREIRALLVARKLLLGKLLDVEFSIRGLLRGFGLKMGVVTRRGFEARVRELCSGQALLSGIMEAMLTARAELQAQFGKLHKSMLSIVRADSVCRRLMSAPGVGPVVAITFKSAIDDPARIGKSKAVGALFGLTPRKYQSGETDVTGGISRVGDEMVRTALYEAANAVLSRVTRFSALKRWAMEVAKRRGMKRAKVALARKIGVVLHRMWVDGTPFRWTKQAAEAAQSART

SEQ ID NO: 82539 - protein, 342 aa, unidentified
MSVYVGIDVHRKRSQLAVIDAKGEVLANRNVPNGAEPILKVIGGLPTGTPAAFEAAFGTTWLVELLEDYGFDPHLVHPSRCKAIASARLKNDKVDAAILAQLLRADLLPEAWIAPPPVRELRAPLRHRVHLVRVRTLLRNRIHAIVADHGHDRPHGGYWTGPGRAWLASLPLPAVSRELVDDNLGLIDAIADRVDRLDGEIRQRARSDPRVKVLTQLPGVGPFTALVILAEVGDVSRFASARKLASWAGLTPTVRGSDRVAHYGHISKEGSVWLRWVLCEAAQTAKRHPQFAATFQRIAKRRGKKIATTAVARKLLTRAWHLLTDAESIASPQPAAPQIPAR

SEQ ID NO: 82540 - protein, 389 aa, unidentified
MEARTVYNPPPAAPHDDAVRCVLAIELSKKSWIVAVNTPLSEKISRHTLGACDWKELLKLCERIRTRIARELRKDVELVSCYEAGYDGFWLHRLLEAHGIRNYVIDPASLQVDRRARRAKTDRVDVERLLRSLMAYLRGEPKVWSVVCVPSVAEEDDRRLHRERGRLINERIQHVNRIKGLLAIHGIYDYPPLRHDRMQQLEGLRTADGRTLSPRLKAEILRELQRLELVIGMIKTIEAERDAIASAKIETEHGSAKRIQDLAKIKCIGPEFATTLADEVFYRSFDNRKQLASYVGLTPAHFQSGETCRDQGISKAGNAKARRVMIELAWLWLRHQPASPLSVWFHDRVGKLKGRIRRITIVAVARKLLIALWRYLETGLAPEGAILKV

SEQ ID NO: 82541 - protein, 429 aa, unidentified
MSGRPGRGAGGGPRGAKMEGETVIAGVDTHKDVHVLCLLDGLGRKIWSGSFGADPEGYDRLAEAIGDPGSCMVVGVEGTASYGAGLTRRLVELGYNVVEVLRPKRDKVRPGEGKSDPLDAERAARKAASGKGCSVPKSQDGWVEAVRQLYVARRLAVATSTSCVACAKSMLTTAPSALRERFRGRERPKDLMPLLARGRKAGDALEESVLASLRSVAAVWKEARSQVESLDERIRALLEANAPALLGVEGCGTTTAAALVVAAGDNPGRLKGEAAFSMMCGASPIPASSGKTDRHRLNRGGNRQANWALYEIAIKRMAYDERTRRYVARRTSEGKSRREAVRCLKRYIAREVYHVLMDPNPDGAAPEGPELAKMRKAMRVTQKKAAAELGLSAATLGHLERGKRRSTKLERRYYELLCELERTLPQTAS

SEQ ID NO: 82542 - protein, 449 aa, unidentified
MASKKKGTKKMAPLAPVNRRAAGVDIGSTFHVVAVPQELDAEPVRSFRSFTTDLNALADWLGRLGVTTVAMESTGVYWIPLFEILQARGFDVVLVNARDAKNVPGRKTDINDAQWIQQLHSYGLLRASFRPEGEIVALRAYLRHRERLLEYAAAHVQHMQKALMQMNLQLHHVVADICGVTGMKILRDIVAGQTDPEVLAAHRDMRCKSSIETIRDSLTGNYRPEHVFTLKQALELYDFYQAKLSDCDVEIERALLALPKRAAPGPTRSRQRGKNEPQFEIRLVMNALLGVDLTEIHGLGPYSVLRIFAECGSDMTRWPTAKHFTSWLTLAPGNKISGGKVLSAKTRRSANRATVLLRLAAVSVSRTATALGAFFRRLAARVGKAKAVTATARKIATVLYNTMRHGKAYVDPGAMYYEERYRERAVSNLRRRANAMGFALIAGAVEGAS

SEQ ID NO: 82543 - protein, 343 aa, unidentified
MQTVTTIGFDIAKSVFQVHGVDTIGQVVIRRQLKRRHVLAFFEKLPPCLVGIEACASSHHWSRELQALGHTVRLMPPAYVKPYVKRQKNDMADAEAICEAVARANMRFVPTKNPEQQSCLMLHRTRHLFIRQQTALINSIRAHFAEFGIVAPVGRKGVTELLRVVADPNDKRLPEAARACLAALGTQLLALKEQILEFDRMILTWHRSNQTSKRLHYIPGVGPMLATALVASVADPRTFRSGRNFSAWIGLVPKQHSSGGKERLGSISKQGDRYLRSLFVAGALAVIRYAKIHGTGHRPWLTALLGRRPTKVAAIALANKIARMAWAMMAKGERYKQPAALAR

SEQ ID NO: 82544 - protein, 344 aa, unidentified
MPHYAALDVSQETTCICLVDETGRVISEAKLPTCPDAITAWLGNKAVDLARVGLETGPMAVWLWNELHARGLPVICLDARHAHAALKVRPNKTDRNDAAGLAQIVRTGWFKPVQIKTRASYEVRSLLAARDALVQIRVKLENEIRGLLRTFGVLFGKAVGGFSRRADELVAGELEASPPMRQLVQTLLQARAAILDQIKGLDRQLTAVAKVHPVARLFMTAPGVGAITALSVASAFDQAERFRRSSSAGAYLGLTPRRFESGEVSHTGRISKHGSALTRKHLYEAATTLLTRTSRFSRLKAWGLRLAKASGFKKARVAVARKLAVILHAMWKTQTLFRWGEAAA

SEQ ID NO: 82545 - protein, 428 aa, unidentified
MNQEESTRLEEFRQFRKEVRGSKEYLLVGIDVAKEKHYAFFGTAQGKTLFRRLVFENNIEGFGKLLVQAEAMKVQGGLTKVVFGMEPTGNYHKPLGEHLIRCGHLVVLVSGVAACENRKTLDGRWDTNDTRDAANVADLVSQGKCLFYEFPVGPLQDLRNLLSLKRRFKRVEHGYRVRIRNHLLAKYFPELDRYYEQSESTALAIVRWCLDPSEIVSLEYKQFAERVSSTRWRYSQEKRLQAIWKLAVDSVGCEAGPVVEFEAKVMVEGLKQIRESIRQIEERIQEVCSLFPEYECLLSIPGFGRDVASKVLGAIGDPFRFQNGRQVLKLSGFDLSAKRSGKASESVIPVISRRGKADLRFALYQAALIASVRNPDFIRYYTDKLRGREREPGIKIKMRVKLAAKLLLIAWTLMKKKEPFNPDYLVTE

SEQ ID NO: 82546 - protein, 354 aa, unidentified
MSQKLNSAIAVIGVDIGKNSFHLVGLDERGAIVMRQKWSRGQVEARFANMPPCLIGMEACVGAHHLSRKLKELGHDARLMPAKYVRPYSKGQKNDFRDAEAIAEAVQRPTMKFVATKTAEQLDLQALHRVRERLVSQRTGIINQIRAFLLERGIAVRQGLRFLRTELPRILATRSDVLSPRMVHVIEELSGDWRRLDERIKALSSEIETLAHQDTACERLITVPGIGPIISSAMVAAIGTGDVFSKGRDFAAWLGLVPKQISTGDRTILGKISKRGNRYLRVLFVQAAWVVLIRPKSWERYGLKPWIEAAKKRLHHNVLAIALANKLARIAWAVLNKERNFQRISRNAIAPRPI

SEQ ID NO: 82547 - protein, 462 aa, unidentified
MKKKRTYSSTDVERLDVLTILSLLTVGCIVSVDVAKTKFVAAIATVAGEVLKIIRFSHPRQTLAFLRVVEALRDAQLAPRVVMEPTGTYGDALRYQCHARGVSVEMMSPKHTHDIAEVLDGVPSMHDPKAAVALARLAVIKPARAWVPESEERREVRALLDRRWPLTTTQALYHGHLEAMLARHWPELGSLIDVHEQRSWMTLLQQYPGPRAVAAASDEAARTLRKASRGRLSAERVEAIVEVARTSLGMPMTKGEETKLRCIVEQIEQQTKGLDAVDQELAELVSKDKEMSRLAVLVGPACAASIVSHVGAPTSFATGGALEKAIGLNLKEKSSGEGAGKLHITKRGPAQVRQLLYLAVLRLLQSDPIVAAWCRARKSYGGESGKRKAIVAVMRKLVRALWHVARGSSFDASKLFDVRRLDLSDCAEKKAAVAPATSPQPMRTGAPVRPVRCEGGVPQQHA

SEQ ID NO: 82548 - protein, 421 aa, unidentified
MAQTVEIAYPVCCGMDVHKNFLVACVAVTGEHSNTEHHIRRFSTFSGDLRRLAAWLASYNCRDVCMESCGKYWIPVFNALEKAGINVCLTHPKYVKAIKGKKTDKKDAKWISELFKCDLVRSSFIPPPDIRQLRDLCRYYVKLTGFASGEKNRAQNCLTMCNFKLDDVFTDIFGKSATRVLDALLEHGNGDFELDGLVSGKCKASTEKIRAALDGELDPAQAEKFNLIRKHISDITDLKIALETLIYKLAVKYQPQIDLLMTVPGISTKLTAIRILAEIGADMSVFETAKQLTSWAGLTPQNQESAGKKKTTRIGRAGAYLKPLLVQIALAVSKSDKHSELKNKYLALKKRRGGKKAVIAIARKLLTAIWHILSKNEAYNAELYRQADKPPVSRELTTTQALAFLRNKGFLIVDEETGEVS

SEQ ID NO: 82549 - protein, 353 aa, unidentified
MKCDKYIGCDLHQATTVVTVLDAEGKVAMETIIATEAAAMIRFLKSLSGPLHITFEETTQARWMYDVVRGYVSEAIVCDPRRNKLLGEGSKADKPDARKLAELLRAGLLRPVYHGHEATRQLKELVRGYETLSTDTQRMMVRIKSIYRAHGIRTSGSAVYQQKQREQWLQLLSEPGTRQRVSWLYEELDHLRPLRKQAKMAMVAEGRKHQAFRLLRTIPQMGPIRCAMLVATVDTPYRFRTKRQLWAYSGLAIVTYMSSEYEIKAGRVVRSRKPVATRGLNRNCNRRLKDLFIGAAVAGSRSEPYRSYVEGLQQKGIRAEMARLTLARKIAAVALRVWKKGETFDPKKLNSTT

SEQ ID NO: 82550 - protein, 365 aa, unidentified
MVNHIFVGIDLGDKNSVARIALNREKTERIGFVNNRRGRVRLFEELRRRAEKVDEAQIVLAYEASSCGFILCDEAEAQGMKCWVLAPTKMEKSVEQRKHKNDDRDADDVVEKLRGHILAGNRLPTVWIPDTHMRDDRELVRSRMDVVEKQTQLKTQIQMLIKRHGLEKPSGSGVGWTIRYRRWLEALSESDRLGNGTRTALRSLLRQLSFLEAEIERMEEPIRQLAQQPRHKPIIEELTQEHGVGLITAMVYRTEIGYAGRFRRGRRVGKFVGLTPTSHESGQQQDRKGHISRQGPPRLRKILCQASWVHVQRDPQAKRFYQQLVSRNPKKKKIAIVAVMRRLAVRLWHRMRAAELGMMAVTEMN

SEQ ID NO: 82551 - protein, 412 aa, unidentified
MFKIFRNNCCGLDVHKTWIYACIGITDPNGRTEYKQARFSSFSKGLRELAAWLAKYSCTEVCMESTGKYWIPVFNILEKSCFVTLAHPKYTKPQKGNKTDRKDAKWICDLFMCDMIKPSFIPSPEIRQLRDLVRYRVKLTNMLTGEKNRARNCLTVSNLKLDDVFSDVFGKSARSITNYILEHPGETFDVSPFVDPRCKTPVSEIQAAVDGAISPEQAVKLRQCLAHIDELEAHRKEIESEILQIAEPFSAVLDLLYTLPGLDKNPMTAIAILSEIGPDMSVFPSSKHLVSWAGCCPRNDQSNQKVKSRRISRAGSYLKPLLVQVANALIKSKKHPEFKERYHRIKSRRGHKKAIIAVCKMLLTAIWNMLSKLEPYNPEGFLEHRPVKQEKTLTVSQALELLRLRGYTITNQ

SEQ ID NO: 82552 - protein, 321 aa, unidentified
MVTGIDCSKDYFDFLVLKENKVVVQDRLGNNRKGFKQLLSHVLGTHVAMEATGPYSFQLALFLHESGVKVSVVNPLVIRRFSQMQMSRTKTDKKDALLIAEFTAMTSPKEWNPPRKEILHIRSLETYIDGAKRRRRMLSNQLHAFEAAGTLDKDFRSELKQELEEYRVRIEKKEKEIERLVNKAYARLSENLRSIPGIGPRSASLLIVLTDGFKMFESHKQVISYFGLAPRIFESGSSVKGRNHICKMGMGNIRKVLYMAATSAIQCNRACRELFERLRAKGKPYKVALIAAVNKLIKQAFAIAKSGRPYEENFVRPNIIR

SEQ ID NO: 82553 - protein, 388 aa, unidentified
MRPISQTTTQKLSHCRRDDATLYASLELSQATWLVTSLSPGSEKMSKHSTLGGDGAALLGLLRRLQLRAERLAGGPVDIVVIQEAGLDGFWVHRLLNANGIESYVVDPASIAVPRRRRRAKTDAIDGETLLRTLLASQRGEPRVCAMVVPPTPEQEDRRRTSRERAVLLQERVRHVNRVKGLLASQGITDYEPLHKDRRAHLAALKTGDGQPLPLRLKAELLREIELIELLIRQIAEVEVERDTAAELDVEGTQSPIALLARLKAIGPQIAAVLYLEGLYRSFANRREVAAYAGLVPTPWRSGTIDREQGISKAGNRRLRHIMIELAWLWVRHQPDSALSRWFRARVGTERGRIRRIAIVALARKLLIALWRYVTHGEVPEGAVLKAA

SEQ ID NO: 82554 - protein, 343 aa, unidentified
MEYYAGIDVSLESSSLCVVDATGRIVREAKVASEPETLTAWFNSLGFALSRIGLEAGPMSQWLYAAMKQAGLTVELLETRHVRNAFKIMPVKTDRKDARGIAQLMRLGWFRPVHCKSLPAQEIRSLLGARKLLQGKLHDIELSLRGTLRGFGLKIGKTTPKTFAGRVRSLVTNHPTLTLIAEALLRARAVLLGEFLNLDQKVHTLARHDPRARLLTTAPGVGSMVALTYAAAIDDPARFKSSKTVGALFGLTPKRYQSGETDVTGRISKIGDAAVRTALYEAANIILERPVKGGWLKAWALGVAKRAGLRKAKVALARKLAVVLHRMLVDGMPFRMDKVAATA

SEQ ID NO: 82555 - protein, 412 aa, unidentified
MELLHRRCCGLDVHKETVVACLRLLCDGKVTTEVRTFQTTTADLLRLSEWLAMNECTHVAMEATGVYWKPVWRILDDGEFALVLANAAHVKNVPGRKTDVNDAMWLAELLAHGLIRASFVPDAQTQEMRNLLRTRKQLVREQSSHVLRVQKTLEDANIKLDSVLTDLMGKSGRAIIEALIAGETNPVKLAGLADRRVKASPEEFREALRGRVTKHHRFLLRLHLNQIDALDAAMATLDAQVEANLGPFRTAVELIGSIPGIKNLGAHVIVSEIGIDMSRFPSAAHLISWACICPRNDESAGKRRSNRVRKGGTWLKTTLVQCAWAAVKKKDSYLQAQFYRIKARRGPKKAIMAVVASILTAIYHMLKDGTMYKDLGRNHFDRRSSDQQKNRLVKRLVDLGYVVEIKPLAATA

SEQ ID NO: 82556 - protein, 363 aa, unidentified
MKALPPVIIIFEYIATQNQHEGGRAMNKQYRYFCGIDVHLNWLQVHIIDGNQIPVITRKIRNVGNGVKWLMEKISLLGDTLVVMEASDLAFPLFDALLEVENAHVVVTNPVHNKAIAWAKVKTDKIDARILAELGRGNLLSECYVPEQPVREFRALVRTRKTLSGHRTELKNRIHGFLRSRGIGLECTDWFGKAGMKAMSELELSDADRFNLDIMLKQIVTLFDTIAELDGKIKRFWKKEFPQTQALLDMSGFGDVIASVVMASVGTIKRFGSPKKFAGYTGLTPSVHQSGEVDRKGRITKTGPPLLRWALTEAANSIARSAKGPHYAFYNRLVSRGISKSKAKVAVARKLASDVWFALALGR

SEQ ID NO: 82557 - protein, 355 aa, unidentified
MYYSGIDLHKDMSFITTINDTGMIVKQSKVSNNDHAILNYFKSIGSDHQTVVESTSNWYWLSDLLKDHQIHFTLAHAKYLKAISYAKVKTDKVDSHTLAQLLRMNLIPVAHQISQENRGLRDMMRARLRLVHKKTSCLNSIHRLLEKFNISIPDNRNLHDLSTLDHLNDLPLSAEYQFPLNALSEQIRLLHRQIKQLEKNLHPILIPNTNIQRLLHVPGIGKILSFTVYLEIDGVERFPDVSRFYSYCRLVPGADNSNRKQRHKSGNKDGNKYLKMAYTEAAVRAVQYYGEIRKYYQAQSRKKHKSIARTLVAKELAKITYHLLINQVDYNNTFKNIKLTKTKSQQWPRLANPDA

SEQ ID NO: 82558 - protein, 359 aa, unidentified
MQSECTQVQFTGQHVHVGLDVAKGSWKACVFLGNAFHKRFAQPPDPKALVHYLHKNFPGAIYHSVYEAGYFGFWIHEALVELGVDSMVINPADVPTTDKERRTKTDRVDAAKLGRSLANGELHPIYIPERSTQEDRTLVRMRTSFVRKQTRCKNQIKALLQFYGIQQPEELPGQYWSRAYLRWLERITFQEQSGAIAFKALLGELLTLRETIADLTRRIRLLAHEERYCSQVELLCSIPGVSILSAITFLTEVVSIDRFKNLDRLACFVGLVPGEKSSGDTEQDTGLTERRNPSLRYMLIECAWIAQREDPALLKAFTEYCQRMPKGVAIVHVARKLLSRMRFVLKHNQPYVTGVLKNA

SEQ ID NO: 82559 - protein, 311 aa, unidentified
MKSYVGIDVSQDWLDVAVMPARRTWRTANNMKGIAELGEELLKLKPEKIAFESTGGMEIRLLIELSKRGLPAARVNPRQVRELARSMGTLAKTDRLDSIVLALFAERNKPEVSRAPTEQELLFKGLVTRRRQLVETRAVEKNRRFSAIDEMKADCDRLIEHLSLEIKLLEQRMKELARADDELGLKVTLLASAPGVGLTVARVLAAEVPELGELSHKKIATLLGVAPLNNDSGKDSGRRFTWGGRAFARSMLYMAAWISSRKDGKIKNFYLRLVQKGKPKKLALVACARKLLVCLNAMLRDEKPWKIESTA

SEQ ID NO: 82560 - protein, 319 aa, unidentified
MDGNRVIGIDIGKWTIEVAREGSARTERHANEPGAIAALVSELDLERDLVVFERTGGYERLLETALAAAGMRWTVVHSKRVKAFREAQGIKAKSDTIDCRLLRDFGRDRLDAGDLRLGRIEDVTLAGLVARQRQLSAMLHAERCRLETTALDLVRRSIAQTIALLEAELRQIEAAVGAHIAEDPKLGAKEQALCQRIGVAHTTARGLLAILPELGEATAKEITALGGIAPRVHQSGNTHKRHGLDHGRGTVKVILFNPARTAMRFDPEMKVFAQRLRARGKPGKVIMVAVMRKMLVCLNAAVRDALAESGGQSAASAAA

SEQ ID NO: 82561 - protein, 407 aa, unidentified
MPEQAVTTHVVGIDIGMESCTMSCLTKDKRQVIKSTPFANTLQGFDWLFERLEGLEVAPKHVLVGLEATSRYGENLLQALLKRGYQVCLLHPAQMHAFAQQRGLRAKTDRLDAVTIARALLSGEARFGYVPSEQVATYRELMRLQKQLSDDVVRYKNEIHALLVVLFPEFTQVFVDPTRPTALAVLKRYPSAQAIAQTGVETLSKFLHELAPRHYGRPTAQELVGLAKSSGSPGVAVAARSSSLRILCDQLDHTQKNLEQRQREIDQLLNQDPKATGMLGVPEFGPTTVAVLRAELGDLTRFTRIDQVVAYVGLDLQVKQSGKWKGQTKLSKHGSGRVRRILYLAALRSIHLEASPFGAYYQRLVARGMKKGMAVVAVMRKMLIVAVHLIQTEERYDPGKVARQAGS

SEQ ID NO: 82562 - protein, 422 aa, unidentified
MHEERRWFVGIDWASQEHVVTLCDAQGNKIGEREFAHGGTGLSDMIAWLLKASGGEAGEIHVAIETPHGPIVEALLERGFNVYSINPKQLDRFRDRFTVSGAKDDSLDAYVLADSLRTDMHLFRKLIVSEPLIVELREWSRIDEELKAECVRLANRLRDQLWRYYPQMLELADDLSADWIFDLWEVAPTPEKTARVREATVARILKKHRIRRFDAAHVISELRKPALSVAQGTTEAATAHIRLVIAQLRLLNRQLADAGLQLDRLCKKLAEPIARDEGENVPGQRQEHRDVTILDSLPGVGRTVLVTMLAEAPDALQRRDYHALRNLCGSAPVTRRSGKSCLVMRRRACNRRLRNAAFYWAQTATQRDPTSRAKYAALRARGHGHARALRSVVDRLLYVACAMLENRTLFDPSFGEKKATAA

SEQ ID NO: 82563 - protein, 428 aa, unidentified
MSERDYNRQVVKRQRINKSTLVVGVDVGNAFNAVGFMDKEGNVLGSCAKLYNSREGFEQFMKITEELKRKHRLNDVLIGMEPTGHYWRKLAYFAKEQGYEVRFVRTTALRHHREIDESSSAKSDRRDALTIANITREGKYIDTVIEDGAMRQLRTLAKTRERLLRYSIGAKNALHAALDDYFPELHEIFSSMGTRSLWAILEQSPFPDDVVLMKISTLQELIAKSARKKAGAAQKARALYQAAQKSIGLKRIGSADRFRVKICLEEVKRTVLMLKDIDRQMRKVLMEMPSAPYLLSIPGVGPLSAAVFLGELGDPAYFNNARQIVKYAGYDPQERDSGSWVSRKFISKKGRWLMRKYLFFMSMRVVVLSKYFQEYYQRKLEIKNRVGQQPKRKEILCAVAIKLIKVIFALLRDKRMFDDGVRATVAHA

SEQ ID NO: 82564 - protein, 474 aa, unidentified
MEAGPITIGGHPMKKRSYRSVKVKAVDWEKLGEVVRGERVVFAIDVAKERLVGSVVLASTEEVRLNVSWEHPGESAEVARLVTGLPALKLEVALEPSGTYGDPLRWLFLRRGVEVYRVSPKRSHDAAEVYDGVPSWHDVKSAGLIAKLHVHGASERWPLRSEGERELAAAVRTMGMYDKQAQCNLSRLEAQLARHWPELTTVLDLVSATVLEVVKEYGTPEAVVREEEAARRLMRRVGGALLREEKVLAVVEGARRSIGVPATEGERRAMQELAAEILRCRAAGRRAKAVVKALVEGDEAAQRMGAVIGKTTAAVVISSVGDPRRFESAGALEKAMGLNLKERSSGKHEGQLKITKRGPGECRFYLYLAALRLLMKDPVVAKWYERKVGRDGGKAKNKAVIAVTRKLAKALWHVARGARFDATLLFDAVKLGFKPKVSSAPSPPRCAPESPGESSRASGLHSVGEVLQHAGLVQ

SEQ ID NO: 82565 - protein, 368 aa, unidentified
MKKLSVVGIDIAKQGFPLVGMDEHGTILVRKRLYRAQVMACIAPLPPTLMGMEACGGAHSWARRFRAHGHEVKLMAPQFVKPYVKANQNDLRDAEAIAEAVTRPTMRFVPITDVAQQDLQALHRVRERLRGRRTALVNAVHGLMHEYGMVIPKGVARFRHAVVEKLESEQDTLTPLSREMFGKLVEEFVALEEQLAYYHEQLEALAKTHPECQRLTTIPGIGPVSATALVAAVSDASALKNGRQFAAWLGLVPRQHSTGGKERLLGISKRGDSYVRTLLIHGARVTLRWVGLTTDRRSQWMRQRLERRGKNRTAVAVANKNARIVWALLTSHQDYQPVQGERRGRAWESRCCCSPHGGRRPGDERCQA

SEQ ID NO: 82566 - protein, 346 aa, unidentified
MEIIGLDLHKRESQLCRRHPDGRVSDERIPTTRESFTAALGGIAPARILLEASTESEWVAAHLEQFGHAVTVADPNFAPMYATLTRRIKTDKRDARALMDACALGAYRPAYRLSAARRHLRAELAVRDALVHTRTRWIALCRTRVRAVGLRVPSGATHTFGARVAALDLAARAPTLGTELAPLLALLPGVSAAIAAAEARLAALAAADPVITRLATAPSVGVITAAGVVAVLDDVTRFRSAHAVEAYLGLVPREDSSAERRHRGGITKAGNTRARWLLVEAGWRLLRSTAPEAAALRSWGQGVAQRRTKRVAAVALARRLAGILYAMWRDEADYDAARLRRRPPRA

SEQ ID NO: 82567 - protein, 309 aa, unidentified
MTAVGIDVSKAMLDLAFNDAAKVHHFPNTAAGIRRLVQLLRKRPGMRIVVEATGGYEEAVLEACAEAGLWIARINPRQARDFARAAGQLAKTDNLDARMLAEMAAVFHARLRRHLPAEPWQAELKCWLRRRRQIVDNIQRNRQQMALTLPAVRVLVKKTLAFQQRELAAVDAEIKALVQAHTTPALSSAKGLGPVFQSTALALLPELGLLNRQQIAKLVGVAPLNRDSGKTQGKRQIYGGRSEMRVALYMATLSAVRWDPVLRAYYQQLRARGKLAKVALVACMRKLLTIVNARRRDELQGAEAIACTA

SEQ ID NO: 82568 - protein, 400 aa, unidentified
MRVVFGIDGSKASSEVAILVNGEKVHGYTMSNDAIGFSRLLGDLKTVHKPEIIFEAIGVYSRRLQSFLDEHGYAYTRLNPLEAKKQLDSLRVRKTDQIDAEKLAQSQFVLNRKTTYVQKEVYQNLRDLSRFYQNLTEDIVRAKNRLHKALQVTFPELENILSTPSGEQYWNLVIAFPCKDFVLDLSKNELSESIRQSTSKRISDKRVAYLAEKLIALANQSYCAVKKNSPMLEEVRYYTKELLRLSGQRQAVLDEMVELAQPLPEYDILLSIPGIAETTATSIIGELGDIRRFQSTNQINAFIGIDLRHYESGNFLAKEHITKRGNPYARKILFKCIHNIASASHTNPCHIADFYEKRKRQSQTTSTKPHTIASIHRLIRTMYYLIMHNKLYDYASTQNR

SEQ ID NO: 82569 - protein, 470 aa, unidentified
MKSTTKMNNAQLNTALSSEEIIVIGKKAYEEAAAITWRQAEVGRTLTQNDKIALVDDKTLVIGADVGSEKHDIRAFDNRGREFSKKAFEFANNEAGFEEAKAWILNIRDVQHLEKIMVGMEPTGHYWINLASWLMNEGITVVLVNPHHVKKSKELDDNLNRKTDRKDPKVIAGLVHEGRYSMPYLPDGVYANLRNLNKLRLMNTEEKTRCMNRLNRWLSIYFPEYGTVFKDVSGTGSLLLLEQAALPEDIMKLGADGVNKIWRAEKLRGTGYSKALKIVSAAEHSIGSTEGLDIARAEIQWILENLKTLIKWDDDLLEKIENLAREIPCIDNMLEIKGLGLRTVVGIFAEIGDITRFTGVKPIQKLAGLALVEDSSGKHEGRTIISKRGRKRLRYHLYQAALVLIGQNDEFREVYEYYRTREANPLKKMQALMAVACKLLRVLYAMATKGIKYDSGKLLGDIHRPQKKAA

SEQ ID NO: 82570 - protein, 435 aa, unidentified
MSSDSEMAAFIGLDWADQHHVICLRAAGSEQVENSVLDQKPESLQAWIQHLRLRFGGRPVALILEQSRGALLYALMDVDFLRLYPINPQTLAKFRKALYPSGAKDDPTDAALLLELLEKHREHLHVWVPDDPDTRCLRLLNEARRKLVDQKTALTNEVTSLLKGYFPQALSWAGDLDTRRAGAFLDKWPSLEGLRRSSRATLEKFYRQHGCPSQRSIDSLLEEIQQAQPLTRDPAVIRASALMVQALMRQVRDLLESIAQFDRQIKDLFEKHPDYPVFHSFPGAGPALGPRLLALFGSDRKRFRVADEVQLLSGIAPVTERSGKAHRVHWRWACSKFLRQSVQEFSEKSIQRSPWARACYDRLRAAGKSHYAALRVLGYKWIRIMFRCWKDHTPYDEQRYLAVLRRRSSPLGNALSLPQEGSVVKKMSFSCAKNA

SEQ ID NO: 82571 - protein, 362 aa, unidentified
MAKVRSWVGLDVHARSVLAVMIDGESGELRSRRLSGTTSEVVEFCCSLPGPTRAAYEAGPTGYGLARALHTAGVGCVVAAPGKIERPAADKVKTDQRDAERVLRLLMIDALHPVRVPTSEEEALRDVVRAREAVRGDLMRARQRLSKLLLRHDVRYEDTASAWTVSHRGWLTRIDLGERGAQVTLLEYLGAIDAIVIRRDALEKTIAELIPGSPWEQTVARLRCLRGIDTLSAVGLCAEVGEFQRFAKARQLMSYVGLTPSEDTSGEKRRQGAITKTGSRHARRLLVEAAWHYRRAPAKGQTLRRRQEGQPAHIVEISWQAQRRLHNVWQRLDTRRGKRRTIVAVAVARELTGFCWALANAG

SEQ ID NO: 82572 - protein, 476 aa, unidentified
MARFVPVGHRSLCSAVSLLFSMVVEGSTRTVDCCLEHERQTSRNFLALPGTGTTSRAERSNRVDLVHPRCAGIDISKRDAKVCVRIASSGRARAKSSVTTWGATTNQILALRDHLVAAEVTLVVIEATSDYWKPFYYLSEDGPFELMLVNARQVKGIPGRKTDVSDAAWLAQLGAHGLVRGSFVPPEPIRQLRDLTRTRTAITRERGREVQRLEKLLEDAGIKLSSVASNITGVSGRAMLEALIGGERDPAGLADLAKRRLRAKIPELTEALTGRFAEHHGFLARIHLDLIDNHTRAIEELTARIELVMEPFRATRDLIVTIPGISTLVADVIIAETGGNMSRFPSAGHLASWAGTCPGSNESAGRIKSTRTRPGNPYLKGALGAAALSVARSKNTYFAAKFRRIAARRGPVNALVALQHAMLVAIWNMCSTRSYHSDPGEDFFARLDPDRAKSRALAQLRRMGYTVTLESFSTAG

SEQ ID NO: 82573 - protein, 309 aa, unidentified
MLNAPQYVAVDVSKAMLDLAEPERTWRIPNTPSGIASLTRRLARYERPWTVCEATGRYGRLLIRQMDRAGIPVSVLNPRQVRDFARASGQLAKTDAIDAGVILRFAQTMQPPQTPIPAENRERLAEQVRRRRQLVDMMAVEKQRLSGLEDADTLASIREHLAFLEGQITGCDLRIQAEIAADAELARKSALLQSIPGIGTTTAAVLIAELPELGEIDSKQIAALAGVAPMNRDSGQWRGQAHIKGGRLSVRCALYMATLPAIRFNPAIRSFYQRLRAEGKPPKLAITAAMRKLIVIANAILQQNRPWQA

SEQ ID NO: 82574 - protein, 454 aa, unidentified
MRKPQVIPDEDHEVIYERVAAVDVAKASGVVCMRTPDSSRPGRFVNRIWDNVPATRARIAELGQELLRCQVQMVTLESTSDYWRIWYYVLESTGLAVHLVSASQAKNLKGRPKTDKLDAMWLARLTQLGLLRPSFVPPAAIRAVRDFTRARTDLVRERTRCLQRLEKLLEDAMVKITSVVSDGMKAKSSVAMVAALIAGERDPGKLADLARGRLRAKRDALAEALDGMFDSHHGVIAQALLDQVAFLDQQIAQMEAGAIAALAQVKESWGVDATGDTGPHTGTSPDSPVLAAAYRLAEIPGISVWLAIVIIAEIGLNMTLFPTPAHLVSWTGLCRSAAQSGTRHGNGKQKKGNSYARAAAGQAAIGACGTATFLGERYARIARRRGGAIAQVAVARSIMIIVWHLLSDPAARYRDLGPDWHATHVNRDKKIRNHIRGLQALGLTITITADEQAA

SEQ ID NO: 82575 - protein, 339 aa, unidentified
MSKLLKNFVGIDISKTWFDAAVIKADHPEQSMHNQFSQTPDGFKEMVKWLQQQDVLLNSETLFCMEYTGIYNAGLVTFLVEQKAQLWVEMPLRIKRSAGFERGSDDKTSAIKIASYAFRYQDKVQLWQPVDSSIEKIKNLIAQRDRVVNAITQLSVPVKELSECGCNKEAKELEKLQRSSLKALQKTKEAIEQLIVKTAKQDTEIIKKIQLVQSITGIGQVTAVAMLAYTKGYTTFSNAKELACYCGVVPFGKRSGTSVRLKPTVSPHANKKLKKLLHLCALSAIQNDKEMKAYFQRKVAEGKNKMSVINAVRNKLIHRVFAVLRDNRPYEENYVRKCA

SEQ ID NO: 82576 - protein, 369 aa, unidentified
MRRPKDKLIAGLDLHSNNAMIGIINQDGKRVAYRKLDCDLNEVVGFLEPFKPQLQSMAVESTFNWYWLVDGLRAKEYPTDLANPAKIEQYSGMKHVTDKDDAFHLAERQRLDILPKAHVYDPELRPVRDLLRRRTNLVHQRTALLLSFKSLYARTNGQQPDLSDAKKMEPKEALKLYTHPANQLIARLQAEHMQALEKSILRIEKAVLDCAREIPLYERLLTLPGIGRILGMTITMEVGDIKRFESDGDFASYCRLVDAQRLSNGKCKADNNQQSGNKYLSWAFVEASNFARRYDEQCRRWYAPQGGQDQQDHRDQSAGLQTGQGGLVRDGPANQLRRETHVSGIGDEKELILRAAASQRRGWTKSPVD

SEQ ID NO: 82577 - protein, 393 aa, unidentified
MSKNQLVVSIDPGSKLCQALIAEDGRVLETFPFPNLSFSGMEKLLAHVQAQGQNPVFVFEATNVFWRPLYWHLSSQGYHCRTVSSSQTGAFRKTRMRRTQTDTIDCKQILEIHRQNESHPTRFLRQPLAGLRELTRFYTHLSDTRTNLAYRLREYLYQLFPEWSRCFSDLAGKTSLSLIQQGLANPAVLVKTRIDKLARIMKKTSNGRFGLSQARTLKEHASHTFGMNLAQEDVSFNLSTLAQAITYLAGLMRPLEQRISSLLAQVPQQLLTVPGVHVIPAASFVSELGDPTDFSKPEQVIAWFGLDVVWKSSAGKGRGYHISKAGSPYARKWLYVAAGEFVRHFPPARQKYLKLFKEHHLHKKAMLPITADLAKLLFVMYRDNSPFDPARYH

SEQ ID NO: 82578 - protein, 421 aa, unidentified
MNTDQKRAYAATFPVHVGVDTAKVFHKLVVRGPDGQRTKAYKVLVSRAGFEAADAHLRDSYPGIAPQQMLVGLEFAGHHGFTFAHFLAERGYVVVNVLAAHTKASKEIEDNNPRKDDAKDAAQVCKLVGDGIFVRFPFLEHPYLELRLLTVHRHRLTVEATRFKNRLQGLLDLAWPEFLGQFSTLHKATPGAILERWPLPQDLLAASIRTVRKEIHAASRGHVSREQIDALVASARTTIALTQAAPERRLEIQSLLARWALVRKQLAVLERRITALVEQCPEAKILTTVPEVSAVCAATLVAELGTPKDYMHYRQVLKLAGMNLASRSSGQTEGRKWQSKRGRPMLRRQLFLLAGRWCLTRGLYHADYLALKARNGGAGTKAVCTLARKLVPLLLKVMQSGEPFDKDRWLGNRRRREAVVS

SEQ ID NO: 82579 - protein, 391 aa, unidentified
MDKAWAGVDAGKEFHWAHVLDASGRELLSRKVENDETDILKLIDEALSLAKELIWAVDQPGGSAAFLLALLWERNERVLYVPGLTVERARDTYRGESKTDARDARVIADQVRMRSDLSELRAGEQELAELQLLLARRRDLVTDQTRSVTRLREALLSLFPALERTLDLNSKGPLILLTHYQTPAHLRRAGHKRVASYLRNRSVKGSSKVAHKALSAARSQSVTLPAQEVASRIVAELAAEVLSLKERLENIDEEIGQRFFVRPEARILISLPGMGPILGAEFLVAVGDISAFESADRLAAYAGLVPATRASGKRVGNRRRMRGGNKTLKRVFYQSAFSSLRGCAESRAFYDRKRAEGKRHTQALIALARRRVNVLWAMLRDGTTFETRSVA

SEQ ID NO: 82580 - protein, 341 aa, unidentified
MAVAGGLDLHRGQLTFDYVDTGTGESWRGRICPADRESLRGWLRRFHGVPDVEFAVEGCTGWRYVAEELQRAGITPHLAEPAETAGLRGRKRRAKTDWADARHLRDLLLDGRIPESWIPPGHVLEARALVRLYKDLLEERTSWQQRVHATLFHQGIPVVPKLGTADGQQRLEAAELSAAGRRAVQAGLRQIERLTQEMASLRRELARLSSRQPGCRALRRAHYGIGGLLSVAVWAELGDCRRFSSSDDAVRHTGLDITIYDSDGKRARGHIARQGPPVLRWALYEAALYASRPASPDYAYYCGVRDRIDGQRALLSVARKLARRCYHTLRDLGEDALAPAA

SEQ ID NO: 82581 - protein, 356 aa, unidentified
MSKITANFENQTIYVGLDVHKRSWNAGIFLGDMFVKNIHQQPSPEILYHYLTKQFPGASYQCAYESGKFGYWIQRQLSELGITCLVVNPADVPSSHKDEVYNTDSRDSRGIGQALAKGQLRGIYIPPLHQEADRNLVRQRKKIWRDLVRCKNRVKGFLDYNGVDLPEKFDNPNWSRNFITWLLSLAFPFESTSRTLQYQVREVELLRKELLAISNDIRKLMRSATYKKLYYLLRSVTGIGPLTAASLLTEIGDMRRFPNFYHLNSFIGLMPMEHSSGEKQMRFNLTVRKHRQLRSDLIECAWAAKRNDPALALYYSEQISRGINGKKAIVKVARKLLSRIRYVWLTEQPYKTSIVK

SEQ ID NO: 82582 - protein, 376 aa, unidentified
MEGGSLMLNTTTFVGLDVHARSIKAVALDAMTGEVRSATFGYDAAEVAGWVSSVDPSAKCVYESGATGFDLQKRLASMGIDCVVGAVSKMIKPPADRKRKNDRNDAEFLARMLSVGNVVEVWVPDDGCEAARDLSRALDDAREDLKRCKQRLSKFLLRHGYVFSETTPTGRRKGSWTAAHWAWIKSISFPEKADNDVLAYYVDAVRQAMEDKARLERLVEAEASKPRWKRRIDSVRCLKGIDVTSAADLVFEAGEFSRFKSARSFAAWLGLTPSEHSSGESVRQGGITKAGNKHLRRVLVESAWHYLGCSPHSKDLAKGQVPDPAARRHAAKGVRRLVERRRAMLERGVHKNKANVATARELACWCWAVGRMVENG

SEQ ID NO: 82583 - protein, 341 aa, unidentified
MDKIASQPVAWCGIDVSAQQLVVALQRGDRAVQHRTFPNGSVGHQALIRWLARSTGTVRVCLEATGLYSLDLALSVHEVPGIELAVLNPKAVCRFAETLRRSKTDPADALVLLDYARRMPWQSWQPPSATALVLRSITRRFAALTKQHTMEANRLHAAEASKTVPRCVRQDLKQSLRQIECRLRRLQSEARELVTRDVELEQRYTLLRSIPGIGESSALQIMGELEVLAPDLDVRQWVAHSGLDPLQHTSGSSVHRAARISRAGNRHLRRVLYMPAVVGVRFDPYLRTFYEHLLERHKTKLQAIIAAARKILHAIYGMFRSRSRYDGSKLFPLFQPVTQAA

SEQ ID NO: 82584 - protein, 324 aa, unidentified
MSKCKEFFGIDISKDVFDVMDSSENHHQLKNDLSGFKEFGKMLNEYSHCVMEATGSYYQGLATWLYSQSIDVSVVNPLSVKRFIQMRLKTSKTDKLDALMIRLYGESEQPDLWNPPSKLIIEATELHKLIEILVRHRAALKNRLHALKAKGISRSPVVTSVRRQIRNLSNEIAELELKLEVVIKEYQPDLLTRLCSIPGIGKRTAIYLIVLTHGFEKFETSRQLISYFGLNPIIRESGSSIRGKSRISKTGNNHIRNLLFMCAFTACEHNKSCREIYQRITAKGKSKKLALIAVANKLLKQSLAIAKSGLYYDENYRSVYVNLG

SEQ ID NO: 82585 - protein, 340 aa, unidentified
MNQYYIGIDLHSNNLHLAMKDQDGKRRLHKKLPCDLNQVLEFLRPYREAIRTIAVESTYNWYWLVDGLREHDYPVLLANPAQIHQYQGLKQSKDIDDAYWLAEMARLDILPTGYLYDPKLRSVRDLLRRRMLLVHQRTGLILSFKGLHARTHGHAPKLAEVKRLAPEEAAAGFEREGDQLAARVQVTLLEHFDEQIALIEREVLRRVKATPLFQRLQSIPGIGKILGMTIALETGDITRFPSPGDFASYCRTVESKRWSNQKVKGRNNGKCGNRHLAWAFVEAAHCSRRFDERCAAFFEKKKRQRNTAVATKALGCKLAKAAWWIMKEGTAYDAGRMFGH

SEQ ID NO: 82586 - protein, 396 aa, unidentified
MSTHQRIWVGIDAGKGHHWAVAIDAEGSRLLSRKVVNDEAEILDLIADVCGLADEVRWAVDISSRPSALLLALLLGHDQEVVYIPGRTVNRMSGAFAGDHKTDAKDAQTIAETARMRSDFRALELAPDLVGELALLTSYRANMTGDRVKMINRLRELLVGICPALERSFEFRKRPGLVLVSGYCTPSALRRMGVGRLTAWLAKRDIRNASYFAHKAVEAAKSQTTSLPGEKRAAALASDLARQILDLDERIKRIDREIADVLGQDERGAIIQSMPGMGPLLTAEFIALAGDLSAYRDAGHLASHAGIAPVARDSGKRTNNNRRPRHYSRRLCRLFYLSAQSALLRPGASQEYYRRKRAEGMIHPQAVLCLARQRINVLWAMLRDGRPYAHPVPGAA

SEQ ID NO: 82587 - protein, 350 aa, unidentified
MKYYAGLDVSVKETSVCIVDESGKLCREKKVVTHPDDLVAVLSDPAFNFERIGLEAGPLSQWLFEGLAKAGFAVVCIETRHTKAFLKAQQPNKSDRNDARGIAHMMRVGLFKDVHVKTLTSQKRRALLTARKLLQEKAIAMENDMRGLLRNFGLKVGTIRAFKFDERIRELVEAAPDLAEIIESLLAARQKLREEFVKLDRKVRGEARVDPVCRQLMTVPGVGPIVALAYTSTIDIPSRFRHSRAVGAVLGLTPVLNQSGESSRIGHVSLCGDGMLRGLLYEAAQVLLIRVKKWSWLKAWAMNVAKRHGIKKAIVALARRLAVVLHRMWVDGSEFRWTREATPTTTDATA

SEQ ID NO: 82588 - protein, 355 aa, unidentified
MNDAKYIGMDVHQATISVAVRDSRGNLVMEAILETKADTILGFIHGLRGSLSVTFEEGTWAAWLHDLLLPHVPRVVACDPRKNALLKVGNHNDRMDARKLSELLYLNKLSAVYHGEHGMRALKELARSYITITRDLTRVMSRLKAIYRSWGIPCAGQQVYAPRYRAEWLAKISEAGVRRRAELYYQQFDALAALRQSVRRELLAEGQKHLNMRLLRQIPSIGPIRAVLLLALIQTPNRFRTKRQLWAYCGLALRTYTSGEYRFVSGQLKRSKKVLAVRGLNLNHNHDLKNIFKGAATRAASTAGPFQDFYQACVARGVKPRLARLTLARKIAAVTLLVWKKGVRFDAEHLKQQAA

SEQ ID NO: 82589 - protein, 315 aa, unidentified
MSTPVFVGIDVSKAELQVAVRPGDEQKTFANDRSGLGQVVAYLGPQQPTLIVLEASGGYETAVAGALAGAHLPVAVVNPRQVRHFAQAVGTLAKTDRIDARVLAQFAEAVRPEPRPLPDALTQALQALVTRRHQLVDMMTAEKNRLAGTSPPVRRQIKAHLAWLQKQLAQVNQDLDQAIRESPVWREREQLLRTAKGVGPVLASTLVADLPELGALNRKQIAALVGVAPLNRDSGTHQGRRSIWGGRSRVRAILYMATLNAIQHNPLIRPFYERLVAAGKRAKVAIVACMRKFLVILNAMVKTNTPWNPKATTGS

SEQ ID NO: 82590 - protein, 340 aa, unidentified
MTIVMGLDQHRVQITAEWIDTDTGEISRTRVAPADRVAVRRFLARFAGRQLEVALEATTGWRFVVEELRAVGAKVHLAEPAQTSALRGPKKHAKSDRADARHLRELLLTGRLPECWIPPDHILDLRGQVRLRHSLVDERGEWQQRIRAVLYHHGLPRRSDLDLLTAAGRDWLTELSLSPAAREQITVGLRMIGALDTEIPAIDKQLRAYARRQPGCRALMGHYGIGELTSVAILAELGDCRRFTSSRYAVRYGGLDITVHASDRRRAPGHLSRQGPPVLRWALYEAAQAATRPSSPDHAYYRQAAQRLGHNRACLAIARNLLKRSYHTLKDLGEEALAPA

SEQ ID NO: 82591 - protein, 455 aa, unidentified
MSNRSRRGLSRGDRRRNEKLARLREIITRETAVLAFDLAADKQVCALTDPDSRVLARRTARVRAWQLAQTLDWGLAAAAEAGFTSVVVACEPTGHRWRVLDQLAAERGVMLMCVQPLLVARAREAEDFTRNKNDDTDATIIARLVTELRCYLPERADPAWARLRHLGARRARLVVEVGAARQQVRDLLECAWPAVLDAAGKPLDSANWLTAVATGLDRVAATGELSELGQRGWEQFAAAVRAELAPTRWYSAIVRAVFDAATDPAAAAVGVVDQRAGALERVRFALADLAHLRAQIAEVETRMTRVLDTLGLTELVTGIPGVSAVGAATILAEAGDPTRFSSARALVKHAGLCPRANESGNYAGTTSISGRGRPELRLAAWRAVFTALQHNPVLAARHAHLTGRADNPLTDTQARIAVAASLLRQLHAVIVTRTAWDPAVAAGLDRREDGAATAA

SEQ ID NO: 82592 - protein, 464 aa, unidentified
MSLTLGIDVAVRAAHQATLARDGATVWRGRKFWTRPADLERLWSDLDLDDPGELTVVLEPTRNAWIVVAEWFRRRGARVVMVPTTQSADLRKYYSKHTKNDRIDSELLARLPLLHPDGLRQYSGQGPADPLRRLVKQRSTMVKRRTAVHSRLDALVELLGPAWYAVLGSNYGNAALELLARYADPHAVIRLGQARLSRFLIVRSHGAWRDDHAAGLLAAATETLALWGEHGMNFAELAEDIAHEADQALFLNRQIKQIDERLANLYADADPDGIVASAPGVGPTISAVIAGRLGNPHRFTSLAAIRAYTGLVPKVSQSGVSKVESNITKAGDPLLREMLFAAADQARKVDPQLAAKYQRLMAGDRHHCSAVCHLATLLLTRIATCMRNGEHYVLRDVDGTVITEIEGRVIVSERYQINPRQRDHIRHRRMRERRKQAAGQESQESPSAPTSQPATTKPTSHQVA

SEQ ID NO: 82593 - protein, 338 aa, unidentified
MTIETLGVDIAKNVFQLHGVSRNGHIVLRRRVMRDELLAAMARIDRCMVVLEACTGAFYWARKFEALGHQVKVISPQYVKPFVRRQKNDGNDAEAICTAARQSHIPFVPKKSVEQQDIQALHRARQRMVNHRTAVVSQIRGLLLDRGFAFAKSITRARRVIPDILADEHNELAPMARETIEELYDLFRDLDRRIAFFDKKIDEVFRKNEACQRIAKIKGVGPKTATAVIAAIGNGAEFKNGRHLAAWVGLVPRQFSSGDRTVLMGISKRGSQHLRSLLVHGARSVVRTAPNKTDPGNQWVNQLRQRRGFNRATVAVANKNVRIIWAVLRTGEPYRAAC

SEQ ID NO: 82594 - protein, 369 aa, unidentified
MADRITYVGLDVHKESIVVAVASGGLRGEVREYGRIANTATALDRLLRKLGDAGMVLRFCYEAGPCGYGIQRHVSARGHECVVVAPSLIPKRAGDRVKTDRRDAASLAKLHRAGELTAVWVPDPQHEAMRDISSARLDAVHSLRRARQQLSGFLLRQGCHYGRPAWTKLHRRWLAGLIFEQAIHHIVLEDYIAAVEAAEARRDRLTAQIGTMLPDWTLAPVVAALQTMRGMAMVNAATLIAELGDLSRFADPRQLMAYLGLTPSEYSSGSSVRRGGITKAGNGAARRLLIEAAWSYRFPARLSRELLLRQESQPKPIRDIAWKGQVRLCARYRRLARTGKPANAVTTAIARELTGFVWAIARQVTVTPG

SEQ ID NO: 82595 - protein, 327 aa, unidentified
MTAFVGIDVSKNKLDCAWLRDPATGKIKTKVFANDTEGFTALQDWLIQHTARPLTECHVVLEATGIYHEALAHSLYDAGAGISIINPAQVRDFGKGLGVRGKTDAKDSVVLARYGATQRPAQWHPESTAVRELKARIARLEALDADIQRECNRREKARITRDTETLASIDTVLAALRAERQRLADALDDHIDGHPELKHDRALLESVPGIGPAVSLHLLTTLRSRAFASARQVAAFAGLVPMPWQSGRSIDKAPHLSKAGSPKLRRVLYMAAVASLKCNPDIAAQYQRLTERGKSSMSALGAAMRKLLHIAYGVLKTQTPYQPQLAQ

SEQ ID NO: 82596 - protein, 435 aa, unidentified
MEPKIENIVAFLGIDWADQKHDIYLTTPSGEKIEYRQIQHTPEVLSEWLTQLRQRFPQGHIAVCLEQSRGSLIYHLMSYDFLILYPINPKALARYREAFKTSGAKDDKPDAEFLCELIRCHSDRLRPWLPESEQTRNIAALAEARRKAVDERTRVANKLKSTLKGFFPQALELVGDSLHTPLSLAFLKKWPQLEAIQRTSETKIRKFYTSQGSRSEQRIAERIKVIRDGVPVTKDTAVITSAVITVQMLTGILATLNASIEQYEQKLDELLANHPDNDIFSSFPGAGNALVPRLLAAWGTDRQRYEAADEMQQYSGVAPVTKRSGKTMIVQRRLACPKFMLQTFHEYARCSLRKSIWAKAFYDMHRERGKSHHTALRSLSFKWIRIMYRCWRDRTCYDETKYIQALQRTHSPVLAHMAQQKIIVDNSVDNMLVPC

SEQ ID NO: 82597 - protein, 353 aa, unidentified
MIHVGIDLHSRNMTLVAINDNGKLLTEEKLTTTPANLSRFFESFTEPVQAVVECTSYWYWVADWCDVNGVPLTLAHAKMLKAISYAKVKTDSVDARTLAELLRVDLIPEAHQCRRNQRDLRELTRGRLRMIERRSSLQSSLWQLAAKYNVIVQDVGWRYLGKLAEFLQQQLPPVAWVEAELLLEQIRLTQNQIVTLEEAIEEQTGFHKEVERLKALPGFGLVCAWTVVAEIGDISRFPSAKQFVSYCRLVPGARDSGGKHRHRSKNKDGNRYLRITFNQAAIIANRDYPVVKEFYNKVRRRSGKHVARTVVGKELAKIVWHMLSKEEEYKGFKGRMTRITTQNYWPQPISPNA

SEQ ID NO: 82598 - protein, 366 aa, unidentified
MSENITAFVGLDVHKESIAIAVAEPGRAAPRFIGTTGPVLREVQKALTHLGTPAQLLVVYEAGPCGYGLARQLASKGYRCEVVAPSKIPRKPGDRIKTDRRDALQLAHFARAGDLTPILIPEEHDEAIRDLSRAREDALRARMSARHQLKALLLRHGVRYIGKCSWTKAHERFLAQLSFPHPAQNIAFVEYRTAVKEVDERLERITAALRDQVDQWRLRPVVGALMTLRGIEMVAAVTLIAELGDLKRFEHPKRLMSFLGLVPSEHSSGQSRSLGGITKAGNTHARRILIEAAWSYRHPPRIAREKQIRQEDQPRAVREIAWRAQLRLCQRYRRLSARGMHQNKTCVSIARELTGFMWDIARQVAI

SEQ ID NO: 82599 - protein, 400 aa, unidentified
MKQSNATQQSVGKTSVAERLSAASDVHAAYIGLDVHKVSISVAIAEAGRHAPEFRGEIPNEPKAIDKLVRQLSERFDGQPLLFSYEAGPCGYGVYHQIQASGHSCEVVAPTLIPRRAGDRVKTDRRDAQMLARLSRSGELTPVWVPTPEQEAIRDLTRAREDMKAIELKARQRLNAFLLRHGKAYPGKSKWIPAHFRWLETVRFDTPVQQIVLQEYIEAVKEAQRRVAGLEKQMEAALPAWSLAPVVEAIQAMRGVSRITAMTVLAELGDISRFDSPRQLMAYLGLVPSEHSSGGSRRQGGITKTGNGHVRRVLVEAAWSYRFPARKTRIIEQRAEKTSPVVQAIAWEAQKRLCGRYRRLAATGKVKQQVVTAVARELAGFLWAIACEAMGKPHASRATA

SEQ ID NO: 82600 - protein, 346 aa, unidentified
MKTEFKAVPWCGLDVAKNSFESSLYLPLHPGEQPRSINDLPKKTFPRTVNGVKLFHDWSFQLRDKFGLPGGDLRIVMEATGRYSKELAQWLIEEMPFSQPAIEDPCTIKSYIKSLKIHNKTDKIDAGAIARYGYERMPKPTVNLPKDYSLLRELTRLRSATKQQLVAANGRLAELTNDFPEIIKIQQCVVESLKDAVNKLELKIKSCISESDELRKSTKIAQTIPGVGLITAATVLGECGPLRYFKSRELGSYSGLAPVLKHSGTSIHSSRISRHGPAGLRQCLYMAANAAMEYNPKMRALHSRIIARGKKPMQAHCAVMRKLLILIRAVVVSGEQFQSNYTPSHV

SEQ ID NO: 82601 - protein, 355 aa, unidentified
MNNTKYIGMDVHRESISIAVMNSAGKIVLECVVETKASVILQFIAGLRGDLHVTFEEGTWAAWLYDLLKPHVTRLVVCDPRKNASMKEGNKSDKIDARRLAELLRLNHLNPVYHGEHGLRSLKELVRSYLTITKDLGRVMSRVKAIYRSWAIPCTGKQVYAPQHRAEWLAKITEPGVRRRAEFYYQQLDALRSLRREVRRELLEESKKHQAWKRLCQIPSIGPIRAAVLLGILQTPHRFRTKRQLWTLGGLGIETYSSADHRYVEGQLQRSKKPVLIRGLNENCNHDLKNLFKGAAIIASTKPGPFQEFYAALLAKGMRAEMARLTLARKIATIVLVVWKRGVCFDAQFLKPQTA

SEQ ID NO: 82602 - protein, 428 aa, unidentified
MVRQLKITRQGRKMYYIGIDVAKSFHVVSAIDENEVKVVSKPFRIENSNDGFKKLLTVLDSISLEKEAFLIGLEATGIYAENLLEYLLSNGYSVKLLNPFQTSRYREQITMKKVKNDNIDSLVIALFLKDGKFSSGYVTDDEYQSLRTLYRNRVSIQSDMKEIKKRILTQITVTFPEFEGFMNPFTISGLALLDKYPTAHHYKRSSVDRIMKLFRHIQGNNFNHEKALTLLSLAKDSIYSGKAKDARAIAIKSSIRLLKTYQKELEILEGEISSLLNNKGITNSVDEVSQDIEKNNALIDNLKTIPGVSEKTISAVISECGDLTRFPTIAKFIGYLGLFPTENSSGNSKRTGHLSKRGSPLAKHALYMSASSCLIHNKQLKQLYDTKRSQGKSKKEGIVAVSRKLATIIYSIFKYNIPYDPNRVFAKS

SEQ ID NO: 82603 - protein, 370 aa, unidentified
MAQSSTLSIGLDVHKESIAVAYAAKDYGADVVYLGSIGTRQCDIDKLVRQLQSKAKRLVFVYEAGPCGYGLYRYLTKKGYDCWVVAPSLIPKKAGDRVKTDRRDALQLARLMRSGDLTPVYVPKVEDEAMRALCRAREDVLRELKAAKLRLKAFLLRHDIRYTGQATWHPAHLRWLSAVVCPTPAQQIVFQEYVRAVNEQTERLHRLEQELQEQVKSWRLNPVVEALQALRGVQFTVAVTTVAELGDLTRFENPRQLMGYLGLTPSESSSGERRRQGAITKAGNTHARRALVEGAWAYRSPAKVSRHLPLRLENQPKAIQDISWKAQVRLCKRYRRLLARGKHANQVVVAIARELVGCMWAIAQQVPLTA

SEQ ID NO: 82604 - protein, 417 aa, unidentified
MDSDKEIVCGADIHRDFLIATMISRSGLKLQERFNMNQDGLLAFRSWIINHRCLRLAVESTGGFWYPIFIILEGHVEFILANAYQIRNIEHKKTDKLDSERIAIYCLNNLIKPSRIYPKDYRDLRSITRAREALVNARSKVKNQIHQSLSTCCIKLSSVISDSFGKSGRYIIDRLLEGKTIDQIISGIPSKRVKKKEDELREAIKNGIDPVQVFLIKANLEVIDDISKKIKILEAEIAVRVKPFEEDLKIALSVPGVGFISAATIIAEMGEYRDFSSADKMAKYFGIVPSVYQSAGKLRTGKITKTGSKHMRRILVEVAKAISRTKKNSRLKRFFQRIFARCGKKNIAAVALARKVLCILYHLLMNHENYQEPEVKKTKPKIPSSVSPISMMDIDEMIKIISQAGYFVEKDLKEGCG

SEQ ID NO: 82605 - protein, 385 aa, unidentified
MQKDDLSRSLVAFDQNSTLVAVVELSLKTWLVGGLVPGLTRQPLRKQSADPDALAVLLHRWRDEAIKAGCKITRIVVAFEAGRDGFWLARWLLARGIEAYVIHPTSIPVSREHRRAKTDRLDTQLLMRAVLGWLRGEVKHCSMAAIPTLAEEDARRPNRAHEMLVGESTRVVNRMKAILIRFGIRNFKVKLSKAAQRLETLRGPEGELPPNTLAELRREMARLAFIKKQIKEIEKARLAELKQAPREGTHPMLLMLARVMGIGVETADMLVHEVLSRKLQDQRAVARYGGITGAPDESGSKRREKGLARAGNARVRRGMIQLAWRWLMFQKASALARWFQARTEGAKSGVRKTMIVALARKLLIALWRFVTTGEVPAGAVLRPAT

SEQ ID NO: 82606 - protein, 345 aa, unidentified
MQNMYYIGLDVHKRTISYCVKDGSGMIHAEGAIPATRFDLDRWMKTLPQPWTAAMEATVFTGWIYDHLQPHAAALKVAHPLMLRAIAAAKKKNDHIDASKICDCLRCDFLPECYMAATAIRERRRTLRYRNLLVRQMVQMKNKIGMLLMEAGVIYNKQRLHKAGYFRELLATNPDIDEGLCSLLRLCRETVVRLQKTESALVRSLERDSLLLDRVERLMTIPAVGPITALTWALEVGDVKRFSSIKKAISYCGLCGAEKSSGNTAQRTPLSKQRNKHLQTTLIEAAKMAPRNSPDLAMLYDREKQKGNANRATLAVARKLVAYLMAVDRGQRNFQVVETSNCIAA

SEQ ID NO: 82607 - protein, 421 aa, unidentified
MKSTIPTILAGVDTHSTTHTLALLDEHGRVTDTETFNADPKGYERLIAMIGDPALCLGVGVEGTNSYGAALSRRLAAAGYTVHEVLRPKRSVRRSDGKSDPIAAIAAARSVLAGDGISTPKASDGWCEALRHLIAAREQLVTSMTAISNCLAELLTTAPEGIRERYRSLPSKRRIGKLAACRPSGGIVERNVLSSLKTLASSWRELHDRADVLECRMRQILEENARPLLDVYCMGTMSAAQLAVIGGDNPERIRSEAAFAKLCGACPLPASSGKTNRHRLNRSGNRQGNRALYNVALVRMSHHQPTKDYVVRKTKEGKGKLEIMRCLKRYIAREAYRALIAIRNGEAGREPAVERGARLREVRVSLGKTQQQVGDALGVPSSRVSEIERGVRDLPELERQIIEWMDSILGQSQHSNTFDNV

SEQ ID NO: 82608 - protein, 365 aa, unidentified
MRTNSQVTQRSVSEDILYMGLDVHKNHINVTVMSDQAVISQSHVAIGDVESYVAGLQRKHPNSVLRAAYEAGFSGFATQRRLEALGVQTIVVNAADVPTTDKQRTSKSDRADSWKICHALRCDQLHAIWVPSVEHAGDRGLVRYRLPLKKARSQSMSRIRMFLHQQGIAIPDEFDRSYWSKAFRAWLNDQTMTSESSQMTYMLMLEEFEHADAVVSKHMKLIKTLSESDRYRKNVELLCSIPGIGVLTAMVILTELGPIDRFSSADRLASYVGLVPMRHQSGSSDRSMPIQRRAKTELRRMLVQSAWIAIGRANHFMDVYDRQRKIKRSQVAIIVVARKILNTIYAILKTSQPFTGSITSSAKLS

SEQ ID NO: 82609 - protein, 347 aa, unidentified
MTTIEDARVITGGVDTHADMHVAAALDSIGGLLGVQEFPATAAGYASLLGWLRGFGTLAVAGVEGTGSYGAGLARHLAAAGVRVVEVDRPDRQDRARQGKSDPLDAVSAARAALSGRASGAPRGRDGAVEAIRALMVAKRSARQERIQAINQARALIMTGPEELRARFVRRSPAQLIEAIAALRPRPGDVPGFATRVALRELGRRAQFLDAQLDRLDELIGPLVTARAPGLLALHGVGPDTAAMLLVAAGDHPERLRRESSWAHLCGVAPIPASSGKTAGRYRLNRGGDRQANSALWRIVIVRMSSHPATRAYADRRSEEGLSKKEIIRCLKRYVAREVYRQLRNGA

SEQ ID NO: 82610 - protein, 358 aa, unidentified
MKAIKQTIGVDVAQDELVCAFGALLEDLSWQIKARKTFGNNPSGFKACLKWAGSMKEANSEVLFVMEATGVYHEKFAHWLFDQGEKLAIVLPNKISNYMRTLSIKTVTDSTCADAITQFGLERKLDTWSPPKVIFRTLRQLTRERDQIVAERVTIDNQIHAEKTEAYPNANSLKRLNARRKLLCKQEQEIKNEIHHLVKSDQQLDQDVKRITSIPGVGELTAVIVMAETNGFELVRNKRQLTSYAGLDVREKQSGTSVKGKPKISKKGNRSLRKAMHLPALAAIRHCQIYKDNFARLVGRHGIKMKAAVAVQRKLLELIYILFKNKTTFDPAFEQRREDDTSPSPLHSLADADLSIEI

SEQ ID NO: 82611 - protein, 330 aa, unidentified
MNYIGIDIAKKTFVAAFPKEKGFKVKSFTNNVDGIRDFIKGLDPKQDRCVMEATGNYCFLLLYLLEKKGISACLVNPKQTKHFARMMMEVTKTDAKDACMIAMYGQKMEPPVYKIPTESIMRLKQKRTVIRQLRKQYTALGNLKESLSVMPSMDKSCEKSITKTMEFIGKQLVKLEDEMAELTNMEYQKQMELLTSIRGIGPACAAALIIATSGFTCFDNAKQVSRYFGLCPTYQQSGTSIHVRGGISHMGDSQIRGALYMASMSAIRTNTSCKEFFYKLRKNGKPGKLALTAVSNKLIRQAFAVVKSGVPYIDGYVSPNPMTTQERMLN

SEQ ID NO: 82612 - protein, 409 aa, unidentified
MQIVITQCAGLDVHKATVVATVRGPDARGQRQTVTATFGTMTADLIALREWLQAFGVTHVALESTGIYWKPVYYVLEDAFELLLINMLELKHVPGRKTDVKDSEWLAQLLECGLLRSSFVPPPVIRELRDVTRYRVQQTRERGREVNRLQKVLEDAGIKLASVASDVMGASGRAMVEALIGGATDPEALADLARGRLRQKLPALRRALVGRFRPVHAFLLEQILAKIDYLDEALERLTAEIDRRVAPFAPMLTALDTIPGIDRIGAISILAETGGDMTRFPSAAHLCSWAGMCPGHDESAGKRRSGKTRKANRYLRTTLIQAGVTGSNKKQSALRALYARLKARRGHKKAVVAVGHQILHIAYYVMRDGVTYHELGPDYFQRHDRERTARRHVKQLEALGYVVTVQPAA

SEQ ID NO: 82613 - protein, 413 aa, unidentified
MKVIYPVCCGIDVHKTFLVATIIKTASYTPEYFKKRFSTHNNDILKFKKWLIENNCYDVCMESTGKYWIPVFNLLEDTIRVTIANPKWVRAVKGNKDDKKDSKWIGDLFRLGLVPGSFIPPKDIRILRELTRYRSKLVSARSGEKNRFQNSFTVCNIALDSVVSDMFGKSATAISDYILTSDTFDPNHCVSLLKGKLKKKSDEVIESIEGYHMMQPQKDRALIIKKHIAFLDQTIAEVDAYLDDLVQPYEQLIQLLCSIPGVKRQSAIIIISEIGSDMTPFENSKKISSWAGLAPSSNESAGKKKSVKISRAGVYLKPALVQVAHAANKSKGTPYYKIKYDRISKRRGKKRAIIAIARMILTAIYHMINTGELWNPSDLIKIDTPEYILQRQKDKAIKEATKLLIKEGILKVS

SEQ ID NO: 82614 - protein, 342 aa, unidentified
MNHAAIDLGGKESQICIRQPDGTILEERKVPTRKLTELVATWAPSRVVMETSAEAFKIADAALAAGHQVRVVPGTLVRLLGVGDRGVKNDQRDAQQLSKASWQTDVPSVHIPSKPARELKSICGARDVLVGTRTKLINNVRGWMRTQLWKLRSGTTCTFAERVRGHAASLGVSLPEHIERQLRTLSMVVEEMKAADKQLQTLAGEHEVCRRLMTVPGIGPVTALRFVAAIDEPGRFATAHHVQSHLGLTPGEHSSSERERRTGITKAGPMELRRTLIQAAWTVMCRVRTSHPMIDWARRLAERRGRPVAAVALARKLAGILFAMWRDGTTYQSKRSAEVAHA

SEQ ID NO: 82615 - protein, 338 aa, unidentified
MGLYCGIDLHSTNSYLAVLNERLESVLDRRVPNRLEAVLGALEPLRAEVQAVAVESTFNWYWLVDGLMEAGYSVDLVNTSAVRKYEGLKYVDDQHDARWLARLLHLGILPTGHIYPKQERALRDLLRRRAFLVRQRTANLLSVKNLYSRNTGAQVAANELKRLTNEQVTAQFSDPHLALAITSSLAVIRSINDEIACIEKLILKDAKLRPGFELLESIPGIGQTLALTIMYETGSIARFADAGHFCSYCRCVPSKHLSNGKVKGKGNVRNGNAYLSWAFTEAAHYAIRFEPLAKRFYERKKAKTHAMVALRAISHKLARASFHILRDQVPFRSELAFG

SEQ ID NO: 82616 - protein, 341 aa, unidentified
MPTITIGLDLAKHIFKVHGVDATGQVVIRKKLRRSELLEFFKELPPSLVGMEASGTAHHWGRELTALGHDARLMPAGYVKPYVKRGKSDAVDAEAICEAVTRPTMRFVEIKSAEQQSGLMLHRTRELLVRQRTALINSLRGQLAEFGLIAPKGVWSIPELHALAQGATSAVLPGAVRSCVELIMGQIDDLQTRVQAIEKVIRKNHRASEVSLRLQTIPGIGVITASAITATIGDIKVFKSGRHLAAWIGLVPRQSGSGGKVHMGRISKKGDAYLRKLLVLGATAVIRYCRNKPELAGWINALLQRRPARVVTIAVANKMARIAWAVMSRGEAFRQAASAIA

SEQ ID NO: 82617 - protein, 345 aa, unidentified
MEHYVGLDVSLKLTSICIVDRTGKVEREGVVASDPEAIATFVKLHAPNVVRIGLETGATSTWLWTELNKMGLPVICIDARHAKAALKMQINKSDRNDAVGIARIMQCGWYKEVCVKDLDSHATKALLVSRALLVKIKRDIENQIRGLLKNLGLVIGRAKMNMFAVRAAQLAEDRSELLAAVDPLLKAREAVEQQILDLDRKVLRLARNNAQVRRFMTAPGIGPVTALCFLATIDDPARFKRSRSVGAYAGLTTRRYASGEIDWTGRISKCGDKMLRSYLYEAANVLLTRVAKWSALKAWGVKLAKRSGLRKAKVAVARKLAVILHRMWIEGTEFKWSKEAADQPA

SEQ ID NO: 82618 - protein, 455 aa, unidentified
MPRKPGKPKSDRAMSMVHPNAAAIDVGATLLMAAVRADRTPEPVRSFGTFTTDLHRLVDWFAECGVETVAMESTSVYWIPIYEMLDARGFAVFLVNARDAKHVPGRKTDVSDAQWLQRLHSYGLLRASFRPKGQFTALRAYVRQRERLLEYAASHIQHMQKALTEMNLQLHHVVADITGTTGLRIIRAILSGEHDPKVLAGLRDYRCRATAETIEKALTGNYRAEHLFALEQALALYDAYHEKVSACDSRIEAVMKDLSIDRSHDAAVLTPSRRRTDQMNGLAFDVRSALFALLGKDITKIDGFGPYLSLKLVAECGDDLSAWPSAKHFTSWLGLAPNNKISGGKVLSARTKRSGSRAAALLRLAAVTVGRTDTALGAFYRRLSARIGKAKAVTATARKIAVLFYNAVRHGMEYVDPGASFYETRYRKRVVDNLHRRAKTFGFVLQPVEAACTVS

SEQ ID NO: 82619 - protein, 343 aa, unidentified
MRRVTCRGPVWDLAKNVFQAHGADAAGAPIFRRKLRRDQVLAFFASQPSCVVAMEACPGAHHWGREIGKLGHAVKLIAPACVKPFVKRQKNDAADAEAICEAAQRPTMRFVAVKSEAKQASAVIFRTRDVLVGQRTQLINAIRGHLAEYGQIVPQGSAHVERLIAQIEDPASDLPPAARASLAVLVGTLRHLQEQTAALDAEIAARAKADDTARRLMSVPGIGPLIATAIEALAPPVETFRSGRDFAAWVGLTPVQRSTGGKERLGRTSRMGERTLRRLLIIASSAVVRWAKRKGVPAESWLGQMLARKPPMLVIVAVANKNARIAWALLTKGGIYRAPAATA

SEQ ID NO: 82620 - protein, 339 aa, unidentified
MVAPVFSFGLNGYLGLGPVRQDKVRKRQMNDTIGIDISKDALDAFWMSGKKHRQFSNNKSGLRSLICWVERTGTPLIVFEATGVYHRLLESSLAERNIPFAQVNPRQARRFAEGVGILAKTDRVDASMLAKMGSLLDLNPSKPKSETLHDLKELLTGKRALIKDRTAAEARLATATQQVLKQQISRRLRQISKDLEQIDDALETMIAADPKLGERVEILTSIPGIGKATAFALVIEMPELGTLNGKQAAALAGLAPMSRQSGKWKGHERIQGGRASLRKAIYMPAIVATRFNPDMKAKYEQLISNGKCKKQAFTAIMRKLVVLANALLRDGRKWNEIAA

SEQ ID NO: 82621 - protein, 370 aa, unidentified
MLDTTTFIGLDVHARSIKAVSLDVMTGEVRAATFGYDAGAVAEWVRSVDPRARCVYESGVTGFDLQKRLSGLGVDCVVGAVSKMIKPSADRRRKNDRNDAEFLARMLSVGNVVEVWVPDDECEAARDLTRALEDARDDLSRSKQRLSKFLLRHGLAFDERTPTGRRKGNWTRAHWSWIESIRFAEGADNDVLAYYVDAVRRAAEEKARLEGLVEAEARKPRWRRRVDSLRCLKGVDTATAADLVFEAGEFSRFGNARSFAAWVGLTPSEHSSGESDRRGAITKAGNKHLRKALVEAAWHYLTCSGRPKDLAKGQAPDRVARRHAAKGVRRLVERREALLARGVHGNKANVATARELACWVWAVGLMAEEA

SEQ ID NO: 82622 - protein, 316 aa, unidentified
MTTNSVVVGVDVAKDRLDVAVRPSGEVWSEANDETGITTLVGRLRPLRPALIVCEATGGFERAAIAALAAAGFPVVVANPRQVRDFARATGQLAKTDQLDAAILALFAERVRPTPRPLPDAAAQLLDAVLTRRRQLLEMLVAEKNRLGFAPKPLHRGIQAHIRWLERQLDDVAKELAGLIEASPVWRAKDDLLQSVPGVGPIVSSTLLGELPELGTLSHKQISALVGVAPLARDSGTLRGKRQVWGGRASVRTALFMAAMCGRRWNPTLKVFYERLKAAGKPTKVALIACARKLLTILNAMVRDQSRWTSNVQYSC

SEQ ID NO: 82623 - protein, 410 aa, unidentified
METITAVGIDVSKGKSTVAVMRPGGEIITLPYDVDHATADLRKLANSLKLLDGDVRVVMEHTSTYYLPVASVLSEVGLFVSVVHAKLIHDFGNNSIRRGKTDKKDAIKIANYALTNWTSLTPFHQSDDIRQKLKKLNRQVSLYTKLETALKNNLIALLDQTFPGLNNLFAPTQRANGHEKWVDFAHRFWHRDCVCGLSQNAFGESYRKWCKRTNSVWSADKVVEIYKYAHTQIAVLPKDNTTKLIIKQATMQLTSLLETVHTMQKEMNSLASLLPEYETVMAMSGMGKVLAPQVIAEIGDVMRFYNKRALTAFAGLDSPPYQSGQFESRERKISKRGSPHLRRVLFRAMGVLLLNSPKDDVVYQFMCKKREEGKHYYVYMTAASNKFLRRYYGQVRECMLALEESSQESD

SEQ ID NO: 82624 - protein, 401 aa, unidentified
MTTGTVDVTMGLDVGKTAHYACAMLNSGEIIYDKPLPQDEDQLRKVFTDLQDHGTVLMVVDQPNTIGALPIAVARDAGCLVGYLPGLAMRKAADLYPGRSKTDRQDAFIIADTARTMPHTLRAVDRENEVLSALKMLAGFDDDIAKDATRTINRLRSVLTQIHPSFERALVGDIITRPLVLEMLIHYGGPTKMKKAGYHRVLGWMTNRAKKDPTKLVDAIFEGLKAQTVTVPGTAAAEIVIPQLATNIKALLEQRKTIAEQVEELLEEFPLHHVLMSMPGVGIKTAANILLAVGDCSDFRSAGHLAAYAGIAPVTRRSGTSIRGEFPARSGNKRLKNALFYSAFASIRFHEPSKTYYERKRAEGKRHNAAIMCLARRRCNVIYAMLTRAEFFREVPARAAT

SEQ ID NO: 82625 - protein, 312 aa, unidentified
MEKLSYGGIDVSKDCLDVVVLPEGWFFSVSNDTAGWAELVARLRPLAVCAIGLEPSGGYERGIIRALLAAGLSVRRINPNKLRQFARARGVLAKNDRLDARLIAEYVAIMPTRVVQRNDAVERLAEIVTMRRQLCDEHVAVENQAVHLEDAMLRRLSKRRLIRLEADIRLLDKRLAEMVATNAAFAQRYELLTSMPGVGPVLAFTLIALLPELGKMSRKQIAALVGLAPYDFDSGKLRGHRSIYGGRMPIRNVLYMAALSASRHNPALKAFSNRLADANKKSKVIIVAVMRKMITTLNAMLRDNAAWQPQSA

SEQ ID NO: 82626 - protein, 400 aa, unidentified
MLSIGIDVSKGKSTVCGMKPGGEIVYTPFEVQHTREGMSELVSLLRSSGEEVRAVLESTGSYHCPVVAALLENGIFVSVVNSLRMKRFCSQSIRKVKTDRIDAMQIALYGLAYWQELQPTKLPEDTYRELQLLARQYYQMTSILIKAKVDFNALCDQVLPGMQELMSDHAGRHKLSDFVLRYRHTTHILEMGETRFRKDYCKWAEKKGYRNCERMAVLIFATAQNGIPVLPNAPSTQIVITEAIRVLHTVEASRDAILTQMQALAKTLPEYSLVREMPCIGDTLAPRLIAEIGDVRRFHSKRALIAYAGIDAPPYQSGKFCANNRHISKRGNRYLRKTGYEVMQSYVMHKPANDPIFTFIEKKRGEGKSGKLAMVAGLNKFLRVYYGKVTELYRSLPAIE

SEQ ID NO: 82627 - protein, 418 aa, unidentified
MTPPMETIYAGVDTHTDTHTLALLDWRGRPLATRTFPTDAAGYEALAGMLPDPSRVVVGVEGTNSYGAALARRLAAAGYETREVLRPKRAVRRRDGKSDPVDAAEAARSVMAGDGTGPKSSDGWVEALRHLNTQRDRLVSAMTTLSNSVNGMLVTAPETVRDRYRSLRTGRRMTRLAACRPAGGPVERAALTAMKASATAWKALREQADGLERAMREILEEHARALLDLNGVGVVTAATLAVVAGDNPERVRSEAAFAKLCGACPLPASSGRTSRHRLNRGGNRQGNKALHQIAVVRLRHHQPTRDYMAKRTREGKSKMETIRCLKRYIAREIHRVLIAVRDGDPGREPPARRGAMLRELRLSHALTQRQVGQALGVPSSRISEIERGARDLPELERRATQWIHSTTDTPPQQQLDKL

SEQ ID NO: 82628 - protein, 345 aa, unidentified
MQNMYYIGLDVHKRTISYCVKDAGGRVYAEGSLPATRFDLDRWMKKLPQPWTAAMEATVFTGWIYDHLQPHAAALKVAHPLMLRAIAAAKKKNDRIDASKICDCLRCDFLPECYMASTAIRERRRTLRHRNLLVRQMVQMKNKIGMLLMEAGVSYNKQRLHKAGYFRELLATNPDIDEGLCSLLRLCRETVVRLQRTESALVRSLERDSLLMDRVERLMTIPAVGPITALTWALEIGDPQRFSSIKKAISYCGLCGAEKSSANTVQRTPLSKQRNKHLQTTLIEAAKMAPRNSPALAMLYDKEKQKGNANRATLAVARKLVAYLIAVDRGQRKFQVVETSNCIAA

SEQ ID NO: 82629 - protein, 361 aa, unidentified
MFTERTSVGLDVHARSVVAAAIDGITGEVFRARLTPSNDDVIGWVRSLPGPVAVVYEAGPTGFGLSRALATAGIRCEIAAPSKIQRPAGDRVKTDARDAMHLAKLLRLDEIVSVRVPTLEQEAARDLVRAREDVRGDLMRARHRVSKLLLRQGIVYYGGKPWTGTHLVWLRAQHFDVPGLQLAFDAEHEAVLQAEARRDRLDKAIVVMAADSEFTPVVHRLGCLRGVSTLTGFGLAVEVGDWHRLTGSSIGAYLGLVPTESSSGGSRAQGSITKTGNTHARRLLVEAAWHHRKPYRTPGATMTARWELAPAAARARGAAGNQRLHQRWLAFTERKKRPVIANVAIARELAGWCWSLAVMND

SEQ ID NO: 82630 - protein, 282 aa, unidentified
MRIASIGIDLGKTTFHLVALGEHNKILLRKKFSRSQLLAHTANLPSSLIGLEACAGSHFLGTVLREQGHEVRLIPAQFVKPYRKSNKNDFLDAEAIAEAVTKQNMRFAQLKTQEQLDWQAMHRVRDRLVQRRTALINEIRGFLLERGITFAAQPIHLRKNLPAVIEDAEQNLSPRLRWLLDRMWQEWKQIETDVEAITKEIERISKDDARCWQLRQIPGFGPLTSTATVAAIGNGAALRRGRDFAAWVGVVPRQYSTGDKQKLYSISKRGNGYGFPGAVTID

SEQ ID NO: 82631 - protein, 338 aa, unidentified
MTTIKVIGIDLGKSSFHLIGHDHTGREQLRKHLSRPKLIQFLSQTPKTTIAMESCGGSHWLARKCQALGHEVKLIPPQYVKPYVKTNKNDYIDADAIAEACTRPSMRFVGVKTETSQVISVIQRVRSSYIKERTACMSRIGAILLEFGMNFPRGHAKMKVLFQWIADNSEPLPAMLMQELIEHHEYYLLLNERIAGQDKKLKQLVEQDVRAQLLKTIPGVGDLTAAQCLADISDVTHFKNGRQMAAWIGLVPHQYSTGGKSTLLGISKRGNKALRTLFIHGARAMLSRPEKALAVFGEWILELRARKPFNVAVVALANKLVRIAWSVLSTKQAFEIRV

SEQ ID NO: 82632 - protein, 355 aa, unidentified
MLIIGCDYHPGFQQIACVDTETGELSEHRLAHREEAEAFYRILKQRNLSARVGMESSGHSRWFERLLHELGFELWIGDPAEIQTRRVRKQKTDRLDAQLLLRLMLENRFPRIWVPDAENRDLRQLLWHGHRMVQMRTRVMNQLHVVPLNEGLRRKKALWRPAGRKELESIALAPWASRRRQDLLDLLDQLTPKIQELTRALEEEVEKRPVTRRLMTHPGVGPLTALAYELVIGTPERFHCGKQLASYVGLVPEEKSSGDRRRQGHISKQGNVLLRFLLVEAAQVTVRSQQEWRNKFFHLAMRRGRKIAKVAMARKLAVHLYWMWRQGSDYGQTQKLGSQGRKLCSHTVVTKGSTR

SEQ ID NO: 82633 - protein, 267 aa, unidentified
MLYAGLDLARKRICFDARRPDGEIVDRGASPTDADGLDRLAQRLLAHDREVLAVVESMNGARFVHDQLELQGVEVQICDAERAKGLAPLACKTDKIAAGVLAELARRDLVPEIWLPDPGTRADRERARFRLHLVRKRTALKNRVHSTLITWGKPCPVSDLFGRQGRELLQRLSIPEPWRSTLQASLELIDALDGEITAQERDLRALGANHPYVPQLTTVPGIAWVLGFTIACEIGDIARFPSPKKLTGYTGLCPKSTSRASTTGAGG

SEQ ID NO: 82634 - protein, 358 aa, unidentified
MNISKDSKLDFTGQPIYIGLDVHKKFWRVSIYTRYGEYQNFNQPPSVAALLHYLRHHFPGAVYYAVYEAGFCGFWIHEQLGQMGIHCIVVNPADVPTGNKERRRKGDRVDCRKLARGLCHKDLKGIHVPPRLKLEDRTLVRTRLSMGRKQTRCKNQIKAMLLFYGIEIPEEREMGHWSRRFIQWIQGVRLQRASGDMALQIHLEELIHLRQGIAKLNRAILALSRTPEYLSWVRLLKTIPGISTLTAMILLTELGEIVRFRSINQLCSFVGLIPDIQGSGDKEHVTGITPRRHSHLRWLLIEASWIAVRKDPALMEAFDQYGKRMLKSKAIIKVAKKVLNRIRYVLKNEAEYVTCVIE

SEQ ID NO: 82635 - protein, 408 aa, unidentified
MEVVYRCCCGIDVHKKIIVACLDQGGEQSLREFGTTTSEIKSLATWLTESGCEMIAMESTGVFWKPLYNLFELMDLDAIVVNAAHMKALPGRKTDVKDAEWIADLLRHGLLKASYIPSREQRELREITRYRKSLTEERCRETNRLQKILEGANIKLDSVVKDINGKSARKLLEKIIEDDVPTSEEEVSKMVHGRMRSKLGQLVTAIEGITTPLQRKLLAQVIDHIDDLNRRIADLDRLVQDYMDEYAAAIAALCDIPGIARRSAEVILAEIGLDMSRFPSAAHLCSWAGVCPGNCQSAGRRKHGKTTKGNKPLKTILTQCAKSARSVKGSYFSAQYQRIAARRGKNRATLAVAHSMLIAIYHMLKNSVPFRDLGSDYYDSFNRDRKIHSYLKRLKALGWEPDALPGSA

SEQ ID NO: 82636 - protein, 348 aa, unidentified
MKKIVKQVAGIDVAQKELVVCLGKMYDDLKLELYAFKSFANTVKGIKAFVEWVNKLSDVALPVRYVMEATGVYHETLAYFLDDQKLEVTVVLPNKISNYVRTLEIKTVTDKTASEAIARFGLERNLDQWHRPKKVFKTLRQLTRERDQVVHIRSMIKNQLHAELAGAEPNKGSIDRIKKQILFFDKQEKEIKKELFEVVKLDEKLKGSVELICSIPGIGMLTAATVLAETNDFELIRNKRQLTSYAGLDVKEKQSGTSVKGKPRISKKGNRYLRKAMHLPALAAIKYNERFKAVFARLVGKHGIKMKAVVAVQRKLLEIVYIIYKTQKPYDKKYFQKNEAEIMNQEVA

SEQ ID NO: 82637 - protein, 343 aa, unidentified
MELYVGMDVSLKETSICVVDGSGEIVSEGTVISEPAAIAAFIEAKAGSALRIGLETGPTTTWLWHELRALGFPVICIDARHAKAALSMQINKSDRNDAVGLARIMQCGWYKEVQVKSVSCHELRAVLNARAQLVKIKRDLENQIRGLLKNLGLVIGKAGGTVFTRRVEELLGRQGLLWEAVRPLLEVREKVRREVAGLYRRLLDLARNDIDSRRSMTVPGIGPITALAFHSAVDDPTRFKRSRSVGVYFGLTPRRFASGEVDWSGRISKCGDAMVRSYLFEAAGVLLTRVAHWCKLKAWGHRLWKRIGFKKAKIAVARKLAVILHRMWRDGTDFIWSSKEVAA

SEQ ID NO: 82638 - protein, 412 aa, unidentified
MHVIYECCCGMDVHAKTVVACLLKAGKKEIRTFSTMTVDLLALLDWLSEAGCSHVAMESTGVYWKPVFNILEGQLQVLLVNARHIKAVPGRKTDVRDCEWLADLLRHGLVRASFIPPREIREIRELTRYRQAVVKEHTAVANRIQKVLESGNIKLGQVASDVLGLSGRLMLRALAAGEQDGEQLAELAQGRLKAKKAELCQALAGQLTVVQRWVLSELLARWEELDRALTRVEARIREEVEACPDPFVPEAVALLDSIPGVGEHVAHTIVAEIGVNMGQFPSDGHLASWAGMSPGNNESAGKRRSGQTTKGSTYLRTALIEAAWAASHGKGTYWAAKYKRLVRRLGKKKALVAVGHTLLRVAYYLLKRRVRYTDLGSDYFDHLQVQRQRQRLVQRLEALGVKVTLEEVGEAA

SEQ ID NO: 82639 - protein, 371 aa, unidentified
MQETSRVFVGLDTSKLKISVALAEEGRQGEVRFLGDIDNTPDAMKRLVRKLSGKYLQLLFCYEAGPTGYGLHRQITALGHDCSVIAPSLIPKRSGEHVKTNRRDALSLARLHRAGELTTIWVPDLGHEAIRDLVRAREAAMEDLREKRQQLQSFLLRHGRLYPGLRSWTLVHARWLSSLIFEHPAQYLVLREYRQAIEDAEARLKRLTQQVADVVSTWSMAPVVEAYQAMRGVAFLTAVTFVAEIGDVRRFETPRQLMAYLGLVPSERSTGEQVRRGSITKAGNPRARRVLIEGAWTYRYPARLSRPLQVRQESLPEVVRAIAWKAQVRLCARYRRLMAAGKRQTLITTAIAREMAAFLWAIGHEVQPCSA

SEQ ID NO: 82640 - protein, 415 aa, unidentified
MEVLYGICSGVDVHKKILVVCLRSGRKTEIKEFGTTTRELLECGEWLQSRGCEMVAMESTGSYWKPLYNVLEAMDVKAIVVNAQHMKAVPGRKTDVKDAEWIADLLQHGLLKASYIPKRDQRELRELVRYRKSLVEDKGRELNRLQKMLEGGNIKLSGTVSEIDGKSARNILARIVEGEKIDEKTYDEMCARKEIAHNLKGTREQILDDLNGILSQTQRHMMKVLLAHLDELNQHIQELDNEIDGSMKQDEKDACKAIEDVPGIGESSAQAIISVIGTDMSRFPTEKHISKWAGVCPGDNESAKKRKSCKTTKGNKVLRTTLVSCAHAAVKVKDSFFSAQFSRICAHRGTKKAYMAVAHSLLIAIYHILSTGEVFHDLGANYYNQFNKERKAESLLKKLKSLGFDVTVATAEASA

SEQ ID NO: 82641 - protein, 355 aa, unidentified
MQKYNISFKGQNIFVGIDVHLKTWHVTTLTESGYKYSFAQHADARELFERLNKKFPEAHFKSAYEAGFCGFSVHYALTEYGIENIVVNAADIPTTGKEKAMKTDAVDSEKIAWSLKRGELTGIYIKDKRFMDDTNLMRLRQRFIKDLSRQKNRTKHLLYTQGVIYPKRFLNSSTHWSRNFMQWLREEVELLSEEKLTLALLCEQVENTRRAILTVTREIRRLSMTEKYKDNFDLLTSVPGFGLIMAMTMLTEFDNNIMRFPNERKFVSMLGLIPTCHDSGEKKTNGEKTFRGNKQLGPLVVESSWVAIQRDCELASYYSKCCQCMRPPRAIIKVARKLACKAYAVLKNQKAYVRP

SEQ ID NO: 82642 - protein, 384 aa, unidentified
MQASSVATPTVEHCGTVFVAIELSQKSWLVTLHSPDRDRISRHKLDGGDHAGLLALIDRERDRASRTAGGVPAVASCYEAGYDGFWLHRLLLAAGITNYVFDPSSIAVDQRARRVKTDRIDGERMLRTLMAYLRGEPRVVRIVRVPTPEQEDARRASRERDRLTKEQTAHTTRIKALLRLLGMAVGNPRRRDWLTWLVKQRDWQGQAIPPQIMAEIKREHARLMLVREQLDALAQAPADLTPAAAQMAQRSELLLRLKSLGPAFATTLTNEVFYKDFRNRREVASYFGLTPSPWQSGGTDRDQGISKAGNPRARCAAIEMAWLWLRHQPDSKLTQEYRRRTLNASKRIKRVAIVALARKLIVALWRYLTTGLVPEGAMLKTAEV

SEQ ID NO: 82643 - protein, 343 aa, unidentified
MQVSTIGLDIAKNVFQVHGVDAAGKTVITRQLRRGQVIGYFAKLPPCLIGMEACATAYHWARELTKLGHTVRLMPASYVKAYVKRSKHDAADAAAVCEAVTRPSMRFVPVKTIDQQAALMLHRCRDLLIRQRTQLINALRAHLAELGMIAAKGKEGVKDLVAMITDAVKATALPEPMRQALQALVNQFAALQQQIGKLERNIHAQHRASDRSRRLETIPGIGVLGATAIAATIADPSAFKSGRECAAWIGLVPRQNSTGGKERLGGISKQGDRYLRRLLVMGATAVIRHAQTHPDKHPWVTKLLAKKPYKVVAVALANKMARIAWAILAKGETYRAPTLATAV

SEQ ID NO: 82644 - protein, 344 aa, unidentified
MNIATIGIDLAKNVFQLHGVNGHGKVVLRRQIHRGQMRGLFVNLPACLIGMEACGSAHYWARTLESYGHTVRLIAPHFVKPYVKTHKTDATDAEAICEAVSRPNMRFVPIKSIEQQSALSLHRVRQGFVRARTAQACQIRSLLAEFGLVMPRGIANIKQVPKLLQVAGNELPAPFGRLIERLLAHLKELDRQARELEEQIVDWHERSEPSRRLAKIPGIGPITASALVASISDVRSFKNGRELAAWMGLVPRQHSSGGKPTLLGISKRGDRYLRTLLVHGARSVIVRVRKRDDQKGGWLERLLERRHVNVATVALAHKTVRTVWAMLAHDREYCSNYQSLPVAA

SEQ ID NO: 82645 - protein, 340 aa, unidentified
MKKAAKFYLGMDVSKLWVDIAVQCVIKQSKQPMVTERFDNTTAGMKIMGKWLKKQQVSFDDNSMLVIENTGVYHRLVWEYCSTEGLPLYIGNATHIKWSFGIARGKNDKIDSQRLCSYALKNADELKTTPVLNPVFLKLKDMMTARSRLLAQKNSMKVYLGELKLTNSKETQLIMEQVHKAALEGIVESIKIVEKQIHQMIQQDEAIRNNYELLISVPGIGHLTAVYIICCTNNFICKITGKELASYAGVAPFGNKSGTSIKGRDKVHKMANKDLKKLLHMGAISAITHYPEFKDYYERKVKEGKHAQSVINAVRSKIALRAVAVINNQEKYVDNYKKAA

SEQ ID NO: 82646 - protein, 335 aa, unidentified
MQIYGIDLAKEKFDVSFFDLTSKKVSNQPSHKVVKNNLKSIGRFLETLPSDAVLVAEHTGVYGDTLLKCCMDSNVKIAFVGGYVIHRYRATPDRAKTDVLDCALLRDFGERYPDKLKYKTFPEEALYELRQLARHREMLVEQRKQLITADKSEDCRPVRSLAVKRSMDRIKEMLDTEIAETEKEMLKVINGHESIHHNYELVKSVNGVGLITAVELLVKTDNFTKITTARQYSAYAGTAPYEKSSGKMDKGAHISKIGNRRSKTLLYICAESARLHNKEIKLYYERRTLIDKKPRHYVLNAIANKLLRIIFTLVEKGEYYDANFIRQDPRVVKYN

SEQ ID NO: 82647 - protein, 324 aa, unidentified
MTDAVLGIDVSKNTFDTNLGAGTKARSKSFANSPAGWHQLIAWLGEHKIGQVHACLEATGRHGLGIALALHEAGHVVSVVNPAQIRDFARTKLGRNKTDQVDAVHIREYAELFKPRPWTPPSPAMRRLCELQTIRAGTVAGLTEWKNRRRSGIMDDLALSLAKTTIQHFISQLEAVDQAIAETIDNDVELSAKRDLLVSVNGVGEALAGIVLAELPGPDILGSSAAVTAYAGLNPQQHQSGISVNRPVRISKIGNAVLRTALYMPALSAMRYNPAVAALVDRLKAQGRLKGKQIVIAAMRKLLVLCFGVLKTGKEFDPAMAMGK

SEQ ID NO: 82648 - protein, 360 aa, unidentified
MSFNGTSVGLDVHALSVVAHAVDEQTGRVERARLCPDHGEILDWLHRLRAPVRVAYEAGPTGFGLARALTEAQIDCVVAAPSKLIRPAGDRVKTDARDAAHLTRLLRLGEITTVTVPEADVEAVRDLVRAREDARADLMRVRHRLSKLLLRQGRVYSGGHAWNGVHQTWLRRQRFDDAHTTAAFDHHFDAVLTATAARDRLDEQIVTVAASPRWADPVDRLGCLRGISALTGLALSVEIGDWTRFTGSSIGAYVGLVPCEYSSGASRVQGSITKAGNAHVRRLLIEAAWHHRQPYRNPGPTMRARWAKVDPVFKARGHAGNRRLHQQWCRFNERKKNHVVANVAVARELAGWCWSLATLT

SEQ ID NO: 82649 - protein, 339 aa, unidentified
MLDTTTFVGLDVHARSIKAVSLDVMTGEVRAATFGYDAGAVAEWVRSVDPRARCVYESGVTGFDLQKRLSGLGVDCVVGAVSKMIKPSADRRRKNDRNDAEFLARMLSVGNVVEVWVPDDECEAARDLTRALEDARDDLSRSKQRLSKFLLRHGLVFDERTPTGRRKGNWTRAHWSWIESIRFAEGADNDVLAYYVDAVRRAAEEKARLEGLVEAEARKPRWRRRVDSLRCLKGVDTASAADLVFEAGEFSRFKNARSFAAWAGLTPSEMDNSLSIVKRINQRGITILFIEHVISAVMQLCDRIVVMNEGHLLTEGDPKTVMANPDVIRAYLGGDYGYA

SEQ ID NO: 82650 - protein, 310 aa, unidentified
MQIICGVDVSKDWLDAFVAPDHHRRFANTPDGVVDVAGFCRDHDVQLVVMEASGGFEQPAFLALWQHGQPSAIANPASVRHFAKAMGYLEKTDRIDARVIARYAQTKRLSPTSPPSCDQLKLTAIATRLRQVVADLSVQKQRLHFTRDPQALASLQEAIAFFARQAKALAAEIATLIEADPLWQALDRTLRSVKGVADRTVAIILADLPEIGTLSNKAVAKLAGLAPIANDSGKRQGYRPVRGGRTSVRTILFLVANIARKFDPTLDDFHRRLTDQGKPKMVVRIALARKLLVRLNSKARETRAQLALAL

SEQ ID NO: 82651 - protein, 348 aa, unidentified
MTVFVGLDISLDETHICVVDQEGKTLKETKVMTEPEAIAPVLRGFGDQIKRVGFEASSLSPWLSNELIKLGFPAIIVETRHMASALGAMRNKTDKNDARGLAQMMRTGWFRAVHVKSDNNHRLRILLTNRRILKRKFLDIENAIRGTLKVFGVKMTRTTRGRFEQDLTIKLADEDPMLREMTQSMLEARRTLLEQHNRCHRLVLQVVRGDDVCRRFMTVPGVGPITALGFKTTIDDPTRFKKSKTVGAHLGLTPKRYQSGTVDYEGRISKCGDPEMRTLLYEAASSLLTRVQSWSVLKAWGMSVQKRAGKRRATVAVARKLSVILHRMWLDGSEFMASREEINTAKVA

SEQ ID NO: 82652 - protein, 390 aa, unidentified
MRYFIGIDVAKFKHTACVIDADGIALVEPFDFTNDIIGFQSLLKNIKPFLKKKHLVGMEDTGHYGDNLHNFLLEKQYKVVMLNPIVTSHIRKASNKAKNDRIDCFVIANTMMNPNFYRDQQVQSIDYATIRQLTRMHHTHTEEINRYKCQLQKSIDIVFPEFNSLLNTKYSKTYLEILDTYHGAYTIANTDIRLLRNTLKNVGVGRSVSISAEQLKKAAKESIGQHNLAIEMDIPFLISLIRRLTSILGEIDKKIEEFSHQLNSPILDISGISHFSAMSIISELGDITYFSNEKKLIKFAGVNPCVYESGTYSMTHTRLEKKGSKYLRKTLYQIIDVVIRFNPVFQAFYQKKISQGKSYRCAQGHCIRKLLRVIYKILSTGENFDSAKLK

SEQ ID NO: 82653 - protein, 411 aa, unidentified
MIKENYVYVGIDLHKETHTAVMIDCYNQKLGEITFPNRPADFPKLVTKVKKCNTDGKEVVYGLENAYGYGRALAVWLIDKGYLVKDVNTAISHRQAKHRGAMYRKSDSDDAKAIALATLNMLDKLPDACPNDAYWSLGHLVHRRDNIMKQRTRLVNQLHEQLCIAYPSYKSFFNDISRPTALYFWEHYPFRKYLRGKSVEDLRKELVPVSHNKCSTKTCEKILDAVASDKVKNIDYQDARDMVTLSIVSDLQHYDSQLAEVDKMLEQMYKMLGCTLTTIPGVNVIIAVKILAEIGDIKRFSNANKLAQFAGIAPLHLSSSGKGKDVATKQGNRRLQATIYFLAIQMVQLSSKGTPRNPVVRAYYEKRKAEGKTSQQTLICISRRLISIIYGMLKNGTEYRMPVVENAGEKL

SEQ ID NO: 82654 - protein, 376 aa, unidentified
MSEIARAPVIARVGIDLAKQVIEVHAVDAAGRRAVTRTVKRNQFFAWCAQLPVGCLVAMEACSSAHHWARKLRAVGLDARLIAAHFVTPYRMEGKNGKNDATAAAAICEAASRPCMRFVPVKTCEQQGVMSLHRVREGLKEERTACINQIRGVLTEFGLVFGRSPKVLRAALTEVIEDASNELSATARLVLQRAFDHWRELDEHLRWCDQQVGQHVRASPAAKRAAKVIGIGELGASALTAGVGDFKQFTSGHQFGAWLGLVPRQDSSGGKTRLGRITKRGDDYLRTLLIQGAKAAVMTADRRDDPTSRWLARLTARVGWQKACVAMANKNARILWAVMTREEGFDPKHVSFKPPAKQSAAQRAAAAPHSLATGTA

SEQ ID NO: 82655 - protein, 343 aa, unidentified
MTKDTMIGVDLAKNVFQLHAASMTGQPKFCKKVARQSFSRFMAEQPPAVVVMEACGSAHYWAREMIRLGHEVKLIAPQYVKPFVKRQKNDAADAEAIVVAAQRPEMRFVEPKSAEQQSKAILFRARERLVHQRTELVNALRACLYEYGHIVPQGIRQITLIGEILDGPNSDLPDLMRDECRDFLEQIAEKTVRIDARTGKIKALAAETETARRLQTIPGVGPLTALAVEAFAPPMESFRCGRDFAAWLGLVPRQFSSGGKERLGRISKAGQSDIRRLLIIGAMSRLNWLGRKSIPEGSWLAGMAARKPRMLVAIALANKMARTIWALLTKNEDYRVPAQAVAA

SEQ ID NO: 82656 - protein, 333 aa, unidentified
MNTINPQDRVANGGRPNCGIDMSKQHADACWLGNELRFGNDPEGRKELIERLLADGVDLVVIEATGGYERDLVCEMQQAGLSVARMNPRQARDFAKSLGYLDKTDRIDGRCLRDFADVLARHKDRHKYITAPTDAARQELAALMTRRRQLVDMRVQEMNRLDLAGKRARRSILSVIRTLDKQIEQIDREVQDHIDDHFDGQRKLLDSFKGVGPVMILTLLAALPELGRLNRRAIAKLVGIAPLADDSGPRKGKRRIMGGRSEVRNVTYMATVAAIRHNPILRSYYQRLLAAGKAKKVAIVACMRKMLTILNAMMRDEASWNPAKHVVQTAPQA

SEQ ID NO: 82657 - protein, 363 aa, unidentified
MTDGICFVGLDVHARKTAAAAVQLGSGEVFKAQLSGAPADALQWFATLPGPVRAVYEAGPTGFGLARAARAAGVEVMVCAPGAIPRQPGDQIKTDTRDALKLARLLAAGQLRPVVVPAPELEALRDLVRAREDLRGDLMGARHRVGKLLLRRGLVWDGPGAAWSQRHLRWLGTIRFDDELVEVVFGEYLAHHEVLLARRDRLDKLLLEQSTQGSWAPTVARLRCLRGVDTLTAVGLVAEIGDITAFRHPKQLASYLGLVPSERSSGTKRRQGAITKAGSGHARRLLVEAAWHYRRPPRVSEPLKRRQDGQPPAAVDAAWRAQIRLHRRWAHLDAARAKKRTTVAVAVARELACFVWEIARQPD

SEQ ID NO: 82658 - protein, 342 aa, unidentified
MQITTIGLDIAKNVFQVHGIDAAEKVVVRKQLRRSQVLAFFKALPPCLVGLEACATAHYWARELAKLGHQVRLMPAKDVKAYVKRNKNDAADAEAICEAVRRPTMRFVQVKSAEQQGRLMLHRTRDLLMRQRTQVINALRAHLAELGIVAAQGRDGIKELLKIIASDADERLPADAHASLVVLAAELRAMQTLIGSIEKRIMTQHRGNEASKQLRTIPGIGIIGATAIAATVTDPKAFRSGRDFAAWIGLVPRQDSTGGKQKLGPISKQGDRYLRRILVVGAHSVLRRAKLSPQKYPWLTQLLARRPFKVVAVALANKMARMAWALLAKGGAYRAPALAAAA

SEQ ID NO: 82659 - protein, 388 aa, unidentified
MLLDHPCDGAAAIRTHFGAIFVSLELSRSTWLVTSLSPGKGEKMSKHSVTAGDIAGLLQLFAELKRRAQARTGQNYPIVTIQEAGLDGFWLHRALQQEGIESHVVDPASIATPRRRRRAKTDRLDGETLLRTLLAYKRGEPRVCAMVVAPSPEEEDRRRLCRERRTLIAERITHVNRIKGLLFAQGISDYAPLRRDRRVRLEALRTGDGRVLPSHVKAQISRELDRLELLLDQIKAVEAEQEALLAEARKPAGKNAPPDPVTMLLALKGMGANFAAVLWSEAFYRQFSNRRQLAAYAGLAPTPWRSGGIEREQGVSKAGNPRLRTTMIQLAWLWLRHQDQSALARWFKAHSQRGRKSAIVALARKLLVALWKYVTGGIVIEGAKMKSA

SEQ ID NO: 82660 - protein, 430 aa, unidentified
MMEEVDDAELVVERIAALDLGKAGLEACVRVPSPHRPGRRMQELRGYGTTTAQLLEMVAWLRHWGVQRAVMESTSTYWKGVYYLLEAEGFDCWLVNAREVKNVPGRAKTDRADAIWLAKVAERGMCRPSLVHPAEIRRLRDLTRYRRALVQDRTREQQRIEKLLEDAQIKISSVLSELHGVTARAMMDALIAGQRDPRALAQLAKGRARKKTAQLEEALRGFFTDHHAAILRMMLDNTDRISAQIAALDARIEKEIGPFSGQAARLAEIPGVDAVAAAELIAEIGVDMTRFPSDAHLVSWAKFCPQTHESAGKSKSKGRGRGNPWLAGTLGRIAFANSRADTFLGARYRRLARRRGKQKAIVATGNSVLTVVYYLLSDPMATFCDLGPGYYESRINVHRRARDLVTQLQALTGQHIVIRDGKAVITDAAA

SEQ ID NO: 82661 - protein, 407 aa, unidentified
MVDTTGTDLFLGLDLGKEFHHAHGRTGDGRTVHDKRLPNTEPKLLELFTRLVAKFGTVLVIVDQVANIGALPLTVARAAGCRVAYLPGLSMRRAADLHPGEAKTDARDAFVIAETARTMPHTLRAIDRDDEVLAELTMLTGYDNDLAGEVNRTTNRLRGLLSQIHPSLERVLGPRLAHPYVQALLARHGSPARLKKLGRTRCEALLKAHGSRKAHHLSGEIFDALAEQTLVVPGTEASALIVPGLAAQLAAAHTQRSQAEQEIAALLEALPLFHLLTSLPGLGVRTTAAVIVAIGDGTGFPTAGHLASYAGLAPATKSSGTSIRGEHAPHRGNRLLKRALFQAAFAAIGCKSDPSSRIYYDRQRARGRTHTQAILRLARQRVNVIHAMIRTGTLYEPRTPDDVGLAA

SEQ ID NO: 82662 - protein, 340 aa, unidentified
MSTINILGIDIGKFTFHLVGHDLSGREVYRKKFSRPKLIQVLSTLEITTIAMEACSGCHWLARKCQEFGHKVKLIPPQYVKPYVKTNKNDFIDADAIAEAAARPTMRFVSVKTESSQVISVIQRIRSSYVKDRTACMSRIGATLLEFGMSFPKSHAKMKVLFQWLAEHGEPIPPMLLLELRDHHDYYLKLNQLILAQEKKLKEIVEHDERAQLLKTIPGVGILTASRCLSDISSATDFKNGRNFAAWLGLVPRQYSTGGKPTLLGISKRGNKGLRELFIHGARAVLVRPEKAVAVFGNWILELLSRKHFNVVVIALANKLARIAWSVLSTKQAFEARVQA

SEQ ID NO: 82663 - protein, 341 aa, unidentified
MHPYFVGLDVHKQIIAYCVKKVDGQLVTEGTIKATRTALAEWVKSLPGPWVGGMEATMFSHWIYVALQPHAAELYMGHAARMKAISAGKKKSDKLDSRTIADLLRCNVFPKCFVISPELGRLRQQLRFRQLVVKQQVAFMNKTAGLLMETGIEYERRRLHGKQYFSELMATTHWVNQELKPLLKFSRQQIESLAGMDKRLIRMLENHAQLKARVAALRTIEGVGPILALSWALETGTPERFPSIKDAQSYCGLTSAFWESAGQQKRRPLSKQRNKHLQTVLIEVANLAPMYNEKLKALYQKEKAAGADSNQATLEVARKLVAYLLAVDRAFWRSAQPKRAP

SEQ ID NO: 82664 - protein, 342 aa, unidentified
MIIIGVDYHPSVQQIAWVDSETGECGERRLTHSDGQAEEFYRELKKKGVSVRVGMEATGHARWFERLLAELDYQLWVGDPAQIRAKQVRKQKNDRRDAEHLLKLMLENNFPRIWVPTPENRDVRQLLLHRHRLVGMRGRVMNQLQAIAMNEGIRRKRGLWSEKGRAQLESLQLPPWTTRRRQELLELLDRFDPSIDELSEAIQQEAERVPEVQRLQTHPGVGPITALAFVLVIGTPNRFNCGKQVASYLGLIPCEDSSADSWRLGHISKQGNALLRFLLGQAALAVARCDEQWHRQYARLSIRRNHAIAKVAIARKLAVRLFWMWRRGWDYQQLKKFGSHVG

SEQ ID NO: 82665 - protein, 402 aa, unidentified
MNAVGIDVSKGKSMVAIMRPFGEIVSAPFEIKHTASDIHSLVELINSVEGESRIVMEHTGRYYEVLAHQLSEANLFVSAINPKLIKDFDNDSLRKVKSDKADAVKIARYALDKWQNLKQYNVMDELRNQLKTMNRQFGFYMKHKTAMKNNLIGILDQTYPGVNTYFDSPARSDGSQKWVDFASTYWHVDCVRKMSLNAFIDHYQNWCKRKKYNFSQSKAEEIYGKAKELVPVLPKDAITKLMIKQAVDQLNSASTTVESLRTLMNETASKLPEYPVVMAMKGVGTSLGSQLMAEIGDVSRFTHKSAITAFAGVDPGVNESGTYEQKSVPTSKRGSADLRKTLFQVMDVLIKTHPQDDPVYQFLDKKRAQGKPYYVYMTAGANKFLRIYYGRVKEYLSSLPES

SEQ ID NO: 82666 - protein, 391 aa, unidentified
MIYVGIDVSKDKHDCCILSSDGQVLVKPFSILNNLDGFNYLYSTICSYEENSDKIKVGLEATGHYSFNILIYLLDKNLNCFLFNPLHSNLFRKSLTLRKTKTDKVDSVIIAKMLLSEVDSKPYSKALYHNEQLKSLSRYRFSKVRERAVLKQQLSRLVNILFPELEKLVPSLHIASVYALLEEFPSASLIASAHLTKMTNLLSVSSKGHYKKSKAIEIRNAAISSIGSVMPAKSLELKHTIHLIRILSEEINKIELHIQEILNEIQSPITSIPGLGFRMAAVILSEIGDFSRFDSPDKILAFAGISPSTYQSGKLDNAYAHMEKRGSRYLRYALYNAAIYVCNWDKTFADYLHKKRSEGKHYYVAISHVIKKLVRVIYHLQLTGDTYKTVV

SEQ ID NO: 82667 - protein, 411 aa, unidentified
MNVFCGIDWAEDHHDIALVDRDGGLVARLRVSDDAAGLARLLDLLAEKGDSAGDPVPVAIETPRGLLVACLRAAGRKVYPVNPMATARYRDRHSMAGRKSDHGDAVVLANVLRTDLHAHRPLPADSELAQAVAVLARAQQDAVWDRVAAHNKLRSHLREYFPGFLAAFAAAKGGIMRPEARAILAAAPTPEAAAKLTLAQLRALLRKAGRSRGIDAEAQRLRGAFRQEQMRQLPLVEQAMGRQSLALLRQLDAACQSADDLEQAVGGAFNQHPDAGIITSFPGIGALTGARVLAEIGDDRSRFQDARGLKAYAGAAPVTRASGKSRSVTHRRVKNNRLAAAGYIWAFSAITASPGARHHYDRRRDAGDRHAAAQRNLFSRLLGCLHHCLTTGQHYDEATAFPARSVTPAAA

SEQ ID NO: 82668 - protein, 392 aa, unidentified
MVISVGIDVSKDKHDCFIVNSEGEVLADVFTIPNNMDGFHYLLQRIQDCANTQNKIKVGLEATGHYSYNLLGFLLDNGLPTYVLNPLRTNIYRKSLSLRKTKTDRVDARTIASMLLSDVGLKPYTDTAYHNEELKSLTRYRFDKVKERAKLKSSISRLVCILFPELEKLVPSLHIASVYALLEEFPGAKQIAAAHLTRLKTLLETASKGHYKRDMALEIRDAARNSIGSWMPAKSLELQHTIRLIRELDDEIAEIEKQIQAIMDELNSPITTIPGIGFRMAAMIFAEVGDFTRFDSPDKLLAYAGMSPSTYQSGQLKNCYPHMEKRGSRYLRYALYNATKYVCHWDPTFAAYLAKKRAEGKHYNVALSHATKKLVRLIFAMEKSRQPYCSAA

SEQ ID NO: 82669 - protein, 349 aa, unidentified
MTIVENPTITVTGGIDTHLDFHVAAAIDSNGGVLGVETFDTTTHGYRELVAWLAGFGTISLVGVEGSGSYGAGVTRHLVGNGIAVVEVDRPNRQARHRAGKSDSVDAIAAARAALTGTATGVPKSRTGKIEAIRVLTVARRSAGDEWISIINQMRHLVFCAPDEIRARFLDLSPIKLARTCATLRPRRNSDDVVRFTTLSTLRELGRRALFVREQKERLNTEMRPLINEFAPALIEMKGVGYDTAAKLLIAAGDNPHRIRSEAAWAHLCGVAPIPASSGKTQRHRLNRGGNRQANSAIYRIMLTRMANDERTRNYIARRSSEGKTMGEIARMLKRYIAREVYKTLPTTI

SEQ ID NO: 82670 - protein, 315 aa, unidentified
MTNLKKSKTTINVGIDVGKQCLDVCIHEKGIHWQDQNNEQGIKRILKRLSHYDVERLVMEATGRYEFNLAQMAYAKNIPVCIVKPLLVRRFAGAMNQLAKTDKIDAKIIALFGFMTKPKVTPRKSKNLIAIKDLIARRRQLMSLRTQEMNRLSIMGKSFEVSCKRILKCLNTEIERMEKRLAKHVHDQAEWAEKQTILKSVPGVGDTLVYTLLADLPELGDLNKNQVAALVGVAPINRDSGKLRGKRRVQGGRANVRTVLYMATLSATLCNPVIRSFYKRLVAQGKHKKVAITACMRKFITILNAMVRDHVEWSL

SEQ ID NO: 82671 - protein, 343 aa, unidentified
MDHFAGLDVSVKETSVCIVDDTGRIVREVKVASEPEALLAVLTNPACHFKRIGLEAGPLSQWLFNALAEAGLPVICVETRHMRAVLKAQINKTDRNDARGIAQMMRVGLYRPVHVKTLRSQKQRMLLTHRKLMQSKAIAIENDLRATLRNFGLKVGVVGTVKFEARIKELVENLPDLVVLVEPLLIVRRVLREQVGILHRRLLAIVRDDDVCRRLMTVPGVGPVVALTYRATVDVPSRFRNSKAVGAVFGLTPSKHQSGESDRTGGISRCGDEMMRMMLYEAAHIMLVRSAKWSWLKAWAMKIARHRGLKKAIVALARRLAVIMHRIWVDGTEFRWTREVAAA

SEQ ID NO: 82672 - protein, 323 aa, unidentified
MSSPSPEINIGIDVSKEQLDIAIHESDTHWTSKHEFTEFARLIEQLRSLTPTRIILEASGGLEHLLVSYLATAGLPVIVLNPRQVRDFARATGQLAKTDRLDAFVLARLGAILQPAVRPLKSAETQELEALVNRRGQLVEMLTAERLRLQQAQQQRRAAIVADLKEHISWLKKRLEQCENDLSQLLRSSPLWRETDRRLQSVPGVGPITSLVLIAELPELGQLANKQLVALCGLAPHARDSGKWHGKRTTRGGRARVRTALYMAALVATKHNLVIKTFYLRLLRAGKVKKVALTACMRKLLVILNAMFRNQTSWQPPRLVQEG

SEQ ID NO: 82673 - protein, 323 aa, unidentified
MSAEVFVGLDVSKDCLDLDVYPENAPCRFDNQERDIRRLVKYLQQLQPQLVVLEATGGYERAVVLALAEAQLPFAVVNPRQARAFALSKGLLAKTDQIDAGALAHFAEAIKPPPQQMPEAQVLELRALRARRAQLQEMMTQERNRRHLTPLPVRKQIDKHLAWLEKQVQELDDSSDELLRSSPLWLEQAALLQSVPGVGKGLTTTLLACLPELGHLNRKQIAALAGVAPFNRDSGRHKGQRCIWGGRAPIRSMLYMATLCATRHNPVIEAFYQRLLRAGKLRKVALVACMRKLLTILNCMMKNGTHWQTHITTTTTNIVTTTA

SEQ ID NO: 82674 - protein, 438 aa, unidentified
MRKKKSKATKKVHFQGLALIHPNAAGIDVGSKEHLVAVPADRDPQPVRTFQAFTPDLHELAAWLKRCGIETVALESTGIYWISLYEVLEQYGFEVRVVNARHVKHVPGRSKTDVLDCQWIQKLHSFGLLNGSFRPEAQIRKLRTYMRLRDNLVVEGSQAIHHMQKALFEMNVQLSNVISDITGESGLRIMEAILTGERDPEQLASLCSIRIKASRQTVAKSLHGNWDEALLFCLKTALETYRFSQNKIQACDKCIENQLAAFEIRRALPNATHNLRTQLHQVCGVDLTKIPGIKEQSAQIIISEVGLDMSPWNTEKQFSSFLGLCPNNLITGGKILRRATRKVYNRAADTLRLCAQSLTHSKSALGAKYRRLRARLGAPKAIVAMAHHLARLVYRMLRYGENYVEKGIEHYEHKFRLQRIKWLQKEAMSLNLQVVAVQ

SEQ ID NO: 82675 - protein, 338 aa, unidentified
MDKITTIGLDLAKNVFHAVCCDERGKVIKKKMLRRSGLLTWFSNLPSSLVGMEACASAHYWARELKTLGHQVKLIPPQYVKPFVRGNKNDYNDALAIAEAVTRPEMRFVSIKTPEQQDIQALHRLRERRLRDRTALCNQLRGLLGEYGLVCSRGVNTLRQRIPEILEDSDNGLSDFFRSLLSQGYQQLTELDAHIDAYTQALEAHSKRNDACQRLRTIPGYGPIVSSAFHSVVGNGEAYRRGRDVSASLGIVPKQHSSGGKEVLLGISKRGDRYLRSLLIHGARAVVIQAANKEDALSRWINKTRAARGFNKAVVALANKLARIGWAILANNTVYQAR

SEQ ID NO: 82676 - protein, 344 aa, unidentified
MKIKLLGIDLAKNVFQLCALNQANKVLFNRAVRRPRLAATIAQLPATTIAIEACSSAHYWGRMFQTMGHTLLLIPAQHVKPFVRGGKSDARDALAICEAAQRPGLHPVPIKSIEQQDILLLHRLRQRQVHHSTALANQIRSLGREYGVIFPLGIHRLIAQLPAALEDGSNDLSPVARSALAEQLQQLQAVRQRIKALQQQIEQLVMHRPAYRDLQVLPGIGPLTASAYIAAIGDGRQFHCGRQVSAWLGLVPRQHGSGGQIQLKGMTKNGDRYLRTLLIHGARAVITRGQDNCPPLATWVQPIIARSGFNKAVVALANKLARIAWVIVTTGEAFDLKQAFKPAA

SEQ ID NO: 82677 - protein, 397 aa, unidentified
MNKIVHYIGLDVHKDSIAVSIAPQNSTEVRRYGIIGGTLDAIDKLIKKLSSQNVELRVVYEAGPCGFVICRHLRGKGIHCDLVCPSLIPKKASDRVKTDRRDADQLARLYRAGELTAIHVPDQEDEAIRDLIRARSAAVRDQRQARNRLKGFLLRLGFRYTGKSSWNDAHKRYLSGLLMPRPAQQIAFQEYIHATDDATDRVGRLTQTVENALTGWKWEPVVRALMSLRGMQVLSGMTVVAEVGDLSRFENPRSLMHFLGLTPSEHTSGDKRVLGGITKCGNAYCRHVLTEAAWHYRLRPLVSEAMQKRQEHQSKEVRLIAWKAQQRLHKRFKQLVVRKKSVVAVTAIARELVGFVWAIACKVKPAPRPPAPEVIRTCQGKVYVLDPEKKMPKTKAK

SEQ ID NO: 82678 - protein, 414 aa, unidentified
MDVKYERCCGIDVHKKTVVACVIVPGAKRGEVEKETQTYATMADDLGALGRWLQSKGVTHIAMESTGVYWKPVFNLLEGQFAIVVVNAERIKALRGRKTDVADAEWIADLLRHGLLPGSFIPSAQQRALRDVTRFRTSMVNDRVRAVNRLQKTLEDANLKLASVVADVTGVSARAMLDALLGGQTDPQVLAALAKGKLRQKTEQLQKALAGTLRPHQRILVGELLSQIDYLEEALARLDREIATMMQPFQAELAQLDSIPGVSQRVAEVLIAEVGVDMTPFASAQRLASWAGMCPGNHESAGKRKTGKTRQGSPWLRRALTEAAHGAARTKKTYLSAHYRRLAARRGSKRAIVAVGHTILTISYHLLTRHTTYQDLGPNYFDERDREGVKRRAVRRLEQLGYQVALSPSVSVAT

SEQ ID NO: 82679 - protein, 391 aa, unidentified
MIYVGIDVAKDKHDCFITNSDGEVLFKSFTIPNNREGFETLFQKVQSVSDDLTKVKVGLEATGHYSYNLLGFLLDKGLPTYVINPLHTNLYRKSLSLRKTKTDKVDAHTIASMIMSDVNLKSYSDTSYHNEELKSLTRYRFDKVQERAKLKTSVSRLICILFPELEKLVATIHMASVYALLSEFPSAHAVASAHLTRLTNLLSESSHGRYGKDTAVMFREAARNSIGSNMPAKSLELKHTIKLIQELTSEIDEIETEIKSIMDEINSPILTIPGISYNMGAMIIAEIGDFSRFDSADKILAYAGMSPSTYQSGQLDNCYSHMEKRGSRYLRYALYNATKYVCHWDESFGTYLAKKRAEGKHYNVALSHATKKLVRTIYAMEKTGQSYSSAS

SEQ ID NO: 82680 - protein, 352 aa, unidentified
MKYYIGCDAHKKYSVFSVVNERGQAGGPERVQHDKELYRKYLNYLPAGSKIAIESVGNWYWMIEAMEQAGHIPILVNPKKAKLLMGNINKTDKLDARGLAMLNLNGSLPEVWIPPAELRDQRELSRMRISMVGVRTQFKNRIHATLAKYAIEFNEVSDIFGKTGRALLQEAIRELPPETKNSVEVQLKLLDQVSGQIEELENHIRKVVKETPAMQLIKSLPGVGDILAIVIALEIGDIDRFRSPQHLASYSGTVPRVSSSGDKTRYGRVRSDVNHNLKWAYIEAANCVALQQERQAGRHAVQLMKRIQKQKGYPKAAVAVARHLAEATYCMLKKNQPYQEPNLRKTVLSSQG

SEQ ID NO: 82681 - protein, 436 aa, unidentified
MKNSAARKLRQVPVGYLRVGVDPHKKRHAAVAVTEDLVVQSKFKFANSKRGFEEALERTKADMVKGGCRGVIFAIETAGHYWRNLAYFLDNNGIPFRLINQFSLKRRREGKELNRRKNDYRDAEVAAQLLSSGEFTETRLLQGIYAELRAAYNAYRRLVKERTRITNLLKSLLDGLFPEFTQVFKDPCGRTALTVLLTCPIPRVIAAMTEDAFVETIRAEHCGRLMKRKLRALHYAAGTSVGIEAGAHSVFLEVSFLVEKLHMITSHLARLDAALTRLVDETGEGKYLLSIRGLNYIAVAGMLAELGSFRSYRNARQLIKMAGSNPTESESAGKRGTHTPMSKKGRPALRYCCWTAVIPILRHNTDFRAWAKRLRERPVHAHPLNGREVVGAALNRLLRLAFTLVRKQAFYQMPQMAVMASQEVITLHQVGRDTPI

SEQ ID NO: 82682 - protein, 370 aa, unidentified
MKKHSYIGLDVHKESISIAVAEGRRNGEVRDYGMVGGSLIALERALRGIKKEGVELHCAYEGGPLGFVIYRRFKAPGVDGAVVAASLIPRKPGERIKTNRRDAIKLARSHRAGELTPVHVPDARDEAIRDLCRARTDAVRDQRRGRQQLKALLLRLGYHYTGKSSWTEAHLRYLRELEMSHPAQKVVLEEYLIAIGQAEERVARLSEQIQLQVATWRLKPAVEALMAMRGIQLIAASVLVSELGDLRRFAHPRQLMAYLGLVSSEYSSGNSRHQGAITKCGNTHARWFLIECAQHYALPPKVSKELSQRQQHQSQRIKELSWKAQTRLHRRFWALMQRGLCRQKAVVTVARELSGFIWAMMREVPVPKPI

SEQ ID NO: 82683 - protein, 422 aa, unidentified
MSKRRYHATKFDKVNWAAIEERSAGQRIVFAVDVAKDDFVGTLMGEDRMPIETVKWTHPQQTQALVVQVVNTFDPAHLEVAMEPSGTYGDSLRWLLVNAGASVFWISPKRVHDAAELYDGVPSLHDAKAAYLIARLHLDGVSQPWHEPSEQRRSLSAQLGLLEMYRERHQHSLSRLEALLSRHWPEVIRQIDIASATLLKLIAAYGDPKSVVLHAEAAEGLMRRTGGVGLRPEKIEQVLEGARHTVGMPCIDAEHHVLQTLAQDMIDTREALRRVEKALESQVEADPILEQLSVVVGKTTSAVLLSSQESPRAFANADSYLKSLGLNLKERSSGKHKGQLKITKRGPGVARRYLYFAALRWIKRDAGIQQWYQRKVARDGGLKSKAIIAIMRKLTKALWHVARGERFDPGKLFNNKAVTTPA

SEQ ID NO: 82684 - protein, 406 aa, unidentified
MYIGWDWATETHDVTVMDNSGARVDRWELAHSEEGLARTLARLRRHGDPADMPVAIETSRGLVVDRLLAAGHPVVPVHPNAFHAMRARWGASKAKTDAGDSFKLADYLRSDGHLLPRLEPTDQTTLDLQALTRQRADHIEARIAAVNQLAALLDAHWPGGKAVFASLDSDIALDFLDRCPTPAAAAKLTAGRLQAWCRRRGYSGKKPGSELIERLRSAPAAASRLSEQAVTQLVRVQVQLVRAIRTTIRELDKAIEAAVATHPYAPLLASMPRIGTVNLAQILGELGPILERAQTCEQFIAETGVVPVTRASGKSHAVTFRHATNRRARLAITLFADNSRHGSNWAAKIYTDARARKKRHPHAVRILARAWLRVIWACWRDGTCYDPTIHQTNSKTRNTDSAPQPA

SEQ ID NO: 82685 - protein, 421 aa, unidentified
MTRKIAGIDIHKNVLMVVVATVLEKEIDGGMEQQIEYEGRRFGSGTQERGHLVAWLREHQAEEVVMESTAQYWKPVWMDLEVHFPKLHLAQAHSNKAPKGRKNDFADARRLTRRMAAGELILSFVPDAEQRTWRTMTRGKQQLVRDRVRLQNQTEALLEEMRIKLSGVVSDLFGVSGRRILEALAGGETHPEKLADLGDDRLKCGREALVDALTGHSEPMHLQILKLSMERLKLLDRQIEALEQMAAGALKKHAAAVTRLAGVPGFGVDSAQQVIAEVGSDAKSFPGAGELASWVGTIPGSDVSAEQNHSSRSPKGNKFLRRIFTQAAQAAVKTKGCHFQNVFRRLVPKLGYKGAIWAIAHRLCRLAWKILHDGVSYIEQAAETTPQAKKRRAQRLTQALRRLGFQVAITPIAPKAEVAQG

SEQ ID NO: 82686 - protein, 344 aa, unidentified
MKKVLIGIDFSKEKFDVAIIVKSTSMQVHAVFDNKVSGYRKMIKWIKSVVEEKTCSSWLFCGETTSGYSCMMSDWLYAQGYDVWIENALTIKRTFPLKRIKNDAVDAFMIAEYALRFEDKAQLYEPLSPALSGLRELFLCRHHLVRHRYSFQVRRIEKRFTQEKSPIKNTISQSARHIITEINKEIAKCDEKIKEYIESDDQLYSIFAIVTSMPGVGTINAVSLMVYTNNFTKFAYNPRKIACYYGIAPFGRDSGTSVHTDPRVGFIANKMLKSLLTQAALASVRTCPQIAKYYQRLIERGKKPMVALNNVKNKMIAIITAMVRTGCMYQPDNICLATQSVIVK

SEQ ID NO: 82687 - protein, 371 aa, unidentified
MKENSTFIGMDVHKNSIDIAIAPKSRKAQVRHYGKIDGTLAALDKVVRKLVSQGDRPHFVYEAGPCGYQIYRHLTAKGFECSVVAPSMVPKQSGNRIKNDRRDSLMLARLHRAGELTAVYVPVIEDEAIRDLSRAREDAKGDEKKSKQRLLAFLLRSGHRYSGRSPWSQAHMRWLADIKMVHPSQQIVLQEYIDTLSHCTLRLQRLTEQIRQLLPQWRLFPVVQALQSLRGVSLIVAATTVAEIGDFKRFQNPEELMNYLGLVPSEHSSGEKTRRGSITKAGNSHVRRMLVEAAWAYRFRARVSRALLKRQEGLPQEIRDIAWKAQVRLCARYRHLWAKGKVKQVVTTAIARELCGFIWAIANETDVPMTA

SEQ ID NO: 82688 - protein, 476 aa, unidentified
MRKNKGAKAKAKSEATKTLGELNPDAAGIDLSPTEIWVAVPPQRAQNSVRKFGGFTEELKAIVRWLQECGVRTVAMEATGVYWISLYQLLEDAQIKVRLVNARHFKNVPGRKSDVRDCQWLQYLLSVGLLLGSFRPAQAICATRSIWRYRQELLSTAGQYIQHMQAALDQMNIKLHYVIDDLTGLTGRAIIEAILKGQRDPVQLAKLRDKRIQAPESDIVKALEADWRKEHLFVLQKAWESYQQIQQQIQHCDQELWQYTRQLEAATQLIKPAKMMRLKPQLLSTEPEANPKEQKPRKARKKTSKNQPEGPWKEELERFFGVDLTAIPGISVLTGLTLMTELGNDLRDFKTEHHFASWLCLCPGNETSAGKVLRRATRPSQNRVRHALRMAASSLHHNKSFLGHKYRRLRTRLGAPKAIVAMAHQLARIIWILLTRQVPFDLSLFAHQEKLNQQRRLKSLQASARQMGYQLTPLAA

SEQ ID NO: 82689 - protein, 309 aa, unidentified
MFSYAGIDVSKDSLEVQVNLLEAGIRCPNAEGDFPGLIGWLMLHQVGRVLLEATGGYERKVMKALQAAGFDVIRINPCRAKNFAKAMGQQAKTDPIDARLLAQFAAVIKSPDSRVTSAEQDNLRALVQQREHFVQQMDDDRRRLKTASSEAVKPALQSHISYLYKAVKSIEKLIDQSVQALDRERMSHLCSVKGIGLVTAASLMAYLPELGEVGRHQIAALAGIAPYNDDSGQHKGKRHIGGGRFAARRSLYMACWSVIRFQPDFNARYKALREKGKCAKVALIACMRVLLVRLNAMIRDGSDWKGRAA

SEQ ID NO: 82690 - protein, 492 aa, unidentified
MAKRSKSTFERLSGSRRKRTQRRDLRRRVAAGDPGLTIVNPHAGGIDVGNASHFVAVPPDRDAHPVQEFGSWTADLIRMAEWLKACRIDTVAVQATGVYAIPLYDVLTEHEIRVVRVNAQHTKNVPGRKSDVPECQWLCQWLMKLHTYGLLRDSFRRDEKMQSVRTIWRLRDRHVKDASGAIQHMQKALTKMNIQLANVISDIRGVTGQAIIAAILQGERDPYQLADRKDERVKASREEVARSLAGNWRDDLLFELQQAVDSFHFAHLQMQECHRKLENFLASLPTRTLDIPSEPVGAKADTVLKPRKAKRAKKPKRPRGNEPTLDLEGELKRICGVDLTSIDGINVITAQTIIAEIGTDLSGFPTENHFASWLGLTPGKDISGGKVIGRGRRKVQNRVAAALRIPATTLLESKSYLGGRHLRRPLPSKTAAVKAMARHPGVLVYRLLTYGQAWVDRGAAKFEQKRAELELARLNFQARTKGYKLTPITQAS

SEQ ID NO: 82691 - protein, 360 aa, unidentified
MIKCNRKSEKVYIGMDVSQKTIEMYAVCGDKKAADIPKIETNKEAIGTFLNELPDPSRVCIVMETGTHSGWMSRYIESRGFEVIVAHARDLALIYCSDKKNDKIDAEKLARLAQADKSLLHPIQHMSEERQRDLTVLKSRELLVAQRTKIVNSIRGQLRSLGYSDKGFTVENMKNAYDLLPDEIKDLFAPLLQSLNMISHGIKTYDQKINQLCKKYSATKIVRQITGIGPIISLAFVLIVGNPKRFRNISSISSYFGLAPKQDQSGETDKQLSISKSGNKLMRRLLVQGSQYIMGSFGPDCDLRRFGERIAARGGPIAKRKAKVAVARKLATVMLTRWKTPDIAYDPDFKKNRRKQKKVA

SEQ ID NO: 82692 - protein, 411 aa, unidentified
MDIVVDRCAGLDVHKDTVVACVRVPGSGRQRREEIATFSTVTVGLLALRDWLVAHGVTLVGMESTGVYWKPVFYVLEDDVECWLLNARHLRNVPGRKTDVSDAAWIAGLVEHGLVRPSFVPPKEIRELRNLTRYRRAQIEERSREAQRLDKVLQDAGIKLSSVATHILGVSGRAMLVALVEGTRDPEVLAELAKGTLRNKIPALRDALMGRFSAHHALLVGQVLAKLDFLDEMTANLTGEIDRLIAPFEHQVDLLTTITGVDRLSAQELIAEIGVDMGRFGTAAQLASWAGMCPGHHESAGKQRSGKARPGPKWLQRTLTQCAKAAGRSKGTYLGALYARLRGRRGPAKATKAVGHSILVAAFHMLRDDKPYEDLGPDWFGRLRPEQHARRLVHQLEALGYNVAITTTDAA

SEQ ID NO: 82693 - protein, 414 aa, unidentified
MRRCIGLDVHREFAQVAIWEDSVVRQAGRIQTTPEALREFADSLCLSDEVALEATGNTYAIARLLEQHVGRVVVSNPQKTRAIAEAKVKTDKVDAAVLAQLLAAGFLPSVWLPDEATFALRRQVVRRAHIVRQRTRLKNQVQSILHRNLIPRCPAADLFGVKGRAWLATQDLPQDELQAVGALLRQLDFHGQELRIVDADLGRVGLEHEEVRRLLTIPGVDATVALAIVAAVGDFGRFSSPQRLVSYLGLNPRVRQSGGHPAQHGRITKQGRAHARGMLVEAAWAAAKTPGPLRAFYERVRARRGMQVAVVATARKLATLCWHLVVTGQDYAFARPSLTDKKLRALELRAGLPARRGQRGKAAAYSLKAVRRRERALAEQAEVAYRQLVAGWQPKPPAKQQPKRGVAATTGTRR

SEQ ID NO: 82694 - protein, 371 aa, unidentified
MKSILSVGMDVHKNSFSLCAYDGYTGEIVSESTFASDVKLVIKFIEKLKSRYENDVEIKCGYEAGCLGYSLYKSLTARGVDCVILAPTTMQVSAKNKMVKNDRMDALNIAKNLTSGSYKAVYVPDEEDVEIKEYIRMIHDFKKELKRVKQEICAFVLRHGYQYDGKSKWTIRYMNWIRELEMSEIQRETLDEYLAEMDNLNDKIERFMNRIDEMYQSDRYNEKVSELRCFKGIDTFAAMTIQVETADFERFPNAKAYASYTGLTTGEHSSGDKNNRIGITKQGNTVIGKTLVECAQSLVKGNVYTPKSKRPKSRQKGMDVNIIAYADKATERLKKKYQKLIERNVPRNKAIVAVARELACFIWGMETGNIH

SEQ ID NO: 82695 - protein, 482 aa, unidentified
MRHTSTAALTEGETPCLSSGQMQSESSAFRELKADLRTRRDRLRVGIDIAKRQHVAQVRLAHTRILEQRFDVANTGADFERLWRHLQQRQAETGVTEIVCAVEPTGTYHEALAQFLEAHGVDVVLVANQVAHHNRRTLDGTWGKSDPKDAHNLCDLLERGVVLFYSLPDERIATLRRLVRLLRAARVELGACKARFRNTLLPRLGPAGDAVPPALLAVLPAPLRRLCPVPAETPRRRGRPRTADPGGEGGAPAGPLPPGLAGECTDLVARLTAVQARLATIEAELVRVAQPLPAYTLLRTIPGIGPTLGAILLAELGDIAWYTHFGQLRKLAGLDIQRVASGQWAGTGRISRCGRPLLRWALYQAALGAARTPCWRARREVLIAKRQGDRFAFLKANVELAAKLLRLVWGVWRSGQPYDPARVDGAPAARPAIASPKARAGRRGAPPLDKGQAEIVEPRGNQAGRSSGRRALRPRSGTSRRA

SEQ ID NO: 82696 - protein, 334 aa, unidentified
MSKNINNVVEADYYLGCDVAKLKLDVSLIESRSGRELMHKIVANSTEAIGSLLEECLAEYSGSLQCVVEATSTYHFNLLYAAEELGIPVRVYNPIITKSGIKTGVRGKKTDRTDALLIARMGLRGEGRIHVPEDYRTVKYYARGCQKLSVMDSAFSKYKTHFTDLVEDELTPEFTELLSGVKQAITEARTQLYKDLSESAQSESFRLLQTIPGIGEYIAASILGEVQDIKRFDSSKALIAYAGLDPKIKQSGKALNSTGRLTKRGSSYLRRSLFIAANVARMHDIQLKELYEKKRKEGKTHKVATCVVARKLVKIVWSVWKNGKDYTVPEETES

SEQ ID NO: 82697 - protein, 393 aa, unidentified
MRFAGIDIASETHVVALVAADGSVELKATPFGEDDLGYQKALALLGTPGEVLIAMEATGHYWKNLFAVLAAAGHAVALLNPLRTHRFAGVDLERTKTDAIDALTIARFAAQKRPAATTVPDALTEELRELVHLRQRLLQDFGDRVRQLHRLVDLGFPEFTRYVRTLDSELASAILRVYPTAAAFRGVSVRRLAALRYDGRHHVGLDLARLLTEAARRSVGQHHSATYRLQIRYACDDLDTLRRRLRDLDRDLDGKLREHAVGRLLTTIDGIGTHTAARVIATVGDPAHFRSGSALAAYVGTIPALKQSGKRQSVRGAVTPIGNAQLRAALWMPTLTAVRCNPWLRAHYQRLLARGKLPKVALVACMHKLLLAIYSVAKHRRPFVPNLTAPATP

SEQ ID NO: 82698 - protein, 422 aa, unidentified
MLEETQETEELIARVAALDIGKAELVCCVRVPSPDTPGKRLQEVRTHTTMTRSLLVLADRLGELGVTRVVMEATSDYWKSPFYLLEAHGFEVWLVNARDVKHLPGRPKTDRLDAVWLCKVAERQMLRPSFVPPPAIRRLRDLTRYRADLVGVRTAEKQRVEKLLEDAQIKLSVVASDIFGVSGRDMLAALLAGERDPKALAQLARSRMRAKLGQLEEAFTGHFSDHHAFLLQTMLGRIDQASADIAELEAKIEEEIGPFAQAVDRLDEITGVGRTAAQVIIAEIGTDMGRFPTPGHLASWAKFAPGVKQSAGKTSGKATTGHGNRYLARVLGEAAVVAGRTDTFLGERYRRIARRRGSKKAIVAVGRSILVIVWHLLADPTVRFQDLGAGFYDTRSSPERAKRNHIRQLEAMGYKVTLEPAA

SEQ ID NO: 82699 - protein, 409 aa, unidentified
MRSSNDAFQTDPPFERPWTAPATVAYWPRWNGHRPPFGEVGMIEGLQNRTASMCQSGAATQPLEERRPQMNATTYGLDIAKRVFQLYWVDAQTGEIANRRFGRDDLIAFLARRPAGRVALEACGSAHWWARKIRALGHEVVLLHAQFIRPFVQTNKTDAADARAIWTAVQQPGMRTVAAKTEDQQAMLSLHRMRSQLVKFRTMQVNQLRGFLYEFGVTFRAGRLAGLAEVRERMVELEDTLPRSIILNLQDQLRRINAFEDDIDQLEKRIGAWQKQEAACRAISEVPGIGRLTATALVATIGDARTFKSGREFAAFLGLVPRQNGTGGKIRLGSISKRGDPYLRTLLIHGARSVLCHTKVPTAWQKGIQERRPGNVVAVALANKMARIAWAILAHASSYEKNHVSVRPA

SEQ ID NO: 82700 - protein, 353 aa, unidentified
MRTYYVGMDVHRASIVIVVLNGAGKVVMESVIETGAERVRGFLKQLRGKVSVTFEEGTQANWLHEVVRPLVTEVVVCDPRHNKLLQSGNKNDRVDAKKLAELLRHGALKRVYHGDHGVRTLKELVRTYDCLVSDSTRVMNRLKAIFRGRAIACAGHEIYRPERSGQWLAKLGEPGAKQRAGFLYEQLAALKPLRRKAKLAMVKEVRRQTAYLWLMSVPKLGSVSVAQLIAVVGTSHRFRSKQQFWTYVGLAVVTRSTADHEVVAGVLRRSQRPVSTRGLNRNHNHLLKRVFKNAATSACHSGPFKAGYDVRVARGMAPSLARLTIARQLAATTLAIWKRGEKFDPERKKQQAV

SEQ ID NO: 82701 - protein, 427 aa, unidentified
MAYRVAAIDVHKKMLAIVVADVAGEGEYQFERRKFGATPAQLHLLAQWLVQQEVEEVVMESTAQYWKPVWGALERFWKPERQKREGATKMSGTLHLCQAKSNRGPRGRKNDFADGERMIKRLVAQELVLSFVPDPEQRLWRTVTRRKYQLTRDKVRFQNQLESLLEQAHIKLSSWVSDLLGLSARRMLKALAEGETDPAALAALADSRLRATPEQLRDALGACTQLHGVYRRLLKMALEELKMMEEQMEQLDREALGLLQQHQDTVKRVAEVPGFGVDSAVQMIAEVGAEAAKFDSEKALSSWVGVCPGDEESAGESQSTRSPKGNRNMRRLLNQAAHAAIKVKGSIFDVTFRRLLPRLGYKQAIWAIAHRLCRLLWMILHKGVRYEERGPAVSAKSKRTRTARMIRELQKLGYRIEGAPLPAGNPA

SEQ ID NO: 82702 - protein, 444 aa, unidentified
MSKVSTLAVLDPRAAFIDVGSEKLHVSIAGGPPEIFGTVTAELYRLRHWLKEAGVHSVAMEATGIYWLPIYSVLEEAGLEVLMVNGKQIRNLPGRKTDMQDCQWGATLHAHGLLRAGFVPSAEVRRLQDYLRLRGDHITNAASAIQLQQKALERMNVKLHDVISSLAGFSGQRVIEAILSGERDPERLLKLCDQRIQDKKADRVKESLRGNWQVEHLFALKQAVETWKHYQKQIEACDREVERVLREISGPPGADEKKSGQRKPGTNAPQIEDLHRLLVRWCGGKDLTVLPAHTDYSWLQLLGEVGTDLNAWPTEKHFTAWAGLAPGTHQSGKYKRSVGRKRNRTGRLFCVMARSLARSKHLALGGFYRRMAARRGGLLAIVALARKLAEWFWRLMVRGVSYVEHGLAKYQEQVLETKRRTLVRLAKQLGHLVVPNFTAANPST

SEQ ID NO: 82703 - protein, 426 aa, unidentified
MKNSKNDKIQLITHKTLIVGIDIAKKVQWAQFTDYRGLEVSKHLKFNNDLTGFKSIIQKIEEIKKNKDFSAVIVGMEPTGHYWKPLGAFLENSGIKVVLVNPAHTKKSKELDDNSQTKNDRKDALTIAKLVKDGRYSEMYLPKEEYSELRALTLTRIEVSKTQNSTKNRIRALMDEYFPEFETVFKTFIEGKAALHLLKNCPFPQDVLKLKELEIQELLKEVVKKTVGIKKIKELQNVAKTSVGITLGIEGAKVRLKVLLENYEQNVKHLELIENEMEKQLQKTGYLEVLTSIPGVGIVSASSFLGEIGNPKRFSNPQQIVRLAGYNLVENSSGLHKSKTSISKRGRKNLRSILYKMALVLVCKNKEMKTLYNYLRTREKNPLKQKQALVVIAEKAVRVMFNLMINRNNYDETKVLGEFRLKQIAA

SEQ ID NO: 82704 - protein, 421 aa, unidentified
MNKRIYRATHVKQVNWRKAIQTTAGKALVLAIDVAKEEQFAMLMDADSQSHLLVKWTHPVETPVLLKHLATLTSQQLEVAMEPTGIYGDTLRRQLALAGYRTYQVSAKRVSDAKEIYDGVPSLHDAKAAYLIGRLYWSGVGQPWQESSAQQRELKALCNRYELHNEHYGRNRNRVEAMLQRHWPEALVYLALDSVTLEYLLIRYGCPQALARYSTAAAALMRKVSCGKLAPEKIHGLLEDSRNSIGIPCVEEERRYLQQLGEELRRSRLHQKTVRKQLQGLIDADEQLQAMSAVVGPLTTAMLLSNRLDPRHYGNAGAYRKGMGLNLKEKSSGKFKGQLKLTKRGSGQVRKYLFFSCLRLINHDPIVQRWYQAKVQANGNRGKLRYVVALMRKLACALWHVGHGEAFDARKLFTVKPVVSA

SEQ ID NO: 82705 - protein, 392 aa, unidentified
MYIVGIDIGKNHHEASIVSPEGKQIGRSLRFATTHKGADSLMSFIFKNIGNSPCVFGMEATGHYWYPIYSFLKAKGYTIYVINPIQSDSLRKMYIRQTKNDSIDSFLIAEVIRFGQFGTTSMADENILAMRQLCRYRDSVISSRTEIKLRIGTIMEQIFPEYEKQFSSLWVSTSMGILEKYLTPENIENAPIDELFEIIKDKSHNRLTRAKAISIKEAAADTFGIKIAQDAFSFQLKQLIDRMNFLDKQIEALDCQILEYYEKFDCYLHTIPGIGIIGAATILAEIGDISRFKNSSALVAFAGIDPTVRQSGEFNSTHNHMSKRGSPYLRHAIFLVATTCSFHNSPLNAYYKKKRDQGKHHLTATGAVARKLTTVIYAVLRDSKPYEPKKFC

SEQ ID NO: 82706 - protein, 309 aa, unidentified
MKEELVYLGVDVAKSYLDLAIGNEKRRLPNDQTGHRELIKWVKQIKAPVQVICESSGGYERKFVQALARAQIKVSLVQANRVRQFARAAGILAKTDRIDSEVLCAFGKMMRPQMVTAATLEQEHLRELESQRRHLTRLLVMEQNRGARVSDACVVRLNRSLVNQIKKQIERLDLLIRNHIQESAELSTKAAKLTAISGVGARTAALLLAQMPELGQLNRREVAALVGVAPFNRDSGKMRGKRAIYGGRRFVRHGLYMAAMVAARHNPILREFYQRLRAAGKPAKLALTATMRKLLIVLNSSLKPDLNYA

SEQ ID NO: 82707 - protein, 371 aa, unidentified
MGDNVRTKFVGMDVHQKTISIAIADDGPDGEVRLYGKTKNTAEAIDKVIRKLVSTGAELHFVYEAGPCGFALYRHLTGNGFCCIVAAPSMIPKKSGVRIKNDTRDAIALARLHRAGELTGIYVPDTEDEAMRDLTRGRNDARIAARKAKQRLLSFLLRNDFIYNGKKKWTKSHYNWLALLKMNHPAQQVAFQEYIEAVNECTERIARLDEQILKAADEWRWAPTVKALQALRGVSLLTAVNMVAEIGDFNRFQNPKELMAYLGLVPSEHSSGDRIRRGGITKTGNSHARRICVESAWSYRYQARITQLLLKRHEGLPKDVLQIAWKAQLRLCTRYRRLRARGKASQVVVVAIARELVAFMWDIARRIPAVA

SEQ ID NO: 82708 - protein, 340 aa, unidentified
MQVTTIGVDLAKNVFQVHGITESEEVVFNRPLRRAQFLSFFEKLDPCLVGMESCSSAHHWARKLTALGHEVRLIPPMYVKPYVKRGKSDAIDAEAICEALTRPTMRFVAIKTVEQQSLLSLHRARDLLVRQRTQLINGLRGLVAEFGIFIPRGLARVISFAEDITLGEVLDLPEIANEVILNLSEQLMSLHKRIRWYEERLKLVAKEDARVRLLRTIPGVGAVTASAIIASIGDGHQFQNGREFAAWLGLTPANKSSGGKEKLGRITKMGDQYLRSLLVVGMTSLVRQTRSHPERASKWLTSLLERKPARVATVAMANKTARIVWAVLTRNEPYNPRAAV

SEQ ID NO: 82709 - protein, 360 aa, unidentified
MKRVSTKSVSVVSDKRVFIGIDVHKDSWHVTARTDGEEVFNGRIPASYHSLMKLLERFRDCQISVAYEAGPCGFSLYDKLIEDGIATKVVPPSLIPIESGNRVKTDKRDSRKLARLLESDMLKKVFVLTEEERIHRELIRTRRQLVDHRGSVARQIKSKLLFYNMSSPFPSRYGWGRPYLQWLRGIVCQSHYLKESFEILIDLYEYLTKEIKRITKSVIDLSRTDKYAQRMRLIWSIPGIGILTGMEILVEVQNFARFKTSEEISSYMGLTPSEYSTGQHVRQGRITRCGNTRVRVALIESSWILVARDPFMRAKYLKLKSSKGAKRAIVAIARKLIIRIRAMLLQNAPYRTDGSMLQAA

SEQ ID NO: 82710 - protein, 340 aa, unidentified
MDKPDLCGMDVSARELVVMVRRDGKTEPARSFANTKAGHQEVKRYLTRQRTGVRVCLESTGLYGLDIALLLQADTRIEVMVANPRAVKDFARALMHRSKTDPLDGLVLLEYAARMPFQAWQPPAPAALQVTALGRRIHALTQQCTMEKNRLHAAASTQTTLPAIMRDLRRSIASLETAIARLSREAHKIIAANAPLARRFLLLQSAPGIGPVSALQLLGELSLVPANCDARQWVAYAGLDPRQHASGSSVHKKVGISKVGNRHIRRALYMPALTAARHNPHLQCFYLHLQTLGKCKMVALVAVMRKLLHAIFGMFKHNALFDGAKLCPCFSHQEVFAQTS

SEQ ID NO: 82711 - protein, 342 aa, unidentified
MREKRAIGIDLHRKRFTCCVRLENGRNYLSEWSLEQLPQFVSKLRRSDEIAVEVTGNTRWFYQAVAPHVARIVVVDPNQFRVISHSVKKTDAHDARNLALYLAKGLLPEVRMKEKEQAELASLTQTRDRLVKLRTALKNKVNHLLSARGIELAKESLSSEKGLTWVLEQKLEPLTQFELEVIVEQIRSLNGSIARLEHAIEEAGKKLDGYSNLTSIKGIGSLGASILLSVIGNVNDFAHEGKLAAYFGIVPRVQDSNQTEHRGRITKRGSKLGRTALVQCALIAQRYSPYLHCYYERIRARRGTGKAIIALARKFLGVIYHTLKNNWTFEDFPNFVLAGAKT

SEQ ID NO: 82712 - protein, 338 aa, unidentified
MRYFVGIDLHSDNSYVGVIDKNDSRIFGKKLPNDLGLILKELKPFQTEIEGIVVESTYNWYWLVDGLQAAKYKVHLANPAEMQQYSGMKYTDDTWDSYWLAHLLRLGMLPEGYIYPKEIRLIRDLLRKRTMLVRHRTAHILSLQNMVNRNTGKKVNVNDAKRLSEEKISEQLTDEHHKMAVQSDKAVIDFFHEQIDRIEEAVLKEVKLRYPYEELLTVPGIGTILGITIMLETGDINRFPTVSDYSSYCRCVSSQKISNGKKKGEGNKKNGNKYLAWTYVEAANFMRRYSEPARSWHQRKAAKTNKIVAIKALSNKVARACYFIIKDQTPFDPKKLFQ

SEQ ID NO: 82713 - protein, 381 aa, unidentified
MTTAVTHHEPENTIEATLFVAFELSEKTWKLGFTTGHGQKPRERTVTARQQERVLDEIVQAKRRLGLPETATVVSCYEAGREGFWLHRFLQGHGITNHVVDSSSIEVNRRRRRAKSDGLDVRKLLSMLMRYHHGERHVWQVVKIPSVEAEDQRHLHRDLETLKQERASTMTRIEGLLSSQGLRVTSLTKLPEQLDALRLWDGSPLPPGLRRRVLRVYAQYTFLSEQIAAVEAERRALLQTSPEASIDKVRQLMQLKGIGINGAWLLVMEFFGWRAFKNRREVGALAGFTPTPYQSGESAREQGITKSGNRHVRWMTTELAWSWVRFQPDSALSCWLRERFGGGGKRLRRIGIVAVARKLLIALWRFLETGVLPAGAVLKEG

SEQ ID NO: 82714 - protein, 347 aa, unidentified
MNKRDDCGVEVSAKRLLAGLEREGAPRARREFPNTPEGHEALVRWLAASVSRRMRVVMEATGLYGLDLALRLDAAPSVEVMVANPRAVRHFAIALMKRSKNDPIDTDVLVEFAQRMPFQRWVRPSPAALALHALARRLESLTEMHAAEKNRLHAAQLSPALPAAVVRDLKRSLRSLERALQRLTRQAVEVMGQDPDLNLRYQLLLSACGIGPTSAVQILAQLAVLSPDLDVRQWVAQAGLDPRQYSSGSSVHKKTRISKTGNRHLRRALYMPALVAIRHEPHLRAFYRHLVERGKAKMQALVAVMRKLLHAIFGMFKHQQPFDGTQLYRLPEEPSLRQPTFSTAEAT

SEQ ID NO: 82715 - protein, 324 aa, unidentified
MNKVKEFVGVDVSKDTLDFYAEEVGHVQVSNDIHGYKQALKMYGKAAVYVMEATGSYHHILCLYLYEQGVNVCVVNPLSVKRYIQMKLCRNKTDKSDAKMIAMYGASEDPKLWEPAAAYVEMSINIQGVVSKYFRERTSLKNKLHSLESKGCKKGVVIQSLKRSIKRLTSEIKKLEAEMERLVKENEPELLSNLQSIPGVGRKTAMLLISGTDGFRRFEHPNQVISYFGLAPMEYSSGSSVRKQSRICKTGNPQIRNHLFLCSFTASQHNAQCRALYTRIVAKGKSKKLALVAVCNKLIKQSFAIAKSGLPYDAEYRSMAPQMS

SEQ ID NO: 82716 - protein, 340 aa, unidentified
MAMVAGFDVHRRQITIDALDTDTAEVHCARIPSTPEAVRAWVHRFPDREIHVAVEACTGWLFVCRALEASGAVAHLAEPAETRARRGSKRRAKTDREDARWLRTLLCEGRLPEAWIPPEHVRQWRARSRLRKTLVDERGAWLQRVQATLFHHGVQGTPERLLSADGRAFLERLELPQDARERIDLALSMVEAIDRELASIERQIRQLARRQRGCRALMELFGVGELTAPAILTELGDVARLRRSRQAVRCAGIDIGVHRSDRRSRVGKLTRQGSPHLRWALYEAAQSACRPTSPDHAELLRLKERMSHTRASLTIARKLARRSFHVLRELGPAALEPLED

SEQ ID NO: 82717 - protein, 335 aa, unidentified
MHYLYYVGLDVSKETFDASLVAFEDANEMAHRKFANSRKGICSCLHWVEKRHGILLDDVIFCAEDVGSYISEMAVCASDRTLTFNFSLISPLVIKYSMGIARGKTDRVDARRIAEYAITHYRKIALYLPAEKELCQLRTWLILRAYLAKQRVAKLVLLEKLDYKEKFADVSIQRSMLQEEIAYAETHMKTIEREMKELIAADSNICRNYKLLTSIKGVGPITAIVMLCSTLNFTKITDHRKFACYCGLAPFEHSSGTSVRGGCHTSSMANRDIKVQLNRSALIAIRCDPQLKAYYERKVAEGKHKFSVLNAVRAKIAARCFAVVRRGTPYVALQI

SEQ ID NO: 82718 - protein, 385 aa, unidentified
MRSEATRAGETIVGGQVLYMALELSERTWKVLFASPAGRRRERSVAARDVAALLEEIAAAKRRLGLSAQARVVSCYEAGRDGFWLDRALRANGIDNLVVDSSSIEVARRARRAKTDRVDLVKLMGLLLRWVRGEAKVWSVVRVPSAQAEDIRQLSRSIERLKGEHGRHVTRIKALLATQGLKLARIGGRDWGKRVGELRCWDGSALGTWLQRDLVLEGERLAVVADQLAALKAERDRLVAEGREAAAVKARELARLGAIASESSFVFATELFGWRTFANRRQLAGSVGLTGTPYSSGESAREQGISKAGNKRMRTMLVEIAWCWLRYQPTSALSRWWQERFANTGGRARRIAIVALARKLLVALWRYLEHGIVPQGARLKTRAAA

SEQ ID NO: 82719 - protein, 356 aa, unidentified
MTHTNKNPSTIGIDLAKNIFYLHALDAQGETLWTKTMRPQNATVFLGGFKPCIIGIEASGGSHYWHRTFTSLGHNVRMITPQRAKAFREGQKNDKNDAEAIAHAVTNKQTRLVAPKAIEQQEVSSINAMRNLQIRQRTQMINHVRGTLNEYGIPCKKGAYWFETHIEGILQKETDGESLPDVVIEGLLTQIVTLKGYKENIKKFDQQILALSEEETCKRLKTVPGIGPVVSTMLYGHGGKGTHYKTGSDFAASLGLVPRQYSTGGKQIHGKITKRGNIGLRANTIHGARSVLSAANNKRKTGVPPENALIAWGLQCYDRMGMNRASVALANKMSRIAWKILKIPGEVFIPSKPQAA

SEQ ID NO: 82720 - protein, 358 aa, unidentified
MENTVKQLDYSGTNIYIGLDTHLKNWKATVRVGDTFYKTFSQDPDARTLFEYLRRNFPGGNYFTAYEASFNGFKAHRELTKLGINNIVVNPADIPTTDKERKQKEDARDSRKIAEQLAASKLEGIHVPGIEREGDRSMVRFRKTLSKEIARNKCRAKSFLYYHGIRIPERFANRARWSKRFTVWLEGLDLPTESSRATLTSIIELVLFIRAKQYETLKSIKALSRTERYREDVELLTGIPGIGPITAMVLLTELGDISRFRDLDGLCSYIGLVPMTDSSGEFDSVGHITKRQNKTLRSMIVESSWIAIRNDPALMLAYQKLVKRMRPTKAIIRISKKMVNRIRYVLKTRTPYVKAVVE

SEQ ID NO: 82721 - protein, 341 aa, unidentified
MSIKRILVNTIDTDLEYEVIGIDLAKNCVSAILLTTDGEIFGIDRLDYQELEKSAQELSPTIFAMEPCTEMNYMVQKLEDWGHHCIVISGKNVKDYVESHFSNQKTDLNDAQALAFLTKDTQLRTVKAKDPEQLKYASLTTLREQYVKQYRQTMVSLKGICQVWGLSISKGISGKARLKDMIENHAAFPAELRTALVGMVAHAQAVQKDLKSVTKILEELAKKDKACQLIQTVPGLGTICSCRLRATVGDIQRFKHPKDFPAYYGLVPRSMATGHNEKKGKITHRGDKTMRSLMVQGAGIVINQATKGNLNSKQLTKWILKKQKEKMPWGKLVCAVTAKLL

SEQ ID NO: 82722 - protein, 373 aa, unidentified
MKKNITGTGMPRRKQQAREQKREELTIGIDIGDRSSSYCILDETGEVRVAGSLKTTRASLRECFGKLQRSRVAIEAGTHSAWVERVLGECGHEVIVANARAIPLLTANSGKRDPIDAEMLARMARVDPKLLRPIRHRSPEAHGHLMMIRARRILVETRTKLMNAARGLVKPLGERLPSCSPAAATVRLAEELEAAARAAIEPLLKAVEALNLQIQEADKRIEAIAREHYAEEVRRLTQVKGVGTLVALTFVLTLEDPARFRKSREVGCYIGARPRRDQSGESNPQLGITKEGDQYLRTLLVNSAQYILGQFGPDTDVRRWGLKLCARGGGNARKRAVVAVARKLSVLLHRLWVSGEAYEPLRNSRTAAPAAAA

SEQ ID NO: 82723 - protein, 260 aa, unidentified
MVLIGCDFHPSWQQVSWLDQETGETGDVKLAHETATVEKFYRQFPAGARMGMEATGNCQWFLELLAKLGHEAWIGDAARIRASDARQQKHDKRDARLILQLLAENRFPRIWVPSREQKDLRQLLIHRYKLVRIRAQVKNGMQHLAMNQGLLRKRKLWSVAGQQELRGLALAPWGSRRREDLFRMMNELDGKIILLDEAVGAAAEQDGRARLLMTQPGVGPITSLAFVLTMGDVARFKRGKQVASYLGLIPREYSSGAISG

SEQ ID NO: 82724 - protein, 409 aa, unidentified
MERVVERGCGLDVHKKSIAACVRIPDERGQRRQQVRTFGTVAAELLALRDWLEAHGVTHVAMESTGVYWKPIFYVLEEAFTCVLVNPVHMAQVPGRKTDVQDCVWIAQLLEHGLLRGSFVPPAPIRELRDLTRYRKTITQERSRAINRLHKTLEDADIKLASVATDVLGVSGRAMLEALVRGNTDPDVLADLARGALRKKLPALRQALSGRFHPHHAFLVSQILAHVDYVEEAIEAVSQQIDVVIAPFTSALERLSTIPGVKKRTAEVILAEIGPDMSTFPSAAHLASWAGLCPGNNESAGKHRSGRTRKGTPWLRTALPEAALGAIRHGRGALATRYRRIMRHRGHKKAVIAVAHAMLVVVDHLLTRQTTYHELGDDYYDRRHAERSKRRALETLERQGYRVVLEPTA

SEQ ID NO: 82725 - protein, 455 aa, unidentified
MQTFYLGIDASKGYADFIILNRYKKVVVESFQLDDTFDGHCLLYELLMNFSTDHPDSIICAALESTGGYENNWHNVLLEFQGTLNLQTARLNPLGVHHNSKADLKRNVTDKISARNVAEYMIAHPEKVSYQPQDHLASLRKQWGFVKMLTKQCTQLLNQLESLLYSANPEILTYCKDGVPAWVLKLLAKYPTAANLARAKMGSVSRIPFVSTAKAEALVLNAKKSVASAVDEVTQQLVAATVKQILHLKETIKIQSAIMARACAVPEVELLKTFIGISDASAIGLMLNIQSVKRFKTVKKLAAFFGLHPKLKISGDGVSYVRMSKQGRAEPRQILYMVAMAAITRNPLIREIYQERVGQGMEKMAAIGLCMHKILRIVYGMLKNNRPFDPEIDWRNRQKPISQRKQKQNKIRRYQDYDFKAPISRRQKAKRMEQRQSQSDNGAECGILAPVPFPT

SEQ ID NO: 82726 - protein, 309 aa, unidentified
MGAEPEVGMSFAHAAGGGPTETEVCAHEGPDRSRSPQKASVAVAAVDEATGELLERASFPQDRAGLSALERWAKQFPERRRAMENARGLGRHLAGRLAASGESVVDVPPKLSARVRVLSSGNARKNDGLDALATALAASRNERLAAMDPEAEKEVLRLLSERREDLVAERTRALNRLHGLLRDLLPGGVAGKLSAYRAARILRGIRARGRASDRLRRRLASEVLRDVRTLDRKIADLNARVEAEVEASGSTLTEIFGVGPILAATILGTVGDVARFPTKAHFASYCGTAPVEASSGKVVRPQALAGRES

SEQ ID NO: 82727 - protein, 340 aa, unidentified
MGEVSTIGLDIAKQVFQAHGADAAGGVVFRKRITRGKLLEFFASQPCCVVALEACGGAHHWARELARLGHTVRLIAPAYVKPFVKRQKNDAADAEAICEAAQRPSMRYVAVKTEEQQASALVFRARDLLVRQRTQIINALRGHMTEYGWVAPQGPAHIDGLVELIADPASLPEAASPVLLLMLETLRALSEQIATLDKEIGRRAREDEMAVRLMTIPGIGPITATALIALAPPVESFAKGRDFAAWLGLTPLQKSTGGKQKLGSITKMGERTLRRLLIIGASAVVRHASKRGAPEGSWLAGMLARKPRMLVTVALANKMARVVWALLVRGEDYRAPAVTA

SEQ ID NO: 82728 - protein, 392 aa, unidentified
MEVQDETGRRLAKARLPEGISGIARLHALVGRFLPEDSDPAEVKIGIETDRGPWVAALVASGYQVYAVNPLQSARARQGNGVSGAKSDAGDAHVLADLVRTGCHQLRTVAGDSEQAGAVKVLTRMHQTLIWDRTRQVLRLRSSLREFFPAALEAYEDLASPDVLELLTKAPEPSRAAALTRAQITAALKRAHRRDREAKTTVIMAALRSEHLTQPPLIAAAYGATVRALAAMITTSNEQITALEGPVEACFGQHPDAEIYLSQPGLGPILGARVLAEFGDDPTRYGGARARKNYAGTSPITRASGKKKVVLARYVRNKRLADALHRQAFCALRRSPGARAYYDALRDRDIGYNAALRQLGNRLVGILHGCLKTHTLYDEAVAWNELAQQVAA

SEQ ID NO: 82729 - protein, 375 aa, unidentified
MKIIGCDYHPSFQQIAMLDTETGEVTERRLYHGNGEAQRFYESLSGPVLVGVESSGNMLWFERLLARLKQELWIGDAAAIHWQNPRKQQLTDKRDAQHLLDLLVEKRFPRIWVPSVEERDLRQLLKHRHTLVQMRTRVKNQLQHIALNQGLQKKSKLWSREGQEWLKKLELAAWTQRRRDDLLQMLEDLDRQVKQMNQEAEKAAAARKDAQLLMSHPGVGPILALATVLTLGDVSRFQCGRQVASYIGLVPTEMSSGQHRWLGSITKQGNSFMRFLLVQAGLSAVRGDAELGRVYKRLVQKKHHGVAKVAVARKLLVRLYWMLRTQKQYPEVVRMQGSLSHPVAAAKADRLSGRPASRPEQQDQKPKKEKRKQQK

SEQ ID NO: 82730 - protein, 385 aa, unidentified
MRDKTFVPTDYDVFAGLDVDKKSISVTFTDHQGFIRSLHMPYSVEHLVNHVRKHFPDQKVAFAYEAGPTGYGLYDGLEAQAYRCLIASPSMIPKAPGQRVKTNRLDSQGLSENLRGGQLKGIHVPTAVYRELRHLTQLRDTLVSEVVATKLRIKSLLLFEGIHFPPAPAGSQWSFMVRAKLRKLPCSSTVRFKLDQLLDGLEFSEKQVLKTTKEVRRFCQNDSELSQCIKYVMTVCGIGWIVASQLLARIGDWRELKNVRQLGGFLGLVPTEHSTGDRTDRGSITRTGDGRLRSKLIQAAWSAIRQDGELREFFRSICHKHPRHQGSRVAIVAVARKLTTRISVVLMQQRPYVVREKVHSAPLTQEETSPQGTTRREPEPGDKNS

SEQ ID NO: 82731 - protein, 311 aa, unidentified
MEHSRFVGIDISKDHLDVHVRPTGDSFRVRYDDAGLVTLVEHLRPLAPVVLVLEATGGYEVTVAATLASAALPVAVVNPRQVRDFARATGQLAKTDTLDARVLALFAEAVRPAARPVPDAQAVALGELIARRRQLVDMLGAEHNRRRLLRDRRLQRHLEAHIAWLEEALRRLDHDLTTLIRSTPVWRETDDLLRSVPGIGPVTAGTLIADLPERGRLDRRRIAALAGLAPIARDSGAFRGRRMIMGGRAHIRRVLYMATLTAITHNPVIRAFHQRRVAAGRPGKVALTAAMRKLLTILNAMLRDRRPWHPA

SEQ ID NO: 82732 - protein, 409 aa, unidentified
MDVLIERCAGLDVHKRTVVATVRSPGAAGTRRSVTQSFSTTVAGLQALEHWLTTEQVSHVAMESTGVYWRPVYAVLEATLEVCLVNPRAVKHVPGRKTDVRDSEWLAQLLECGLLRASFIPPPLIRDLRDLTRYRKVLIRERAHHVNRVEKTLELAQIKLGSVVTDLMGKTGRAILSALLAGETDPALLAGLAQGLLKKKTLALQAALTGGLRPHYAFLLRQQLQTIDHLTHQIAALDEQIAQVRAPLAPQHHLVCTVPGIAARASEAILAEIGTDMARFPSPGHLASWARVCPGTRESAGKRGVTTTGKANNWLRAALNEAAWAASRTKRSYYHALYHRMKARQGPKKAIGAVQHAMLRAIWYILTRGVPHDDLGADYLGARDAARTQRHHVRRLELLGYRVVLEPAA

SEQ ID NO: 82733 - protein, 357 aa, unidentified
MERYIGLDAHGTSCTFGVIGPSGRKLRNDVVETNGAALVSHLRSIPGRKHLCLEEGTQSAWLYEILSPHVEEIVVAGINESRGQKSDVLDAFRRAEELRTGTIKTPVFKAPRLYSRLRELARVHSMLVRDVVRVQARLKVMYRARGIPTPGRSVYSPSGREQWLSRLPVSSRWATEKLHETYDQLLTLKREAEQELLTEARKHRISRVLATAPGLGPIRVAQLVPIVVTPHRFRTRSQFWAYCGLGIVMRSSSDWVQSPAGGWVRAQVQQTRGLNRKHNSTLKNIFKGAATTIVTQLHADPLYEHYLRLTSAGTKPNLAKVTIARRVAAIVLRMWKDEKEYDPGKLKQQASLASAVS

SEQ ID NO: 82734 - protein, 345 aa, unidentified
MQDDLVLGVDTHKDVHVAAIVDAVGRLVDTAEFASSDRGGQQMLAWVRRHGCLRRAGIEGTGSYGYRLTKLLRANGVETIEVNRPDRSARRLRGKSDPIDAEAAARAVLSGRAAAIPKDREGPAGALRALMVARRSAVKARTQATNQIRALLVGCDDDLRKRLNELLGRALARGCARLRSTEGTRSALRSLGRRWLNLDREAGDLEGEIALIVTRVAPRLLDRPGVGVLSAAQLLITAGDNPRRLRSEAAFAALCGASPVEASSGRTSRRRLSRGGDRTANAALWMIAHVRMVRDEKTRSYAASRTERGNNRKEIMRLLMRYIARELYPIILESLTPEPALDDVA

SEQ ID NO: 82735 - protein, 348 aa, unidentified
MRNQPLGAVVYGIDLGKTRFDVVGCDAAGRPIQRVKFSRDTLLTFFAAAPTALIGMEACPGAQWMARKLGELGHTVRIIPAQFVKPFVKSNKNDARDAEAIAEAVIRPTMRFVEIKPCEQIDLQALHRVRDRIVGNRTQLICQMRAFCLEYGIAIRPGTGAFKLDIARIITDEANDLTPAMRGLLKELWEELKIVDIRLAAVSRHVEVLAARHDAARRLMTIPGIGPIGATALIAAVGDAHQFRKARDLAAWLGLVPRQHSTGGKTILLGISKRGNPYIRRLLIHGARSCMIHLDRSRDRIGVWLKALDARMHRNKAIVALANKIARIAWALLRRPHTLYERVAPAYA

SEQ ID NO: 82736 - protein, 350 aa, unidentified
MGEPRSLGIMRNDDDALRSLLRKLGPASRLRVCYEAGPCGYVVHRFLQRLNIHCTIVAPSLIPRKAGDRIKTDRRDALMLARLLRSGELTATWVPDREHEALRDLVRAREDATEDHLRARHRLTKFLLRLGIMPPEGVRSGSVRHRQWLNQLTWEHGAQQLVFTEYRQSLEEIEQRITRLEREIATAAQASAHRATIAALQAMRGIKLVTAATVVSEVGDINRFRSPRELMAYAGMVPAERSSGGRVRRGSITKTGNAHLRRVIIEAAWHYRHQPLVSGDLRQRQSTAPAQACTIAWNAQQRLNKRYRRLLARGKTSHQTVVAVGRELLGFVWAIAKTVQTEPKPLATAA

SEQ ID NO: 82737 - protein, 342 aa, unidentified
MEKVSIIGLDLAKRSFQAHGALADGGVGFRKKLSREKVLGFFAEQPRCIVAMEACGSAHHWGRAIRDLGHEVRLIPPVYVKPFVKRQKNDAADAAAIAEAASRPTMRFVAVKTEGQQARAMLFRTRDLLVRQRTQLINALRGHLSEHGVVAAQGPANVKVLEEVVEDQTTSLPLLVVELARVFLDQIEGLSKTIAKLEKVTAQEAACAETTRRLQTMPGVGPIAALAIETFAPPMDVFKRGRDFAAWLGLVPRQHSTGGKQVLGKISKMGQRDIRRLLIIGAMAVVRSALRKGAPEGRWLQRMLARKPKMLVAIALANKMARSVWAMLAKGEDFRVPTVAAI

SEQ ID NO: 82738 - protein, 475 aa, unidentified
MNKIFLGLDVSKGFADCTIIDNNGTNLIKPMRLPDNNSGYNLLLKTVSGLKTDQELLCYAGMESTGGLETHWFNLLFNKKEIFDKAFVFNGYRTKHYQKALNERNKTDAVSSKVIAQYIRNNHENMLEAKPHLYHQYKKFLYTIKDYDVLKTKSINQLRQILYEFFPEFSSLMPDKFYDCHLRFLMAFPSRKAVLKAKKKTLMKIPYIKEDFVDRLVKLCKETILIAQPINDFAYVHIQKLARDIFNYKKDIDLYFEKLSQALPKEQIDLLCTIPGVGKQSAISLLILIGDVKNFDSGKKLSAYFGVHPVSNNSGNVEMSRMSKQGNPYARQILYQIVFQMFKQSSFFNPYFEKMIDKFQEKKKKAAGAMMQKVCRIIWSILTFNKPFDCERFKHDREMTAKSKEQTVDNTNLFFKDNNLKYEDWETSMPNKIKKKLIKAKKREPQDNKLSSTGSSRPSSKIENNETPKISQEFS

SEQ ID NO: 82739 - protein, 404 aa, unidentified
MEYNAVGIDVSKGKSTICIGRPMGEVVASPFEIKHTKADVDNLIRRINGLDGDTKIVMESTGRYPLPLLTRLSDAGLYVSMVNAKLIKDYNPDNSLRNVKSDKADSKKIMAYTLDKWLLLKQYGAMDKIREQLKIVNRQFDFYMQQRISLQNNLIAILDLTFPGINDCFSSPIRPDGHCKWADFAYTYWHTECVCGKSLNAFTEHYQNWCKKHGYIFKKEKASDLYQFSKELIPVLPKNDTTKQLIRQTIDVFMSMSAAVESLRKQLDQIASQLPEYPVVMAMNGVGPTLGPQLMAEIGDVERFTKRSAITAFAGVDPGVDQSGTRNKKSVHASKHGSPELRKTLFQIMQILIQLAPDDDPVYDFMIKKRSEGKQYFVYMTAGANKFLRIYYGKVKEYLAKQKL

SEQ ID NO: 82740 - protein, 310 aa, unidentified
MDIIAVGIDVSKDRLDVALRPSGEIFAVERNASGLDRLIERLRQLAPRIVALEATGGFETVAAAALASASLPVVVVNPVQIRAFAKALGQRAKTDPIDAAVIAHFAEATRPEPRPLPDEATRLLADLVARRRQIIEMIGAERQREKRTSMPRLRKSIGRVVGMLEKELAGLDADMDDAVRGSPAWREKEDLLASVPGIGTTIARTLIADLPELGTLSRKQVAALAGLAPFARQSGQWRGRSFIGGGRASVRTALFMGALVAMRHNPVLKGFFERLRAAGKPKMVALIAVARKLLTILNAMVRDNKRWQNA

SEQ ID NO: 82741 - protein, 353 aa, unidentified
MEQFIGCDAHQEFSLFIAMNQEGQYGKPIRIAHDRERMREFLEALPAGSKIALETSGSYYWLVDEMERAGHQAQLAHALTAKRRMEGRHKTDERDARGLAMLLRNGTLPRVWIPPAELRDQREMLRWRMCLVESRSQIKNRIHGVLLRYNVEARASDLYGDAGRAELHDLLAELPEWTRQSVSEQLETIDRLDRQIEDCEQKLEALLEASAERDLLKTMPGVGPILSAVIALEIGDIGRFQSAQNLASYAGLVPAARESAGKKRKGKCPADCNTYLKWAFIEAGNVVAVHHKKWPGRHVAELYERVEKSSGMHGKATVAVARHLAEASYWMLTKQQIYREPKGNRQALSSTHG

SEQ ID NO: 82742 - protein, 316 aa, unidentified
MQSALCIGVDVAKDNVVVACSQETFAPRIVPNKPAALKTFLRSLPPQCCIAMEATGSYHLGLADLAHQLGLRVFVLNPRDLSHYAKGVGLRAKTDRVDAALIARFLANEGARLRPYQPATAEQRQIDGLLRRRARIVSLRTALQLACSETLSIRAETASVLKSFAVLLKKIDLQLATLQQAVPERAEQVARLKTMPGVGALTACWLANLFDRVKFRNSDALVAFAGMDPRPCDSGQKRGKRRLSKRGPAEGRRLLFNAAMSAARTSAWKETYTRFRENGWTSTEAILILARKMLRIALAMHKTQTGFDPECIGQRA

SEQ ID NO: 82743 - protein, 381 aa, unidentified
MLKYSVGLDISSKSINGCLSTIDNGQKVTVKTTQTFANSKAGFKSIDTWIRKNHKDQSIPLVICMEATGNYHESCALYLFEKGYSVSVVLPNKAKNYLKSLGNKSKNDSIDAKGLAQMGAEQCLSIWSPFGRYFYELRSLTRHHQSLQEQKTSSKNQLHAIKNGMYSSKAVEKQLENMIKLIDKQLEQLETTIKNLFQSEEEVWEKVCNICTIKGVGLLTTAIVLAETNGFELFENSKQLVSYSGYDVIENQSGKHNGKTKISKKGNARIRRAMFMPAFQAVTYQVKPFCNLFNRTFEKHGLKMKSYVAVQKKILTTIYALWKNNTPFNQEYQPKISKEQELELPSPVSFAKAEKSSADQVGTTQGKHPSERSLHASSPVS

SEQ ID NO: 82744 - protein, 346 aa, unidentified
MMIIGCDFHPSWQQITWLDSETGETGERELVHADDEARVFYQQLVVPTLIGIEATGNSQWFVEMVEDLGHVVWIGDAAAIRASYVRRQKTDKRDAAHILKLVVEGRFPRLWTPDREQRDLRQLVLHRHKLVEIRSRVKNELQHLAMNKGIQKKRKLWSQAGQQMLRELPLKPWAACRREDLLGLLAMLDQQVGELDAAVAKAAEEDAGARLLMTQPGVGPNTALAFVLTIGDVRRFRRGKQVASYVGLIPHENSSGDRRRTGAISKQGNCMLRSLLVEAAQVAVRCDPGMRKQYLHRCHQKAKGVAKVAAARKLAVRLYWMLRTQTAYPEIVFIESSSRVPLVGAS

SEQ ID NO: 82745 - protein, 365 aa, unidentified
MNQCIYVGLDVHLNSITAAVLEDDIQAPQVVRLSGDLNQTRRLFRRLARKGPVRSCYEASGAGFVLQRVLANDGFHCDVIAPSLIPRKPGDRRKTDRLDAVNLVRLYKSGHLTPVHIPSREQEALRRLIRLRYEYVRYTTGTKNRISGMLRHHGLVFSEGKTNWTQIHRRWLARTRDELDGAMRTALATELEHLEYLETQRGVLDDEITRYAQSPTYRTDVEALCCLRGIKTLSAMSLLAEIGDVRRFHSSTALMAYFGLVPSERSSGERERRGPITRAGNTHCRRVLVEAAWNNHHRSGADLVLKRRRQGQPPEVVAIAVKAQHRLYKKFWRLDHRKHRHVAVTAVARELCGFVWAVLNAAPRH

SEQ ID NO: 82746 - protein, 359 aa, unidentified
MVSKVKENKINFKGKMVNIGVDMHKLSWRITALVEGDVVLAVNLAKPKYDSFIQLISRFEGNYVRIVYEAGPGGFDLYDKLTDDGIDCIVTPPSLIPTESGNKVKTDKKDSHKLARLLESNMLKKVWVLSPEERAHRQLVRTRRQIVNHRSDVMRQIKSLLLFHGIEVPFSSRQQWTGRFIKWLHEIDLGDEYLNGSLKTLVHLFDYLSAEKKRLTSEVIELARKDKYVSKVKLLKSIPGIGALSAIEILVEIQDMSRFETADELAAFLGLTPSQYSSGEHIRMGHITHMGNDRVRTTLIESSWILINKNPLMRKKYENIKYRRGGKRAIVAVARSLSACIRRILLDQVPYEIDFKKAA

SEQ ID NO: 82747 - protein, 422 aa, unidentified
MKNTAARKLKQVPERYLIIGVDPHKKKHAAVAITQDLTIHDRFKFDNTREGLEFMLQRVKTVMVKSGCRGIMFAIETGGHYWRNIAYYLDERGIPFRFINQYTLKRRREGKDLNKRKNDYRDSEVAAQLLCTGEFVESGIPQGVYAELRTAHNAYRRLVKERTRITNLVKGLLDSLFPEFVHVFKDPCALTALSVLSTCSTPGIIAVMTEDQFIAVIEAQHHGRRLMRRKLGELRNLAKTSIGIEAGARSVAAEISFLVEKLELIRGHIWTIERTLVGLVDEAEEGKYLLSIRGLHYIAVAGLLAELGCFKSYRSAKQMIKMAGSNPTESESGGKRRSRTPMSKQGRPVLRYCAWTSVIPMLRLNPDFRAWAKERRERPAHANPLSGREVVGAALNRLLRLCFAMVKNQTYYRSPQLVEVTE

SEQ ID NO: 82748 - protein, 354 aa, unidentified
MYTLGIDVHKHTSTAVLIDDAHESLFEQTIRSHPKDFNRLLKELPVPPVTIQVALEPVGPWRWITTLLEESGMEIHIANPRKVRLIAESKQKTDSNDAHMLARLLQSGYFPEARKVPDDVYQLRLLLRERQHVVRMRVSTINRMHGIATTQGLYKIAYGNPNTKVGKASIMEGNNSVLQELHILIEELDKRIVVFDNACAETVKTLPTAQLLMTIPSVGVITALTVLAEVGNFSDFSHPKKLAAFAGLVPKQRSSGKVVRNGSITHQGSPMLRTALVECAMRIHQKGAPELYSFVARLKENGIGAKKARVALARKLLCIMWSMVINNQEYHPQSVLPVSVCNTTMSNLDTRTGT

SEQ ID NO: 82749 - protein, 354 aa, unidentified
MITSLSPGSGEKISKHAVRGGDITGLLARFAQLQDKAQARTGRHFALVVIQEAGLDGFWIHRILEAEGIESHVVDAASIATSRRRRRAKTDKIDGEALVRALLAYKRGEPRVCAIVRVPSVKEEDHRRIGRERKVLVGERTCHVNRIKGLLFAQGITGYEPLRRDRRHRLEELRTGDGRALPEHLKGQIRRELDRLELVIAQIKEVQAERDALLAIEVAETPAATLLDLKGIGPECAAILYAEGLFRHFDNRRQVAAYAGLAPTPWQSGSVQHEQGVSKAGNPRLRTTMIELAWLWLRNQPSSALTRWFHERVMRNQGRLKKTTIVALARKLLVALWKYVTAGVVIEGAVMKAV

SEQ ID NO: 82750 - protein, 402 aa, unidentified
MIFINCLGIDISKSESVVAHYKDEVLVKEMVIQNNQNGYRYLKNYIKHLDSLFILFESTGIYSRGMKRFCEIHKIDYLEMNPLEAKFKMSSLRSWKTDKSDAHKLALLAFRMKDSKVQRQSEEIYFELRERARFHLEMEINQNRLKVELVETLHQTFPGLEKLFTNRYSKIALNIAKAFPHPDFVSTLTHGELVEKVLHSTDKGISVNKAHKYVQKLIEIKNNSFPNVDKSSFLLQKVQYLCDKLLIGIEEMKEFDQEMIDLAKNTTEFKNIISIPGIGELTATLLIGELGNIREFKTNKQLNAFVGIDIKRYQSETSKSRDTINKRGNKKARRLLYLIIMNIIRGRNHYQSHIVDYYYKLREQPHGKTHKTAVIASINRLLKTIHYLIVNDKLYDYQKAPH

SEQ ID NO: 82751 - protein, 356 aa, unidentified
MDKVIREEAVRVGVDLAKRVIQVHAVDATGHVLTSRALPRARFIDWCVRLPAGCVVAMEASSSAHHWARKLIALGLDARIISAQLVEPYRMEGVSGKNDANDAAAICEAASRPKMRFIPVKSIEQQSMLCVHRLREGLKEDRTACINRIRGLLAEFGLVFPQSPRELQAALSDVLEDAGNELGTLARLTLQRAQAQWRELDDHLAWCDERIDAHRRSNPEVQHAATLIGIGPVTASAAIATVGDFKQFKNGAQFGAWIGLTPRQRSSGGKNNLGGITKRGDTYLRTLLIQGAKSAVMTAHRRQDKISSWVLALRERSGWQKAVVALANKNARILWAMMTRGDVFDPNHLSVKPTAC

SEQ ID NO: 82752 - protein, 349 aa, unidentified
MKHFAGLDVSLKETSVCVVDEGRKVVKEGKVASEAEAIAAFLKQIGLPIELVGMETGSLAPALYHGLVALDLRVVCVDARHMKGVTSVMPVKTDRIDARNIAWAMQAGWYKRVHVKSLATHKLRMVLRSRKILVDLRLDIDNHIRGVLKAFNLKVGKASPGSFEKRVQELVADNADIAAVIETLLQARAELVRRVEVLHRMVLSLTKRDPACRLLMTVPGVGPVTALAFCTAIEDPRRFSKSALVGAYFGLTPRKYASGEIDRTGHVSKCGDTMVRSLLFEAANALLTRVQSWNWLKRWGLEVVKRRGKRRAQVAVARRLAVIMHRMWLDRTDFRWSRDGETPTAAAAA

SEQ ID NO: 82753 - protein, 408 aa, unidentified
MVVREAELEQVSAVWAGVDAGKEHHHVAVLDPEGSVVLSRRVANDEPALRAVIAEVAGLAGRARWAIDLRDGAAALLLALLAAAGAEIVYVPGRVVHRMTGAYRGEGKTDAKDARVIADQARMRADLAPLVPGEELVTELRMLTARRADLVTDRTRAINRLRAGLLEISPALERALDFTCTGPLILIRGYPTPAAIRQAGEQQLTAWLRGQHARNAARLAAAAVAAAASQTVRLPAEDVAAELVTELAGEVMTLGARIRQIDLRIQDRFRRHRAAAVITSLPGIGTLLGAEFLVATGGDMAAFASADHLAGYAGLAPAPRDSGRRTGNLHRPRRYNRQLNRVFYTSALVSITCSPQSRAFYDRKRAEGKKHTQAVLALARRRVNVLWALLRDNRPYMPPAPVIAAEAA

SEQ ID NO: 82754 - protein, 367 aa, unidentified
MQNTIVHYEGAASLEAAATKVKPGGAQIKIGLDVHARQYVAVAQYDHLLPKAARRLSPGEFVPWVKVLLGQGHSVHVVYEACGFGFSLYRQLIAAGAHCYVIAPRKLDEACSRVKTDPRDATTLCQRLSRYLEGNTRELAVIRVPSQEEERARHVSRQRTQLVCHRQKLEAQGRSLLISHALPAPAHWWKEQTWTRLGQHLPVWITIRLQMARPALLSLQEQINALTSELEASASSTLSRGVGKLTSVMLTREICDWHRFNNRRAISSYTGLCPGERSSGSKRVPGSVTKRGNPRVRAALVECAWRMVRFQPQYPPVQKRSGILAKGSHALGAVRKKAIVAVARRLAVDLWRLHTGRCTAEQLGLKL

SEQ ID NO: 82755 - protein, 437 aa, unidentified
MVAGLDVGSSEHWVCGPARADGTPNVRVFGTTTDELQALAAWLADQGVESVAMESTSVYWIPIYELLESRGIEGVLVNARDLHNVPGRKTDMRDCQWLQLLHSCGLLRGSFRPGEAITRLRALQRQLANLVAERTRCVQWMQKALDQMNVQVHRAVTDLTGATGLAIVRAIVGGERDPARLALHRDYRCRKSAAEIARYLTGTWRAEHLFNLASALRLFDALETEIALYDARLLQEIETLHPPARQAEPVPPHPNPAKEKAIKARGEQAARTTLWRFAGVDLTRIDGISAGAAQVILTEVGPNLAAFPSEDHFVSWLRLCPRTPISGGKPLKNRRNGLGANRIAGVLRMAATSLQRSKTALGASFRRIARHKGGAVAVFATARQLARLIYRMLRYGHDYVDIGEQAYDHQFQTRRLAALAETARTLGYTLVPKAAAA

SEQ ID NO: 82756 - protein, 415 aa, unidentified
MALKIVYKICCGIDVHKTFVVACIASTNDKGVTSYESHRFSTYTSGLKTLLQWLLDRNCKDVCMESTGKYWIPVYNILEKDCSIVLAHPKYVKAIRGKKTDKKDAKWIADLFKHDLVAGSFMPPADIRQLRDLMRYRFKLTCFQSSEKNRLQNCLTVSNIQLGNVVSDTFGKSAQAILDKILENPEDTSFDLEPFVYRSLKKKLPELRDAIDGYITPEQAGKLKVIKAHYESLESRKAELEELILALAAPYQQELAILQTAPGISSGFTAIGIISEIGTNMEAFPSAKHLCSWAGLTPTNNESAGKKKSVRVSKAGCYIKPLLVQCANAVVKSKKHPEIRNRYLRLKKRRGHKKAIIAVARMLLTALYHMLKNGENYNAELYRKSDLPPIDCEITVEQALIIARNQGYRIKSATA

SEQ ID NO: 82757 - protein, 405 aa, unidentified
MKVYIGIDWSSQKHDIVYLNEEGGIIAYQTIPHTPLGFEAFDDQRMKLGVGVEDCLVGIETEHNLLIDFLSSRQYRQIYVIPPTTIKGSRGRFGASKANTDRSDAHLIADMLRTDRARLHVWHADSLLTQQIAALASLEQFLTHMIIQTNNRLRNVLWRYYPNAAIVFSALDLQISLEFICAFPTPQAAAQLTFEQFKVFARSHHYPQPSKLPACFARLQKPQPEARQQTVLAFQSEAVRLARLSFHAVQDKAATIREIQELFLEHPDYPIFSSLPGAGKILAPALLAKFGDDRLRYPTPQVLQSVAGTCPVTRASGKHKVVSFRYACDHEFRSVVQQWAKCSIDASVWAYTYFQSIRPHCDSLSHAYRRLANRWLEIAWRLWQDRVPYDEERHLRQHALRVKPN

SEQ ID NO: 82758 - protein, 338 aa, unidentified
MYYTGIDLHKKTSFITTVDEKGKIVTKANLPNDAALILRYFEELRGKTHIVIESTASWYWIYDLLTGNGLDVVISNPTKTKAIASAKIKNDKLDSHMLAQLLRSDLIAPVYVSSLEIRKLKELLRHRVRLVRDATRMKNRIHHLLMKNNYQVPFSDLFGARGLSYLDKLSLPDYHQPQLQTYLTLYGQLVEQIEPLTQTLRRLAKEDPRAKLLMTIPGIGHLTAMVIVAEIEDISRFPSYRHLASYAGLVPSLDASAEKERRGRITKQGSPHLRTALIEATQAIPRLRGRRLNIFFRKRIVRSGYKKAIVATAHKLLQFAFYILESQTPYQEVYSNAA

SEQ ID NO: 82759 - protein, 356 aa, unidentified
MANTIPTGVFIGVDTHKEVHAAAAISEVGAHLATTTIPANSKGYGVLEAWVGSMGAVLAFGIEGTGSYGAGLSRFLRERGHNVVEVNRPNRQLRHQKGKSDAVDAESAARAVLAGQATGRPKSGTGSVEMIRHLKIARDTAVKSRTQAMQTLKAIIVCSPDALREQLDPVRGKMTLLRRLAALRPGPLTSTLASAKATLRAIARRWLSLDAEIKQHDAHLETLTADRAPDLLEAHGMATGTAAEMLLLVGDNPERIHSEAAFAKLCGACPIPASSGKTNRHRLNRGGNRQANAALYRVVIVRMRAHQPTLDYVRRRTAEGKSKSEIIRCLKRYVAREIFGYLCAKPVLTNTATASP

SEQ ID NO: 82760 - protein, 353 aa, unidentified
MKRDKYVGMDVHQSMTVVAVSNAEGKIVLETMVPTAARPIRELMESLSGPLHVTLEEGTQAQWLHEVIRDLVKEVVVCDPKRNKLLTAGSKGDKLDARKLADLLRAGMLRSVWHGHEQTRGLKQMVRAYETFTIDTKRTMLRIKAIYRSRGIATRGSGVYQATQREQWLGQIPEAGMRQRAVWLYEQLDQVRKLRKQAKAGMLAESRHHGAIALLGTIPQLGPIRSAQIVATADTPHRFRTKRQFWSYSGLAVVTHTSAEYELQEGRIRRRSKPVATRGLNRNCNRRLKSVFVSAATGGGSSNPWREYLESLKQKGMRPEMARLTLARKIATVALTIWKKGETFDPRKLSSTP

SEQ ID NO: 82761 - protein, 370 aa, unidentified
MRTSVLYVGLDVHKMSMDVAIAEAGSGAEVRFYGQIGGDLDSLDRVIRKLRATGAQLQFAYEAGPCGYVVYRHLTAQGWPCLVAAPSLIPRRPGDRIKCDRRDALSLARLFRAGELTAVKVPDADDEAMRDLTRAREDAVSVERRAKQRTGALLLRHGRRYPGKTTWGRGHWRWLLQQVMDHPAQQIVLQEYLDAVREASARVQRLTGQIQELLPQWRRAPYVAAYQALRGVSLIVAATMVAELGDLRRFNNPKELMAYLGLVPSEHSSGASVRRGRITKTGNGHARRVLVEAAWAYRLRARVTRPVLQRQEGLSTGVKEIAWKAQLRLCARYRRLLARGKAKNTVATAIARELAAYIWAIGQAVEPLTA

SEQ ID NO: 82762 - protein, 340 aa, unidentified
MNEVSIIGLDLAKNVFQAHGAATDGSVVFRRKLSRSQLVKFFSAQPGCLVAMEACASAHHWARTIGALGHTVKLIPPAYVKPFLKRQKNDAADAEAIAEAAARPTMRFVEPKSEAQQAAAMAYRTRDLLVRQRTQTINALRAHLAEYGVVAPTGIAHVGRLVAILERGDSGLPEAVTALGRMLVAQIAALSVAIEKLDKELRLRASSEDTTRRLMTIPGVGAITATALTTFAPPATTFSKGRDFAAWVGLTPRQHSSGGKERLGTISKMGQRDIRRLLITGAVAVVRWAARNGAPEGSWLARMMARKPRMLVAVALANRMARIAWALMRSKEIYRDPAAA

SEQ ID NO: 82763 - protein, 373 aa, unidentified
MRYYIGVDWADAAHAIWVEDGHGARVLTRTVPHTAEGLAEWGRWLDEQRARGIELWAAIERPAGRVVDFLLDHGVVVYPINPKALDRARDRYRTSSSKSDFFDAHVLASFLRTDQAHLQALQPSSTAAQELKLLTRDYTRLVREQTRLVNQLTATLKEYYPRALEICADLTAHRAAALLRAYPTPAALAALTEEAWQQFATAHRWNAEQAAALWAVLRRPQLPVPAHVGRAKSRLMLVLLRQLEPVVEAVDDYRKAVMDFFASLPAAAWASTLPASQGTLVPTIWAELGDALGRWRSWQHVQGHGGVVPVTRRSGKSQGVYFRFACNLHLRRALQQFAFCSLKSSEWARAYYDRQRARGLGTRPRSGPSRRSG

SEQ ID NO: 82764 - protein, 403 aa, unidentified
MTVRPLVWVGIDVGKTSHHACAVDETGKVLWNQKVSNEQRAIEQLIARAHKGADEARWAIDLTSPMALMLITVLLGAEQSVVYVPGHVVNTMTGAFRGEGKTDAKDARVIAETARMRSDLSEVAMPDELVVELAQLTGYRTDVMADWVRGVNRLRSLLGSIFPGLEAAFDYSNRTPLILVAHLCTPAEIRAAGIKGVTAYLGDNGGWPAAIAKTAATAVAAAKQQPLALPGEAGTAALVKRLARKLLDLDHEIKDIDKTITERFRDHPYAHIIESLPGFGPGLGAEFVVVTGGDLASFATAGRLASYAGLVPVPRDSGRISGNLHRPKRYNRRLRRVFYMAALSSIRGDGPSRQFYDRKRGERLIHSQALLALARRLVDVLWALLRDGREFTPDKPTPATAAA

SEQ ID NO: 82765 - protein, 411 aa, unidentified
MNNTLFVGIDISKRSNVATFMNCEGKVVGRLTFSNNGSGADRLVAKILSYYEKEDFEAIRIGMENTSVYSKNLVWFLYEHEALNEHKLSIIPLNAIMVANYKKSFMDMDKDDITDSFAIADFIRIRPGLLPFKLDDRQEALKIMTRSRYNYVQALSRMKSQFLTRLFLSFSEMEAGKPFYSIFSKTSLSLLEEEFTLDELAEKPIPELVEFLQEKGGGKFQNPEEIAKVLKKAASSSYRVPAMVRESLNRTMASDMEIMRILENEIHNCDKNIEKLMKSVPAILVSIPGIGPVLAAGIMSEIGDISRFQKQESLGKMAGFKWKRNQSGKKESEDKAAVLSGNKKLRYYLVEAANRVRIHDPVFEAYYRKKYAESKTHAHKRALILTARKLVRVIFYLLKENKLYKPDVGIS

SEQ ID NO: 82766 - protein, 409 aa, unidentified
METVVERPAALDVHKESVTACVRVPGAGGRREQHLHAFKTTVAGLLTLRDWLRAHGATQVAMEATGVYWKPVWAILEDDFDCLLVNARHVKQVPGRKTDVQDAAWLCQLLEAGLLRRSFVPPKPIRTLRNLTRYRKAQLRERQREANRLHKILEDTGIKLDCVASDILGVSGRAMLEALAAGTTDPAVLAELARGRLRKKLPALREALEGRFTDEHALVVSSILAHLDFLDEQIERLSEAIEQAIAPFANAVELLCTIPGVQRRTAEVIVAEIGVDMSQFASAGHLVSWAGLCPGQDESAGKRRNAHTRKGSKWLRSALLEASLAATRTTDTYLAAQYRRLKPRRGHGRASIAVCHSILAACWHMLTTGELYRELGGDYFQRRDPERTTRRLVRQLEALGHTVILEAAA

SEQ ID NO: 82767 - protein, 394 aa, unidentified
MIYVGIDVAKDKHDCIILNSNGKVVFDVFTIQNNIDGFEDLLFKIKATEKYPDKVKVGLEATGHYSCNILGFLKNKGLSTIVINPLYTSLSRKSISLRKTKTDKVDARTIACMIMSDVNLKPYSDTLYLNEDLKSLTRYRFNKVAQRAKLKISVSRLVNILFPELEKLVSTLHGKAVYELLSEFPSAQHIASANLKHLTNLLHTASKGRFQRASADQIRQAARKSIGSYLPAKSLELKHTIKLIRELNSEITEIEAEIKKIMDVIDSPIISIPGIGQNLGAVILAEIGDFSRFESPDKILAFAGCSPSTYQSGQLYSSHAKMEKRGSRYLRWALLNAAAYVCKWEPTFATYLAKKLAEGKHYYVALSHAAKKLVRVLYHLETTGKTYKPTSILS

SEQ ID NO: 82768 - protein, 326 aa, unidentified
MQGKVSSNDSAAKQVYVGIDVCKKWLDIAIHPVGHVERFENAAKGHRRLLRWLLEYRVALVVVEATGKLHRGVHRALHEAGMAVAVVNPLRSRLFAVSAGVLAKTDAIDARLLALMAEALRPRQVVPLSDVMESLQELMRIRGTTIAERTGIVNQIGACVCAFVRRELQRRERALSASISRIETEIKRLIDNDARLSARYAIVLSIPGVGPVAAAALVIGLAELGTCTAKQAAMLAGLAPVACDSGDLKGARHIRGGRGEVRCALYMAALSAARHNPQLKVFHDRLIAAGKRPKVALTAVMRKLVALANTLLTANRPWRPMAPKTS

SEQ ID NO: 82769 - protein, 426 aa, unidentified
MPYKIAGIDVHKKMLHVVFCDVEVDGEYQFERRRVDTSPSQLRALADWLLEQQVEEVAMESTAQYWKPVWETLERYWKPICQKRKGAGTSGTLHLAQALSNRGRRGRKRDFRDAERLVKRLVAQELTLSFVPDPEQRLWRTVMRTKYQLTCNRVQLQNRLEALLEEAHIKLSSLVSDLLGASARRMLKAIADGETHAAALAALADQKLRATQEQLCDALGACTELNPVYRRLIKMVLEDLESIEKRIDQLEQEMADLLRPHQDQVERLAEVPGLGVDSAQQIIAEVGATAVTFPSEDHLSSWVGACPGDEESAKVNSNRRSPKGNRHVRRILNQAANAAVKHKGSLFEILYRRYVPRMGHNQTIGVIAHKLCRLIWKILHQGVRYEERGPAVSKTSKQKRTQKMIRELRRLGYRIELTTSQSPIPA

SEQ ID NO: 82770 - protein, 390 aa, unidentified
MMEGELRMDCTTPTAGSILHCALELSKNTWLLGIQFPDRPQPSLYPIKGGNTEDLMAKLTAARDRCAKLSGWAPSIVLCYEAGYDAFWLARFLKARGIECLVVDSASMQVNRRARRAKTDRIDVGKLLRGLIAWLRGDRHVWSVVRTPSIDEEDLRRSHRERDYLVHERTAHINRIKGLLFAQGIRGINVKRQYKTLDVDKLVTGDGHPIPPRLASEIVREIARLALVQEQIAALERERDERPTPCTATEKKRAQLMYLNGIGPAISAVMTREVYYRQFDNRRQVAGFLGLATSPYDSGEVERSQGISRAGRGQVRGTMIQAAWLWIKHQPRSTLTRWFLERTMGQGGRVKRIMIVAVARKLAIALWRFLEHGLVPQGAILSGQMTSMAR

SEQ ID NO: 82771 - protein, 334 aa, unidentified
MSKITTVGIDLAKNVFSVHGIDETGAVVLRRAVGRTRLAETVAQWPACVIGMEACSGAHEWARRFQALGHTVRIMAPRFVAPYRKSGKNDGNDAEAICEAVQRPNMRFVPVKSIEQQALLTLHRVRRGFVEERTATINRIRAVLCEFGVVLPHDARQVRCAATAAAEQLPALARRGVDDLRAHLQVLDERIAAYDKELEHQARCNESAVRLMGIAGVGALTASATVASVGPAHEFTNGRQFAAWLGLTPRQWSTGGKTRLGRITKRGDPYLRNLLVMGARAVLRMAAGRTDKMSRWALALKERRGYHKAAVAIAAKNARIIWALLARGGHFKAV

SEQ ID NO: 82772 - protein, 409 aa, unidentified
MEVLYERCCGIDVHKRVLVCCLKCGNKQEIRTFDSNNDEIRELTKWLQQRKCQIIAMESTGSYWKPLYNIFELSGLDAIVANARDIKNVPGRKTDIGDAEWIADLLRHGLIKASYIPNREQRELRELSRYRISLVRERARELNRLQKMLEGGNVKLSNVVSNINGRSARKLLQSMLESDEPLTRECVEGMIHGKLVRKVDAILKAMNGFLTPLQKELIRRVVDHIDDMSQRIGEMDDMLSRYLQPYQEAIEKLDELPGIGKRSAETIIIETGLDMSRFATDKHFSSWAGLAPGNNESAQKRRRCRVVKGNQTLRTTLVQCAKAASRCKSYFRAQYQRLVVRRGANRATVAVAHSMLIAIYHILKSGKTFIDLGEDFYTQFNRDKKITHHLKQLTKLGWLPHAAEDVAIA

SEQ ID NO: 82773 - protein, 429 aa, unidentified
MGRLKIVYPICCGMDVHRDFVMACIASTNERGVTEYQTRRFSTYTGGLRDCAAWLEANQCKDVCMESTGKYWFPVHNILEKTCRVVVTHPKFVKAIKGKKTDKRDAMWIADLFKHDVVSGSFIPPERIRQLRDLCRYWMKLTWNATGEKNRAHNCLTVSNLKLDSVFSNVFGKSASAIIDFMLEHPGEEFDVAPFLNNRCKSSAEEVQAAADGVFSPWQAEKLKIIRAHMADLGKRKEMVEALIFQLAEPYQRQIELILTVPGISDPMTAIRIIAEIGADMTQFDSSKHLCSWAGLTPQNHESAGKKKTTRIGKAGQYLKPLLIECSIGATNPRSKKHPEMVRKYQQLRKRRGAKKARVAIARRLLTAIYQMLLKDEPYQPHVAPAKEAIPKQRVMTAEDALAMLRRKGYILVDAQGAVIEGNLLPAPA

SEQ ID NO: 82774 - protein, 345 aa, unidentified
MELHTIGIDLGKTVFHLVGLNRRGEIVVRKKFSRTQLLHFTANLKVDLIGMEACGGAHFLGRALREQGHEVRLMPAQYVKPYVKTNKSDYIDAEAIAEAVARPRMRFVPIKTDDQLDMQSLHRVRERWVMRRTAVVNQVRGLLLERGITLRQGRRHVDRALPGILEDATAKLSGALRLLLAQLKLELEQLALRIGEADAAIEKTAQENEACRRLVAIPGIGPVTATALIAAIGNGAAFHKGREFAAWMGVVPREHSTGGKQKLLGISKRGNSYLRSLFVQGARAVMRFRGKQSSGLSAWLEQLTSRTHPNIAIVALANKLARMAWAVLAKDEPYRPPLLASAVAA

SEQ ID NO: 82775 - protein, 349 aa, unidentified
MMHAGLDLSRRKIDVCLLSDEGEVAGELAVPADADGLRALNRSVMELGEPVRAVIESMTGARFVHDVLEQLGWDVLIADAQKVKGLAPLACKTDKIDARVLAVLSQRDLVPAIWLPDPRVRREREQARFRLHLVKHKSMLKSRIHATLMTFGRPCTVTDLFGVAGRQLLAGLDLPEPWRGTVDASVLLIDDLERQIGQINAQLRASGPEHPYVPLLMSAPGIGWVLAFTIAAEIGEIERFSSPTKLVGYTGLCPRVYQSGEKDRRGPLTKQGPKYLRWAMLEATMHALRHPAYSERYQHTKRRLGKQRGAKVAQVDTARRLTEAIWHMLTRNQPFNPTAAGGAAFRLAA

SEQ ID NO: 82776 - protein, 344 aa, unidentified
MDHFAGMDVSVKETSVCILDDAGKVVKEVKVASEPQALLRVLGNSTYRFKRIGLEAGPLSQWLFSALAEAELPVICVETRHMQAVLKAQINKTDRNDARGIAQMMRAGLYRPVHVKTLRSQKLRMLLTHRKLLQSKAIAIENDLRGTLRNFGLKVGMVGMVRFEARIQELVKNQPDLAVLVEPLLIVRRALREQIVILHRRLLAIVRDDEVCRRLMTTPGVGPVVALTYRATVDVPARFRKSKSVGAVFGLTSSRYQSGEIDWNGKISRCGDEMMRVMLYEAAQSMMHSRKWSWLKAWAMQIARRRGMKKAIVALARRLAVIMHRIWVDGTEFCWTREQAAAAA

SEQ ID NO: 82777 - protein, 490 aa, unidentified
MPMLAETIDGVIGVDTHRDTHHVEIAHPTSAAIATCSISNDSAGYAQLLTWAGQHAPGSRLAMCIEGTRSYGAGLARAAAAAGLPVIECEQPTRKTRRGKGKSDPIDAHLAVLTALQLDADRLPTPRADGDREALRILLCARQELTTTSTAQTNRLRALLRDGDDTDRRLARARLSDAALTGLARRRQPTDASRAQAVRHGEIRRLALALREAARALKANRAELAAIVNDLVPGLTNRPGIGPVSAAQAIVSFSHAGQCRNDAAFAKLAGTSPIEASSGQTTRHRLNRGGDRALNNAIHVIANTRMRSDSSTQAYVLRRRAEGKSDREIRRCIKRYVARQLYRTLTAAMTEQRSQRMNPPHPLTPEKKARPTPLTQIEASAASGDEHLLLLAPPCSGAGACGPPVRILPGGLPGGRMRLPTGRAALPRPHPGRGLKTYRKFSPRAGQAGQAGQAGQAGQAGQAGQAGQLTRHTPRLTVVHSGLTCPWICP

SEQ ID NO: 82778 - protein, 315 aa, unidentified
MTNLIKSKSIINVGVDVGKYFLDVHIHEKDLHFQVENNPAGIAVLLKRLSYYQVERLVMEATGRYQLMLAEAAFLKDLPVCIVKPLSVRRYAGAIEQIAKTDRLDAAVISEFAAVVRPRVTAARSKNLILIKDLISRRRQIMQIRTQELKRLQIMGKTLETSCKRIVRCLDAELKRIEGKLDQCIDQQTEWAEKRDILKSAPGIGDAMVYTLLADLPELGSMTSKQTAALVGVAPMNRDSGKLRGKRRIRGGRHDVRTILYMATLSAARCNPVIKDFYQRLVAQGKHKKVALTACMRKFITILNAMVRDNLEWQS

SEQ ID NO: 82779 - protein, 334 aa, unidentified
MKQFYVGLDMGRKWIYGTIIDEQKRVVKEAKIECTIGAVERFLLAKPKESLNVVLEACGIWEGLYDHLHRRCNVVKVANVLKTKAIGYARKKTDKVDSKTLAELLLADMIPESYVPDIEIRRMRKSVRHRIGIVKVRTMFKNQIHAILRARNIHPPLQVKDVFTKRGIAWLKTLNIGEIDSCIRMIDASNSEVKIAERSSSDNPLRKEIELLKTMPGIGEVSATLIMSDIADIRRFETPKKLCAYAGIVASVYQSGDKERYGGITKHGPSHLRHVLVECADVAIRCDDRFRRFFQRIQKKKGWNVAITAVAHKMLYIMWYMLTKNQQYIGDNSE

SEQ ID NO: 82780 - protein, 415 aa, unidentified
MKKHNNSGKKSEPTSKRTKSPGAVRRDTKEVLAELVAKLKEKLDSKKVAATSGEEDQRGELRPNLDRLTVGVDLGDQWSHYCILGLEGETLAAGQLRTTQEDFATFFKGLNAARVVVEVGTHSAWVQEVIRGYAHEVLVANPRLMDGSKRRKRKNDRIDANKLARLGRVDPESLYPIQHRSREVRQDLVMLRARDALVAARTELINTTRGLVKSMGTRLPKCSSRSFAQKGEEAVAVEIREALLPLVRLAAVLSADIKEYDKKIETLGREKYGHTALLRQVKGVGPITALAYVLTLENPKRFVKSRDVGPYLGLVPKQEDSGESQPQLGISKAGDTMVRKLLVGSAQYILGPFGPDTDLRRYGLRLCERGGKNAKKRAAVAVARKLAVLLHRLWVSGEVYEPLHHARSAPIAAAA

SEQ ID NO: 82781 - protein, 414 aa, unidentified
MDEVHEVFVERCAGLDVHQKTVAATVRVPGPDGGRRTETKTFGTTVKRLTELADWLASFKVTVVGMESTGVYWKPVYYLLEDRFGCWLLNARHLHNVPGRKTDVADSVWIARLVEQGLVRPSFVPPPQIRDLRDLTRYRRALTEERSREVQRLDKVLQDASIKLSAVVSTLQTKSARDMLAGLVAGRPPGDLAGLARGRLKDRQAELAEALSGRFRRAHHGLLVAHILAHMDFLDDQIAQLDARIEDLVSPFEDLVGLVATIPGVSERGAQVLLAETGTDMTRFPDAAHLASWAGICPGNNESAGKTRSGKTRKGSVWLRTELTGAAKAAGRTKRSYLAAHQAQIRARRGHPKAIGATRHDILTAFYFIVRDHIPYHDLGPAWAEQRNATEQRTRRLVTQLEQLGHTVTLTPAA

SEQ ID NO: 82782 - protein, 350 aa, unidentified
MDAQLEVVLGVDTHLNVDVGVVIDTVGRVLGTLSVPTNSEGYNQLLSWTRSFGCLRRAGVEGTGTYGSGLARLLTTNGIAVFEVNRPNLARRRLRGKSDPTDAENAARAVLAGEATALPKSQSGVVEALRVLAVTRRSAVKARTQAINQLRSLLVSAPDDVRARLLKTSPDECVAKCRRIRLLGNSPVFVALSQALRTLAKRWTSLSCEIKSLDRTLKQLTEHVAVRLLQQFGIGTQTAATLMVTAGDNPERLHSEAAFAALCGASPLQASSGKTVRHRLNRGGDRAANNALWTIAMVRMRSEERTSAYIARRTAEGMSHKEIQCCLKRYIAREIYLLLLADLHDASLPS

SEQ ID NO: 82783 - protein, 386 aa, unidentified
MRNEATLSMESNAGGQVLYMALELSNTTWKVLFGTSASGRRRERNVTARDLLALLAEVARAKERFGLAADAKVVSCYEAGRDGFWLDRALRLNGIDNLVIDSSSIEVPRHMRRKKTDRVDVGKLLGLLLRFAFGERAALAVVRVPSSADEDIRQLSRAIERLKGERVRHLTRIKALLAKEGIVIQRVGGPAWAERVAALRTWEGKPLGRWLQQDLRDDGEQLALVVRLLAERQAERDALVAAAESGAGLKARQLMRLRAIAAESSFVFATEVFGWRSFANRRQLAGAIGIVGTPFKSGSLDHEQGISKAGNARMRKMLAEIAHCWLRYQPTSALARWWAERFARGGGRRRKSGIVALARKLLVALWRYLEEGIVPEGAQLKPAVAP

SEQ ID NO: 82784 - protein, 406 aa, unidentified
MQGPVITVDVSKGSCHYQPYVSNGHPMRKPKVLHDTVEGFQSLSDLIDTMKDRYECETIPVIFEATGVYHHCLQKYLDDHQIPYYIISPLMSASYRKTTPNSNKTDDLDCSHIAKAYYGECNLFPYDKPSKSFHNLRELNRYYECELNHLRMRKNTFRKYLDIVYPRLDKCFKGHSSLYDEIPMEVIKQYPHPSLLLKHKEETIVKKIEKKTSHNALFIQNIVHEMYECSMHCYSGADVTDVESMILPELVDDLQSQKEKCDEILKQLVSEAQKTPYFTSIVSIVGIGDNLAARIIAELGDMSRFSCRRAITAYAGLNPKIRQSGDMDGIHLAISKKGNKHLRCLMYLAVSCNYRLKKGDVLYEFNQKKRQQSFSPLKPKAATIATAHKLLLIIYALCTNGTVYHS

SEQ ID NO: 82785 - protein, 312 aa, unidentified
MAIEFAGIDVSKDWLDLHLLTSGQMDRVQNTPEDCQALAARLSQSPPERIVVEATGGYERLLVAELCAAKLPVVVVNPRQVRDFAKAIGRLAKTDKIDAQVLAKFASAVQPEVRPLPDEFEQKLQEMLARRAQLIGMQTMEKNRLQQARSATVRADVEAHLQFLKERLDEIDQDLDQRIQESPAWQEKFDLLTSVPGVGPQVARTLIAELSALGSATRQEIAALVGVAPINRDSGQFRGKRTTFGGRGNVRRMLYLAVLTGSRCNPTIKAYYQQLLKAGKQTKVALVACMRKLLTILNAMIRNKKPWRLQIT

SEQ ID NO: 82786 - protein, 360 aa, unidentified
MHATTVAIDLAKDVFELTFADADHRILERKRLSRRAFAHVLDNRMPLRVVMEACGSAHYWARRFAGQGHTVRLLPARDVRPYVRRNKTDRTDVAGILEADRCAQIDPVPIKSPEQQGVQALHRIRERLKSQRTSTINLLRGVLREFGLIIPLGAAKVRPAVLAVLEDGDNDVPMALRHTLGELLDRLAGLQADMTVIEQRLEVFAENDPASQRYQGVPGIGLLTATALRASVGSLDRFRSGRHFAAWLGLTPREHSSGSHRHLGAMSKRGDGYLRLLLIHGARAALRAAQVRRGKDQPLDHLQAWALALQARQGHNKAAVALANKVARRVWAMEHHHTAFDSNHCSVRPAVATGLACAIE

SEQ ID NO: 82787 - protein, 339 aa, unidentified
MYYTGIDQHKLTSYLTTVDNKGVIIKQANLKNNDFEILNYFHQLGDQNIATVETTGGWYWISDLLKANNIDLKLAHAKYVKAIAYAKVKTDKVDSQILAQLLRMDFIPEANKIDEELRPLRDTLRARLRLTQKRTSALNFMHRMLEKFNIQNPSELSEQYQFQYKQFSDQAEFLKQQILALEKSLYPTLVPNQDVQHLLAIPGIGKMNAFTSFLEIYDINRFETVKNFLSYCRLAPRASNSGGKTKQSRTPKDGNKYLKIVFSDAAIHAIQYYPVIKKHHNSLLRKKNKQIAKYIISKEIASIVYHVLKTKKSFNNKFKNIDLEHIKSIQWPRITSPIV

SEQ ID NO: 82788 - protein, 306 aa, unidentified
MKEIGFTQMVSVGCGIDVHQKLITASIRKSDDDVETREFEAYTSSLTSLREWCQKEGVTHVAMESTGVYWKPVFNVLEADFEVILVNARHVKNVPGHKTDKKDSRWLSKLLLSGLLKGSFIPPCPIRELRDLVRYRKKVTGQIASEKNRIIKILEDANIKLSSVLSNVDGAVGTKIINDLINGETAVYRLIRHYHGKQKVSIEEFRKALEGRVTAHHRLMLSIHKDSIADKEEQLKRLDEAIDKATDAYRVEIDLLQTIPGVGKESAINIVSEVGVDMSRFPDETHLSSWAGMSPGNCETGGKKKR

SEQ ID NO: 82789 - protein, 367 aa, unidentified
MKKVSTAARKQSRNFSQQKLTIGLDLGDRSSCYCVLDETGSIVLEQRVATTPKALPAAFGAMPRSRIALETGMHSPWVSRLLSGLGHEVIVAHARNVRLIGESRRKDDRLDAQTLARLARIDPELLSPVKHRSAKAQADLTVIRARAGLVRARTALVNTARGLAKSYGERLRGCNVRNMNPEKAEGLSPELRAALQPLLAGLESLSEQIREYNERIENLAQESYPQVALLKQIKGVGTLIALTFLLTLEDPHRFRKSRDVGCYLGLQPGRRNSGQSEPQMHISKEGDPYLRTLLVQGAQHILGPFGADCDLRRWGLKLAERGGKSGKKRAIIATARKLAVLLHHLWVSGEVYDPLHNSSRVAIAAAA

SEQ ID NO: 82790 - protein, 360 aa, unidentified
MTGTMTWAAMDVHARSTYAASLDVVTGELSRQRFDTGAVEPVVGWLAGLPGPVRCCYEAGPTGFGLYRAAVAAGIDCRVIAPSKTPRPSGDRNKSDRRDTDLLLRQLMAGGLTAVVVPSATCEAARDLARAREQVRVDLMRCRHRLSKLLLRHGRVWDRSAWTKVHREWLSAQTFEQVNTELAFIDNLAACDGLTARKDALDERLSGVVSDPEFWPLVRRLRAFRGIDTLSALIVTLEVCDFARFSRAVQLGSWLGLVPSREQSGESDHHRSITKTGSKYARRILVEAAWHYARPPRIGRTLYERQEGLPDHVLQIARRAQSRLYRIHRRMRERNKPGNVITVACARELACFLWAAATAP

SEQ ID NO: 82791 - protein, 449 aa, unidentified
MSRPQVIDDEDHERVHERVAAIGVAKDSGMVCTRVPHPSRPGARRSTVQTVKARTNAIRALGRQLARDGIEVVTLESTSDYWRIWFFVLEERGLAVQLVNASQAKNLPGRPKTDKLDARWLARLTEMGLLRASFVPPKAVRDLRDYTRARTRLVQERTRCFQRLEKLLESALIKVSPVASKLTTLSAQDMIAAMIAGQRDPKALAGLARGKMKAKHHDLVQALDGMVDDHHGELAQMLVEQIAFLDERIAALAARAAELAAAMPAAWGINPDGTTGPDAGTTPDGPVLNAVTRLAQIPGIRQDQARTIIAETGLDMSRFPTAAHLVSWAGLCPSARQSGPRARPGKKGQGNAYLRGALGQAAIGAAGTDTFLGERYHRIARRRGTAKAQAAVARSILVIIWHLLADPAARYTDLGPGYYQARLDTSRKLKNHIRQIQALGFDVTLTKAA

SEQ ID NO: 82792 - protein, 386 aa, unidentified
MNHSTNILPRSVDYDQTLVLAIELSNKSWVLAAQVPGLSQTKAKRTIEPDKNDLLAAINGYRTRAAAAGHQVKRVITSYEAGWCGFWLARWLMAHDIEVHVVQPSSVPVDRRMRRAKSDGIDAELLLRTLLAWLRGEPRVCSMVPIPDEADEDARRCVRERSELISERVGLVNRIGAILATLGAGDYNPLLQSRRRRLTELRTGLGNPIPPNALAKLVRLLTRLELVLAQIAELELERDAAAKTDTPDQAGKMIQQLIRLRGIGVQSATVLVREAFVRRFANGKALGSYAGLTSTPYSSGGIDRERGIGKAGNRRLRTVMVELAWLWQRYQPSATQVVWFRQRVGSTGRRVRKVMVVALARKLLIALWRFVIDGLMPEGAVTKPSI

SEQ ID NO: 82793 - protein, 287 aa, unidentified
MNVTTIGIDLAKTVFSIHGTDQHGKVVVRKRLNRPKLLAFFAQLPPCLIGMEACSGAHYWAREMTKLGHDARIIAPRFVAPYRKSSKNDDNDAEAICEAVSRPNMRFVPIKTEDQQATLSLHRIRRGLTKERTAQINQIRGLLAEFGLIIPQGRYAARRRVPEILEDAENGLPMLARRLLNNINQRILQLDEEILAYEQAKRLMAIPGIGPQTATALLASAPDPRQFKSGRHFAAWLGLVPRQYSTGGKPRLGRITKRGDKYLRTLLIHGTRAVIATIDTKEDRLSA

SEQ ID NO: 82794 - protein, 387 aa, unidentified
MLYCGIDVAKLKHAVSLMDDKGEIVKASLTISNTRAGFDQLHAELQALGGAITVGLEATGHYWLALYDDLTRNHYPVIVLNPLQVAAYRKSGIRKIKSDASDAVWIADYIRIANLPPSEQNLPVFLQLRELSRFRFRLTEQVGDLKRKLLTILDRVFPEYERLFSNVFLHASRAVLQEAVSAQEFADFDLQELAQVLAEASHGRFGLEKAEKLQAQARQSVGIAFLTDAVHLEMRCLLAQLELLDSQRAEIDLAIAELMQQIPQHITSLPGIGPVTGAAILSEIGDIRRFETLDKLVAYAGIDATVYQTGQFQASEAHMSKRGSPYFRHALWLAATAAILHDPSLKAYYQKKRDEGKHHGTALGAVCHKLLARIFVVLKEKRAYVIR

SEQ ID NO: 82795 - protein, 353 aa, unidentified
MKKVDFTGQHIYVGMDIGKKSWKVCMLTEELEHGLISQPPRVEVLVNYLRRSFPGAKYHCTYEAGYSGYWIYEELKKEGIECLIVNPADVPTTHKEKTRKTDRIDARKLARSLRNGELTGIYVPEHSTLEDRSLVRTRHSLVKKQTRCKNQIKGLLNFYGVNIPEELVNSHWSRRYIGWLEQLIIGRPSVTHAVRTLLEELKYLRQMIAEMTKEIRLMSREEEYKSDAHYLMTVPGISTLSAMIFLTELGKIDRFERLDKLASYVGLVPGEQSSGEREVITGITCRRNPYLRGLIIESAWVAAKKDPAMIMSFNQLCKRMPRNQAIVRIARKLLNRIRYVLIHQEPYVPAVVS

SEQ ID NO: 82796 - protein, 441 aa, unidentified
MNKLESPKYCGIDVSKSTLVCAAIGDLEEHHRHYHPGQSSDLGIIGEEAVVIRTFPNSWTGIVSMIKWMHSIGVSAAVMESTCSYWCAAYTTLEKEGIEPVLANARQVKNVSVHKTDLKDCVWLAVLLRAGFIVPSYVPAGLIKDLRDASRMRRSIMKDITRLKNRCHRVLDSVLVNLGMSVAFVKRGRAALTQALKGDYEGLTNEQQRAFESVTEVEKLMIIDLLTTIERSDERVKKYDSVLAALVKQLEEDRGDRDVILLATVPGVGLVSAIVVKAEIGTVERFPIPERLSSYAGLAPRVMQSGERRRMGQTVRLSNSHLRTTMYMVAQVCARSGPPRLIEFHQRVREKKGYKVATIALARKLLVIMWRMLKDGVTFKMAYEKGLAERKHKRMRTSLRRLTRLECDYGSERVFSAIQEVLDRREKESLAPGVSLHPELH

SEQ ID NO: 82797 - protein, 403 aa, unidentified
MTEPEPGIYGGVDTHGDVHVAAVVDHTGRIRDVESFPASASGYRRLLAWMRRHGEAIRVGVEGTGSYGAGLTRHLLSEGVAVVDVNRPNRQTRRRRGKSDTVDAEAAARAALNGEATAAPKSGDGIVESIRVLRIALCSTRNTRTRIANQLRDLVFCAPDQLRHDLEALDTPARVERAARFRPADLTHPTEGTKAAMRALARQYQALSADLDELRGQLDTLTAAANPALRDARGVGVDVASILLIAAGDNPERLTSEAAFAALCGASPIEASSGKVVRHRLNQGGNRQANHALWRIVMVRLTCDPATRAYAERRRAEGKSTREIIRCLKRYIAREVYRLLTNPQPVADRTELRRARTAQGLTLAAAADALNTWPARTSELERGVRPATELEHRYRLWLGLEVA

SEQ ID NO: 82798 - protein, 349 aa, unidentified
MRFYTTQHQYYCGIDLHARSMYVCIQDQSGKILLHRNYRAGPDALLGAIDQYREDLVVAVECVFTWYWIADLCSREGIAFVLGHALYMKAIHGGKTKNDKIDSNKIAALLRSGMLPMAYVYPQGMRSPRDLLRRRLYLARQHAELQAHIQNTNTQYNLPYFEKRIDRNSNRAGIAMRFTDPAVRTSVEVDGALMDALHQQILAIERQINAQVPEHDPVALHLLRSIPGVGKTLALVILYEIHDISRFPAVGNFISYARLVKCTHESGGKRKTGPNNKIGNVHLKWAFSEAACLFLRKNERGKLYHQRLVSRYGKAKALSILAQKLGRTVYTMLKRRTPFDAKRFFETVG

SEQ ID NO: 82799 - protein, 279 aa, unidentified
MAQSSTRFIGMDVHKDTIAVAYVAQDHGAEVTYLGTMGTRQCDSDQLVRNMQSKAQHLIFVYEAGPCGYWRYRYLRKKDYDCWVVAPSLIPKKAGDRVKTDRRDAVQLARLARSGDLTRAREDALGDLKAAKFRLKAFLLRHDIRYTGSANWGPAPLRWLSEVICPTPAQQIVFQEYVRAVTEHTERLGRLEQELQEQVKAWHLHPVVDALQALRGVQFTVAVITVAELGDLTRFDNPRALMKFLGLIPSEYSSGERRRQGSLTKAGNTHARRALVEGA

SEQ ID NO: 82800 - protein, 349 aa, unidentified
MTIVEDACVITGGVDTHADMHVAAALDPLGGLLGVREFPATAAGYAGLLDWLSGFGTVALVGVEGTGSYGAGLARHLAAAGVRVVEVDRADRQDRHRQGKSDPLDAVSAARAAQSGRAAGTPKGRDGAVEAIRALMVAKRTARSERTQTINQARALIVTGPDELRARFAGHRPAQLVAAIAALRPRPGDVPGYATRVALRELGRRAQFLDAQLDRLDALIGPLVTARAPGLLALHGVGPDTAALLLIAAGDHPERLRSESSWAHLCGVAPIPASSGKVRRNRLNRGGDRQANHALWRIVITRLGSRPGHPATRAYVERRTKEGLSKKEIIRCLKRYVAREVYHQLRGSA

SEQ ID NO: 82801 - protein, 353 aa, unidentified
MKYYTSTTKFNCGIDLHARQMYVCVMDRDGKKLVHTNIRNNDFEFFLKLVAPYRHDLTVCAECMFGWYWLADACQAAGLHFVLAHALYLKAIHGGKNKNDRIDSEKLAHLLRTNFIPPAYVYPADKRPLRALLRQRILYVWRRSELLSRIQSHQLAYNRPTCRQNLYNRQSWTEQLLASEPDPVRQLALQNDLALIGHYDAQLASLEKALLKLTKQTASRDFNLLQTTPGIGDYLGLTILHEIGDIARFPTVKDFLSYCRLVKGTVASAGKLKGLRGAKLGNPYLRWAFGEAAVIAKRDGVLGPLAQRLEARLGNKFKANTVLAIKLARAVYFMLKKKTAFDPDRWVATLSKN

SEQ ID NO: 82802 - protein, 326 aa, unidentified
MNLSVAALGVDIAKLKFDVCLIKENGKAKHKVFTNTKHGFEQLVIWLNSHQAGSLHVCLEATGTYGEALAVHLFDAGYRVSVVNPAAVKAFAASRLTRTKTDKVDAELIARFCLLQQPQAWQPPAPAVRQLQALVRRLESLIEMRVSEENRLSSGVSIEEVRDSLEEHIAYLVAEIKQTELLIREHINNHRNLKQKSDLLHSIPGIGQTTAALLLAEIVNIKQYKSARQVAAYAGLVPRERRSGSSVRGRVQLSKIGNARLRKALYFPAMTALRCSSFFQQWASGMRERGKCKMAVIGAAMRKLIHLAFGVLKTGKPFDPNWAKTA

SEQ ID NO: 82803 - protein, 352 aa, unidentified
MEIIGLDLHKRETQLCRQQPDGHIVDERIPTSRVRFTQTFGGVAPARILLEASTESEWVATHLEQLGHTVIVADPNFAPMYATRSRRIKTDKRDARALMQACALGAYRPAYRLSAPRVHARAALAVRDTLVRTRARMITLIKTLVRRDGLRVPTGTSRTVGQRVATLELATTAPALGAELAPLLAMLPGLTAQIATLDATLAAVAADDPVVARLATAPGVGVVTAVAVVATLDDITRFRSAHAVEAYLGLVPSEDSSADRRHLGHITKAGNARARWLLVEAGWRILRSKQPEMAALRAWGRAIAARRGARIAAVAVARRLAGVLYAMWRDAVPYDATKLQRRARRAGAPPGP

SEQ ID NO: 82804 - protein, 379 aa, unidentified
MRRVCGLDVHKDSVFMCILSENGEKVQEKYGVLTKELDTLRDVLVANNVGEVAMESTSIYWMPIWRVLESDFDLKLVNPYFIKQLPGKKSDVKDAEWIATCLQKELIKGSFVPDAAIQRLRQYNRRIFDLNKDISYKLTKLDMALQRCNIRISNYVSKTDSKSYKKVVDKLAGGITDPQELEKCIHGRTVNRFGKDIITASLTGVINETDIDIMSQLKSEIDLAERHKSECLMKMREICMENYPKQLENIKSMPGVKEQSATAIIAEIGVDMKMFLTAAAIVSWCGLRPRNEESAGKIKSRKIVHGNKYLRRTLIECAWAASKTQGCFYNKFSYTQVSIRKKNVLKVRVAVARKMLVTIWNILSKGEAYREILDCTQPQ

SEQ ID NO: 82805 - protein, 408 aa, unidentified
MDVVIERGAGLDVHQASVVATVRVPGRSGRQTVTETFGTMTPDLIALREWLQAYGVTHVALESTGVYWKPVYYVLEDAFTLLLINMQELKHVPGRKSDVRDSEWLAQLLECGLLRPSFVPPPPIRELRDLTRYRVQQVRDRAQEVNRLCKVLEDSGLKLTTVMTDVMGASGRAMLTALIQGTTDPVVLADLARGRLRQKLPDLRRALQGRFRPHHAFLLEQIVAKIDYLDETIERIGAELDRRLVPFEPMLTALDTIPGIDRIGAISLVAETGGDMRRFPTAAHLCSWGAMCPGQNESAGKRRSGKTRKGNRYLRATLIQAGLGAIHSKGTALQARYHRVKRHRGHKKAVVAVGHQILEIAYFIMRDGVTYDELGADYFDRRHAERAVRRHVRQLEALGYRVTIEQAA

SEQ ID NO: 82806 - protein, 401 aa, unidentified
MTYDYVIGMDVGKYFHHACVLDIDGTQVLSKRINQNEKSLHALFSTFSANDHKVLGVVDQPNNIGRLTVAVAQDIGIDVRYLPSLAMRQLSRIHAGNAKTDIRHAYIIAHAAKNLPESLRSVDRIEETFLQLKVLNGIDEDLARSYTRLINQIRSALVDCYPQFEQALRGQIIHRKWVLHLLPRYGGPTKIKRLGKAKAAAFAQHYKARNPEPVIDAIFAAISEQTVTIAGAQYAEMGVAMSAKDALLKLEHRKQIEQEVIELINDTPTQILLSMPGIGPKTAAQILMTTGDMSDFPTAGHLASYAGLSPRTNQSGTSIMSNSLNRAGNKKLKNALWQSSFASIRFHERSRQFYERKRREGKRHNAAVVALARRRLNVLYAMMRNHKCYRDPALPQEGIAA

SEQ ID NO: 82807 - protein, 481 aa, unidentified
MAARKKTAKKDAAPGSPAAASAPGEDGAEVAEERVEVVTYAAAIDVAKGSGMVCTRVPGSRPDRKRQKIWCAEATYDSVVALIDHLRCEGIQRLVLESTSDYWRIWYYLAEAAGLQVWLVNAKDVKHLPGRGESDREDCVWLCKLNERGMLRRSFVPPEPVRDLRSLTRTRSRLAQDQVRHQNRVEKILEDALLKISVVISDLFGASGRRFLDALAAGERSPAALAALGDPRLRATPQQLAGALTGRFRDIHAFEIATHLRLIDTINDEIARLDARIEQQLASIPGVAPACTSCGLIGGGHAPGCASKDAAVLGLVERLDEITGVGTRNAQVIIAELGTDMSVFPTPGHAAAWARLTPRTLQSGATARPGRAGKGNPYLRGALGQCVMAASRTDTRLGEQYRRIARRRGKQKGIVAVSRTICEIACILTGDRAARFTDLGAGYYSAQNPRRQTRSRIREIERLNPGMKVTLTPIEPAGTAA

SEQ ID NO: 82808 - protein, 353 aa, unidentified
MDEYIAFDSHKHYTWVEREQVDSGRLRQFRVEHTPGAIRQALAGCAPGTPVAIEATANWYWITDEIEQAGCRPQLTHPRKAKLMMGQINKTDRLDTHGMNRLQRNGTLPVVWMPPGPLRDLRELTRTRVVLVAQRTRWKNRITATLAKWGVPPSEYSDPYGKRARAEWEQRIAWLPEQTRWTLRQMLEQLDHLNAQVAGFEQRLKELVEVTPEMQRLMSLPGVGVILAATIALEVGEVSRFLSAERLASYAGTVPRVIASGDRMRFGRTRPDVNRYLKWAFAEAGNSVAVNYRRWPERHVSQLYVRVRVYKGKGHHKAVGAVARHLAEAAFHLLSRQQEYRDPATAGGRTREV

SEQ ID NO: 82809 - protein, 370 aa, unidentified
MARNGTLAKSQELQPSFHATTEQITIGIDLGDRFSHCCVLGPDGKILTEGRLRSTPETLARHFQDLPPSRIAIEVGTHSRWVSQLLGQWGHEVIVANPRNLRMIADSIRKSDRVDAHMLARLARVDPKLLSPITHRKQEIYPDIVQLKARDLLVKNRTRLMNAVRGVLKSAGLRVPNSGTSCFPSKAAQCIPDELKPSLTPLLETISHLNKQIYSLDKAIECTAQTRYPETNRLRQISGVGSITALQYVLTIGDPGRFAHSRDVPAYLGLTPRRHQSGSVEQQLRISKAGNKQLRSLLVQCAQYLLGRFGPDSDLKRWGTRMFERGGKNSKKRAIVAVARKLAVLLHRLWVTGDTYHPLYNVEISSVTMS

SEQ ID NO: 82810 - protein, 343 aa, unidentified
MQAVTTIGFDIAKSVFQVHGVDSVGQVLIRRQLKRRQVIAFFQKLPACLVGIEACASSHYWSRELQALGHNVRLMPPAYVRPYVKRQKNDMADAEAICEAVTRANMRFVPTKTAEQQSGLMLHRTRHLFMRQQTSVINAIRAHLAEFGIVAPVGRRGVEELLRVIADPSDKRLPEVVRACLAALGSQLLSLKKQILDFDRMIMAWHRSNQTSKRLNCIPGVGPLLSTALVASVADPKTFRSGRNFSAWIGLVPKQNSSGGRDKLGSISKQGDRYLRGLFVAGAFAVIRYAKIHGTKHRPWLTALLARRHTKVAAIALANKLARMAWAMMATGERYNYPASLKV

SEQ ID NO: 82811 - protein, 428 aa, unidentified
MSNQEIIRRKQYCQIVKEINGSDQYLVVGIDVGKDKHHAFMGSATGKSLFRKLIFENNLDGFSRLLKTAEAIKVQNGLAKIVYGVEPTGNYHKPLARHLIRCDCNVVLVSGVAVKRNRELLDGRWDKNDTKDAANIADLVSRARCLYYDCPSPSIIEIRSLLSLRRRLKREEHSLRMRIRNNLLAQYFPELDRFYSACESESLAIVCWCLNPDTIAAMEFGEFFHMVTTTRRGIAQTLRLRKIHQLAIESVGCPMGPAAEYEADLLVEKLKQVRQQIQKTNDLIEDFCLEFSEYSYLLTIPGFGPYISARVLASIGNPFRFENRKQLIKMTGYDLCADRSGKTSAKAVPVISKKGNGELRYALYQAAHVAATRVDHFRAYFTRLLRGRERERGIKTKMRVKLAAKMLVIAWTLMKKKEVFDPAHLNIK

SEQ ID NO: 82812 - protein, 402 aa, unidentified
MNAVGIDVSKGKSMVAIMRPFGEIVSTPFEIKHTSSDINSLVKLIKSIEGESRIVMEHTGRYYEVLAHQLSEANLFVSAINPKLIKDFDNDSLRKVKTDKADSVKIARYALDKWQNLKQYSVMDELRNQLKTMNRQFGFYMKHKTAMKNNLIGILDQTYPGVNTYFDSPARSDGSQKWVDFASTYWHVDCVRKMSLNSFIDHYQNWCKRKKYNFSKSKAEEIYGKAKELVPVLPKDDITKLIIKQAVDQLNSASITVESLRTLMNETASKLPEYPVVMAMKGVGTSLGPQLMAEIGDVSRFTHKGAITAFAGVDPGVNESGSYEQKSVPTSKRGSSDLRKTLFQVMDVLIKTHPQDDPVYQFLDKKRAQKKPYYVYMTAGANKFLRIYYGRVKEYLASLPES

SEQ ID NO: 82813 - protein, 313 aa, unidentified
MTKPTNANPIDYIAIDVSKATLQIQDDQLAFAVDNDSEGHSKLLKHIKTRKNPLVVFEATGGYERGLCEFLREETIPLTMVNPARVRDFARSEGVRAKTDPIDTKMILAFAKSKALCAMETPSETCTKLAALLDRRGHLVEQLAREKNRLQNSEKLILRSIQRMIKILEKEISALDKAIDELVSSEPGLQSRSKLIQSIQGVGKITAWTLLAYLTEIEHLNRNRLVALAGIAPFNRDSGKFSGKRSIIGGRAKVRRCLYMATQSAANCNPIISAYVKRLRERGKPYKCAIVAAMRKLLIHIQSLIKNPKLSTC

SEQ ID NO: 82814 - protein, 352 aa, unidentified
MARSKHQRGTTMNHYVGIDVSLEASSLCVVDANGKIVREGKVASEPDALIAWRRGLKLELTRIGLEAGPLSQWLYAAMRQAGFAAELLETRHVHTALETMPVKSDRNDARGIAQLMRLGWFRPVHCKSMAAQETRALLTARKLLQTKLHDLELSLRGILRGFGLKVGPTTPVHFEGRIRELVAGHPSLEVIADGLLAARVALRRGFDRFEKQVRDAARRDTRARLLMSIPGVGAIVSLSFAAAMDDPARFKSSKQVGAYFGLTPTKYQSGETDIDGRISKIGDASVRAALYEGAHIILTKPLKGCTALKSWAMKIGRRSGMKKAKVALARKLAVIMHRMLADGTSFRNAAAV

SEQ ID NO: 82815 - protein, 349 aa, unidentified
MVRYVGIDVGKAKCRVAVVNQKGDVEDEFFFENSNKGISELEAMLKVEDRVVMESTGNLWLNIYDALDSRSIKVVLANPMQTRASSRKKKTDKVDARKLALLLKAGLISESYVPPGYLREMRALVRHRLSLVRLRTMQKNKVHAILDKYGYRCERSDLYGKAGRAWLGRLKFNGLDRLLVENHVSLIEFVGVQVEGVDAAILQKASEEDDVRLLLSLTGVDVFTAVLIKSEIGTIERFDNYKKLVSWAGLAPSVHQSGEVEFHGGITREGSGVLRWAIVEAAWIAVNHDVKLREFYERVCSRRGKQKAAVAVACKMLKIIWFMLTRREVYGGAKERRYGEKLKKIGVKG

SEQ ID NO: 82816 - protein, 400 aa, unidentified
MNPVIGLDVAKGESQAQAFLDKGKPYGKSFGIQHTREGLDTFLHFLKEVEKQTGHQPAVVLESTGHYHTPVIQFLEEHYYLFIVINPIISYQAKKASLRKVKTDAIDAYHLGELYYKEELEPYKKRGIQLLNLRHLTRQHETLTGLCVQAKLQFHSILDQVFPEYRGVFGDLYSKVSLHTLLEFPTSEAILNAGETKVAERIAILCMSRSERWAKERTKKLMEAAKRNPFQSIIYHSHLISLEMYIKMVLQYQEHLAQLESKIDALAGELEEYKIIQSIPGIGEKIAATIISETGEIDRFNHPKKLVAFAGIDPSVHSSGKFTATINRITKRGSSRLRHALYMAVLCGIRGSRNKKLKAFYDRKREEGKPFKVAIIACANKLIHWIYTLLKRKELFLDLD

SEQ ID NO: 82817 - protein, 344 aa, unidentified
MSKVITISLDIAKNVFHAHGADERGAMVFSRKLTRGKLLEFFAGQPACTVALEACGGAHHWARQLQALGHDVRLIPPAYVKPFVKRNKNDAVDAEAICEAAQRPGMRFVAIKTEEQQAAGLVFRTRDLVVRQRTQLINAIRGHLAEYGWVAPRGTASMTMLADLLQDGDMASSLPEAARPMFKLMIDLLAELDEQIATLDREIARRAKDDEAARRLMTIPGIGPIAATAIIALAPPIETFRKGRDFAAWLGLAPRQHSTGGKQRLGSITKMGERTIRRLLIIGASSVVLQASRRGAQSGSWLERMLARKPRMLVSVALANKMARMVWALLTKDEDYRAPAAVSA

SEQ ID NO: 82818 - protein, 375 aa, unidentified
MKEKLRFLGLDVHAETIAAAIAEPDGEVRGLGTIPNRLESVRKLLKKLGPVEKLRACYEAGPTGYVLYWQLAELGVQCEVIAPSLVPVKAGDRVKTDRRDAEKLARSYRSGDLTAVWVPDEGSEALRDLVRAREAAKQDQLRARHRLNKFLLRSGQRPPAGVRAWTHLHLIWVSQIRFAQVAQESTRLDYLHEVEHMRERVARLEQAIVEAVKLASPALQEVIKDLQALRGIAHISAVTIAAELGQVSRFPGARELMGYSGAVPSEDSSGKRTRRGSITKSGNAHLRRIVVEAAWSYDRPPAIWAGLRKRQQTASEEAKEIAWKAQHRLHKRYARLAAKGKDKRKIVTAVGRELLGFIWAIGTRAEANAAQRVAA

SEQ ID NO: 82819 - protein, 447 aa, unidentified
MKKKKPASKRNATLPKHLLHLNQHAAGIDIGSRSHFVAVPDGIDDQPVREFLTFTDDLERLAEWLISCGVTTVAMESTGVYWIPVFEILEYHGLEVRLVNARHVKNVPGRKSDVLDCQWLQQLHTYGLLRGAFRPADQVCTLRAYVRQRSTLVRSASAHIQRMQKALAQMNLQLHNVVTDITGVTGMSIIKAILAGERKPHALAALRDKRCKNSEETIARSLHGNYRPEHLFSLQQAVELYEFYLQKIADCDQQILAQLKQFDSPDDNSPDSKPPRSMEEALQRMSGTDLSSINGINTNTALKIIAEIGIDMSRWKTVKHFTSWLGLCPGSKISGGKVLSSATKPVANRAAAALRMSAMTLFNSKSALGAYFRRQRSRLGAPKAITATAHKLARLIYNMLKYGSAFVDFGQEQYEERYRSRVLQGLKRKAQEMGYKLISIQEEPQTA

SEQ ID NO: 82820 - protein, 412 aa, unidentified
MKKHTYRTKKVNDIDWAQLKERINANEAVFAIDIAKEKQFALLSTADDEVSQLVCWNHPEQTQELLAQLKNLGCPLTVVMESTGTYGDALRHQFRGLGFEVFQASAKRVSDAREIYDGVPSLHDAKAAVIITRLYRAGLTKLWRESTESERNLDALRREYDLHQSHYQRNQNRLESSLARHWPEILYLLSLDAVTLEGMLIEYGSPQRLAEDAQAAQKLKAWSKGMIQNDKIAQIIQSAEHTLGQPCLESERRYLQALAEEMRHSRQQQKQAKQALEAIVNADTGLKEIALTIGLVTTAVLLSSRLDPRHYTNARSFQKALGLNLKEKSSGRYVGQLKITKRGCSIVRRYLYFAALRLIKNDPLVKAWYQAKVDARAKNKTVIALMRKLAKALWHLALGERFDARKLLAVRV

SEQ ID NO: 82821 - protein, 292 aa, unidentified
MSEAFIIGLDIAKYVFHAHGVDERGRAIFSKRISRKKLLDFFAAQPSCTVALEACGGAHHWARQLSQLGHEVRLIPPAYVKPFVKRQKNDAIDAEAICEAAQRPNMRFVAVKSEQQQAAGLVFRTRDLLVRQRTQLINAIRGHLTEFGWIAPKGPSHVAMLAGLIEEEEMAGSLPEAARAMLRLMLDLLADLDGKIADLDKEIARRAREDEVSRRLMTVPGIGPISATAIAALAPPAETFAKGRDFAAWLGLTPLQRSTGGKHKLGSTSKMGERTLRRLLIIGSSAVVLQAS

SEQ ID NO: 82822 - protein, 401 aa, unidentified
MISIGIDVSKGKSMVCICSVQKMLVSPYEIQHTRTALQDLIQSIQSYSEECKVVLEATGIYHLPVLLSLHEAGIFVCVVNPMLMKKYIASSSIRKAKTDRADAIRIAQYGLDHWFHLQNYMLANDTYEQLRLLGRQYERYTNMKVASKQTLDILLNQTMPGIKTLVRSKKTSKPEQDKLCDFVEKYWHYDLILKQSEQQFISSYCSWAKKKGYRPSATKAQEIYAAAQNSIPTLSSKTASSKMLVLEAVRVLKEINRTLHRILTQMQELATALPEYSVIREMNGIGDVLAVRFIAEIGDIRRFHCGSALVAYAGIDSPPYQSGTFSATRRKISKRGSPILRKIGFDAMKILKSVKPTQDDAVYRYILKKEAEGKPLKVAKIAGLNKFLRIYYARVSAVCNC

SEQ ID NO: 82823 - protein, 360 aa, unidentified
MSNVPALIKPATSVIVGVDTHKHVHVAVAINTLGAHLAHCSVPADRAGYATLVAWARSLGVVEAFGIEGTGSYGVGLASHVRRHAIRVVEVSHCDRRKRRNNGKSDTIDAEAAARAVLAGIATAIPKTADGSAEMVRQIKVARDTAVKARSAAIITLKTLIVNAPGELREALEPLTDRKLIDRCARLLPGTITDPLASTKHALRALASRWLVLATEIGDHDDVLDAITTAAVPTLREAFGIGADSAAEMMIVVGDNPTRVRSEAAFAKLCGACPIPASSGVTNRHRLFRGGHRQANAALYRIVTVRMRWHEPTLAYVARRTAQGLSKKDIIRCLKRFVAREIYRALIDDHRARVNASVAA

SEQ ID NO: 82824 - protein, 343 aa, unidentified
MKLIRIGVDLAKDVFQVHGVDRHEKAVWRRKLRRNEWLKVLVATAEPGCQIGMEACGGAHHWARKLQGLGFRVKLIAPQFVKPYVKGDKNDANDAEAICEAMSRPSMRFVTVKSAEQQDSQAVHRIRVGLVEQRTAKANQIRGLAAEYGLVAPKELGQLRIALPCWLEDAQNGLSDRFRRLLSGVWEDLRALDERVGELDREITVIAKSDPLAKRLQQLRGVGPVIATALVGALGNGEQFARGRQMAAALGLTPKQHSSGGKERLLGISKRGDAYLRTLLIHGARSVIRTAKGKEDRLSRWVIALAARSHPNVAAAAHANKTARMAWAMMRKGTDYQPDLVTD

SEQ ID NO: 82825 - protein, 317 aa, unidentified
MSATLFIGIDIAKESFQVASRPAHLHGSYLNTRQGHRDFLHRLPDLDVALIVLEATGGYEKPLAAELVQAGYHVVVANPRQVRDFARGLGRLAKTDPIDADILAHFGEIVQPQPKPPQNPETEALAELVTRRRQLIDLLTQETNRAAMIHHVKVRKSIRKMIKTIEFQIRELDDLIQDHIQANDDFQHKDHILRSTPAIGPQTSAMLLSHLPELGQLNRHQIAALVGVAPYDRQSGKQTRGAHIAGGRKEIRSMLYMAALTARRCNPAIRSFALRLEQQGKAFKVVITACMRKLLVILNALIRDQQLWTAKKILKTT

SEQ ID NO: 82826 - protein, 383 aa, unidentified
MTKSINLYVGMDVHKESIDIALADEDGRQEVRHYGSIGGDLPALDQAVRKLQATGKTLHFVYEAGPCGYVIYRHLAGKGLDCVVVAPSMIPKRSGDRVKTDRRDAEMLARLYRAGELGAVYVPHPEDEAVRDLTRAREDAKQAQTRARHQLKAFLLRSGIRYTGKTAWTPAHVRWIAGIKLDQPVQQIVFQEYVEAVTAASDRLERVEGNLRDAVAEWRLKPLVEALQALRGVQLVVAATLAAEIGQIDRFDNPRQLMAYLGLVPSEYSSGSSTRRGSITKCGNTHARRVLTEAAWAYRLPARITPIIARRQDKLARSIRAIAWKAQLRLCKRYRSLRAKGKEQNKVITAIAREIAGFVWAIAREVSAGAKKDGLSTGAALRA

SEQ ID NO: 82827 - protein, 395 aa, unidentified
MRSTKMAKQNEETIAAYIGLDWADSEHEVTMLVVETGEVESRKLKQESEALADWVQSLRERFSGRKVAIAIEQRKGALIYALMCYDFLILYPVNPKTLARFREAFYTSGAKSDPGDSGLLLDLIRLHRDKLRPWVPEDADTRLLQMLVEERRGLVDEVTRLTNRLKSTLKQYFPQALEWAGELDSRQGLDFLTRWPTLESIRKAGAVAVEKFYRQHSMRNQDKLEQRVKAIKEARALTTDRAVLAASKMKALAIVRQLRALGKSIAEMEARIQELFEQHRDHEVFSSFPCAKKVLGPRLLAAFGGDRTRYESALDLQSFAGIAPVTRSSGKSKTIHKRMACPKFLRQTFHEYAAQSIKKAGWARVYYRGHRDKGVKHHAAVRALAYKWIRIMFRC

SEQ ID NO: 82828 - protein, 340 aa, unidentified
MSLYGGIDLHANNSVIVLINEQDEVIYRKRLPNALPTILEQLAPYHTEMKGLVVESTYNWYWLVDGLMEADYRVHLANPAAIQQYSGLKYTDDHSDARWLAHLLRLGVLPEGYIYPKAERAVRDLLRKRAHLVRQHTANVLSVQNILVRNTGARFSVKRLQELTKQELKSLLAEEPQVLAVTSSLAVLDCLRQQIKTLEKTVHKRLHHTPAYEQLLTVDGIGTILAQTITLETGAISRFPTVGNYASYCRCVDSTKISNGKRNGTGNVKNGNPYLAWAYMEAAQFAMRFQPAAQRFYQRKLAQSRNNTVLARKAVAHKLSRACYYIMRDLVPFEAAKAFG

SEQ ID NO: 82829 - protein, 419 aa, unidentified
MEDIKAKKVKSINEKTLIVAMDIGKGVHHAYFRAPNGREMRTFPFSNSRESFESMWARICQFKTLQGLDEVVVGFESTGPYAEPMCHFLSKKPVRLVQINPMHTKRLKELTGNSPNKSDQKDPRVIADIISLGHALSLVVPEGPAAQLRRLTQARERAMKRRTALSNQLQHLIFLIFPEFLNLMKDISCKTAIYLIKTYPTPESVIGLGLEGLAMQLKRVSRGKVGREKAEALLRAAEHSIGIKEGRQSLLLEIEYVVSQLGADTQFILSLEKQMEHYLEQTPWSGSLLSIKGIGPVTVAGLTGEVGDFKKFHTVSEVMKLAGLDLYEISSGRHRGQRRISKRGRSLMRKLLFFAAINAVKSKGILHKPYHEMLDRGMPKIKALVAMARKLLRVIFALARDGSVYMENHGYQEPLKLAA

SEQ ID NO: 82830 - protein, 386 aa, unidentified
MQKFDDLSRSLTTLEPGGTLIAVIEMSLSSWLVAGIVPGVERQRLKKLAIDESALLKLLHRWREEAKKAGRRIERIAVAFEAGRDGFWLARWLKARGIEAYVIHASSIAVSREHRRAKTDRLDTELLKRSFLGWLRGERDHCKMVDIPTMKDEDAKRPNRERDSLIGERSRIINRMKSALVRLGIRGFNPKLKRAAARLDDLRTPEGEPIPPNTQAELRRDMERRRLVSDHIRQIEEARLERIEQAPSSGPHAMVRLLARVMGVGIETADMLVHEVLSRNMRDRRALARYAGLTGSPDESGRKRREKGLARSGNARVRRGMIQLAWRFLLHQKDSALTKWFRSRTENARGTRKPMIVALARKLLIALWRLVREGIVPDGVVLRPAQ

SEQ ID NO: 82831 - protein, 395 aa, unidentified
MDRMFVGVDISKDTFSAAGLDAEGNECFSGFYSMDSDGFCKFLEIVTAHCQDRQKVLVGMESTGCYHINLFSFLTSQGIPAVVINPLLIANFAKRSLRKTKTDKKDARTIAKFLRENGEEISQLSISQDLQDLRDLARERESLSHLISATKVEIKRVLRAIFPELESIADIYTRVMLRFLQVYPSARLVKAAKPKVLAQALRQPYVGHKLTFSAEDILRAAQSSVATASPGKEIILKGKIATLLHLQERMDEMTKLLTDLCKATRVEDLKILRSIKGVGPKTGVPFLAEMGSVENFSSHKKLIAFAAMDPSVCQSGKNIGKSKLSKRGNRHLRRAIYLMTAAVVSKNAFFKAYFLRRKKEGLIPQKALLATAHKLIRVIFAMLSHRTYFQVKMAI

SEQ ID NO: 82832 - protein, 450 aa, unidentified
MKKAKGFGEVNRFVAGIDLAGAADHYVCGPRKDDGSHDIEHFGTTTSELQRMLAWLKERNVVSAAMESTSVFWIPVYDMLESGGIKVSLVDTRQVHMVPGKKSDVQDCQWLQRLHSCGLLRGAFRPPEKFNAIRSVLREKANVLTMRTQSIQAIQKSMDQMNIRLHHAVSNITGVTGMKILGAIVAGERDPHVLASMRDWRCKKSEAAIAEELTGNWRDEHLFTLGQAYETLMFLDQRIAAFDKKIRSMYAKLAAESDKPEPPEPEDRGKRKDKVDVAAKRALSRLLGGFDPTTLDGVDYGLAAAIVAETGSDLSMFQNEAHFISYIGLKPSLGKSAGKNVRTGRKAKNTSRIGQYFRQAAFTLSKSDCEMGARYRCVRSRTCPTTAIKDVARELAKRYYRGVRFGQKYVDIGEEAYMQRRRERMLHSMKRNIEKLQISAEELGFLKDVG

SEQ ID NO: 82833 - protein, 366 aa, unidentified
MRKINTMAMEGIQIFKDDQLTIGLDLGDRTSHYCILNEAGEVILEQELPTTAKGIAPVFSKIPRSRIALETGTHSPWVSRQLTQMGHEVIVAHARNVRLIGESSRKDDQRDARTLARLARIDPALLSPVRHRSAQAQIHLTVIRARAVLVSARTALVNAARGLTKSYGQRLRKCGTEQMNRESAKELKPELREALHPLLAEIESLNARITEYDTRIEQLAKEVYPEVARLKQVKGVGPLIALTYVLTLDDPHRFRRSRDVGCFVGLRPGRRNSGRSEPQLHISKEGDRYLRTLLVQGAHYILGPFGQDSDLRRWGLKLSERGGRNAKKRAVVAVARKLAVLLHKLWVSKEIYEPLRNNRKQMAQVA

SEQ ID NO: 82834 - protein, 365 aa, unidentified
MQKISTMQTSEENILNGQLTIGLDLGDRFSSYCILDEVGKILREQKVPTTPEEMKQTFGRMVRSRIAMETGTHSPWASRLLTGLGHEVIVAHAQRVRLIVKSRRKDDRLDARTLARLARIDPELLSPVQHRSAEAQIHLTEIRARAGLVSARTALVNAARGLVKSYGERLRKCGTQQFRQEITSGLSTGLREALEPLVREVESLNERIKEYDRRIERMAKETYPEVELLKQVKGVGDLIALAYVLTIEDPHRFRKSRDAGCFVGLQPGRRDSGESAPQMHISKEGDEYLRKLLVQGAHYILGPFGEDSDLRRWGKKLAERGGKNAKKRAVVAVARKLAVLLHRLWVSGEAYEPLRNSQKAMSTAA

SEQ ID NO: 82835 - protein, 324 aa, unidentified
MNLPPLGLDIAKLKFNACLVGAGAKLRHKVFANNPQGFSQLSDWLKKQGVQQVHACMEATGTYGESLAAYLHQQSQLVSVVNPAAIKGYAQSHLSRTKTDRVDAALIAGFCGERRPPAWCPPAPEAQQLQALVRRLESLIEMRTAEENRLCSGITVEAVRESVEELIAHLSEQIKRTQALIRDHIESHPKLKRQRELLDSIPGIGETTAAALLAEVPDFSQYQSARQVAAFAGLVPRERQSGSSVRGRVRLSKIGNARLRKALYFPAVTALRCSPFFQAWADGLRQRGKSKMSIIGAAMRKLIHLAYGVLKTGKPFDPQWAKTA

SEQ ID NO: 82836 - protein, 332 aa, unidentified
MLYKNYVGIDVSKLSLDVFIREASLHRKFRNDSSGFAPLVQWLKGHVTCSWQSLLICFEHTGLYSLSLAQFLEQEGTTYAMVPALEIKRSLGITRGKNDIVDAKRIAEFAYRFSDKILPTKLPSKDIQKLHFLLTMRDKMMVNIAGYTMAQKELFRVVSVSELPTIALSYQNTLITLKEEVRRIEREIRSTISSNNTLKTTFELITTVKGIGFIVASFLIVYTCNFTRFKDWRKFACYSGIAPFEHQSGTSVHGRTQVSAIANQQVKRLLHLAAMAAIHFDSELREYYMRRQAEGKSKMATINIVRNKLLARVFAIVKRGTPFVDIHRYAST

SEQ ID NO: 82837 - protein, 398 aa, unidentified
MKVSGLDVHKDSIFCAIYNGKEYSEVNEYDTATPKIRQMGEYLRSEGVKKVAMESTSTYWVPVWDILLEMGFELMLVNPFLIKQMPGRKSDVKDAQWIACLLHKGMLRGSMIPSPIIQQLRVYSRKYTKLQEQKSRTLQKMDRIMVMCGFRIGSCMSTLATKSVMLVIQALIMKETNPEVLERLVYGNTENKKSGKLREALTGNLKEHYRQQLEWEKEEYDLFEKQTQQCLEQMRQICDEHYEEDMRLLKTIPGVSEISAMIIIAETGGDMSVFENSGKITGWAGLRPRNDESAGKYKSTAITKGNKYLRSILVQVAWAASRIKNGWFKEKFNRLAMRKSRRKALIAIARKLLTVTWNVLYYKIPYNPKSVHIYNPVKVEAKKNYHQREMERMQKLLN

SEQ ID NO: 82838 - protein, 340 aa, unidentified
MTITTVGIDLAKNVFAVHAVDQNGRTVLVKPKVSRTALPALIASLPPCVIGMEACSGAHYWARLFRQYGHEPRLMAAKFVSPYRMAGKSGKNDAADAQAICEAVRRPHMRFVPVKDESQQAMQCLHRTRQGFIEEKTATYNRLRGLISEFGVIAPRSTDALRHMVSEQKSSLPLHVQQCIDDLLKHIDRIEDNVAEYDRILSRMAKTDHRSQRLMELKGIGPTTACALVASIGNAHDFKNGRQLAAWLGLTPSQYSSGGKSKLGRITKAGDSYLRTLLVQGARSVLIGAEKRADSFSRWVCTLVERRGYWRAVVAIAAKNARLCWASLHYGDDFRLYSAS

SEQ ID NO: 82839 - protein, 349 aa, unidentified
MKITTIGLDLAKSIFQVHGVDATGQVVVRKSLRRSQMLPFFAKLPPCLVGIEACGTSHHWARELLKLGHEVRLMPPAYVKPYVKRGKTDAADAEAVCEAVTRPTMRFVPVKSPEQQAALSMHRTRDLLVKQRTQLINMIRGLLAEFGIDIPKGLERALLMARQIVDGKPPEVPFEAAKIVSTLSQQVLDTHVRLREIDRDLAIWLRSNDVARRLMTIPGIGPIGASALAASVTDPHQFRSGRQFAAWLGLTPLQKSSGGKERLGRISKMGDKYLRKLLIVGMTSLVRRAKYSPGKVDRRLADLLARKPTRVATVAMANKTARVIWAIMHVARPIVPVTGRHWPHKRYRI

SEQ ID NO: 82840 - protein, 388 aa, unidentified
MGMKTPRIQSYIRKELAMSKENSITYVGMDVHKSGINVAVILPDSKEISQEWQIANESRSRARMLRKIQRLGGTQVRFCYEAGPCGYGLQREFRDAGVECIVVAPSLIPSKPGERIKTDRRDGRKLAELFKAGLLTEVHPPSPEEEAVRDLTRAREDAIRDLLSARHRLTKMLLRHGYVYRQGTNWTQRHRAWLKGIRLEVPGLQNVLDNYLLAVEQIEERLKHLTELLEEVARSDDYAELVGWLCCLRGVNTVTAMTILAELHDVSRFKTPRELMCYLGLTPSEHSSGGRTRRGSITKAGNGHVRRVLVEAAWNYRHRPAVSAHLAKRRKGQPADIIAIADRAQQRLYKRYYKLKEAHCKHHNVVTVAVARELTGFIWSILQKKKAA

SEQ ID NO: 82841 - protein, 343 aa, unidentified
MKKITTVGLDLAKSVFQVHGIAEEGDVILRRALRRSQVLDFFRTLQPCLVGMEACGSAHYWAREIQALGHTVRMMPPAYVKAYVKRNKTDAADAEAICEAVTRPTMRYVPAKTQDEQAAGMVLKTRDLLIRQRTQAINALRAHLAELGIVRATGLVGIISLAAIVRDDSDLRLPGAARMALEELVEQIEAVTGRIERLDRKILEAVRKDDSARRLTAIPGVGPIIAATVRAVVPDPAGFRTGRDFAAWIGLTPRAHSSGGRERIGSISKRGNQQLRTLLVSGATSILKLARRGLQPSQWIAAMMLRRPFKVIAVALANKIARIIWALLVRGDSYRGAKMIVQA

SEQ ID NO: 82842 - protein, 396 aa, unidentified
MERAWAGVDIGKEHHHVVVLDADGERLLSQRVANDEAALAEVIGRARALAGEVTWAIDLNSGESALLVALLLDRGQVVVYVPGLTVNRASGSYRGAGKTDARDARVIADQARMRRDLAVLRGDEELIVELRMLVARRQDLVSDRTRAVNRLHHQLLAISPALERALDLTNRGPLVLLTGFRSPAALREAGVPAVEAWLRARKVRGAATLAAAAVRAAGTQAITLPGEQVAARLVAQLAEGVIALDEQVKEVDQFIGDRFRRHPSADVITSLPGIGVLLGAEFLAATGGDMDAFGSADRLASFAGVAPVPRDSGRISGNLHRPQRYHRGLQRVFYTSAMISIRCSPESRRFYDRKRGEGKRHTQAVMALARRRVNVLWALLRDGRCYEPASPAAAAA

SEQ ID NO: 82843 - protein, 369 aa, unidentified
MAQVTTIGLDLAKRVFQVHGVDATGTVVVRRSLRRRQVLAFFAKLPSCLVGIEACATAHCWAREITKLGHDVRLIPPAYAKAYVRRNKNDPADAAAIWEAVSRPSMRFVAIKTEAQQAAAGIHKVRAMLVKQRTMLINTLRGLMAEFGIVVADGRQHVEELIAVLTDPAEARIAAPLHDGLMAIVDSLRSLEQRIERIEKQILGWGRSNPTCRHLTTIPGYGPILSSAMAAMVVEPTAFASARHFAASLGLVPRQDGTGGKVKLGPISKRGNGYLRRLLVNGAMSVLCSKRAKEDPWLMKLLASKPRKVAACALANKLARIGWGVMMRQEDFRSRRMISRTPDPSQPDAVLTALKTASRAPLAVTCGQS

SEQ ID NO: 82844 - protein, 352 aa, unidentified
MNIYFGCDAHKRYSMFASMNERGQTGRPVRVEHTRAMFREFLRGLPPGSPIAIESVGNWYWMIEEMEKAGHEPQLTNARKAKMMMGQMNKTDKLDATGLATLLRNGTLPSVWIPPRNLRDARELPRMRMSLVSVRTMLKNRIHATLAKYMIEIDEVSDVFGMKGRELLKGRVEELPPYTRQSVETQLELLDEVEAHIEEAEKEIREVVKTTPEMRLLMTIPGVGPILAVVLAMEIGDVKRFPGAEHLASYAGTVPRIKSSGGKSYFGKVRPDVNRYLKWALVEAANIVVINQGRWSSRHVVRLYGRIKERKGHAKAVVAVARHLAEAAYWILRRNEAYKEPGTTNSISSTRK

SEQ ID NO: 82845 - protein, 391 aa, unidentified
MQSVTSATAVATTALANDITLFASLELSKSKWVVTINSPGSEKFSKHVVEGGDGAGLLDLLSRSRAKAEQRYGVRVKAIVIQEAGLDGFWIHRLLLANGIESQVVDAASIAVDRRHRRAKTDSIDGETLLRALMAWARGERRVCSMIRAPSPEEEDRRRLTRERGTLLKERIQHTNRIRGLLSGQGIRDYNPLRRDRFERLEALPTGDGRQLPPTLKAEIRRELDRIAVVTTQLAAVERARDALIRTEAEERNNPAAQLLKLKGMGPEFASLLWLESLFRSFGNRRQVAAYAGLAPSPWQSGGVERDQGISKSGNRRLRHTMIELAWFWLRHQPASALSRWFQARVGAGKGRVRRIAIVALARKLLVALWRYVTQGVVPEGAAFKAACPAA

SEQ ID NO: 82846 - protein, 364 aa, unidentified
MRIIGVDLHGRQQVIAMLDTDTGEVIEKTLEHEAEKVREFYSALPGPVQVGIEATGSMHWFLELLEELGIDCKVGHPAEIRKAETRKQKHDRRDAALLLKLQVENRFPSIWIPSTQLRDLRTLLMHRHQWVRMRTRVQNSLQAIALSRGLRRGKALWSQAGQHAIASLPLPPHAAYRRAELQSLYRALNEQIDELDKRVSYQVGQRPGAKLLMTHPGVGPVTALATDVFLGDPARFADSKAVVSYVGIIPSEYSSGGQQRLGGLSKQGNPLLRFLWCEAAIHAVRRDPDLQRFYRRKLAQKGLGKARVAAGRKLGIRLWILLRDQIDYQEFCRRGQMRQKCGAACAGMPDVGHSPVPSGDCETD

SEQ ID NO: 82847 - protein, 318 aa, unidentified
MTHTTQTTALYVGIDVSQNTLTVAIYPTDEVWTLVNDPHSHTALVQHLAQLPVQRVLLESSGGYEKAVVSALQQAGLPVVVVPAQRARYFAKSMRGDLKTDRADARMLAYFACCYPVQPVAPCSPVQAELKELWARREQLVQELEREKKRLQTGMSEAVRASLERMIAVLKEEIAQIEARVAELIASDADLSQKAALLQTAVGVGRVVAYGLVAELPELGQVSHRAIAALAGLAPVRCESGAWVGRARVRGGRPRVRRLLYQAAVVAATHDGRWRAVYEALVGRGKAKKVALCAVARQLLVVLNAMVRDGRAYERVQE

SEQ ID NO: 82848 - protein, 392 aa, unidentified
MIYIGIDVAKDKHDCCIVDSDGVIINDSLRISNSREGYELLYSTILSALPNKDISNVKIGLESTGHYSANLQNFLHAKGFKLSILNPLATNLFRKAQTLRKTKTDKTDALVIAKMLFSDDTKSYSPVSYQIQELKSLTRHRYRLIGYRSKLKLSITRLIDIIFPELPKHLWSIHQSSSYSLLSELPSPKDVANCHLTKLTNILSKSSKGKYGKDKATALKEAARQSIGTSTRSLSFELQQTIRLIQSVQVEIDALDLQIKEIVTEIDSPIMSIPGVSYTLAAIILSEIGDIEKFSSPAKLLAFAGLEPSTYQSGKYSASHTPMVKRGSVYLRWAILIASRTVSMRDSTFSEYLSKKQTEGKHYYVAMSHVAKKLIRVIFYLLKTNTKFVPQM

SEQ ID NO: 82849 - protein, 409 aa, unidentified
MVVHVAPLSSLTVVVAVDVGKNEFAVSVTDAQRRKLMKPRLGCPMTAPSLRQVQAAIEAVVPAASGVRVGIEAAGHYHQPLLSLAVWPSGWEVFELNPAQVSEQRKVLGKRTIKTDTVDLEAMTELVLAGHGWPVRDTATVLTQLTAWSAHRRSRVAVRSATKTQLLAQLDRTFPGLSIALPDVLGTKVGRLVAEEFTDPTRLAALGEARFIRFGATRGLQIRRPTASKIVAAARDALPMPDAPVARAVLRADLALLADLDAQIDAATAELDRLVPLSPFATLTTVPGWGPVRVGSYGGALGDPTRFHTARQVYRSAGLNPIQYESAGKRRDHSISREGSVELRRALIDLGIGLWLNDPNAKHYAAGLRARGKKGGVIACALAHRANRIAFALVRDQTSYDPAAWTREG

SEQ ID NO: 82850 - protein, 374 aa, unidentified
MNEFSKYVGLDTHKDTIAVAVSDAYGGAPRYYGQIANTPEALTKLVKKLSSDSQAVSFCYEAGPCGYGIYRQITGMGHDCAVVAPSLIPSRPGDRVKTDRRDSESLSRFHRAGELTSVWVPDQKQEAVRDLTRAREDMKAMERQARQRLNAFLLRHGKIYESGKSKWTQAHFRWLERVKFEMPVQQIVFEEYVGAIKQAQQRVAGLEDEMLKVMESWSLAPVVNALMALRGVKLITAMTVMAELGDISRFDSPRQLMAYLGLVPSEYSSGKTKRRGGITKTGNGHVRRVLTESAWCYRFQARKTAHLQRRAEKTSEEVQAIAWKAQKRLCGRYQHLLDRGKLKVQVCTAIARELAGFIWAIACEVMGRRQAIVR

SEQ ID NO: 82851 - protein, 312 aa, unidentified
MKEVSTIGLDLAKNVFQVHGVDGVGGVVIRRALRRSQVLVWFAKLPRCLVGMEACATAHYWARELEKLGHEVRLIAPAYAKAYVRRNKNDPADAAAICEAVGRPSMRFVAIKSTAQQAAAGIHRVRDLLMKQHTMLRNQLRGLMAEFGLVAAKGQRGLSELIAILVDPEDRRLPSPLREGLVAIVETLRGIDRKLEAIDRQLVQAGRENATYRHLITAPGYGPILASAMVAMVVDPGAFRRGDDFAAALGLVPRQEGTGGKTWLGPISKRGNGYLRRLLVNGATAVLKSKRAKEDPWLAKLLTSTPRKLVAA

SEQ ID NO: 82852 - protein, 481 aa, unidentified
MNDVLEKLNVENGAEVRPLYDYGVGIDTHRDFIQVCVLVRAGGVIRMYESEHRTTWKDLVNAGKWIIDTIREKAIPTIEPGPLRYTIESTSTYHLPVIKAVKGKPCIVNPVLAGTYKRKTDVLDARLLAYQCMTGLWPESFVIPPNIEELRLLMKQRHYHSRECTAITNRINNYILRFGHTLGSYKSVQSMENRAIIEDMCCEDYVYKENCLVLEAGQFICPDGLPHEVKKILKDMFYEYDSHVEKEKYYLKLALKVAKKINWETDSGYVKGDVLIKNLLTVPSVGDLTALVWLCEIVTPLRFETAAQLAAYCGCDPSLKVSAGKVTSQTRRKGNTKLHSQLYKIAGTCINRHCEPFGQWGFAISKKHAKGGYKKASGAVARRLAVSLYYVHKQNVPFSYDKYNFYKIDVPFMPLSDMGFNKRLENILTSNGLTDSKVIVESFLVGKIHELKGLGKKSARDIDTWIQLNKNFKFKGDKIHA

SEQ ID NO: 82853 - protein, 320 aa, unidentified
MSKMKLDLYLHTTKRHFVLENNNKGFAELIEKSIVTTRCKPEDLLVCFENTGKYSKPLSVFLQSQNIRFAMLSALEIKRSLGMTRGKNDKVDAFRIANYAHQKRETLSPTILPGPMIDKMKSLLSLREKLIRHRTAYKNGLTDVNDCHCEGENDLYIQIQTDMIEQINDKVNKIEAELQRIIQSDQALERNYRLVTSVIGVGPIIAFNMIAYTDNFKSFDNPRSFACFAGIAPFEASSGKRKGNARVHPYANKQLKSLLNMAAMSAIGTSGELKNYFRGREQAGKNNMSTMNIIRNKIVFRIFAVIKRGTPYVNHQKFAA

SEQ ID NO: 82854 - protein, 315 aa, unidentified
MEKYIGIDISKATLDLYDGEKSYKVNNNREGFTFIRKLAKHQKDLVLIFEPTGVYAHALIAYCQKQNIRAVIVGSKEARDYARSIKQRSKTDKIDAKVLYRYHTQISPEMIAVPSLDTRVIRITQRRNVYDKYRQAITQLNNLIEATRKEDKVLIRSIQKQIASLEKASDRLLDEIEALLIKQEENKAALENLQTIPGIGKKSALALLLEFMRYPKAKSNEMVALMGLDPVLKDSGVFKGKSRISKQGGKHLRQKLYMATIVAIKYNDRLKHFYQRLISHGKPKMVALLAAMRKLLRIAFAIVKNNEPYRALEGV

SEQ ID NO: 82855 - protein, 348 aa, unidentified
MEDILTCTMGLDVHRDVIVACLIKGELNQKPEVEIRNFNTLRPDMENLKKWVLEQECKNVAMESTGIYWQPIYEILEDCFDGEINVLVVNARHMKNVPGKKTDMRDSQWIATLLRAGLLCGSFIPEKSFRELRHLTRYRKSIIRDITSQKNRIDKLLQSSGFRLAAFMSDIFGASGRNIIRHLFTYGSITKEDLDKCLKTKTRAKIDQILVAVNGNLSKHQQNFLKLMFEHLEQIEAHKKVIETSIDNEITNHSQALSLLCSIPGIDVTAASAIIAEISTNMKFFPTSEHICSWAGLSPGNNESAGKRKSRHITKGNPYLKSMLCKIAWVITGKRSTYLANWYWRLKN

SEQ ID NO: 82856 - protein, 422 aa, unidentified
MNALSHIRPDSVIPSAMESPGTVLAIGIDIAKQTHVACALRGTGVRVRETFSCTSQPESLQALAAWIKALRLRLRCSHVFIGMEPTNVFWRPVYAYLVEHLPDCGVYVVPAVNVHYARRMHGSNLSKTDPRDAFLIAEQILQVHCSRPIQHTPVTRQVRDTLHNHLRADHDATVWKHQLQAMLGQVFPEAFVGAGPSAAEGRLAILRDTPAPADVRAVPEAQWVKDRLKPGRSRAMLLALYRAAMSSAAPPIESPLWRDSWDIALHAWDNALRYRTALHILLGRLLQEIPAVPLLQTVPGVDLLTAAAFFAGVGDLSQYSRAAQVEKVFGFDLHRWQSGAMDSTPHITKRGYAPARRAFFLAALSACTHEPFNRWYRRHVPNKEQKGKRKSIVALAAKLVRICFCIARSGSPFDAFLAVEHE

SEQ ID NO: 82857 - protein, 346 aa, unidentified
MSKISIIGLDIAKTFFQVHAADESGRVVEQKKLRRDKLLAYFTSIPPCLVGIEACATAHYWGRELSVLGHEVKLIPPAYVKPYVRRGKSDAIDAAAICEAVSRHHLRCVPIKTPAQQAALMLHKTRDLLIGQRTQTGNALRAHLAEFGFVFVQGEVGIRKAVAAVSAPLNDLPELAREALQLLAQQVESLQAKIRDLTQKITQWHKNSEESRILATIPGIGPIGASAIAATIGDASAFASGREFAAWLGLTPKQHSSGGKEKLGSISRQGNHRIRRLLVLGATGQLRGKRAETAAGGQWFAALLKRKPPRLATVALANKMARVAWAVLAKHTEYQHDYSSSRSSAA

SEQ ID NO: 82858 - protein, 341 aa, unidentified
MGSMVAIGVDTHRDEHVAVALDQFGRDLGSVAVTADASGYADLWQWACELGAPVFAVEGTGSYGAGLTAFLVAAGGVVFECERPRRRDRRHGKSDLVDATLAAKRLLTGELLPRPRGGGVRDDLRLLLMERQGAVRARTAALNALQAAIVTGPETVRRRFRGLDGKQAAKLALKMRERSSETAVAAAVVRRIAVRVRHLSCEIDEIDDQLVTITSDLVPALLQECGVGPVCAAQLVVSSGDPSRMRNEASFAALAGTSPVQASSGQTQRHRLNRGGDRQLNRALHIIALNRTRRHPQTAAYYQRLLSEGKTPREARRCVKRQLARYFHHKLKTTPKLALTP

SEQ ID NO: 82859 - protein, 380 aa, unidentified
MRRLILASYDKIMLNINAVIMLQKRGESAMRNVTIGMDLGDKNHIITILDEAGVIVKSCSLENVRASIVKFFRKYKGSTVAIEAGTHSPWISRELKALGCNVLVGNPRKLRSIWNSDDKTDVHDSEMLARIARFDSGLLYPITHRNEQAQADLELLKARDMLVKTRTSLINHVRGAVKSFGERLPKCSAASFHKQCGDFLPANLKTVLKEVVETIEHVTGRIKEFDRRIEKISREVYPETELLKAIGGVGPLTALAYVLVLEEPGRFGKGRQVGKFLGLTPRRDQSGETDKQLRITKAGNRFLRRLLVGAAQYILGPFGPDCNLRRFGLRLMERGGKNAKKRAVVAVARKLAVLMHHLWRNGEIYDPFYKSHKVVMKNAA

SEQ ID NO: 82860 - protein, 354 aa, unidentified
MKRTTKYVAFDVHQATTVASVREESGRVIARSVLPTDGAALTEFVGGMRGAVHVTFEEGTQAQWLHDLLAPLVDRVIVCDRRGAPRQGNKGDHVDADQLAELLRRGGLRAVYHASAQRTTLKELTRTYRNLVEDSTRVMLRLKALFRARGIPAPGKRVYHPTARLQWLAQLEDPGARLRAETLYAELDLLRGLRPKAKAAMCAEARRDPAWPVLQTIPFLGPVRVALLLATMQTPWRFRTKRNLWAYAGLAVVTRSSADYTLVAGQPVRRRRPPLTRGLNRNHNRVLKDVFKGAATAATARPGPLQTFYHSVIARGTREELARLTLTRKLAALTLRLWKKGERYDPTKLTTPAR

SEQ ID NO: 82861 - protein, 392 aa, unidentified
MYIVGIDIGKNHHEASIVSPEGKQIGRSLRFATTHKGADSLMSFIFKNIGNSPCVFGMEATGHYWYPIYSFLKAKGYTICVINPIQSDSLRKMYIRQTKNDSIDSFLIAEVIRFGQFGTTSMADENILAMRQLCRYRDSVISSRTEIKLRISTIMEQIFPEYEKQFSSLWVSTSMGILEKYLTPENIENAPIDELFEIIKDKSHNRLTKAKAISIKEAAADTFGIKIAQDAFSFQLKQLIDRMNFLDKQIEALDCQILEYYEKFDCYLHTIPGIGMIAAATILAEIGDINRFKSSSALVAFAGIDPTVRQSGEFNSTHNHMSKRGSPYLRHAIFLAATTCSFHNSPLNAYYKKKRDQGKHHLTATGAVARKLTTVIYAVLRDSKPYEPKKFC

SEQ ID NO: 82862 - protein, 385 aa, unidentified
MFYVGIDIAKTKHDLACINETGETVITNFRFANSYQGFHQLKLKLKQLSPITQDIHIALESTGHYNYNIVAFLRELGYTVFAYNPFIIKQFAKSQSLRKTKTDKKDALLIARKLRSDVTPEYYQTDKVMDELKELTRYQNRLIQSRSKCKNLYIRLLDIIFPEINSYVSNLHSHFVYELLTKYPSAQKIARARVSSLLKIKRLTADKAHQIQETAKQTIGNASSALSLELVQLIDSIQHYDKQINQTQEEINRLMTGLDSPITSIPGIGSRLGAIILAEIKTIYNFKNPNQLQAFAGLDPAIYQSGQMDNTGHMVKRGSSYLRYALIQAAKLISIYSPHFKTYLKLKISHGKHYNVAVTLIAKKLIRVIYHLLKTNQTFDEAKLR

SEQ ID NO: 82863 - protein, 422 aa, unidentified
MLEETQDTEEIIGRVAALDIGKAELVCCVRVPSAQGSGKRAQEVRTYQTMTRSLLVLADRLGELGVTRVVMEATSDYWKSPFYLLEAHGFDVWLVNAKDVKHLPGRPKTDKLDAVWLAKVAERQMLRPSFVPPPPIRRLRDLTRYRADLVAARTAEKNRVEKLLEDAQIKLSVVASDIFGVSGRDMLAALIAGERDPKALAQLARRRLRAKLSLLEEAFYGHFSDHHAFLLQTMLARIDQATADIATVEAHIDAEIAPFAQAADRLDEITGVGRAAAQVIIAEIGVDMGRFATPGQLVSWARFAPGVKESAGKKKGKATTGHGNPYLARVLGEAAAAAGKTNTFLGERYRRIARRRGTKKAIVAVGRSILIIIWHLLSDPDARFHDLGPGFYDTRIDADRRKRNHVRQLEALGYKVTLQPVA

SEQ ID NO: 82864 - protein, 355 aa, unidentified
MSRDIKYIGMDVHKEATVIAVLNANGNLVMESIVETKAGSLLQFIHGLRGELHVTWEEGTWAAWLYDLLKPQAQVLVCDPRRNALLKEGNKSDKVDARKLADLLRTGMLRPVYHGENGLRTLRELGRSYQTISQDLNRVMNRLKALYRGWGIACAGTQVYAPRYREEWLQKIEHAGVRRRAELLYQQLDGLQALRRTLRPELLAESRKHKATQLLRQIPCIGPIRAARLLALMQTPHRFRSKRQLWTYCGLGIETRDSAQYRFVRGQLQRAKKPQQIRGLNRNHNHEMKEIFKGAATRASCGVGPLRDFYVALLDKGMKAEMARLTLARKIAAIALTLWKKEERFDAEQLKTQAA

SEQ ID NO: 82865 - protein, 435 aa, unidentified
MDEVTDEPLYRDRVCGIDIGKAQMAATIRVPSDKDPARRMAETRTFGTTKKEVLALADWCRSWQVPAVVMEATLVIWKGPFYRLEAEGSECVLADAKQVRNLPGRPKRDPADSRWLAACFERGAVTSCFAATPEFRIIRLHARYRRDLIEERTRDRQRTEKLLEGAAIKLSSVLSDLHGVTGRDIPEHLIAGERNPRVLAQLARAAARRKISQLEEALEGAEFFTDAHAALLKTMLERIDRVTADIGGLSEVIEQLLAPYEEQLAQAESMPGWARRAAQDAIAETGVDMSRFATAGHLVSWGGRAPLDHQSGARKGRAKTKKGNRYLAGTLGETAIAASRTQTREGARYRRIARRRGKAKAQVAVGNTQLKVLHKLLSNPGMRYEDLGADYYERRADLRRQVAHHVGKLGAPGFEVTLCRIPDPGPDGPGQPQAA

SEQ ID NO: 82866 - protein, 322 aa, unidentified
MSDVKRVIGIDVSKEKLDIALRPDKAFWTMSNCEKKFGPLIDKLAGISPDLIVLEATGGLEMPVASALATAGLPVVIINPRQIRDFAKATGRLAKTDRIDADIIAHFGESIRPEIRPLKDEQTRELTEILTRRRQLVDMLTAEKNRLPTVHTKVKRDIAQHVKWLEKRIKDSDGELEKRIKQSPIWRKQDELVKSVPGVGPVLSLALLTSLPELGKLENRQISALVGVAPFNRDSGKFKGTRAIWGGRANVRSVLYMATLVAVRFNPVIKRFHDRLIKAGKKPKVAIVASMRKLIIILNAMVKNGTKWQNFSAKNLDFNHSC

SEQ ID NO: 82867 - protein, 465 aa, unidentified
MKKKTSKSEKEKGKTSIHEAWEKINPDAAGIDIGSREHWVCIPPGRREKTVRKFGTFTCELEALADWLQECGVKSIAMEATGVYWIPVFQILEARGFHVLLVNARQTKNVAGRKTDVQDCQWIQRLHTYGLLQGSFRPGDPYCVLRTYLRYRDELIGARSTQCQHMQKALQQMNLQLAQVLSDVTGLSGLAIIQAILEGQRHPAKLAALVDVRVRATQATIQKALVGDYRKEHLFELKSAFELYHTYEQKIQACDEQIVAETAGLPDKVDLSSKPLPARKQGRPAHKDKMAGQDMREWVYKKLGADLTAIEGIGITTALVILTEVGPDLSRFPSEKHFASWLGLCPDNRISGGKVLSSRTRRVVNRVSDALRIGATSLERSQTAMGAFYRRMKAKLGAAEAVTATAHKLARIVYRLIKHGEAYVRQGTVEAEKKYQERKLYALRKTASALGFELIAKQQVTQGVS

SEQ ID NO: 82868 - protein, 360 aa, unidentified
MREYYVGVDLHKRFSQIAVIDENGGKVDERRIDNDRDVLSQYFSGLPAGTGVAVESTSNWYWLAEVLEEAGMEMSLSHPLKTKLIASARVKTDRIDANCLAQLLRTNFLPTCHIPDGAQRELKQFIRYRISLVRMRTKLKNAIQNILAARNIDVPEVSDLFGKTGMKFLREVELDKMDRLRVNGYLSVLEVLEKEIKILDKMVRERAKVNEEAERLMSVPGIGYFSALTVLSEVGDVRRFPKAKNLVSYAGLNPSVRESAGQIHRGHISRQGSPWLRWIMVECSQVAVRRSRALKCFHQKIRSKKGYNMATVATARKMLEVIYHVLKDKCDYKENLVNTQHVLKPGEPVFSTGPEMRSWE

SEQ ID NO: 82869 - protein, 347 aa, unidentified
MRYLTATAASYVGVDLHARTLFVCVLDQAGTVQLSRNLPAKPAPFLKAVEPFGPDLLVGCECVHSWYWLADTCREHHLPFALGHAFGIKAVHASKTKSDAHDAEVLARLLRGGNFPLAYAYPHERRGLRDLLRTRLRLVRQRAELYGHVHTVRRQLNLDPVGSDVKYKSKRDGAADDITDPHARRGVEARLNLLAPLDTEIRRLERDIVVAADQHDPTERAALQTIPGVGSIISLTILLEIDTVTRFDSRQPFCSYARLITPKQESGGKIVGVGNAKAGNAWLKWAFSEAAVLSAQKDERMKKCLAKLQSTHGRGKGLSIFAHKLGRVVYHLLRTKKVFDVDRFVRG

SEQ ID NO: 82870 - protein, 433 aa, unidentified
MRHHGRGQERSTLAEEQFELFVGIDWASESHEICVLDAERRVIDRKTIEHSGAGMTQLCELLLKLSSHQPSRVAVAIETPRGAVVETLVERQFKVFAINPKQMDRFRDRHTVAGAKDDRKDAFVLADSLRTDLHLFHPIQLDEARVIRIRELSRTEEDIVQEQTRAGNQLRELLRRYYPQMLQLCPGMDEGWFLELIELAPTPEAAQKLTRSKVEQLLKEHRIRRLSAEEILTELKAPPLQLAPGAVEAASEHVLLQLPRIRLLQQQRSDVAGRIQSILDEMSQPGQNGEHRDVAIILSLPGVGRVVAATMLAEASQALAQRDYHALRSYAGAAPITRQSGKKKIVLMRQSCNLRMRNALYHWSRVSVQRDDQSREHYTQLRKVGHKHGRALRGVVDRLLPVLMAMLKSGTLYDPQRRANRRTPTIGSPTDQS

SEQ ID NO: 82871 - protein, 393 aa, unidentified
MQNCLAIDVAKGKSMVSLISSCGEVLIDPYEINHSINDFTNLLNRIKKLKLDNVSVIMESTGIYHRPIERFFLENNFKVYTINALYSKMYKRNLRKTKTDKLDCISLAELFFTTDFKQYIKPDDLYLNMNALSRQYFALSDLCTNIKNRYKNLIYLCFPEYEIIFKGEMIYGTIALSFIEKYPHADIISNTRIDALQNFFKKNNFRYWKRKANIIKEYALKSYPSVNMNDELVSNLSQLARLIDDYQKEIETIKYKLVFLAKKSKYFESINSIFGIGEFTTSIIIAELGDINRFNNIKELTAYCGLDPSIKQSGRSIDIHGPISKSGNKYLRKILFVSCLNIVRLSPKCHVQNDIEIYYRKKRNEGKHHYAATIACTTKLLRKILALCKQLDK

SEQ ID NO: 82872 - protein, 347 aa, unidentified
MRFYTKQHQTYCGIDLHARTMYICILNQAGEILVHHNFTASPETFLKVIAPYREEIVVAVECMCTWYWLADLCQREGITFVLGHALYMKAIHGGKATNDRIDAQKIAVLLRGGMLPQAYVYPAEMRATRDLLRRRMHFMRKRAELLTHVQNTNSQYNLPEIGKKIAYKANRNGIAERFADPAVQKSVAVDLALLGHYDALLRDIELAVLKAAKQHDANALYLLRTVPGIGEILSLVLLYEIHDIQRFPRVQDFVSYCRLVKCAKESAGKRYGTSGTKIGNAYLKWAFSEAAVLFLRTNPAGQKYLSRLEKKHGKGKALTVLAHKLARTVYYMLQRTTAFDMNKFLTG

SEQ ID NO: 82873 - protein, 339 aa, unidentified
MFIIGIDPHKRSHTAVAVDRFETVLDTIRVDADRHQRSRLLEWATRFEPRAWAVEGATGMGAMLAQQLVSAGEHVLDVPPKLSARVRLLERGRIDKTDPNDARSAAIVAWRTPALNVVTVNDEHRVVLRLLADRDHQITAQRTRSICRLHALLCVLIEGGTAKSLTVARAEKLLASVHADGPIILERLTMARQLIEEVRTLDAARAEIRRRHVTALEASKTTVTNVFGIGPLTAAIIVGRVGDVRRFPTAGHFARHNGTAPIEASSGPKTRHRLNPRGDRQLNHAIHMAAVTQVRNDTPGRAYYLRKQAEGKSRKEAMRALKRRISDAVYQRLITDAHR

SEQ ID NO: 82874 - protein, 344 aa, unidentified
MTYYAGIDVSLRSVNICVVDDEGELVAETKLPSDVQEIIAYLDELDCNIDLVGLEAGTLAQYLTYGLQSAGFDVACMEAQQVKAALSALRNKTDKHDARGIAQLLRSGWYSEVHVKSMQSHHIRMLLTSRRAVLDKCIDLENEIRGLFKIFGIKLPPKLGHGSFDKAVRAIIEADEKLSHALLPMLDARLVLYKTFRVLDNRTRHLAWGDEVCELLMTAPGVGYVTALTFKAGVDDPSRFRRSRTVAAHFGLTPRRSQSGEMDIEGRISKSGDVEVRRSLYVAANSVLTRSSRWSSLKAWGMKLKKNRGHKKAVVAVARKLAVILHRMWIEETQFQWGTEGVRS

SEQ ID NO: 82875 - protein, 340 aa, unidentified
MNNISIVGIDLAKHVFQLHAVDDSGHKVFSKKIKRDQLRTVMANLPPCIVAMEACGSAHYWAREISQLGHDAQLLPPQAVKPFIQGHKNDARDAAGITEAAARPATRRVTVKTQEQQSLQALHRVRSRLVRARTAVGNELRGLLNEVGIIVAQGHRVIRQGDIRQLLDERHDQLGATLCNVIHDLLDEWLALDTRIAEYDKRLEAYVQASPCTKQLMSVPGIGPVNATLLVSHMGDPKRFPNGRQFSASIGLVPRQYSSGGKNVLKSITKRGNSEVRRQLVHGARAALRQFQRQEHPDRLAQWVIRLAARVGQRKAIVALANKMARICWSILAHQRSYQA

SEQ ID NO: 82876 - protein, 377 aa, unidentified
MTHTVATIEPTTVVGGVDTHLDFHVAAALDGYGALLGIETFPTTPAGYRALLAWLAGFGPVGVVGVEGTGSYGAGLARHLHAAGIAVAEVNRPDRSARRRRGKTDAYDAEAAARTALAAHREHQTPAAKLNHGPVEALRAYKVAHDQAVKQRTATLNLMHQLIVTAPDDLRQELAGLTKHTLPDHCARFRTPTPDTTDTTNTPTDPRAATKATLKRLGRRVLTLVEEIEFYDSQITALTKSIAPTVLDQPGVGPQTLAQLLITISSNPDRFTNEAAFAALCGTSPIPASSGKTDRHRLNRGGDRQANCALHMITLSRLRIHQPTRDYIAARTADGRSTPHLRRMLKRYIARELFTLIRDDLRAYNTHAEAHQARQAA

SEQ ID NO: 82877 - protein, 431 aa, unidentified
MPPKKKNTSTVSVVHHICCGLDVHKKTVSACLLWSDSFGTEQCEVMEFETFTDDLIRLREWLIERECPVVAMESTGPYWTPIHNILEGLFQVILVNARHMRNVPGRKTDLSDSRWLAALLRHGLLRAAFIPPKYQRQWRDLTRMRNKYQQTVGDFQRRVHKLFQEANIKIDSVLSDLFGLTGRSLMRLLATKGSTPTLGEVEQCLRGSLKKKREEVYRSIQGFFEEHHRVLLAVMLETIEKLESQVEALDQRITQSMRTHQEKIERLDEIPGISDVSAPAVLAEIGPTLDAFPNADALSSWCGLCPGNNQSGGKRFSGKSRVRKNRLKTIMIEIAWPAIKKKESYYRAKYYALKARLGPKKAIVAIAHRILKAIYHVVKHDTPFKDLGEAYLLEKNKDAKVRYLTRQAALLGFELVPVHQASPQPQQRFFS

SEQ ID NO: 82878 - protein, 345 aa, unidentified
MECYVGLDVSLKQTSICVVNEKGLVVREGVVDSVPEAIAGFVRSKAPGAVRVGLETGPTAAWLWTELARLDLPVICIDARHAKAVLKMQVNKNDRNDAAGIARIMQTGWFKEVHVKDLDSHAVKALLASRALLVKIKRDLENQVRGLLKNLGLVVGHGTFNVFAVRAKELIADRPELTSAVSPLLTARTAIEQQIGELDRQVLKLSRQDAQARRFMTVPGIGPITALCFKATIDDPARFRRSRSVGAYIGLTTRRHASGELDWSGRISKCGDAMLRMYLFEAAGVLLTRVPKWSALKAWGTRLTKRNGLRKAKVAVARKLAVILHRMWVDGTEFNWSNNNKEVAA

SEQ ID NO: 82879 - protein, 408 aa, unidentified
MDVVYSHVCGLDVHKKTVVACILTPNEKEIRTFSTMTDDLLQMVDWIKSKGCTHAAMESTGSYWKPVYNLLETEEIQTLVVNAQHIKHVPGRKTDVKDAEWIASLLRHGLLRGSFIPPRDQRELRELIRYRRSLIDERAREANRIQKVLEGANIKLSSVASDILGKSARSMLEALIAGNEDPEALSELALRRLKNKKQDLQRALKGLIGPHQRLMLQTQLRHIDELDRLIQQLDEEIKRRMLPFEEALERLDTIPGVARRTAEQIVAETGTDMSRYPSAAHLCSWAGLAPGNNESAGKRKSGRTTKGNPKLRRALVEAARAAARTKNTYLSSLYHRIAARRGANRAAVAVAHRILVIVYHLLKDKQNYNELGPQYYEERRREQIAKQALRKLQSLGYNVMLEPANHTA

SEQ ID NO: 82880 - protein, 371 aa, unidentified
MKQQTKSSNITVGLDLGDRRHRFCALDERGEVVEQDSICNDRVSLRKLAGRYHGALGVMEAGAHSPWISRFLEALGWRVVVSNPRKVRAIYQHERKSDQRDALMLARIGRMDLALLYPVRHGTAEAQQDLLRIKLRDSLVRARVAVINSVRFTLKSLGYTVRNPSSARFHKVVMEEVPESVREMITPSVQALAELTARIKMLELEINTLAQMKYPQSAQLQQIPGVGPITALYFVLKIEDPNRFAHVRDVGAYAGLCPRRDQSGESDPQLRISKRGDAYLRRLLVSAAHYILGPFGPQSALRAYGLMLAADGTARAKKRATVAVARKLAVLLLSLWKSQQPYQPFPAACLNGEQEDRRSGTIALHRMEATD

SEQ ID NO: 82881 - protein, 341 aa, unidentified
MQITTIGLDIAKNVFQVHGVDGDEKVVVRKQLRRSQVISFFQELSPCLVGLEACATAHHWARELAKLGHEVRLMPAKDVKAYVKRNKNDAADAAAICEAVSRPTVRFVPVKSAEQQAQLMQHRARDLLMRQRTQLINAIRAHMAELGITAPQGREGIKQLLAIIGDNGDTRLPIDARASLMVLAAQLQAMQTTIGSLERRIVARHRSNQDSKRLQTIPGVGVIGATAIVATVTDPTAFRSGRDFAAWVGLVPRQDSTGGKPRLGPISKQGDRYLRRILVGGAVSILRRAKLNPQRYPWVTRLLARRPFKVVAIALANKMARVAWALVAKGGTYRIPRLEAV

SEQ ID NO: 82882 - protein, 343 aa, unidentified
MQAVTTIGLDIAKSVFQVHGIDAEGNVIVRRQLKRRHILAFFQKLPLCLVGIEACASSHHWSREIKALGHTVRLMPPAYVKPYVKRHKNDATDAEAICEAVRRPTMRFIETKTPEQQSCLTLHRTRHLFIRQQTAAINAIRAHLAEFGIVASVGRQGVDKLLDIVADARDTRLPEVARACLAALGNQLRMLKAQILNFDRMITAWHRSNETSKRLDALPGVGPALATALVASVADPKAFRSGRDFSAWVGLVPKQNSSGGKQKLGSISKQGDRYLRSLFTAGALAVIRYAKIHGTGHRPWLTALLARRPTKIAAIALANKIARMAWAMMARGERYREPVALAA

SEQ ID NO: 82883 - protein, 403 aa, unidentified
MAAVMIGVDPHKGSHTAVVISPAEEPLGELRVRASAGQAGKLIGWAAAWPERTWAAGGAAGLGRLLAQQLVAAGERVLDVQPKLASRVRLLQAGDTNKNDPNDALSVAVAALRSTVCREVIADDYRVVLKVRAERHRDLARTRNQVACRLHSVLCDLVPGGHQKEISAAHAARILAQATPSGAVALARAELAAEFLADLRHLDGQLRDTRKKLAAAVRASGTTLTQVFGVGPVIAGTVIGDVGDVARFPGRDHFASYNGTAPVEVSSGNRKIHRLSLRGNRRINHAIHMAAITQLRHKHSEGRAYYDKKVAEGKTHKEALRSLKRKVSDAIFARLQADARQARESGPGGQPGNGSDSSAASSHPERQLFGPATPGPDTTIRPGTTAGTPPPSKPASKKTRPAT

SEQ ID NO: 82884 - protein, 319 aa, unidentified
MIFVGIDVAKDKHDCFILNSEGTVLADVFTIANNRIGFETLLSRIQSCSQGESKIKVGLEATGHYSYNLLGFLLDSGLATYVINPLHTNLYRKSLSLRRTKTDRIDARTIAMMLMSDVDLKSYSNTAYHNEELKSLTRYRFDKVKERAKLKSSVARLVNILFPELEKLVSSLHIAVVYALLSNYPGASYIANANTEELAETLCTASKGRYTKSKTAEIQVAAGVSIGSKMPAKSMELKHTIALIRELDKEISEVESAIDKITSQMDSPIFTIPGIGRHMGAMILAEVGDFSNFASADKLLAYAGLSPSTYQSGQLQNRS

SEQ ID NO: 82885 - protein, 414 aa, unidentified
MDVIVERCAGLDVHRDSVVATVRVPGKGKSRRRRAQETRTFATTIAQLEQLGDWLESFGVTLVGMEATGVYWKPVFYVLERRFECWLLNAQHLHNVPGRKSDVIDSRWCCELVELGLVRPSFVPPPEIRRLRDLTRLRATEVQERSRSIQRLEKVLQDAGIKLTSVASATYSVSARAMLEALLGGVTDPVALAELAKGRLRTKIPQLEEALASRFDVAHHGVLVAGLLAHIDALDQAVATLEARIAIATRPYADLIELLCTIPGVGVRLAEILIAECGLDMTVFPTAGHFVSWAAICPGTNQSGRKRRSGKTRHGDTWLRTALTEAAHAAVRTKNTYLAAHYWQLRGRRGQFKAIGATRHDILIAYYHITRDRVPYHELGPDWLARRHSPEHRTRRLVKQLEALGHRVTLEAAA

SEQ ID NO: 82886 - protein, 356 aa, unidentified
MRQFSKEPVTTIGIDLAKNSVHVFGVDAQGEAVFSRKLARRALSAFIAQQPSCRIAMEACGSAHHWARTFRGLGHEVVLIAPQHVKPFVKSNKTDAADAEAICEAAQRPRMRVVPIKSVEQQDIQAMHRMRSQVIAQRTALVNQVRGLLAEYGLVMPQGRKAAMARLPEILEDAGNGLSERFRTELHGLLEELRHLDERVAHYDSQIQAIAEASESVQRLMTIPGIGPLVATALLATLGEDWGLFANGRALAAWLGLVPRQHSTGGKPRLLGISKRGDVYLRQLLIHGARAMLRWVERKDDATSRWARDLKQRRHPNVAIVAMANKLARIAWAVMTTGKAFDPARGALAKGAVATA

SEQ ID NO: 82887 - protein, 412 aa, unidentified
MKVVHEICCGIDVHARMLVACLLLADGQKEIRSFSTMTDELLRLRDWLVAAQCTQVALESTGVYWKPVFNILEDALTVILINPEHARALRGHKTDVKDAEWLADLLRHGLLRASFIPPPEIRELRELTRYRESLVREQSAVANRIQKVIESGNIKLSQVASDALGASGRKMLWALARGETDPVKLAALAQRQLKEKMPQLQRALQGRLTTNQRFVLRELLQRWEELEAADRRVTKEIDRYLQDRPKLARARENLDSIVGIGPRAAEVIMAEIGVAMKPVFASDAHLASWAGICPGNKASGGKRLSGRTRKGNSYLRAALVQAAWGATMKKHCYLSSQYFRLVKRLGRKKALVAVAHSLLVIIYHVLDREQSYTELGGDYFDRHHVEQQREYFIRRLQLLGLKVNVEDLSAAA

SEQ ID NO: 82888 - protein, 465 aa, unidentified
MKTDKKLWRNRKAKKELARRLQSENPGLEVVHAHAAGIDVGNSAHYVAVRPDRDPQPVRRFDCFTADLHRLADWLQSCGVQTVALQSTGVYWIPLYDILEERGLEVYLVNARHTKNLPGRKSDVQESQWLLKLHTYGLLNNSFQPTSEIRVLRTYWRQRAQHVSGAATCIQRMQKALTQMNVQLANVISDLSGVTGQLIVRAVVAGERDPRKLAELSHPRIQASRGEIAKSLEGNWRQELIFVLQQEMEMYDTYQRRMAECDQELQKHLTAFADTVPPPAKEELPPKKKGKQNKNNPHFHLADELQRITGVDLTRIDGVDVMVAQTLVSEVGLDMSRWKTEAHFASWLGLCPDNRISGDKVLSRGTRHVVNRAATALRLGASTLLRSQTYLGAQYRRLRSKLGAPKAITAMAHRLARLVYRMLKYGQQYVDKGAEYYDQRNRQQQIEFVRKKAAQLGLQVTPAHA

SEQ ID NO: 82889 - protein, 320 aa, unidentified
MSKKKSKTFIGIDVSKKLLEVATHESDYQFRCTNKASAFPELIAELIALRPALIVLEATGGLEIPVTAALHAAGLPVVVVNPRQVRDFAKATGQLAKTDRLDARVLAHFAAAIKPPLRPIKSKDELELDALVGRRGQLIEMLTAEKNRRGSAATDTVREEIKKHIDWLEERIAELDEQLQAQLKTSSLWQAKDVILQSTPGIGPVVSFSMIADLPELGTLNRQQISKLVGVAPLNNDSGQQRGTRHIYGGRARVRSMLYMAAFSATRYNPVIKEFYERLMAKQKPFKVVMTACMRKLLTIINVMVRDNTPWKTNDQPILP

SEQ ID NO: 82890 - protein, 352 aa, unidentified
MDRYVGLDAHPTSCTLAVMGPSGKRLKSMVVETNGAALVEAVKSIPGRVHLCLEEGTQSAWLHELLSPHVAELVVVVAPENKGAKDDLRDAWSRADELRTGSIRTRVYKAPLHLAALRNAVRGYGFAVRDAVRAMNRLRSVFLSRGVAVNDGIYSVKGRVRWLGKLTAPHRQLAEWLGRQLDQLVPLREEAEKWLLEEAKTHPIIRKLATAPGMGPIRTAQVVAITANPHRFRTRRQYWSYCGFAIVTRSSSDWVQGKDGRWERSQVRQTRGLTRKRHPLLKSVFKGAATTVITQLPDHPLHKDYERMLAAGIKPNLAKLTLARKIAATVLSMWKHQEVYDPQRHRAVSVKA

SEQ ID NO: 82891 - protein, 346 aa, unidentified
MRFYTKQHKYYCGIDLHAKNMYVCIVDQQATILVHKNIPAHPDYLIQLINPYLDDLSLAVECMFTWYWVSDFCLKHNISFVLGHALYMKAIHGSKTKNDKIDSRKIAMLLRGGLIPMAYVYPQRMRATRDLLRRRMYFMHKRSELLAHIQNTRSQYLVEAFDGPVARKRHRHNVVEKFHEQAVAKTIEADLILLNHYDSVINDVENYLQRRVKEHDYNTFYLLRSIYGVGKILALVMLYEIHDIRRFERVQHFTSYTRLVKPRKESDGKVKGGSNKKMGNAYLKWAFNEAVLLLIRESEEVKQLHMKLKNKHGKKVALAILAHKLGRAVYYMLTHKKVFDVDKYVN

SEQ ID NO: 82892 - protein, 340 aa, unidentified
MQIAVLGIDLGKNSCSIVGFDDGGAVVLRRRMRREGVIKLAGKLRPCVVAMEACCGAHHLGRVLRAQGHEVRLMSPEYVRPYVKSQKNDDRDAEAIAEAATRPTMRFVELKSEEQLDMQTLHRARDRLVGERTALINQLRAVLLERGITVAQGRRKLERHLAGLDAQGGLSQRMRVLIEDMRLQWCELDRRIAELDKELTEWVRNEEAARRLMTIPGIGVLNATALIAAIGQGESFARGRDLAAWLGLVPRQLTTGGRPRLVGISKRGNKYLRKLLIHGARAALPTLLESPTSLGAWLRGLMTRMHKNAVVVALANKLARLAWAVLRHGEMFRFAVSAAA

SEQ ID NO: 82893 - protein, 426 aa, unidentified
MWDAKRRVLKIKSLKHGIIQDKRGNVMRAVFGIDVSKTSSEVAILVNGEKVHGYSILNDAIGFNRLLGDLKTVHNPEIIFEATGVYSRRLQAFLEECGYAYTRLNPLEAKKQLDSLRVRKTDKIDAEKLAKSQLVHNRKPTYVQEEVYQHLRDLSRFYQNMTEDLVRAKNRLHKVLQVTFPELENLLSTPTGEQYWNLVMAFPCKEFVLSLSQSDLYEIIRQSTSKRISEKRIAYLTDKLIKLAKQSFCAVKKTSPMLEEVRYYAQELLRLSERRQVVLNDMIALAQPLPEYDILRSIPGISETTATSIIGELGDIRRFHSANQINAFIGIDLRHYKSGNFLAQEHITKRGNPHARKILFKCIHNIASASHTNPCHIADFYEKRKRQSTIASTKPHTIASIHRLIRTMYYLITHNKLYDYSLTQNR

SEQ ID NO: 82894 - protein, 402 aa, unidentified
MNCVGIDVSKGKSMIAVMRPFGEMVVSPFEVHHTANELSELARLLKSLDGETRVVMESTGNYHTPVAWLLHDAGLYVSVVNAMLVHDYGNNSLRRAKTDKKDAIKLANYGLDHWLTLPRYVPEEDTRLLLKACYRQYQQYSKVQTMLKNNLISLLDTTFPDANRLFTSPPRTDGSEKWVDFVATFWHCECVCGLSEKAFTTKYQKWCRKHGYNFSEDKALDIYASACGHFGVIPKTDTAKLLVEQAISQLRTTSAALAALKKEMQSLAASLPEYPVVMGMFGVGPTLGPQLMAEIGDVRRFHSKKALVAFAGIDAPPYQSGQMDVRSRSISKRGSAALRRTLFLVMGVYLQSAPMGEPVYQFMDKKRSEGKPYRVYMMASANKFLRIYYASVKAYLDSLEHD

SEQ ID NO: 82895 - protein, 364 aa, unidentified
MKRKVYVGMDVHKETIQIAYLTSNSKEILKEQQIKHNEVQIKKFIKKLKLEWNEIHCCYEAGVTGYPLYRYLKSLGVNCILVAPGKIPRQNTDKIKTDKRDAIKLARLMRSGELESIHVPSEEDEAVRDYLRSRDSLRLDLGRNRQKLMKFLLRKDIKYSTTKYWTVSHYKWLNNLHFNNEILQETFNDYYSRVRVQEENLKSMDKKIQEIAESEPYREKVGILRCFRGVDYLTAMFLLCEVNDFKRFKTAGSFMSFLGLVPGEYSSGSKRKQTGITKTGSPRLRRILTEAAWQHRFPGTGSKIITARRSGQPALVVALAEKASLRLHKKFRNLQLRGKTPQVMITAVSRELSGFLWAAMNLVA

SEQ ID NO: 82896 - protein, 412 aa, unidentified
MDVYCGIDWAEDHHDIALVDRDGQLLARRRISDDAAGLVGLLALLADHGDTPDDPVPVAIETPRGLLVACLRATGRQVYPINPMAVARYRDRHSIAGKKSDHGDAVVLANVLRTDLHAHRPLPADTELAQAIAVLARAQQDAVWDRTTAHNKLRSHLREYYPAFLAAFAEARGGILRPEARTVLAAAPTPADAATLTLTQLRGLLRKAGRIRGIDAEATRLREAFRAGQMRQLPLVEAAMGRQALALLGQLNAACAAADDLERAATESFSLHPDAGIITSFPGLGALTGARVLAEIGDDRSRFQDAKGLKAYAGAAPITRASGKTKSVTRRHIKNNRLNAAGYTWAFSALTASPGARAHYDRRRADGDRHAGAQRNLFGRLLGCLWHCLTTGCEYDEATAFPTTPEKLPKAA

SEQ ID NO: 82897 - protein, 392 aa, unidentified
MIFVGIDVAKNKHDCFITNSDGEVLFHSFSITNNLSGFTELYQNILSVMDGVNKVKVGLEATGHYSYNLLGYLLDKGFPTYIINPLHTNLYRKSLSLRQTKTDKVDARTIASMLMSDVNLKSYSDTSYHNEELKSLIRYRFDKVKERSALKVSISRLVCILFPELENLVPTLHMTSVYTLLFEFPGASYVASAHLTKLTNLLSKASKGHYDKDTAVLFRETARNSIGSVMPAKSLELKHTIKLIQELTSEIDEIEAAIKQIMDEEIKSPILTIPGISYRMGAMIIAEIGDFSRFDSADKILAYAGMSPSTYQSGQLDNCHSHMEKRGSRYLRYALYNATKYVCHWDKSFGAYLEKKRSAGKHYNVALSHAAKKLVRTIFAMEKSGQPYIAAI

SEQ ID NO: 82898 - protein, 411 aa, unidentified
MEVLHDRVAGLDVHKKTVVACVRTPSDGRARRSETREFETFIADLERLRDWLASEGVTHVAMEATGVFWKPVWFVLEEAPFELLLVNARNMRMVPGRKTDVADAGWIAQLLEVGLLRGSLVPPPVIRELRDLTRYRKRLIQDRTREGQRVEKVLEDAGIKLASVASQTMSVSGRAMIDALIAGERDPAVLADLAKTRMRSKIPELTRALHGRFGDHHGAMLRFHLAHIDHLDATITSIDNQIDTKLVGFAEARRRLMTITGVGKTTAEVLIAEIGVDMSAFPTAAHLASWAGVCPGNNESAGKRRSGRTNPASPWLTDALIQASWAAARSKDTWLSARFWRLARRIGKQKALIAVAHSIVIAIWHMHTDQCDYVDLGPDWWNKRTDPTRETERLRRRLEALGHHVTLEPAA

SEQ ID NO: 82899 - protein, 387 aa, unidentified
MPQPAAVLPHASPDYDRTLVLGIELSSKSWVLAAQVPGLAQVKAKRTIAPTKEALLEALASYRARAAAAGHQIERIVSIYEAGWSGFWLARWLITQGVQVHVVQPSSVLTDRRMRRAKSDGIDAELLLRTLLAWLRSEPRVCSMVPIPDQTDEDARRAVRERGELVAERVGLVNRIAAVLATLGAGDYNPLLQSRRRRLNELRTGLGEPLPPHARAKIERLLARLELVLAHITELERERNAVAETAAPDHAARMIQQLAGLRGIGVQSATVLVREAFVRRFANGKALGAYAGLTATPYSSGGLEREQGIGKAGNRRLRSVMVELAWLWQRYQPGAAQVVWFRERVGKTGRRLRKVMVVALARKLLIALWRYVTDGVVPEGAAMKPAI

SEQ ID NO: 82900 - protein, 340 aa, unidentified
MGLYTAFDLHANNSYGAIIGEQGQRIKRQRLANDPELIFQFLLPYKAEIVGVVVESTYNWYWLVDALMSEGYKVHLANTAGIQKYNGLKHSDDQDDAFWLAEMLRLNILPEGHIYPKEERPIRDLLRKRGHLVKQRTSMIISLQNIIDRNCGTRIKANDVKRLKEDRVAPFVAGNEDLALAGLVSKETIDFLTVKIRAIESAVENRIKLKEPYKHLLTIPGIGKILSLTIMLETGAIDRFAKVGNYVSYCRKVSTRWTSNDKKKGKGNKKNGNRYLAWAFSEAAEFARRYDPQAKAFYNRKLQKTNFMVAHNALAHKLARAAYHVIKEQTPFMPEKLFAS

SEQ ID NO: 82901 - protein, 342 aa, unidentified
MKFYCGIDLSARDCHVCVIDQQLKILVQQKLRNELPKICQLLEPYKANLKIVVESTFNWYWLIDGLQAEGFEVVLAHTLGLYLITGAKVKTDRRDAYSLAKLLLVGAVPAAYIYPVETRPVRDLLRRRLHLVQVRAGEYGSLRRLLLRQGILSSKQQEIKTATETELEQWFTHPLGRLHASQELRRIELYSQQIAELEKTILELAQTERSYELLQQLPGVGQTIALTILYEVGELTRFANVKVFSSYCRVVPGIAQSGNVTGRGRASKQGNHYLKAAFSQAAVHAVRCYPKVRRYYERQLKRHQGRGRQMICYNIIAHKLAQAAFHVLKEQTEYREELLFGR

SEQ ID NO: 82902 - protein, 333 aa, unidentified
MDQKYCIGLDVHKNQTTYAVKNNKGVTLMEGKCATQYKDLSSNLSKYIDKSSIVMEACTCYYHLYENMKKEGLDVHVANVIQLRKCVGKNDKIDAERLADMYRLNALPESYIPSKEIQTLRIMINIYHNIVRENVRFQNQIGAVLDMNGVFTEVNDFSSKNGMIFLSQYLMKNNNFSIRYLYDEIVNLNKKQEQIEIEIAGYIENNFDEEYRLLTSIPGIGKILAAYLIAEICPIERFADKKKLRRYAGVIPIKEMSDKKVYATYLPKGSSRKLLRYALVLAANCASRFDNRLKEYYKKKKKGSNHGHAIMCVASSLSDIVYNVLKTKQNYKK

SEQ ID NO: 82903 - protein, 370 aa, unidentified
MKDSITIVGLDVHKDSIEIVIAETTGSREVRHFGKIGGNMASLDKAIRKLKSSHRELRFVYEAGPCGYEIYRHLSRQGFHCVVVAPSMIPKKSGNRIKNDRRDAEALARLYRAGELTSIYVPREDDEAMRDLTRAREDAGKAQRKARQQLGAFLLRHGVRYSGSSSWKSAHMRWLSDIKMPHPAQQITLQEYIHAVEECTQRVERLTEQIHKLLLQWRMAPVVEALQALRGVAPIVAATTVAEIGDLGRFQTPRQIMAYLGLVPSEHSSGNCTRRGGITKTGNGHVRRVLIEAAHAYGYPARVSRHLLKRQEGLPQPIREIAWKAQIRLCGRFRRLMAKGKSRNTVVAAIARELSGFIWAIANQVPVPNE

SEQ ID NO: 82904 - protein, 343 aa, unidentified
MEHFAGLDVSVKVTSLCIVDDAGGIIREAKIESDPDALLQVLKSGAYHFKRIGLEAGPLSQWLFSALAEAGLPVICVETRHMRAALKAQINKTDRNDARGMAQMMRAGLYRPVHVKTVRSQKLRMLLTHRKLLQSKAIAIENDLRATLRNFGLKVGMAGAVKFEARIKELVENIPDLAILVEPLLIVRRTLREQFGIVHRRLLAVVRQDEVCRRLMTVPGVGPVVALTYRSTVDVPARFRNSKAVGAVFGLTPSKYQSGEIDRTGAISRCGDEMMRVMLYEAAQSMLYSRKWSWLKAWAMQIARRRGIKKAIVALARRLAVVMHRIWVDGTEFRWTRQEAAAA

SEQ ID NO: 82905 - protein, 321 aa, unidentified
MSQISAFVGSDVSKLWLDVFVRPLGKHERFANSAKGIAAMAAWLRRLDVAIAWIGLEASGGYERDAAQALSAAGLPVTLLDPLRIRRFAQAGGTRAKNDRIDARVIADYLVAFSDKLRLLAFDPHRSALAELCRQREALVETKVMLQNRAEHHRHPLVRRMDARLLRNLEADIGALDAEIRGLLAGVPGLAALEELLRSVPGIGAVAAATLIAELPELGQLPGGKIAALAGVAPFDRDSGAISAPRHIAGGRAAIRRVLYMAALVGAARGCNKPLAAFYRRLTQAGKPPKLVLTACMRKLVELLNTIAARGYPWKPVLAEQ

SEQ ID NO: 82906 - protein, 350 aa, unidentified
MPVSYIGADVDSKMTDLAVERGQKIVERYRVPTTVPALREVLGGIRRPRQLAFEEGPLAHWLWRNLRQEVDRLVVCDPRRNAYIARDGDKDDPIDAGKLAELLRGGFLREVYHSSDDRQTLLKRWVGLYHDRVGELTRQINKVRGCCRHYGLRPGSASWRDAQARAEWMAEVEGDLREQLGVLWPGLDTTLHQVEQCRRWLRRLGKAYPIITHWQALPGVGPIRATTLYAYLDTPWRFRTPEKLWKYCGVGLERASSGKDRWGRPKVGLLQLAWQVNKRLKNAVVGAAVSAIEQGANPFAARYEALCRKGLTPANARHTVARKLLTVMWGMWKTNRPFNPALLERTGAER

SEQ ID NO: 82907 - protein, 312 aa, unidentified
MTQETRFVGLDVGKLEIYAFDAGRDAEIIVTNTGSGHLALADWLGDPNDIVIALESTGGYEWMVWQNLNDAGFDARQVSAAHVRSFSRASGALAKTDPIDARLIAQFIAFRPTAGRKPPAYKVREINRLNVKRRQLVEMRKRLRCQVKQRHSPQLDEMDTDLLDLLTQQIADLEGLIETAISSCQELSNRAKILRTIPGIGPVLMANLIGDLPELGHCSDKQIAALAGLAPINNDSGKMAGKRAIKGGRYAIRGLFYQAALVASNHNPVLRIFAKRLREKGKPHKVVLIAVARKLLIIANVLVAKNAVWEPN

SEQ ID NO: 82908 - protein, 318 aa, unidentified
MNTNTRQNINVGVDTGKSQLDIYVRPLDIYFTVPNTDKGISDAIKIIKKHKPQRVVIEATGRLEMPFILACDKAKLPYVVANPLRIKRFAEAIGQRAKNDRLDAALIAHYAERVQPELTKLKSENIRLMSDLVTRRNQLLTMQTMERNRLQILPKNISSTITPILTALKNQLEKVEAKIEKLIESCPEYQAKNTILQSMPGVGKILAASLISNVPELGFITNKQASSLIGVAPITRESGRFKGKRMIKGGRPQVRTVMYMAMMSAIQCNPVFKATYERLLAAGKPKKVAIVACMRKMVVTLNSMLRDGAMWDKDSVKN

SEQ ID NO: 82909 - protein, 347 aa, unidentified
MRFYKQQHQFYCGIDLHARKMYVCIIDQKGKTRLHKNIPTDAEVFFELIFPFLEDIVVGVECVFCWYWIADLCAQHSLPFVLGHALYMKAIHGGKTKNDKIDSFKIAALLRGGNFPLAYTYPAHMRATRDLLRRRMYLSRRCGELVAHIQNTNPQYNLPEFAKKISRKYNREGVAERFEDPVVRKSVEVDLTMIDALNQTLRQLEWYIEKSAREQDYKTLYLLRSIPGVGQILALVILYEICDIKRFATVQDFSSYARLIRPAKESDGKWAGKGNKKIGNHHLKWAINEAVILMLRESEQAKNFVDRLTKKHNKGKALGILTHKLGRAIFFMLKNNEAFNMKRFFSS

SEQ ID NO: 82910 - protein, 349 aa, unidentified
MDVVHPRCAGIDVSKRDAKVCVRIASEGRAKAKSTVTTWGAVTNQVLALCDHLIAEQVTLVVMEATSDYWKPFFYLLEDGPFEVMLVNARHVKNLPGRKTDVSDAAWLAQLGAHGLVRGSFVPPQPVRQLRDLTRTRTIIVRERSREIQRLEKLLEDAGIKLSSVASDLTGVSGRAMLEALVEGVRDPIELADLAKRRMRIKIPQLVEALTGRFNEHHAFLVRLHLNQIDQHNQSIQDLTDRIEVVIEPFRGARDLIVTIPGISTTVADVIIAETGGDMSRFPSAGHLASWAGTCPGSNESAGRIKSTHTRRGTPTSRAPSGSPRCQPHAARTPTSPPSSVGSHHDAGP

SEQ ID NO: 82911 - protein, 367 aa, unidentified
MKKVSTVAAEASKKISQQKLTVGLDLGDRNSWYCVVDEAGQIRLEQRVSTTAKALREVFGAMPRSRIALEIGTHSPWISRMLSELGHEVIVANARKVGLIGESRKKDDRLDAQTLARLARIDPELLYPVKHRSAQAQADLMMIRARAGLVRARTALVNTARGLAKSYGERLRGCNVRNMNPEKAEGLSPELQSALEPLLAGIEAVSERIREYNERIEQLAQQSYPQTALLKQVKGVGTLIALTYLLTLEDPHRFGKSRDVGCYLGLQPGRRNSGQSEPQMHISKEGDPYLRTLLVQGAQHILGPFGIDCDLRRWGLKLAERGGRNGKKRAIVATARKLAVLLHHLWVSGEAYEPLHNSQRSPLAIAA

SEQ ID NO: 82912 - protein, 405 aa, unidentified
MVNVGIDLHKTQFTICVRWFGVEKENEFFKYPTTEEGYTAFLKRVSIWQECGEVVRVGVESTGNTRYFKERMEAAGIEVKVINTLKMKVVNESVKKTDKHDAATIAEFLEKDMLPECQLCSRESEQLRRLLKVRTTLVRSIVVIKNQIHALLTAEGIERAKGTLQSKKGRKQALDTLNQCTNGLVVQPLLETIDQLGENVKRIEKQLRELTVGDRVVELLLTIPGCGEICAWTIRAYLDDINRFSSAKKFCSFAGLAPWVQNSNEIIHHGRITKRGPQELRTAIVQIVMGLRRMKAKTLTWRLMQRYEMMKAAKGSGKSIIATARKIAVIIWRMLSADAAFDLEKMVDQKLAKKSESMSKRARAEDNEIIEERAISLLTKNETMLTVDKKSKKTGVAREKLLKAG

SEQ ID NO: 82913 - protein, 408 aa, unidentified
MNTLYVGIDVSSKSNVVYLMLPNGDKHSNFSVANSHEGSTQLVKRILSALTSHSLDTVLIGLEATSVYGDNLVYFLREDATLAPFNRKIHVLNPKQVKKFHDAYNDLTKNDYVDSFVIADCLRFGRINKEVYLGDYRYKALQNLTRARFFAVQNLIKEKQRFMNVLFKKYSTMTQEKVFSDTFSTTALAVYDEFDSAEALANMDLHELTDFIIEKGKNRFPDPDAVAKAIQKAARSSYRLPKTVNDSVNQVLSISITSMKALESQIKEFDKAIKAQMELLPNVLISIPGIGPVYSAGIMAEIGDINRFDNQAALAKYAGLAWKQHQSGSFEAEVTRLIPSGNRFLKYYLYEAAFSLVRCDKEYSDFYHLKYKEVNRCQHKRALALTARKFVRLVFRLLKDNRLYVPAK

SEQ ID NO: 82914 - protein, 338 aa, unidentified
MNPIARVGIDLAKDVFHVYAVDANDRPVMSKCLTRKQLREWLATAPPCYVATESCGTSHHLARYAEQCGHHVQIVASHYVKPYPKGNKHDAADAEAICEAASRPQMRFVPGKTIGQQDIQCLHRVRQRRMEERTALMNQMRGLLLEFGIPVRLGPGGLRKAIPILLNDSRNELSGRGRRLIADPFNEWMDLENRIAESDREIQIVFRQSEACQRLAKIGGIGPLISTALVAAVGNASEFRNGRHLAAWLGLVPRQHSTGGQQRLLGISKRGDSYLRALFIHGARSLLKIAARRNDRIARWVCGLATRRGFNVATVALANKNARIAWAMLTRGDSFRIA

SEQ ID NO: 82915 - protein, 444 aa, unidentified
MHTARRLIHIREGVAAVGFTGVRVGFASSFEGGENLNTTTLFVGIDVSKTSNTVRFMDGGGDTLLLFDIPNNIDGAAKLQDKLRYTLLHTDYSKVTVGMESTSIYADHLAAYLRNDEFLRKWECTVYVINAKNINHFKKSYPELPKTDSIDTLIIADYLRFGRVPKSVSHDEKYLALRNMTRARFQAAQNLSREKTRFLDTLFKKFSTLDSAKVFSNTFGATSLAAICDFLSVDEIIYTPISELTDFVNQKGKGKFADPETVAAALQAAARSSYRVSKTVNDSLNQLLAIRLIGIRSIEDQVKSLDIAIESFMDAFQNVLISIPGIGPVYSAGLMAEIGDIKRFAGQASLAKYAGLVWSKYQSGGFEAANTKMILSGNKYLKYYLLEAANKVRMHDAEFAEYYRIKFREVPKHQHKRALALTARKLVRLVYSLLDTNRLYMPHL

SEQ ID NO: 82916 - protein, 313 aa, unidentified
MLPSLVYVGMDVAKATLDLHAPTPPCPRSRQFANGPVGHRALVRWLQALGPVHVVCEASGGYERAVVTALQQAPIAVSVVNPRQARDFARAQGCLAKTDRLDARVLAEFGRHLQPAATPAPSAAQRQLAELVARRQQVQQLRCAERNRLEHTTHPAVRRQLQRHLISLDRQLEQLDIWLTELVDAQPSLAHKVARLCAVVGVGRITAVVLLATMPELGALNRGQAAALVGVAPFNRDSGPHRGHRLIGGGRAVARRALYMAALVAAFSNPRFQVFYQRLIAAGKAPKVALVAVMRKLIILLNQLLKNPEFQPT

SEQ ID NO: 82917 - protein, 360 aa, unidentified
MGSSVSWIYDVSPVEPEQSPGPVMSRARIYKEGNPTVQPNSNAKCWAGIDVSKDWVDVAVLVEEQKVEQFRCVRSVVELEQLAQKLLPYGPQGVVLEATGGLEGSVITALVAAGLKVMRMNPKRVRDFARAQGLLAKTDQLDAHILALFGARMQPPLRAWPEAERQQLAAWIARQQQLTLQRAAERTRLHQATEPQLSKSVERVIAFLGKELARLEKQMGKWMAQSEIWTEQESLLRTAPGVGPKTARLLLAQLPELGHINRREIASLVGLAPLACDSGHWRGKRRIHGGRGAVRAILYLASWSAVRPPGSLREFYRRLVAAGKPRQVALIAVARKLLLALNEMMRLNQPWRSPKESIPA

SEQ ID NO: 82918 - protein, 323 aa, unidentified
MTVYLGIDIASKKFDVAELCDGNYRCKAFENTSAGFLALYKWLGQSTMPDIHACLEATGDYGTSLATFLYENKIKVSVVNPARIKGFGASELSRTKTDKADSKLIARFCKAAVPDGWKPTPAPVRKLQALVRRISALNGMLRMECNRRENADANIQASLDRIISLLKTEIEVVRQEIKDHVRSDDELKKQDALIQSVPGIGEVSSNLILSFMSGKGFRKAKEVTAYLGLNPRHHQSGSSVRGKTRMSKMGDTRLRSALYMPALVALRYNPDIKAFGQRLLLAGKPRMLVVGAVMRKLIHIVFGVLKSGTAFSSRIAVHSVVTS

SEQ ID NO: 82919 - protein, 365 aa, unidentified
MKKSSTVAAASNKNFERKLTIGLDLGDRSSWYCVLDEAGEVISEQKMSTTPKAMREVFAAMPCSRIALETGMHSPWVSRLLSELGHEVIVAHARNVRLIGESRRKDDRLDARTLARLARIDPQLLSPVKHRSAQAQADLTVIRARASLVRARTALVNTARGLTKSYGERIRGCNPRNLDTEKAQALSPELQAALGPLLQALESLSERITEYNRQIEGIAQQSYPQTALLKQVKGVGTLIALTYMLTLEDPHRFRKSRDVGCYAGLQPGRRNSGQSEPQMHISKEGDPYLRTLLVQGAHHILGPFGADSDLRRWGLRLAERGGKAGKKRAIIATARKLAVLLHRLWVSGEVYEPLRNTKRTMSAAA

SEQ ID NO: 82920 - protein, 520 aa, unidentified
MHQTKYRGIITEGRIIDVSSLGASGFPLVKPLRKSVNPFGGDLCFGWLGSLRLYLYKPLGCVSTLWKWMPAGKDITMHYHKVLEMFESIPCLSVGLDVGADFTWMSIMLPNGILTGKPFKIIHSDPQSRELAVSKIKEAQEMYSLESRCFLESTGIYHIPLLYFLRDKGFDCAVINPIITKNSTNRNVRKLHNDKFDSKKAAKVGLDASLKASIVPDDAIIDLRNLVRDYYYFKDLQSAIVLKLNAELKVSFPAYLNVFSKVTTQTSLKLLEAYPLAADMLAAPKDELVETIRSTARFGETYALARYDAICTAAKDAAVFGRALPSNALRIRLYIKMYREYQAHLDSILEELHQAVGKLEGTPDYDRISFIQTLHGVGFLSAVVLIAEMGSFDLFSSPKKLYAYFGLDPGVNDSGKFHGDRVHMSKRGSSLARRILHMVAINNLKVDKATKTPVNPVIYDYYTRKCASKKKSVAVGAVMHKICNIIFAMLRDNKPFELITPEEHRERYAAEHPESVNTAA

SEQ ID NO: 82921 - protein, 394 aa, unidentified
MKLVGIDVGKNSHHFCVMDKETGEFNVTPTSFSNNKEGFDFLINSLKPYSKKSILIGMEDTGHYHVALLKFLLSNGYTVALINPKTTDLTRKMEGGITKNDKLDTITICDVLDTPERKKQYRITKVDRFDLYEQRQLTRHHHNLKEELNVYCNRLQKSIDLVFPEFNTLFSSKYSIVYMNLLKTFGSAEAIASTDIRTIRKCFEIKGRGNRISLTPEKLKECAKNSIGISSEVETIQIKHLVSQITLIKEQIAEIDKKIEEFSITNNSPILSIPGISHFSGTSILAELGDIGNYSKPSQIIKFAGVAPYHYESSQYNAQHTAITKKGSKYLRKTLYQIILPVINNNPVFKKYYLLKISQGKGHRCAQGHCIRKLLRIIYHLLETGQSFDPALLR

SEQ ID NO: 82922 - protein, 497 aa, unidentified
MPTKSTIYSRCNPQLLKLFEQARHPAKVLCVALDYAKAQHTALFCNGLGELLKPSFALENTAQGATQLLSEVRACAKRRKIRPEHVFFGGEDYPSFAENFVRHLRQEKFLVVRVNAWEAKQQRDNFQASSDSLDLLGIARCCLNRRGQSIRDLPEAYPNLRLATRDRDKLVRMRTAVSNRIHSYVDRLFPGFLSAGKSGLEPFSQASLELMEDRFSPAQLRRRPRQALIQWLGRRGLTQPPETADQLKQLARHALEPAPEQTPLLQQTLAQLVGLYRNLEQSIARIDREVAHWLARTPGAWLTSIPGFGITLAAGWTAELGPPSQWRSVRQLCSYSGVVPKSKQTGGPQQEPVVGAVQQRCNKRLKNVVLQAVEKVIQHGPEELRQTAQALQARGAHTQFALAKRLVRLGKYLALTATVYRPKAMMDPQTPKATLAAHYQTVWEKLLPKWRDKADLCQVFAPEQPLGQWRKMVQELYALELRLPQQKAAQKSRAPAP

SEQ ID NO: 82923 - protein, 323 aa, unidentified
MCKFIGIDVSKASFDVSYEKSDGKFSHYKFSNNAKDFSRFIELIGVGDHCVMEATGPYYLSLACYLFDHNIKVSVVNPLQIKHFVKMRMTRAKTDKKDAAMIALYGQSEKPRLWQPDEPHVMQLQQLHTVIEGLQKQSTMLKNQLEAFLQSPVKDASVINTLKSLLKTLEAKINKLENRMMEIVKIHYGPTFNSLISIPAIGPKTAIVLISITNNFKKFNDIKKLSAYAGIAPRIYQSGTSVNGKAHISKMGNKYIRKLLYICSWSAKTCNEPCKQLYERLKAKNKPERVIKIAIANKLLKQAFAIGSNLSLYNKNYEFKFGI

SEQ ID NO: 82924 - protein, 343 aa, unidentified
MDKISMIGLDLAKNVFQVHGVEASGRVVLRRQLRRGAVEKFFAQLPPCTVGMEACGSAHHWARVIGRHGHQVRLMPPAYVKPYVKRNKNDGRDAEAICEAVGRPTMRFVPVKSVEQQATLAVHGTRALLVKQRTMAANALRAALSELGIVAAQGLKGLHELMAKLEAPSEEIPEMLRGALLVLARHWQALDADERTIERQIAKAARADREARRLMEVPSVGPMIASTVLAKVPDARVFGSGRDFAAWIGLTGRDHGTGGKHRPGRISKQGDRVLRALLISGASAHLRQQKRRGISDPWLRDLLARRPYKVAMVAFAAKTARILWAMLVKGEPYYDRASASAAA

SEQ ID NO: 82925 - protein, 443 aa, unidentified
MNESNELNPSNLPASSEYGAFVGVDWGDQEHAVSLRAANGTVIERLTLQQTPEALAQWVSALRTRFPNQKIAIAVEQSRGPLLSGLTQYEHIVPFPVNPKSLARFREAIYPSRSKDDLRDADLLLEFLLKHRDHLRPWQPDTVQTRQLALLNEQRRHFVDFRTCLTNQLLAHLKMIFPQAIALVGGDLTSPMAADFLKKWPSLQEVQKVSPSDLRKFYYGHNSRSKDLIAERLELTKNAVALTTDPALLAAHSLAIQTLASQLAALHPFIDKYDAQIAELFAAHPDALIFDSLPGAGPTLAPRLLTALGTDRARFPSAVQLSCYTGIAPVTEQSGNSKWVHIRWSCPKFLRQSWHEFANCSIRFCPWARDCYDQYRKRNIAHHEAIRKLAFKWQRIVWRMWQNRQPYAEAYYEAALLKKRGLKTSATQHQADSLSGEQKIKNP

SEQ ID NO: 82926 - protein, 315 aa, unidentified
MVDVPCFVGIDVATAQLDIAVRPSGERWAVPNDASGVTTLVDRVQALQPTLIVLEAPGGLERLVASALATAGLPVVVVHPRQARDVARATGQLAKTDALDARALAHCADAIRPTPRPVPDVQTQALRALLGRRQQLVAMRTAEQNRLAGTSGRLQADMTAPIAWLNARLTALDDDLDTALRSSPRWRENDDLFQSAPGIGPVCARTLLLALPELGTLTRQKIATLVGVAPLTCDSGTLRGRRMIWGGRARVRTVLSMATLVATRFNPRIKAFYERLLAAGKVKKVALTACMHKFLTMLHAMLKHRTPWQGQAVQG

SEQ ID NO: 82927 - protein, 315 aa, unidentified
MSENTVEKFVGIDVSKGTLDIGIEPTGEALRVVYDDQGIAQVVKRLVAVGPTLIVMEATGGLEVRLASELAGKGLPLAVINPRQARDFARATGQLAKTDRVDAAVLAAFARAIRPRVRPLKDTDTRELDELLTRRRQLIEIRVQETLRLGTASKLPRKSLVAHIAWLDKRIADLDVDLTRRLRASDAWRAKDDLLQGIPGVGAVTSLTMLAKCPELGSLNRREIAALVGVAPLANDSGKHRGKRFIWGGRADVRAVLYMATVTAIRCNSVLKAFAERLKQAGKPAKVVIVACMRKLLTSMNAMVKNNAQWNAKTA

SEQ ID NO: 82928 - protein, 351 aa, unidentified
MPNVKRQPLKKLRFDPDALLGLLLRWRDQATKAGGRIKRIVLAFEAGRDGFWLARWLRARGIEAYVIHPASIPVSREHRRAKTDRLDAGLLMRAVLGWLRGEPKHCSMAAIPTVAEEDARRPTRERETLVGEQTRAVNRIKSTLIRFGIRAFKARLRQASKHLGELRSPEGEPLPPNTMAELRRDLVRLQVIREQIRAIERARLERLKRAPRQGTHPMMRMLARILGIGIETADLLVHEVLTRKLRDQRAVARYGGLTGSPDESGTKRRERGLARAGNARVRHGMIQLAWRWLKFQNKSALAQWYGARTTGGKPGLRKTMIVALARKLLIALWRYVTVGEVPAGAVLRPAT

SEQ ID NO: 82929 - protein, 342 aa, unidentified
MYYIGLDVHKKTISYCVKDVSGRVHQEGKLGATRCELDRWMRTLPQPWTVAMEATIFTGWIYDHLHPHATQIKVAHPLMLRAIAAAKKKNDRVDASKIADCLRCDFLPECHMASTEIRDRRRTLRYRYLLVRQMVQTKNRISGLLMETGVTYNKQRLHKVGYFRELLASNEEVSESIRPLLRLSRDTIARLQKTERALVSSLQRDPLLTERIERLRTVPGVGPITALTWALEMGEISRFPSIRQAISYCGLCGDERSSAEKSIRTPISKQRNKNIQFVLIEAAKLAPRQDHDLALLYAREKEKGNANRATLAVARKMVAYLLAVDRGKRDFVPVARCSNAAA

SEQ ID NO: 82930 - protein, 312 aa, unidentified
MANQVFAGIDVGKEKLFINIYMDSQVRDYPNTHSGLERLARFLNKRTVDLVVMEASGGYERQPASELRASGLSVAVVNPTYVRRFAQGMGTLAKTDTIDARLIAHFAFVKQPKPQLARTAEEEELAALVERREQLVSLLSVEKNRLSKASDYSKVSIQNSIHFLAGQIDKIETEIKVLVAKSPERQAKLHCMCSFIGVGDVTAVTLLTEMPELGNESREHIAALAGVAPINRDSGKMKGKRRTYGGRGRVRRTLYLAALSASRHNPIIRTFYERLLAAGKEKKVALVACMHKMLTILNAMLKKGELFNPIYA

SEQ ID NO: 82931 - protein, 353 aa, unidentified
MKQYIGCDAHARYSIFVSMDANGKVSVPVRVEHEELEMRRFLGSLPAGSPVALETSGNWYWLVRAMEEAGLDPRLAHALEVKKRMPGRNKTDGLDAKGLALLLRNDALPEVWIPPAQLLDLRDLMRPRLSIRQQGSLLKCRIHAALRRYGARDYSDGADLFAAKSRAKLAASIARLPQETRIATLHEWELLDFLEAQIAALEERIRERIASVGWVRLLKTLPGIGTILGCTIYLEIGDVGRFATPEKLASYAGLVPSVHASGGKLWQGPTPRSANHFLKWAFVEAANVIVSHQKQWPQKHVVRLYQRLRAAKCHGKAATAVARHLAESSWWILSNKQPYREPAPATLSSSKNG

SEQ ID NO: 82932 - protein, 319 aa, unidentified
MTQNDLVVVGIDVAKDKVDACIRTVTERRTFPTTASGRRSLIAWLRKHQVGKAVMEASGGYERVWAKALRQAGLEVRIVDPKRVRSFAESAGRLAKNDKIDAEMIAWFAETFSAAPSQVEDPAHEEIKALVKGRKSLIDLRTRLEMQKEHETPRLVQKAHAHLLKKLADEIAAIETAIGAKIKAAPAFAVRAEIIQSVPGFAKATALTLLAGLPELGQVSNEVAAALVGVAPYDDDSGKRHGQRCIKGGRRWLRNALYMPCVGAATLNNPVFKAFYQRLIAKGKAPKAALIACMRKLIVILNTMIARGEKWDPKRYQLA

SEQ ID NO: 82933 - protein, 475 aa, unidentified
MARARKQVRRAAQAGAGKRVAQAADLVITHRHAAGIDVHAAEHFVAVAPEDVPAGFVSPDRKLPAGVRKFGTNTADLEAIADWLKACGVTTVAMESTGVYWIALYDLLASRGFEVLLVDPRQTKHAPGRPKTDVVDCQWIRRLHSYGLLTGSFRPGDEIVRWRGFQRQRETLIRYAAQHVQHMQKMLEEMNVKLTEVVSDIVGVTGLKIIKDIVRGQRDPLRLAKNRHESCKRSEAEIAAALYGNWRQELLFGLQQALELYEFYQKQLRDCEAQIEACLRSMKDGSDGRPLPPSLRQRKPEKNEVRFGARALLFRLSGVDLTQIEGISETTALVILSELGIDLSAFPHEKNFVSWLGLCPQHRGSGGKIFKRGTRRGANRVARALRMAAQGCHRAQNALGAFYRRIQGRSGGAKAVVATARKIAERVYRMLKFGQEYVRQSQQAYEQAYQLRLMKSLAKHAAHLGYKLVPETIGT

SEQ ID NO: 82934 - protein, 362 aa, unidentified
MEWFCGLDVGMDESAICVVDDRGAVALQTTVVTDPEAIKTALKPYLARLRRLGHEAGALSPWLHPELVKLGLPAVCLETLHVRAALNAQRNKTDKTDALGIAHIMRTGWFRRAHIKSEACYRLRLLLTHRRNPKRKFLDLENAVRHSLKAFGIRLNRVGRGGFAQAVRDAVAHDALVSELIDAMLNARAALWKEYCRLHNLVVKLVAGHALCRRFMQIPGVGPIAALSFMTAIDDPSRFRRSRDVAAYFGLTSRRWQSGTSIDVQGRISKAGDADVRRALYEAASALLTRYKKKDKVKSWGLALAKRSSHRKATVAVARKLAVIMHAMWVDGTFYCGDPDAAKADVSARAAVKERRLLAPLA

SEQ ID NO: 82935 - protein, 403 aa, unidentified
MSAALSNSDSANSRFRRRFSSSSPFSRRASETSSPPYFDFHLMGWTASSQRSQNCRLTRLRGEVSNESSHSRYRLAKNVFQLHGVDRKGRPVLVRRVRRELLLKVLGELEPCLIGIEASTGAFYWQRQFEKLGHVVKIMAPQYVKPFVRRQKNDSNDAEAICTAVQQRNMRFVPKKTLEQQDIQALHRARQRLVNHRTALTSQMRGLLLDRGIAIAVSATQARRLIPKILSAANDELTEMMREIVSSLYAFMLQIDERIKAFDRKVTAVFKASAVCQRIAMIRGIGPKTATAMIAAIGDRSDFKNGRHLAAWLGLVPRQHSSGDRKVMMGITKRGSQHLRTLLVHGARAVVRTAVRKTDSRSMWVNELRQRRGYNRATVAVANKNARVIWAVLTSGEPYRAAA

SEQ ID NO: 82936 - protein, 479 aa, unidentified
MENNTSAAGKAARLTRKQRKALGRRMWSENPGLEVVHRDAAGIDIGSRAHYVAVGPDRDAEPVRIFGCFTTELQRLAEFLKKCRIKTVVMQSTGVYWIPVYDVLEQAGLEVCLVNARDTKNLPGRKSDVQESQWLLKLHTYGLLRKSFRPTPEIRALRTCWRERAEYVQQAGTCIQRMHKALTEMNVQLGTVLSDLSGTTGMSILRSIVAGERDGRKLAEFRDPHVKASAETIAESLQGTWRPEQLAILKRQLADWDHVQQQVAACDRDLQTMMKQMPDAAVAPAPPAPGNPPKKRRRKKNGKSSRNAPQFDLESELKRMSGVDLTRIDGVNANTIQTVITEAGLDMSKWPTEQHFVSWIGLSPRNDLSGGKVLNRKTRKVVSRLATALRLAATTLRESDSYLGAQFRRFRSRLGAPKAITAMAAKLARLIYRMLRYGQEYVDRGTAHYEEKHRQQQIQFLAKKAAQHGFALVEARTSA

SEQ ID NO: 82937 - protein, 347 aa, unidentified
MARHSKRSSQTSQSSQSSQSYVLGVDIAKASFDVALATAAGKVVDTAQFSNDEGGFRALRKWLEQHKAKQMHACLEATGRYGEALAYYLYAQGSAVSIVNPVRIHAYGQSKLQRNKTDSEDARLIADFCATQKPDRWTPPPAEQRQLHDLTRRLDTLKQMRQQERNRLESAVGGLAPAAHRSLQESIAFLDRQIAQLEAEIADHTGSHPTLQHQADLLDSIPGIGPATAYALLGELPDLANFAEASQLAALAGLTPTIRCSGSSVRGKSTLSKTGNAHLRAILYMPALSAMRCSPAFRSFADRLAANGKSKMAIIGAIMHKLIRVIYAVLKHQKPFDPNHYLADAAS

SEQ ID NO: 82938 - protein, 419 aa, unidentified
MEQEVVAVLFVGDDWAEDHHDVELVDDEGAVLARRRLPEGIIGVTALHALIAAHLPEDWADLEAGQAQSRVKVGIETESGSWVAALVAAGYEVFAINPMSVARYRERHSTSGAKSDTADAHLLAEIVRLDRAHHRPLAGDSEDAEAIKLVARTHQSMIWDRTRQVLRLRSALRDFFPGALKAFPDLDARDALELLGKAPDPDRAARLTRAQLRAALRRANRRDVEAKAAQLQDLLRADQLRRSIVVQSAYAAIVSGQVAILQTLNAQIEELGAVVAAHFGRHPDAEIYASQPGLGVILGARVLGEFGDDPHRYADAKARKNYAGTSPITRASGTKKIVLARYARNRRLGDALQQWALCSMRGSAGARTYYRTLRDRGTGHQAALRQLANRLVGILHGCLKTRTVYDERTAWAHHAISAA

SEQ ID NO: 82939 - protein, 353 aa, unidentified
MTDIATHNDRIATIGMDLGKRSFHLIGMDAHGKVIMRQQLSRGRFERHMANLQPCLVGVEACAGAHHIGRRLSAFGHNVRLIPAQYVKPFRKGQKNDYRDAEAIAEAVQRPTMRFVPIKSAEQLDLQALHRIRSRLVGHRTAVINQLRGFLLECGVIVPQGPAMLRKILPSVLAQRTDVLSPRMVRLIEELADDWRRLDDRVDAVTGEVQALARQDEGCRRLMSVPGIGALTASAVVATIGNGAAFTKGRDFGAWLGLVPKQLSTGDRTILGRLSKRGNKYMRTLFIIGARAVLAKPGSWAKFGLEGWLAAAAKRLHHNVLAAALANKLARIAWSVLYHGRSFARNFEPQSVS

SEQ ID NO: 82940 - protein, 343 aa, unidentified
MEHFAGLDVSVKLTSLCIVDDAGGIIREAKIESDPDALLQVLKNGAYHFKRIGLEAGPLSQWLFSALAEAGLPVICVETRHMRAALKAQINKTDRNDARGMAQMMRAGLYRPVHVKTVRSQKLRMLLTHRKLLQSKAIAIENDLRATLRNFGLKVGMAGAVKFEARIKELVENIPDLAILVEPLLIVRRTLREQFGIVHRRLLAVVRQDEVCRRLMTVPGVGPVVALTYRSTVDVPARFRSSKAVGAVFGLTPSKYQSGEIDRTGAISRCGDEMMRVMLYEAAQSMLYSRKWSWLKAWAMQIARRRGIKKAIVALARRLAVVMHRIWVDGTEFRWTRQEAAAA

SEQ ID NO: 82941 - protein, 457 aa, unidentified
MQSFYLGSDVSKGYADFVILDSRKQQVMKNFQLDDTFEGYCHLHDMLNQFLVAHPGASLFAAVESTGGYENNWYNALVKFQSTLNVQTARLNPLGVMHNSKADLKRNNTDKISAQSIAEYLITHPEKVTYQQENQMASLRKQWGFIKMLTKQSTQLLNQLESLLYTANTELLAYCKGSTPDWVLKVLLKYPTAARLARAKVPVLSRIPYVTSKRAQELAISAKRSVASASDRITEKLVSATAKQILNLKKTIDEQTELMVKECSMPEVDLLKTFTGISDSSAIGLILEIQAIERFKTVKKLASFFGIHPIYKTSGDGSGGFRMSKKGRKEPRKILFMVALTAVRSNPLIRSIYLERTEKGMEKMAAIGLCMHKILRIIYGMLKHGKPFDPQIDLNNRQRSVKKKPAGKRDESRRFQDYDSNAPISRRQSKKRLERKQSHSVNDTEFGINAPVPEFVS

SEQ ID NO: 82942 - protein, 344 aa, unidentified
MKSLAWQVVFAGLDYHKDGVQVCVMDRTGKVLLNRRYANSWNEIAAAVSRYGGRVQAAIEACTGAANLARQLAEQAGWNISLGHPGFVARMKQNPDKSDFSDARMLADLVRVGYLPKVWLAPDQIVELRRLVRFRQQLVQARTRVKLRIRALLRDERLLLSTEAGNAWTKGWLTLLRDYPRLRETSRWIMNQNLDELTNLVGRIREVEQRIEREVADDALVLKLREQSGIGLITAATMRAEIAQFERFHTGKQLAKFCGLSPRNASSGEKQADAGVIKAGNKGLRTVLIEAGHRLLRLDDRWRALGAKLSAKGKPKSVVIAAVTNRWIRWLFHQMQPEQLATAA

SEQ ID NO: 82943 - protein, 349 aa, unidentified
MRHIGVDLHKTNFVVCFLLEDETTHLETFPLTKTGINRFISHLNTEDEVAVEVTQNIYYFYDQIKAHVARVVLVDTYRFAVIAKSKKKTDKADAHALARFLKLGYLPEVSVPSERIRRLRQLLEARETLVSMRTKLKNMGHAALARNGIALSRAAFASAASRTRLSVRDDLPSTDALIMQATLRQITELNKEVEQLEAEIIKVGKTMPGIPRLLQLHGMNLLSAISLLAEIGDIHRFETSKQLTAYAGLVTSTRQSSETTRHGKITKQGRKRLRTVAIRAVLAMVNRTDTPLMDFYQKKKREKGSGKAICATARKLLTIIFVMLKKDLDYWYLEDRLYNRKLRALNAVA

SEQ ID NO: 82944 - protein, 352 aa, unidentified
MIIIGVDFHPEFQQIASVDTDTGEFQEKRLAHREEAEKFYRALTSKKVRVGMEASGHARWFERLLSELRFELNVGDAAEIRSKRVRKQKTDRQDARLILQLLIENRFPRIWVPSWENRDLRQLLWHRHRMVQARTRIMNQLQAVALNEGLRCKKRLWRDAGREQLESFALAPWASRRRRDLLELLDRLTPTIAELTQAIEGEVEKCPEARRLQTHPGVGALTALAFVLIIGRAERFQCGKQIASYLGLVPLEESSGNRRRLGHITKQGNSLLRFLLVEAAQVTVRSDQEWRNKYFHLALRRGRKIAKVAMARRLAVRMYWMWRKGWNYEQLKKIGSHAGEPGNRDGVMSNTE

SEQ ID NO: 82945 - protein, 344 aa, unidentified
MTYYAALDVSLRSVAICIIDDRGTVCLERTVPSEVTDIVACLRDFDRAIEVVGFEAGTLSQYLAHGLQSDGFEAVCLEARQVNAALSAMRNKTDRNDARGIAQILRTGWYARVHVKSRASHYIRALLSSRKAVLKKCIDLENEIRGLFKIFGIKLPASLGHGPFDARVRPLIENDVDLADALLPLLDARLVLYRTYLELDRRVKRLARNDAVCQLLMTVPGVGPVTAMTFKAAVDDPRRFRRSRTVGAHFGLTPRRYQSGEYDNPGRISKAGDADVRAILYTAANALMTRTQRWSSLKAWGMRLMRTKGRRRALVAVARKLAVIMHRMWMDGSRFQWGKEAAAV

SEQ ID NO: 82946 - protein, 351 aa, unidentified
MSKYSIEAFIGIDLGDIEDEICILDQNGEIVEKTSIDNTVSEVNTFFDRFDSPRQVLVAVETGTHSPWISQLLRARGFRVLVGNARRLRAIWDSSIKTDERDAEMLARIARFDPQLLSPIRHRSRAAHMDLAIVKGRDALVRCRTSLINFVRGSCKSAGTRLPSCSADSFAKRVIEHVPEDLLAATVPCINTIVELTQKIRQFESQIEALCKEAYPQTMRLRQIKGVGPVTALGYVLTLEDPHRFRKSRDVGPYLGLVPKRDQSGCCDKPLSITKAGNMYLRRLLIGSAQYILGPFGPDCELRRYGLRIASRGGKVAKRKAVVAVARKLAIMMHHIWKNKTVYDPFYHRAI

SEQ ID NO: 82947 - protein, 405 aa, unidentified
MRYYLGVDWADQTHAVWVVDESGTKIAARAVSHTAEGLGEWGRELDEWRAQGIDLWAAIERPDGRVVDFLLDHGVVVYPVNPKALDRARDRFRQSGAKSDPFDARVLADFLRTDHAHLRALQPSSEAAQELKLLTEDCQRHIRQQTRLVNQLTATLKAYYPRALEVAEVTSALAREFLPAYPTPEALTALTERQWQRWARAHRLPEARAGELWAVLRQPHLPVPAHVVRAKARLMQALMEQLRPVVAAVAQYRKAIDDFFARMPAAQWARTLPIGKHGITAPTLWARLGDAPGRWESFRHLQAHAGTVPVTKRSGKQPRVVQFRFACDKALRSVVDQVAYLSRLSSAWARPYYDQQRARGHSHRQALRALGAKWLKIIFIMWQRQVPYDEQYHLATMTRQQLGRR

SEQ ID NO: 82948 - protein, 402 aa, unidentified
MNSVGIDISKGRSTIAVMRPFGEVVISPFEVPHTDSELSELARRLKSLNGETRVVMEATGNYHMPVAKLLHDAGLYVSIVNAKLVHGYGNNDLRRIKTDRKDAVKLANYGLDRWLTLPRYVPEENTRLLLKNCYRQYRQYSKVQTVLKNNLISLLDATFPNANRLFNSPSRADGSEKWVDFVAEFWHCERVCERSKKAFVNKYQKWCRTHGYNFNEKKAHTIYDEASGHIGIMPKSETTKLLVGQAVSQLRATSAALAALKQEMQSLASQLPEYPVVMEMFGVGPTLGPQLIAEIGDVRRFYSKKALVAYAGIDALPNDSGDVIGRYKSMSKVGASSLRRTLFLVMSVYLQNSPQDEPVYQFMDRKRAEGKPYRVYMMASANKFLRRYYATVKAYLDSLEQA

SEQ ID NO: 82949 - protein, 347 aa, unidentified
MKYVGVDIGKRKCRAAIMNPEGRIVKELDFNNDSAGIANLTLLLSIDDRVVMESTGPYWLDLYNQLDDLHIAVVLANPLKTKAIASARIKSDKVDARILAHLLRTDLIPECYVPPKEMREIRSLVRHRLSIVKLRTMVKNKAHALVDRNGLKHDFSDLFGKAGVQWLRSVELSGLDRLMLDNYLMHLENLDLQIQRVDLEITSRASFDGDVRLLLSLKGINVYSALLIKSEIGKIERFSDYKKLVSWAGLAPSLHQSGDVEYHGNITKQGSVMLRWIMVESARVASVFDPRLKAFYERVARRRGDQKAVVAVANKMLKIIWFMLTREEAYESVDERRYAVKLKSLKG

SEQ ID NO: 82950 - protein, 463 aa, unidentified
MRFGPTTHSQMSSFEDSTIRSVAGSKPACGGISRKGDLMMKTESEEQIDFAAFVGVDWADQQHAVCLQASGSTKVEMCVLKQTAQSIGEWANQLRTRFEGRKVAVCLEQSKGALIYTLMSYDFLVLYPVNPQTLAKYRKAFRTSGAKDDPDDAGLLMELVKLHRERLRAWVPDDVQTRTLQMLVESRRKIVRERTRLTNRLKSLLKAYYPEALEWAGELKGLRACDFLKKWPTLEAVKRAKVSELQRFYRHHGCRNEEVIGERIKQIRGSDPLTGDQAVIKSSAMVVLTIVSQLPCVIRAVEQFDQEIARVFQQHPDHELFNSFPGAGSALAPRLLAAMGSDRARYESAEEVQQFSGIAPVTERSGKSKWVHRRFACPKFVRQTFHEFAKQSIIWSSWAHAYYDQQRERGKHHHAAVRALAYKWIRIIFRCWKDRTVYNEQAYVEALRRRGSRLILSQVSSDS

SEQ ID NO: 82951 - protein, 323 aa, unidentified
MKHILGIDVAKAKLDVALRRPDGKRRSKVVDNTPEGFVELSAWLLKQGVTELHACMEATGIYWEAVAEYLVDAGCRVSVVNPAQIKAFGAAQLVRTKTDKADAQLIAAFCAAQCPEPWQAPSPAIRELRALVARRNALDAMRTQEKNRLPVAREAVRAGIEAHLDYLEQAIAEVERMIREKIDNDPDLNQQRELLDSIPGLGDKTIPVLLSYYGGALRFEKAKEAAAFAGLDPRQHESGSSVRGRPRLSKVGHSALRKALYMPAMVAITKTHWGRTFRDRLKASGKPPMVIIGAMMRKLIHVAFGVLKSGKPFTPALHGVVDA

SEQ ID NO: 82952 - protein, 312 aa, unidentified
MRSEGLYVGVDVAKATLDVAIGSDGEMLQVANDEVGIAALVTRLSQASPELVVLEATGGYESLVAGAIAGQGIAVAVVNPRQVRDFAKATGVLAKTDRIDARVLARFAEAVRPEPRPLPTAEAKELEEFLSRRRQIVDMLTMEKNRLSTAATDRMKKGIKKHIVWLQEALRRADDDIDNAIKNSPAWREQEDLLLSVPGIGPVSARTMLAELPELGSLNRKKIAALVGVAPLNRDSGTLKGTRSCWGGRATLRQVLYMAAFSAIRCNPIIRSTYKALRARGKKHKVAMVACIRKLLSILTAMVRDHRRWSPS

SEQ ID NO: 82953 - protein, 335 aa, unidentified
MKYNAFIGIDISKLTIDVAIRSRASKELAHQQFENSPKGYARMLAWVKRLTRCGETEFFFCVEHTGVYALPLACFLTGKGLDYRLENPYHLKHSMGLQRGKNDRVDAMMIARYAYLHHDELRLTTLPPGAIITLQHLLAHRERLVKTKRVYTVAPKELASFSSQESHAFIGHESQLIVSTIERGIKAVEGQIESLIQEHADLNKNFRLARSVKGVGLVIAAYMLVYTHNFTAITDPRCFASYSGIAPFARSSGTSLAKAPRVSHLANKRMKALLSNGARSAIRNDPEIRAYFQRKCDEGKPEMLVANAVKNKLVGRIFATVKRGTPFVGLGKHFS

SEQ ID NO: 82954 - protein, 342 aa, unidentified
MTNSVTVGLDIAKNVFHAHGVDGNGEVIFSRKLRRAKVTGFFASLAPCLIGIEACGTSHHWARVLTEMGHEVKLMPPRYVKPYVKSQKNDAADAEAICEAITRPTMRFVEIKSIEQQSVLVMHRTRAMLIRHRTRVGNSIRAHLSEFGITAPIGRNGLHRLIEIIEDREDVSITDITRHCLAHLADQYHLLQRQILDLDRQINKSHRASEMSRRLATIPGIGPLAASALVATIGDASAFRSGRSLAAFLGLVPRQSSSGGKEKLGKISKRGDAYLRWLLVAGAMAVVRYVQRHGTRRPWLVQLLARRSGKTAIVALANKMARMAWALMVSGEAYREPEIQPS

SEQ ID NO: 82955 - protein, 338 aa, unidentified
MQLYCGIDLHSNNSLISLIDENDRPVSEKRLSNDLNAIQQHLQPYQDDITGIVVESTYNWYWLVDGLMDIGYPVHLANTLAIQQYNGIKYTNDASDARFLAHLLRLNILPTGYIYPKAMRFVRDLLRRRLLLVKQRTAQVLSLQSLIGRHTGRRLTGYQVKRLQVEALSHYFPEPASLLAAQHAFQLKHQIDAQIADIESFVLDSCTSSDHYARLLSAPGIGKILGMTILLETGPIERFPNVGNYSSYARCVPSDKISNGKSKGKGNTKNGNRYLAMAFIEAAHYAAIWDPVIKRYYQRKSKKVPLMVAKKAVANKLTRACYHMLKEQTLFDVSRAFG

SEQ ID NO: 82956 - protein, 314 aa, unidentified
MSKNRVYAGIDVSKKRLDVHIRPGGESCSVEYTAPGLRKVQELVRRAGVCLVVMEATGKLEERAAAAIESAVAPVAVVNPGRIRDFARASGRLAKTDAIDASVIAHFGEAMEPKPRTPPTDAQEEFGALADRRRELVGMITAERNRLHTASVPSVIKHLNKHLRWLQRELQAVEEELSGAVSEDPDIEAKKKLLRSAPGVGDVTAVTLVADLPELGQVSNKEIVSLAGLAPFNRDSGQMRGKRTIYGGRAAVRSALYMATLSAIRAQAELAAFYNRLVQAGKPRKVALIAAARKLLVMLNSIAKRGTAWQPSHP

SEQ ID NO: 82957 - protein, 343 aa, unidentified
MTTTTMIGVDLAKNVFQLHAASMSGEVEYRKQLSRDKFRKFMAQQAPAVVVMEACGSANYWARELARLGHEVRLIAPHYVRPFVKRQKNDATDAEAIVIAAQRPEMRFVVPKSEEQQGRAMMFRTRTRMVHQRTELINMLRAFLYECGHTVPKGIHQFQRIEAIVTEPNSDLSVMARAECSELLEQIAALTARIAASDRRIKMAASQADTARRLQTMPGIGPLTALAVEAFAPPMESFHCGRDFAAWLGLVPRQHSSGGKARYGRVSKAGQADIRRLLIIGAMSRLNWLGRKTIAQESWLARLSARKPRMLVAIALANKMARMIWAMLTKNEDFRNPATATAA

SEQ ID NO: 82958 - protein, 350 aa, unidentified
MLADELDFVLGVDPHRDTHAVGVLEVRTGAVVFEATVTADSGGYVEALGLAEQHAPGRRAFAIEGTGSFGAGLTRFLLGRGERVYEVGRLRRERRSGGKSDALDALRAARSVLGEKRPSVPRSSGEREALRALMAAREGAVAAKRAGLCQLRDLIVTTPEPLRNELRTLTRTRLIARLSSTRPARHQDPELRGTLLALRSLARRVQTLTCEERDLGREIETLTRKLAPQLLEQPGIGPLLAAQVVLSWSHPGRIANEAAFARLAGAAPIPASSGQTVRYRLDRSGDRKLNRALHLILVTRRRTHAPTIDYIERRVREGKTRREAIRCLKRYLARSLYRQLEHPPHPTTEN

SEQ ID NO: 82959 - protein, 334 aa, unidentified
MENIALIGIDLGKNSFHIHCQDHRGKAVYRKKFTRPNLIEFLATCPATTIAMEACGGSHFMARKLEELGHFPKLISPQFVRPFVKSNKNDFVDAEAICEAASRPSMRFVQPRTESQQAMRALHRVRESLVQDKVKTTNQMHAFLLEFGISVPRGAAVISRLSTLLEDSSLPLYLSQLLLKLQQHYHYLVEQIKDLESQLKRKLDEDEVGQRLLSIPCVGTLTASTISTEIGDGKQYASSRDFAAATGLVPRQYSTGGRTTLLGISKRGNKKIRTLLVQCARVFIQKLEHQSGKLADWVRELLCRKSNFVVTCALANKLARIAWALTARQQTYEA

SEQ ID NO: 82960 - protein, 321 aa, unidentified
MSKLTFKAFIHSDQVNREFDNVRKGHKQLMDRAYKSPDRPKENIIFIFEHTGPYPHGLPVHLASKDVPFLLVPGLEVKRPMGMVGGKNDKADARMIARYGHRMRDGTTPTQLSSEEGQGIKRPLDLRQRLVEQRSGYKASIKEQRRVLVKKYNGTLSSTQEKMIDHLTEQIKEVDKEMMAISKDNGSMSNNYDPMTSICGVGPQTALSIIACTANFTKFESYRKFASYCGIAPSQNRSGTSMMGKTKVSNLANKKIKTSLDLCARSSIQHNTEMKVCYEKRVAQGKNKMSTINIIGDKLLSRIFAVVNGNEPYVDTMKYAA

SEQ ID NO: 82961 - protein, 309 aa, unidentified
MEIVVGIDVSKERLDVAILPQGEVFAVGNDHAGIDELVERLKGIGVDAIALEAAGGYEMLAVAGLSSAGLTVLVVNPAQVRAYAHAIGRRAKTDPIDAAVIAAFVLATKPEVRPLRDAETQALSELVARRRQIVQMVVAEENRLRMALAKQAQKSIKRLLKALRRELESLDADLDSHIRKSPVWRVREALLTSVPGVGATTARTLLAELPELGSLDRRQIASLAGLAPWTRQSGKWKGKSFIGGGRGKVRAVLFMAALVASRYNPDLKAFRDRLVAAGKPKIVAIVATMRKLLTILNAIIRDGRPWQTA

SEQ ID NO: 82962 - protein, 440 aa, unidentified
MPTPSLPVLDPTAAAVDVGSEQMHVSIAGGPPKVFGTTTGELHALRDYFLEQGVRSVAMEATGIYWLCAYEVFEKAGLEVVVVNGKYVKNLPGRKTDIADCQWQATLHAHGLLKPGFVPPEHIRRLQDYLRVRTDHITMAGAHEQHMQKALERMNLKIHDVISDLTGMSGLKMVEAIVAGARDPVALLALCDPQIQKNKAGRLRAALEGTWKAEHLFALRQAYELWQFYQKKIGECDQAVEEVLKQMAGPEDPNHPTPPASKRGGVNSPQIAGLHGMLFRLCGGKDPTQLPGVADYVLLQLLSEVGTDLGQNWKTEKHFTAWLGLAPGSHQSGKRRRSSQRRSRNRAGRLFCVIARSVGRSVDKALGGFYRRLKGRKGGLVANLALARKLAELFWRLMVHGITYVEKGLKKYEEKVATTEQHLLQKLARKYNMVLQPKVA

SEQ ID NO: 82963 - protein, 363 aa, unidentified
MEVAGRFVGIDLGKRTYEMCIVDRKGKISRTGGKTDFAGIDRLCEKLNGDDAVAIEACNLAFRIERAIRKSVGCKVCIMNAGKLAVIYMSTRKTDKEDSLKLAKLLKTHDEDELPIVAPPSDEEWERRKLLSEYRSLKCQRTKEINKLHAIFEHNGYTQFVRKDMCSEKNRANILPLLKGYEKEEAERLVERLNLLEKQIERLLQKINAEVENDGKIQKLMTVPGIGPITALAYVAYVGDVNRFDNAHQVSNFIGFVPKVDNSCTICRSGHTTKKGNPLLRSLLVQAAWSTVKSKNGGALRDKYKYMAESRCIGKGKSIVTIARKLGELLYLILKTDQEYKPQKFITPELKISKLAEDALECS

SEQ ID NO: 82964 - protein, 347 aa, unidentified
MVTLGADAHKRSHSLVAVDDTGRQLGAHTVAATSAGQLDALRWAQCWPERRWAVEDCRHVTRGLERDLLSAGEVVVRVPPHVAAEGRRSVRERGKSDAIDALAVARAALREPNLPEAHLEERSRAVKLLLDHREDLVGERTRIQNRLQWLLHELEPGFQVANGALSRRPAIRRVEGLLEGRAGIVAELARELTARTAQLSMRIDELEQQLAGMMPALSPSLLALPGCGILTAAKLVGETADVRRFRSRAAFAMHNGTAPIPASSGNVQRHRLNRGGNRQLNAALHRIAVSQIRRPGLSYDYFHRRLTAGNTKREAYRALRRRLSDEVFKLMLIDQRTCVSSAESAAA

SEQ ID NO: 82965 - protein, 342 aa, unidentified
MHFIGVDHHKQTSTMTVLDDQGREVRTARLLNLRADVEAFIREAAPGGFLAVIEAGRASYGMADLLRELGGQVKMANPLQVKAIAHARIKTDKRDSRTLAQLLRADLIPEVYQREAWNREAQRVLRLRAFWLSLRVQVRNKIRALLAQQPEEIRLAVEKQDGPLFGAKGQELLGSLKLGERDGEILRALLRGYQTFQAFQAESDQVVAALYQDLPAARLIDTAPGFATTLAVLVAVEIADVRRFPRAEALSAYAGLIPSTYSSGERTYHGPIVKGNVWLRWALVEAVHPAIRKDQELAILYYRLARTKGPNVAKVATARRLLTILYRMLTENRVYRLKPKAA

SEQ ID NO: 82966 - protein, 346 aa, unidentified
MKQIIRVGMDTSKHIFQLHGVDAAEQVVLRKRLGRKQMVDFFAKLPPTVIGMEACGASHYWARVLAQFGHEVKLIAPQHVKPYVMRNKNDGRDAEAVCEATGRPRMRFVPVKTAEQQAALMLAGIRERLIARRTQLSNAIRGYAAEFGITSAKGLDKIEPLLAQIARDASVPKIAHDLFAMQGREYAQLQVELKAIEFKLRAWHHANADSQRLAKIPGIGPVGATALVMKTPDPHAFPSGRHFAAWLGLTPKDHSTAGKTRLGKITRAGDERLRSVLVAGATAVIQQAKRGRGHPSPWVVALLKRKPPKLAAVALANKIARVAWKLMATGESYDGARMLGALASAA

SEQ ID NO: 82967 - protein, 342 aa, unidentified
MKITTIGLDIAKNVFQVHGIDAKEKVVVRKQLRRSQVIAFFKALPPCLIGMEACATAHYWARELTKLGHKVRLMPAKDVKAYVKRNKNDAADAEAICEAVRRPTMRFVQIKSAEQQGQLMQHRTRDLLIRQRTQSINAFRAHLAELGIVAAQGDAGVTELLAIVADEQDTRLPIDARASVIVLAAQLGALRTLIGSIEKRIKTQHRSNEVSRRVETIPGIGVLGATAIVATAADPTIFRSGRDFAAWIGLVPRQNSTGGKQKLGPISKQGDHYLRRILIVGAIAVLRRAQENPGKYPWLTQLLARRPFKVVAVALANKMARTAWALMVHGGTYRAPELAQAA

SEQ ID NO: 82968 - protein, 389 aa, unidentified
MIYVGIDVAKDKHDCCILGSEADKLFPVFTIPNNKAGFDELYEKMFSVTDDKTKIKVGLEATGHYSLNLLGSLIDKGLPTCVINPLHTNLYRKGQSLRKTKTDKVDARSIAMMLMTNKTLKPYSDTSYHSEELKSLTRYRFDKVQERAKLKSSVARLVNILFPELEKLVPSLHMASVYSLLSKLPGASYITECHLTHLKNLLETASKGHYGRDMAITLRNTARDSIGSVIPAKSMELKHTIHLIKVMTEEIDEIEDSIKSIMDTCNSPIMTIPGISYRMGAMILAEIGDFTRFNYADQILAFAGLSPSTYQSGQLDSSYSHMEKRGSRYLRYALFNAAKFVCKWDENFGAYLSKKIGEGKHYNVAIGHATKKLVRTIYRMELTGEAYRR

SEQ ID NO: 82969 - protein, 372 aa, unidentified
MTSIIYVGMDVHTTNYTLCCYSMEDDRFFAEVQVEPDAKNILKYLARIEKQQSRDCRIVCGYEAGCLGYSLYHQLHAHGIDCVILAPTTMMTKPGKRIKTDRRDARLISKCLAFHTYSPVYIPTEVDDAVKEYIRMRDDANSALARVKQQIIAFCIRHGKIHDGKSYWRNKHLEWLSSLDLGNKILSEVLQEYLIRYYQLREQVDMYDMRINEIAQAEPYRQKVEKLGCFRGIAAHTALSFCVEVGDFRRFATAQQFASYFGLVPGECSSGDKQQYTGITKAGNSHLRKLLVETAQVFGRSATKSGKSVALKERQAKCDSLTVAYADKANARLKKKYFKIAMRSKVNIAKTAVAREMACFIWGMMTDNISCA

SEQ ID NO: 82970 - protein, 374 aa, unidentified
MENTITYVAMDTHKKQHKIALHYPCREEIIEFTINNTVRDIKKMVNKIKKQAPGEVEFCYEAGVCGFTLKRRIEQFDCRCCVIAPSLVPRKPGDRVKTDRRDAKKLLMMQQAGLLTEVHAPNEHQEAARELTRLRETARDNLKRIRHQLLKLLTRHGYVYTEGRHWTQKHITWLRTVKFAESTLTNVFENYFNEMIYCIGRLENLDKEVGLLAGSQEYKEIVGLLCCYHGIDTLTAITIITEIFEFGRFESPRHLMSYLGLTPSEDSSGEKQKKGAITKAGNKRIRRLLNETSWHYRHRYVPSAALKKRRKGQPQWAIEIADAAGRRLSTRHRYLINKGKMPCKANIAVARELAGFIWFTVTQYQARKNTNDAA

SEQ ID NO: 82971 - protein, 418 aa, unidentified
MEKQDQLPFAAYVGIDWADKKHDFCIEIPAEGTQEFDVIPHRINLIDQWVRTLYARVKGPIAVAIELTRGPLISALQMYDFIVIYPVNPGSLAKYRQAFVPSRAKDDPTDAALAVDMLRRHPERFKPLRPQSADMRALITLVEQRRQLVGERVRLTNRLRAALKQYYPNALEWFDHVDTIVFCDFIVKWPTLVQAKRARVATLKRFFHEHNVRFPSVVEARITAIKEAVPLTKDDAIIVPYRMKAQAVVEQLKLLLGSIKAFDVEIDLVATRHADYSLFRVLPGAGPSLAPRLLVAFGEDRDRFASASEVQMYSGIAPVTERSGKKHWVHWRLQCPRFLRQTFVEWAAQTINKSYWAGEFYQQQRDKGCTYQAAVRALAFKWIRIVYRCWQTGIPYDEAKYLKTLERRGSPLMVKKTA

SEQ ID NO: 82972 - protein, 390 aa, unidentified
MIYVGIDIAKSKHDCCIMGIGAVILKDVFTIQNSSDGFSMLLECIRCFEQDTSAVRIGLESTGHYSLNLISFLRRSGFQPVIFNPLSVNLFRKAQTLRKTKTDKVDARFIAAMLLSRPDEVTMPVPQYIAELKTLTRSRYRLIRYRSRLKISLSRLLDIIFPELASVVWSNNQKSVYALLLEFPNPQTITGCHLTKLTNILRQASHGKYGREKALQIRDLASCSIGSNSPALAFELQQTIRLILSVQSEIILLDKQIRSIVEESHTPLLSIPGISYTLAAIIIAEIGDISCFSTPAKLLAFAGMDPSTSQSGRYTASNTPMVKRGSSYLRWAILQAARLVSMRDATFRQFMLKKRAEGKHHFVVMSHVGKKLIRVIFHMLQTGQAFSPQN

SEQ ID NO: 82973 - protein, 430 aa, unidentified
MTKRSSTPADAVLVAIDMSKHRQEVLIERPEGGRRRRMTVMATKADYDRLADDLSAIGRPIVVGFEATGNYHRTLAHRLLSAGFELRLISSVALARTREALHNGWDKNDSKDAQVILHMLRIGATQRYVDPLAAGINDLQEMSKTHEAISKAKTQTWHRILTHYLPLYFPEIERFAGNSRSDWFLALLEHFPTPGSIIAVGREGFTSEAWTLVGRKVSKARLINDIYETACTSIALPVDEDSVAITMFRMVIAQARSLIQQRNEIEQTAHAMLGENRDYQLLRMIPGIGPINALTILAEAGDLRRFNHHRQFLKFCGLDLATCQSGTFRGRTKLSKYGNARLRRTFWMATQVAIRQRDNSFRDKLGRYVAGHPNDPDRRRKAMTALTAKMARVAHAVIKTGTEYRPFLERADTRWKDPSLWSREGATATL

SEQ ID NO: 82974 - protein, 336 aa, unidentified
MQVYGIDLSMEKFDVSYINNEGIEMHKQVKNSLNSISKFLSKVPDAAILCAENTGSYGDLLVFLCNQQNLKIALVPGYNIKHSLGLVKGKTDKVDASRIREYAERFNDKLVFKEYDSEEMFELKSLHALRSQLIKARKLLLAGGHSRTKTPMQSIAVKHHMDMALISLNKQIKEVDFEMETIIRSHEELNDNFVLATSVLGIGPVIGIDLIIKTGNFKTIDTARKASSYAGVCPFPNKSGKMVGKSKTSPFADRKLKSLLYMGAKSALKSSKEYKLYYQKKKLEGKAYFLIMNNISNKMLRTVYSVVKSKVPYSRDYICLDPREKNINNSSSKNVA

SEQ ID NO: 82975 - protein, 352 aa, unidentified
MRTSQKTSETMTTIGIDLGKNTFHLVGLDKRGAIVLQRKVSRSQLERHLSNVPRCLIGMEACSGSHHIGRQLTALGHDVRLIPAQYVKPFLKGHKNDYRDAEAIAEAVQRPTMSFVAIKTPEQMDLLALHRVRSRLVGQRTGVINQIRGFLIERGIVVRQGVAPLRKALPDILSSNTDVLSPRMVSLIADLMQDWRRLDERIETVSAEIEALAQQDDSCQRLMTVPGVGPIISSAMVAAIGNGAGFKQGRDFGAWLGLVPKQESTGDRTILGKISKRGNKYLRTLFVQAAHVVLVRRPSAAMRGLWPWIEQASRRLHRNMLAIALANKLARIAWAVLARGRAYQPRIAANAA

SEQ ID NO: 82976 - protein, 359 aa, unidentified
MTTTNVTARPILAIDLGKYKSVACLYDRSTAQASFDTITTSRAELLRLIDRHRPTLVVIEACALAGWVFDLCAERGLVCKVANTASEAWKFKHTKRKTDKDDALRLAQLEALGQLPTVVIPPQQTRQWRALIAYRQVLIGRRCAGQNRIRALLVGQGLPAPRGHRAWTEVGLEGIAQHAKVLADCGPDELWQGLLALALTEYRQVRALIEQTEAKLDALAKADEGVRLLETIPGVGTRTAETIVAHLHQPERFDNGKQVSAYVGLVPRQFQSGETDRRGRITRRGPAILRKLLVECAWVMLRYNRWAREVYLRLSRGKARKKQAIVALARKLLVRCWAMLRDKSPWREAAPPKAEAARV

SEQ ID NO: 82977 - protein, 344 aa, unidentified
MLDTTTGEVLKATLEHGGNKVREFYSNLPRPVRVGIEATGSMQWFVNLMEELGIECLVGHPAEIRAAEPRKQKHDRRDADLLLSLLVQERFPAIWLPTKELLDLRALLRHRHQWVGLRVKIQNALQAIALANGLRRGSSLWTQAGQQAIASLRLSPHAACRRDELQAMYVQFETEIEKLNQRVEQQARERFGARLLMTHPGVGPITALATEVFLGDPSRFASSKELASYVGMIPGEHSSGKRQRLGGLSKQGNPLLRFLWSEAVIHAVRRDAELKQFYRRKLIQKGLGKARAAVARKLGIRMWIMLRDRIEYNEFCRRGQRQQKSGDACAGMPGPRYGAKSPAD

SEQ ID NO: 82978 - protein, 341 aa, unidentified
MNEVTMIGVDLAKSVFQAHGATAIGEPIFRKKLSRGQFLKFLSEQPICVVAMEACASSHYWGREIMKLGHDVRLIPPIYVKPFVKRQKNDANDAEAIAEAAVRPTMRFVPVKSAEQQSRSMVFKTRDLFVRQRNAIINALRGHLMEYGIIAPPGRSFVSKLAEQIESPDCDLPSIVIDLSRVHLDHLGTLTDKIVLIERRLKDEAKSDPETIRLQTAPGIGPVSAMAIKAFAPPLEGFKRGRDFAAWLGLVPVQKSTGGRQILGRTSKMGQRDIRRLLIIGAMTRIRWAIKNGAPKGSWLEQMLERKPRMLVAIALANKTARTIWAMMTKCEDYRDPVVAA

SEQ ID NO: 82979 - protein, 460 aa, unidentified
MNRKRSKSRVDRTLPMMHPNAAAIDVGATIHMAAVRADRAPEPVRSFGTFTTDLHRLVDWFTECGVETVVMESTSVYWIPIFELLDARGFTVFLVNARDAKHVPGRKTDVSDAQWLQRLHSYGLLRASFRPKGQIAELRAYVRQRERLLEYAASHIQHMQKALTEMNLQLHHVVADITGSTGLRIIRAILAGERDPEVLACLRHYSCHSSAETIAKALTGSYRTEHLFALEQALALYDAYHEKASACDVRIEAVLKELSIHRGRDVGPVPPASRRRHRTDQANALAFDARAALFALLGKDITRIDGLGPYLSLKLIAECGDDLSSWPSAKHFTSWLGLAPSNKVSGGKMLSSRTRRSGGRAAALLRLAAVTVGRTDTALGAFYRRLSARIGKAKAVTATARKVAVLFYNAVRHGMEYVDPGASSYETRYRTRVVNNLHRRAKAFGFALQPLEPKADAVVS

SEQ ID NO: 82980 - protein, 355 aa, unidentified
MKYYAGIDLHSSNNYIGIIDETDKRVFGKRINNDLPDVLSVLEPFKNNLDGVVVESTYNWYWLVDGLQNEGYPVHLANPSAVKQYEGLKYTDDRWDSFWLAHMKRLNILPEGYIYPKEQRSVRDLLRRRLLFVHQRTSQILSLQSMIARTLGARISASKMNKFTDEDIDRMFEANLAFMAKNQLSTIAFLNKTILNIEKQVLAQVKLKKEFSLLQTMPGIGKILALTIMLEVGDIKRFKKVGHYSSYCRCVKSEKTSNKKKKGENNKKNGNKFLSWAYVEAANFAQRYSQEAQRFYQKKKAKRNGIVAVKALSNKLCRASYYIMRDQIPYDEARLFAEFGCGREPTVGLALNQQA

SEQ ID NO: 82981 - protein, 391 aa, unidentified
MTRISVGVDVSKNRSTVCIMDQDGKFIMRPFLVWHSTEELDFLADTLKRLNGEVRVIMESTSIYQYPIALHLKEKGIFISIVNAYKVKKFANTDFRGGKTDKKDSRTIASYGISYWDKLVEWQIPKDTYFNLDLLNRTYMNAKKHRQIILQELQHYIDCAMPGMDKELHSLNLNTKKDFMLDFVEKFWHRDEIVNMTEAEFTEVFTAWAKEKGYRPGKGKAAKIYAIAKSCIPYYPANPTVKTILQCIVDKLSGVNRTLVTIVTQMIEEAKKLPEYQIVREMPGVGDPLAARFFGSAGDIRRFKNSKALVAYAGIDSPPDESGDFSSTHRHITKKGSKVFRDTGYEIMMALRAQKRTWEKVRKNPEVYDYMLRKEAEGKPPPKLNELARFN

SEQ ID NO: 82982 - protein, 310 aa, unidentified
MDASFVGIDVSKDRLDVHVCPSGEAFTVLRDGKGLEGLIDRLRTLLPQLIALEATGGFETIAAAALAGAGLPLVIVNPAQVRHFARAVGKRAKTDPIDAAMIARFAAAIRPEVRPLPDEQARLLGELVARRRQIIEMIVAERQREPHTAIVRVRKSIARHIRVLEKELVEIDNDIGTLVRSSPAWRDKEDLLVTFPGIANKLARTLLAEMPELGSLTRRQIASLAGVAPFTRQSGHWKGKSMIAGGRAPVRSALYMAALSAITCNPPLKGFYQRLLSAGKPKMVALIAVARKILTILNAMLRERKQWQHA

SEQ ID NO: 82983 - protein, 345 aa, unidentified
MEIAVIGLDLAKHVFQVHGVDAAGRAVLRRKLRRGEVLAFFAKLPRALVGMEACHTAHHWGREIAKLGHEVRLMPPQFVKPYVKSQKNDAADAEAICEAVQRPSMRFVPVKSAERQAVILLHRTRDLLIRQRSSLISAIRAHFAEFGITASGGMRNIDRLLALLQTEGAERRLPAIAAEMLGVLAAQLRAVAERVDEVETRLLAWHRADETSRRLQSVPGIGPVTASALVATVGDPSQFGSGRQFAAWLGLVPQQRSSGGKERLGGISKRGDGYLRRLLVHGARAVVGWRKRAAVDGATSWIDRLLERRPTNVATVAYANKLARIAWAVMMRGRRYDPGRAFAAA

SEQ ID NO: 82984 - protein, 343 aa, unidentified
MEKITTIGFDLAKSIFQVHAVTGDGKVAVRRSLRRSQVLDFFRSLEPCLIGIEACGTAHYWANAIGEFGHTVRLMPPAYVKAYVKRNKTDAADAEAICEAVTRPTMRFVPVKSAEEQSAGMVLKTRELLVRQRSQMSNAMRSHMAELGIIAATGMPSIAKLVVIVRDEEDHRLPPSARAALLEMAEQIEILTERIEKLDSRIVAAVKADDTARRLTTIPGVGPIIAATVRASVPDPAGFRTGRDLAAWIGITPRANSSGGKERLGKISKRGNKQLRTLLVVGATSILKQARRGAKLPAWIASVLERRPYKVAAVALANKMARTIWALLVKGGTYQTPAVMMKA

SEQ ID NO: 82985 - protein, 351 aa, unidentified
MAKTFETTVAVIGIDIGKNSFHVVGLDRRGAIVLRQKWSRGHVETRLANMPPCLIGMEACVGAHHLSRRLKALGHDARLMPAKYVRPYSKGQKNDFRDAEAIAEAVQRPTMKFVATKTVEQLDLQALHRVRERLVSQRTGIINQIRAFLLERGIAVRQGRLSLRMALPQILAAPPDVLSPRMLHIIEDLAGDWRRLDERIQTLSDEIGAIARQDIGCERLMSVPGIGPIIASAMVAAVGTGDTFVKGRDFAAWLGLVPKQISTGDRTILGSISRRGNRYLRVLFVQAAWVVLIRPKNWERYGLKSWLEAASKRLHHNVLAIALANKLARIAWSVLARGRGFEVSRLDHAIA

SEQ ID NO: 82986 - protein, 419 aa, unidentified
MEGSITWVGVDAHKKTLAVAAFQRNGQEPEEFTIDNDERAIRKLVRRLERSSDGREIRICYEAGTCGYALQRRIEASGGVVCEVVAPSLIPRKPGERIKTDRRDARKLAELYRAGVLTTVAPPSPEQEAIRDLCRCREDVRADLGRCRHRLVKMLVRRGYVFNTTSRLWSEAHRSWLKSLAFDNDVDRAVVTEYMLAVEQAERRLRAMDGEIAKAAQLPLYREHIAWLRCFRGIDTTIAMIFVAELHGVERFESPRALAAYLGLVPSLYASGESARRGKITKTGNGHIRRALVQACWQYRHQAGVGAKLRERQAGQPERVLMIADEAQRRLTGRYRRLVARGKNTNKVIIAIARELVGFLWAALRDDREPALHGARSSAQFEGAKASAAPRSGATRYARKESRTGVGQRRKARKEKRAV

SEQ ID NO: 82987 - protein, 356 aa, unidentified
MGKNTKVDFTGQDIYVGIDTGKKSWKVSIQTKEIEHKTFSQPPIPGVLVQYLRRCFPGAKYQCVYEAGYFGFWIHDALREQGVECLVTHAADVPTKDKERRNRNDRVDARKLARSLRNGELSPLYVPTRSALENRSLVRTRMSMVKKQTRCKNQIKAFLSFYGYAIPDELVRSHWSRRFIHWLESLSFEGDSGNQSLQTYLEELKHLRDSIAHLTKEIRTLARQEPYRTQVELLDSIPGISTLSAMILLTEIVDINRFRNLDHLASYVGLIPGEDSSGDQERSTGISHRRNAHLRSMLIECSWVAAREDPALLMAFSKLSKRMAKNQAIVRIARKLLNRIRYVLKHQKPYETSVVI

SEQ ID NO: 82988 - protein, 427 aa, unidentified
MNYTQNQKISQITPSTLIIGIDIAKDKHVARAQDDRGIEFGKRLIFENRIHGFETLLEWVEKHQKENGKTHVIFGVEPTGHYWMNLAYFLTAKGFDFVLVNPMHVKKSKELDDNSPTKNDTKDAKVIAQLIKDGRYSIPNLLEGIYAELREGVKLRDQLARQRMITEGRIQNVIQRYFPEFFDVFGDWEGKAALSTLKMFPFPSQIVEMTPEEVLLKWKPFVQRGVGIKRATKLVETAKKSIGIQIGIQFAKREMDCLLEQYELYKKQLEQLDLELETLVETIPGAKEMTAIKGLGITTVALLFAEVGDITNYRHPQQLVNLAGLSLREHSSGKFKGQTKISKRGRSRLRRALYLAIRPLVAHNPTFKALHEYYTKRPENPLKKQQSLIALCSKLLRVFFVIGNKQCEFDGSKLLRGLPQIETLQAA

SEQ ID NO: 82989 - protein, 421 aa, unidentified
MKIVYPVCCGIDVHKSFLVATIVSVTKLRTLTYKKERFSTYNKDLLKLKNWLIENNCYDVCMESTGKYWVPVLNVLEPDLHVVIVNPKWVKAIKGNKDDVKDSKWIGELFCFGLVRSSFIPSKDIRILREFTRYRYKLVNMRSSEKNRFQNGFTVCNIALDSVVSDMFGKSASEITNYLLTDKNPNAEHCATMLHRSLKRKAVAVVESIEGFQLTEEQKFRMRQVLNHKEYLDLAIDRLDTKLESLAEPYAAAIKLLCTIPGMDKDSATTIISEIGTDMSQFDSSKRLCSWAGLTPGNNQSAGKKKSVKITRAGVYIKPMLVQVAHAAVKCTSQPYYKIKYENITRRRGKKRAIIAIARMILTAIYHMFQTGEVFNPSDLKQIDMPEELKQKQLQKNVSNAITLLKKQGILSDDFSAPSCA

SEQ ID NO: 82990 - protein, 404 aa, unidentified
MIYLGIDWAEAHHDVFLLDEAGIRLDKARVPDGLEGLRRIHELVAAHTESAKTVMVGIETDRGLLVQGLVATGYQVYAVNPFAVSRYRDRHATSGAKSDPGDAKILADLVRTDRHNHRPVAGDSEHVEALKVLARAHQSLIWSRQKQVNQLRSTLREFYPAALVALGTDLSARDAVALLERAPTPEQGRLLSLSKIRATLERGGRQRNLDARAAAIQAALRTPQLQPPRRLAQAYGSSVRATVRVLAQLNAEIAELEAELAESFEGHPDAEILRSLPGLGVVLGARVLAEFGDDRTRYQDARARRCYAGTAPITRASGTRYVVLARMSRNRRLADALYLWAFSSLTRSPGARASYDAHRARGNTHHQALRALGNRLVGILHGCLNHRIVYTEAVAWPPRAETAA

SEQ ID NO: 82991 - protein, 362 aa, unidentified
MNAYGIDLHSDRFTVAKMMVKNDKVYEVVSTYSFKNESYERFLGSLREDDYVLVENSTNAFWFHDQLAGRVKACFVYDTNDIRSSGNKNDKIDARHLVRKLSFYLIMGEREKDLPTVSVPDAEIRELRGLFTTYRLYNKTKVQLKNRIHSILKQNGICIDRGNIDKKGFEPSIEDFEISEVWKLQIRSAYRQLQSVQTEQKRIMDMIYVQGNKRFKREVELLMGIRGFSAFTAIALMSDVVDVARFQNAKSFCSYLRATPKVRSSNQTTHVGQVNRQSRPLTCSLLTQSIYQLAQAGEHMAKFYARVRVGKSPGKSRIALIRKVLVSAYHMLKRNEPYFWVEQELYSCKLRTFQRALQRIAA

SEQ ID NO: 82992 - protein, 312 aa, unidentified
MPSPIDVGVDVAMETLQIAHADSAAADARVANRRAPIRAWLAQLPPGSRIAMEATGRYHLLLAELAYAQGMIVYVLNPCDLRHYARAVGLRGKTDRVDARLILRYLVREGSALHPYVPPTPAQREIDQLLRRRATLVNAKTQLRLSLQGLALCASDLTVLLKRLDAMITKLEQRLRQLAQGQAEAQRRVESVLGIGPLLGVALTNTFARVPLRNSDAAVAFVGFDPRAKDSGQCIGRRRLSKRGPAELRRLLFNAARSASKTTLWRPLYQRYRDRGLSTTEATVILARKLVRIAFSIYHHGTTFDPARFVHA

SEQ ID NO: 82993 - protein, 344 aa, unidentified
MQIAVIGLDLAKNVFQVHGIDDSGQAVLKRKLRRSEVLPFFAGLAPALVGIEACHTAHYWGREIAALGHDVRLMPPQFVKPYVKSQKNDAADAEAIAEAVQRPTMRFVPIKSADQQAVLMLHRTRDLLIRQRSSLISAIRAHFAEFGIVVGQGIRNVERLLALLETAGDQRLPALAAEMLGILAAQLRYVAEQIKEVEVKLLAWHRADETSRRLQSVPGLGPITASAIVATVGDPKQFKSGRQFAAWLGLVPQQRSSGGKERLGGISKRGDGYIRRLLVHGARAIVGWRKRSATHKTPWIERLLARRPTNVATVAYANKLARIAWAIMMHGNRYNPALAFATIP

SEQ ID NO: 82994 - protein, 342 aa, unidentified
MELYAGIDVSLEYSSVCVVDAKGKIVREAKVASEPQALITWFGSLGFGLERIGLEAGPLSQWLFAGMKKARLAVELLEMRHVRKAFEAMPVKSDRNDARGIAQLMRLGWFRPVHCKSMSAQETRSLLTARKLVQSKLHDVENSLRGILRGFGLKVGKTTGQKFAGRIEELVAGHPHLQTIAKALLAVRAVLRTEFAAFEKQTRRMVRSDMQARLLTSVPAVGPIVALTYASAIDDPARFKSSKQAGAHFGLTPKKYQSGETDYTGRISKIGDASVRTALYEAANVMLTKPVKGCSQLKSWAMRIKQRAGMNKAKVALARRLAVIMHRMLADGTPFNAAAAAA

SEQ ID NO: 82995 - protein, 418 aa, unidentified
MKITNSILVGLDWADQKHDLCWRDPDTDKIQTMVLKHKPELINEWVCDMLSRYPEKRIAVCLEQTRGSIVYALMGYNTVDIYPVNPSTMSDYRKAFSPGGAKDDPSDAALMLELLERHPESLKLLKPDTENTRLLRSLCEDRRKAVDMRTALCSSMRSRLKGYFPQALKLVSEQLFTELTCAFLMKWPSFESVAAARPSTLRSFYYTQKSRSEKCIKERLELVVSSRPLCSDSSIINSSVMWIQMLVKQIRVLNREIKSYDKRIKDLFGNHEDNFIFKCLPGAGPQLAPRLLTSFGTDRDRYDKAEEVSNYFGISPVIVRSGKQKWVHWRWHCPKFIRQSVVEFAGKSIMYSAWARIYYEEQIKRGKGHHAAVRALAYKWIRIIFYCWKHKVAYDEKTYIASLTRHGSWIVENLKKTA

SEQ ID NO: 82996 - protein, 317 aa, unidentified
MNSTDSTFVGIDVSKATLDVHVLPSSRAWSTPNQEHSVSSLVKDLVALRPTLVVLEATGGLERRVLAALLAAKLPAVAVNPRQVRDFAKAKGLLAKTDALDAHVLALFADAIRPAVRFAPDQETQELDALLTRRRKVVDMITAEKNRLAADPPSPRVQRDIRRTIKYLENQLDQEDNDIDAAITNSSAWKEKDDLLRTVPGVGKVLSRTLLGQAPEIGTLNRKQIALLIGVAPLNRDSGKLRGRRCIWGGRAHVRQVLYMATLAAIRFNPSIRAFHARLLAAGKLRKVAVVACMRKLLSILNAMLRSNSPWSTEVSA

SEQ ID NO: 82997 - protein, 482 aa, unidentified
MGVIIEGRRSLPASWSKADLQWSFEPDYQSGLGIATNLELSPPTVGEHARQIVAFFDTPEVPVRLGGCIVDIIYQCVAGLDLHKETTVAAVRSIGPAGKVETDLRTFGTMTRDLLELAEWLAAHGVTHVAMEATGVLWKPVWNILDGRFELLLVNPRELKQVPGRKSDIKDAQWIAQLLQHGLLRSSFVPGRSQRELRDLTRHRAQLEGEHTRAANRIHKLLEDANIKLGVVASDILGVSGREILDRLVEGEEDAASLAQSARRRMRSKIPQLELALQGKFLPHHRFMLKQLLSHLDHLDQQIGQFTARIEELMVPFVDEELKEKLDAVPGVDVATIQNITAEIGVNMNQFPTAGHLASWTGICPGNEESAGKRKRSKTTKGNRWLRRALTQAAWAATHTKDSYLGAQYHRLAGRRGKKRALVAVAHTLLVIIYHIIKYRVDYEDLGADYFLRLEPDRQKRYLVKRLEQLGYEVQLAEKHAA

SEQ ID NO: 82998 - protein, 353 aa, unidentified
MIVLGADMHKSSHTIAAVAAASGELLGDKTVRVGDRGFAAALDWARGLQDERVWALEDCRHVSGAFERFLLGHGERVVRVATRLMVGDRRGGRDRGKSDLIDAMAVGRAALREGVDRLPVAELAGVELDIRLLVDHRERLVRMRTALYNDLLWHLHDLWPEQTFPACALLSKKWTARIARRLARAEQTARVRIARDELRHLRELSDTINLLEAEIADLVAQVAPQLLAEPGFGPLTAGKLIGEIAGAHRFSSDAKLARAAGIAPIPVSSGNTNRHRLDRGGNRQINTAIHRVAITRLRCHPETKTYIERKRGEGKTNREALRCLKRHLARRIWHLLQPSPPVLNNTPNINLLT

SEQ ID NO: 82999 - protein, 447 aa, unidentified
MQVVTANWKLPREELQLTHPGGHMQPQKITACGIDIHKDFFVAAIMSRDGATKIEKFDHTQEGLLLLKSWVLAEECSTVAMESTGNYWRPLYLTLEGYVELILSNAYVIKRIPGRKTDIIDAQWIAELALNGLLTPSRVFPKEVREIRELTRARERLVDQRTGCKAIVHGVFDAACIKLSSVITDIFGKSGRYLVHGLLQGKTIDELIEGIPSKRVQHKEKLLKNAIKSALSTSQVIVIEQNLRLIDQITEQVTQLDDEIIGRMKNREDDVKIAMSLPGIGMTAAVTILAELGDYHDFKSPDSLASWAGMVPSVYQSANKLRTGSITKHGSKHLRRILTEAAQAAARTKDTRFSAYFRRLKNRIGYQKAIIALARKILCILWHLLINREFYIDTQKTRPKNQSVSPKPVNPKSIERSIEILVKAGYCVQKSDILMNMRRFQGAADPP

SEQ ID NO: 83000 - protein, 370 aa, unidentified
MLDTTTFVGLDVHARSIKAVSLDVMTGELRCATFGYDAGAVAGWVRSVDPRARCVYESGVTGFDLQKRLSGLGVDCVVGAVSKMIKPSADRRRKNDRNDAEFLARMLSVGNVVEVWVPDDECEAARDLTRALEDARDDLSRAKQRLSKFLLRHGLAFDERTPTGRRKGNWTRAHWSWIESIRFAEGADNDVLAYYVDAVRRAAEEKARLEGLVEAEARKPRWRRRVDSLRCLKGVDTASAADLVFEAGEFSRFRNARSFAAWVGLTPSEHSSGESDRRGAITKAGNKHLRKALVEAAWHYLTCSGRPKGLAKGQAPDRVARRHAAKGVRRLVERREALLARGVHGNKANVATARELACWVWAVGLMAEEA

SEQ ID NO: 83001 - protein, 312 aa, unidentified
MFHRRVAATLDAVNQALAPYWPRISAMGVESTYNWYWLVDGLREQGRDIRLGNPAKMDPYKGLKRANDHTDALWLAEQLRLGLFPASYIYPRAIRGVRDALRRRQLFVRQRTQAMLSLEGLLTRYGVEVPGTYALKKWTNRDIEATGLEPFVQLQLRTLLGALPSSDLQAKEVERPVKEFTEPIEAFQRIQQVPGIGVILGMTIVLESGDFARFPNAGCYASYCRAVDSRRESNHKKKGENNRRNGNRHLGWAFIEAATFATRFDPRIQSWYDRKKRQRNSIVARKALACKLAKAVWHVMKGRDFDLQMLFG

SEQ ID NO: 83002 - protein, 424 aa, unidentified
MKNTAAKKRKQVPEGYLVIGVDPHKKRHAAVAITQDFTTQAKFKFDNTREGLDMMLGRAREEMVKCGCRGVMFAIETGGHYWRNIAYYLDERGIPFRFINQYTLKRRREGKDLNRRKNDYRDSEVAAQLLCTGEFVESVIPQGAYAELRTSHNAYQRLVKERTRITNLVKGLLDALFPEFTQIFKDPGGRTALSVLSTCPIPRVIAGMTEDEFVATIEARYKGRHLMRKKLRALHCSARTSIGIYAGARSLSSEIAFLVDKLELIKQQIRIMEMTLVKLVDEAEEGKYLLSIRGLNYTAVAGLLAELGCFKLYRSAKQMIKMAGSNPTESESAGKKRSRTPMSKQGRPLLRYCAWTAVIPMLRFNKDFRAWAKQRRERPAHANPLSGREVVGAALNRLLRLAFALVKNQTYYQDTKPALIPVAV

SEQ ID NO: 83003 - protein, 314 aa, unidentified
MNNKQVAGIDVSKATLDAALSSTGEVMQFTNDAGGIEELGKKLKSAAVDLVVMEATGGYETAVATALVGSGWRVAVVNPRQIRDFAKATGRLAKNDRIDAQVIAAFGQAIEPEIVRLPDEDARELEALLVRRRQLVAMRVQEVNRLGLVQGAMRKRIKAHIDWLEKEIDKLNIDLTAGLRNSPAWRAKDELLRSFKGVGPITSSTLVIDLPELGLLDRRAIAALVGLAPFNRDSGVMRGRRSIYGGRSHVRTLLYMAATTAIRSNPVIRAFYERLKSRGKPHKVAMVACMRKMLIILNAMVRQSTPLTPETNPV

SEQ ID NO: 83004 - protein, 317 aa, unidentified
MTKKKEIILAIDVSSTQLEAHISDGQSILLRKAFNNNKSGCSQLFKIAQNHNVTRCALEATGGYEQAIAEYFYGSEITVNILNPARVRRYAQGLGILAKTDKIDAYVIERYTREVKPEANFEATKSQLMLKRLIYRRSSLKSTIVAEKNRKRIAEKQIVKSINRVINFLEKEVKLIEKSIDQLLQQDISLQKKVDVLTKQKGIAKITACSLIGLMPELGYLNKQQVASLAGLAPFSRDSGKMKGKRFIQAGRFLARKSLYMPAWVAVMYDQKFKQIYNRLTGRGKPPKVAIVAVMRKMIIEANKNLKFYYKNIQKNY

SEQ ID NO: 83005 - protein, 367 aa, unidentified
MMGWMAPFRHRRAKLVFCRITRNREPSMSEVTTIGLDLAKHVFQVHGIDAQGATVLRKRLRRGQVLAFFSRIPRCLVGLEACATAHYWARELAALGHEVRLMPAQYVKAYIKRNKHDAADAEAICEAVQRPTMRFVPVKTAEQQAAQLLHRGREQLVRQRTMLVNALRAHLAEFGMVAAQGLRNVAQLIAIVRDEDDLRLPDVARQVLQVLANQIEQIEAAITALEKQLMAWHKTNPVSQRLASIPGIGPIIATAIATTVADPNVFRSGREFGAWLGLVPRQNSTGGKTRLGGITKRGNRYLRRLLINGASANLLRSKATKADPWVIGIRRRRPPLVVAVALANKTARIAWAVMLRQEQYQPRALAA

SEQ ID NO: 83006 - protein, 433 aa, unidentified
MKGGDTMNNALTTTLFIGIDVSSKSNYVFALDFFGKKLLSFQANNNLPGSEEIVSIILSCLKENNLTHLTIAMESTSFYSWHLANTLATHEALVWFKPKVYCMNPRVICAYKKSFVDMDKTDPKDAFVIADFARVGKITTAPWNGAQYIALQRLTRCRLHLMENISREKSYILSNIFLKFSELAVLDKKENPFSDTFGATSLAVLTDFMSTEELANASIEDLVAFLVEKSKNRFSNPEATAKLLQKAARDSYRLDKTLYDPLNATIAASLNCIKALEREVKGLDKAIEKAIKRIDNHQFQCLLSISGIGPVFAAGIISELGDATKFNNQACVAKYAGLTWRKKQSGNFTADNTFLTKTGNKYLRYYLLEAAASVIRNNDEYLDYYHKKYDEALVHKHKRALALTGRKLVRLIFALLRNNQLYTSKEVVEKATI

SEQ ID NO: 83007 - protein, 346 aa, unidentified
MHYIGMDCHISTLDFAVVNEAGRLVKAHRVATSVNGFMEFVKAVPPPRAIFMEEGTLAAWALETCVRFREKLVITDAKKNHWIGSSGQKDDSIDALKLAQLARGGYIKEIHHPVGQRRRFRELMIAYHDTVRSTTRIKNKIKAKFRQNGIRCAGATVYSKTYREEWKGKLPQEATLLLILDGLWRQLKQSEQTEKELLAAARAQAKQYLEIKLFKDIPGIGFIHAATVSAILENPYRFANKRKVWMYAGLGIMTRSSGGKTYSEKLSTDYNRLLKYTLKQAAEATIQAKDNPFRRKYLDMTLLHGIAPHRAKLTIARDMLATMWAMWRRGEKYSPEIREKAAYKQG

SEQ ID NO: 83008 - protein, 360 aa, unidentified
MTGTMTWAAMDVHARSTYAASMDVVSGELSRRRFDTGAVAPVVAWLAELPGPVRACYEAGPTGFGLYRAAVAAGIDCQVIAPSKTPRPSGDRHKSDRRDTDLLLRQLMAGALTAVAVPSVSLEAARDLARAREQVRVDLMRCRHRLSKLLLRHGRVWDRSTWTKAHREWLGSHTFEHQNTELAFIDNLAACDGLTARKTALDERLSHVVTDPEFWPVVTRLRAFRGIDTLSALILTLEIADFTRFQRAVQLGSWLGLVPSREQSGETDRHGSITKTGSKYARRILVEASWHYARPPRIGKTLYERQEGLPDHVLQIARRAQARLYRVHNRMRERRKPGNVITVACARELACFLWAAATAP

SEQ ID NO: 83009 - protein, 344 aa, unidentified
MEVAIGVDPSKSSLAVAAVDPLGRVVGTAEFSNDPRGHRALLGWVGERGLDRVIGIECSLSYGATLSRVLLRSGEDVREVPTTLTHRQRRRRASQGKSDMVDSVAIARIVASGEVLPSAHRLEVLTDLRALVEYRDQLVRARTQVANRTHADLVNILPGYERQVPNLRAKAHRTTARSLLRGDRSVRGELVRKRLGELSRLEGEIAAMDRRIRATVQKTGTSLTSIPGVGPFIAAKILGEVGDPSRIRSKPAFAVLSGTAPLSASSGQVQRHRLNRGGNRQLNWALHYIALVQCRIMPEAQAYMARQREAGKSHKEAMRCLKRQLSNVVYRHLVADARRAELAA

SEQ ID NO: 83010 - protein, 342 aa, unidentified
MLGEKGEVLEEGSVGNNRAALSELGGRYPEALVVMEAGCHSPWVSRHLEQAGCEVVVSNPRKTRAIYQHERKSDRRDALMLARIARMEPALLYPVRHGSEEAQQELLRIKLRDSLVRARVALINSLRFTLKSLGYSIANPSTERFHKVIQSALPQSVAQVIAPSVQALEELTLRIKLLEREISDQARSKYPDTAWLEQIPGVGPITALYFVLKIEDPARFKRARDVGAFLGLCPRRDQSGENDPQLRISKRGDAYLRRLLVSSAQYILGPFAPPSALRQYGLALATGATARAKKRAVVAVARKLAVLLLTLWKNKSSYQAFPQRSSREKMRTNDLERLRCIA

SEQ ID NO: 83011 - protein, 328 aa, unidentified
MALKIVYKICCGIDVHKTFVVACIASTNDKGVTSYESHRFSTYTSGLKTLLQWLLDRNCKDVCMESTGKYWIPVYNILEKDCSIVLAHPKYVKAIRGKKTDKKDAKWIADLFKHDLVAGSFMPPADIRQLRDLMRYRSKLTNFRSSEKNRLQNCLTVSNIQLGNVVSDTFGKSAQAILDKILENPADTSFDLEPLVFKSLKKKLPELRDAIDGYITTEQAGKLKVIKAHYENLESRKAELEELILALAAPYQQELAILQTAPGISSDFTAIGIISEIGTNMEAFPSAKHLCSWAGLTPTNNESAGKKKSVRVAVIRQRSVRKKNIKIY

SEQ ID NO: 83012 - protein, 341 aa, unidentified
MDKELYFGVDVSKKTLDLAYYDGETIDWKNAHIKVSNDDAGFKKIGSWVAKVGKDFDTFLFCMEYTGLYNQNFRLWLESKEYIYGMVDPRKMHHFEPDLDDDQRSLDRIKTDELDAFRIAIYCEQNHKKILRNPSKLPSPVYLKLKRLLVERKQNTKQSTLCKQQLHDTCAYDTDLSVERKKLLLKNMQENQKAIDKEIDSYIQEDASISKNYELLTSIPGIGRIIALETIVLTENFTAISNPRKYACYIGIAPFKKESGTSVRKKTGISKKGFSEAKADLSIAVLSAITYNPAIRGYWIRKKKEKCGGIVLNAIKFKLVLRMFAVIKRGTPYVETDAYKN

SEQ ID NO: 83013 - protein, 370 aa, unidentified
MSQSRTLFIGMDVHKDSIAVAYVAQDHGAEVTYLGARGTRQCDIDQLVRKMQSKAKHLLFVYEAGPCGYWLYRYLPRKGSDCWVVAPSLIPHKPGDRVNTDRRDARQLARLARSGDLTVVYVPKVEEEAIRDLSRAREDAISDLKDAKFRLKAFLLRQDIRYVGRAHWGPAHLRWLSEVVCPTPAQQIVFQEYVRAVQEHTERLQRLAQELQEQVNAWRLHPVGEALQALRGVQCTVAVTMVAEIGDLTRFDTPRELMQFLGLIPSAYSSGEQRRQGSITKAGNTHARKAVVEGAWAYRYPAKVSRHLQLRLEKPPKMIQDLSWKAQVRLCTRYRRLVSRGKHATVVTVAMARELVGFMGAIATQVPLTA

SEQ ID NO: 83014 - protein, 386 aa, unidentified
MWPVGVTLFRLSAIEHVGQIGAPARFILLVRTVSWAIAVLCVSPHTREVKMEAMREVLGIDVSKSKLDIELLINGKVKTKVLQNTPAGHKSLLEWIDKSKASRSSLHVCMEATGVYHEALALTLYEAGIKVSIVNPACIKGFGHGENIRNKNDEIDAGLIARYCLAMNPELWTPPPLEQRQLRGWTLRVQALKDIRQQEENRLEAHTIGGMEDVATHVKTHIIWLDVEIKKLEKEIDDHIDRHPNLKNDAQLIASIPGLGMTTIARVLGHIGDIRRFKNAKAFAAFLGVTPKQRTSGSSVRGRTVMSKTGSSSLRAALFMPSMVARRHNPILRQFADRLLATGMAKKAVIGAVTHKLAHLIYGVIRTGKPFDANFLSNRLAIQDGI

SEQ ID NO: 83015 - protein, 313 aa, unidentified
MMTDATIGIDVSKDRLDVHRLPGGEERSFANDRSGLRALIVWLGGFDIARVVFEPTGRFHRCLEQALAKAGFPACKVNPRQARRFAEATGKLAKTDRADALVLARLGVALEPAPVSAASENLLQLSELVLARRALIRDRTAIKNRGKGLTLGLLKRQNAQRLRQIEAQLTAIDAAVTTLIHEDEALSRRHQILLSIPGISSVTAAILVVEMPELGSLDARQAASLAGLAPITRQSGTWQGRAFIRGGRAQIRRALYMPALVAARFNPDLKATFDRLTLEGKPPKVAITAVMRKLLILANALLRDEREWRPVSH

SEQ ID NO: 83016 - protein, 416 aa, unidentified
MSGKREIACGVDVHNKFIMATILSSDGLKLQNRFETSLDNLLKFKSWLKENGCHKVALESTGNYWLPIYHILEGSVNFILANAYQIKHIPGRKTDTLDSEWIAELCLKNLISPSRIFTRDHRELRSLTRARESLIKVRTKIKNRVTHELEGACIKLSSVIADVFGKSGRHIVDGLLDGMDLEKILESIPSGRVRKNKEEIRGIIQANLSPSQIFLLRSHLNTIDAVTKQIQEIDARISDQISLRNEDMRIALSMPGMGFISASTILAEIGDFRDFSSANKLAAYCGLVPSVYQSAGKLINGHITKHGSPHARRILIEVAHAIILTKKLSKLKKFFLRIKARRGAKIGIVALARKVLCILYHLLVSRELYQDDLLSKPRRIKSPCLHPIAAMDLEEMIRTIVRAGYEVRKNECLEGG

SEQ ID NO: 83017 - protein, 356 aa, unidentified
MQLQDTLSIPKIFIGLDIHKKSWTVSIQTDLFFHKTYSMPSNAEDLYQYVERTFPNYAVDLVYEAGCCGFSAARYFLNLGWNVLVVNPADVKTGDKERYQKTDALDSKNLSNQLKSGVLKGIYIPTEEHEQFMTLARHRTQITKKLRQTKSHIKSMLLFHGIKVPEEFDNPNWSKAFIDWLEQLKFSTSCGDLALQGKIRMFKFIKSEYLEIANQMRAYCRKTNKKDYNLLRSIPGIGGYLASVILAECGDLRRFNNEGQFSSYIGLVPGIYNSGDSEKCLGITPRSRSQLRSYLVEASWIAIRKDVEMQNYYRKHQGRNVKSVIIKVAHKMSRRILSVIKTETPYQINHNLEVEQ

SEQ ID NO: 83018 - protein, 338 aa, unidentified
MAIVSVGIDLAKNVFAVHGVDEAGKPALVRPSVPRARLLELIASLPPCLIGMEACSGAHHWAREFAKFGHTVRLMAPKFVIPYRLSGKRGKNDAADAAAICEAVTRPNMRFVPVKSLEQQGQLLVHRARQGFVEQRTATLNRIRGLLSELGIVLPLKAAVVRREALTRLEDLPGWANTVIGDLLGEVSRLDERIAQYDQHIKAMAGQSTEAQRLMQLPGIGETTATALLSTIGNGRDFRCGRQLCAWLGLVPGQYSSGGKQRLGRITKAGDPYLRSLLVLGARAVLAAAKNKSDPISLWATALAQRRGYWKAVVAIAAKNARLCWAVLSRGEDFRLPA

SEQ ID NO: 83019 - protein, 456 aa, unidentified
MGDRKREKDVPNQFQQLNPHAAGIDVGSQSHFVAIPEGADEKPVREFSCFTGDLHRLADWLEACGVKTVAMESTGIYWIPVFEILERRGFEVKLVNAHHVKNVPGRKTDVSDCQWLQRLHSYGLLEGAFRPPDQVCVLRSYIRQRMNLVRYAASHIQHMQKALSQMNLLLHNVVSDITGVTGMRIIKAILAGERDSLVLAGYRDPRCKNSKETIARSLEGHYKPEHLFSLKQAVELYEFYQAKITDCDHQIEEQLGIFDDRSDGAKTTPPAKGKVAGNGLGFDVRGDLYRMTGVDLTRIEGIDAYTALKVVSEVGIDMSRWKSSKQFASWMGLCPGNKVSGGKKLSGKTKSVANRAAIALRIAANSLYRSKSALGAYLRRQKARLGAPKAITATAHKLARLIYSMLKHGTQYVDAGQDYYEQRYRTRVVENLKKRATELGFTLVKNTLPCPIICTE

SEQ ID NO: 83020 - protein, 355 aa, unidentified
MSNDTTIGVDLAKSVFEVAVSQEVGRVSSRRRLSRSKFLPYFQQQAPATVVMEACGSAHHWARTLEKMAHTVVLLPPSQVRPYVVRNKTDQCDARALLEAYRNESIMPVPVKSIDTQVLASLHRFREGWMHRRTALLNSIRGSLRELGVFIPEGARLVLPKLAELLEEPSSPLPVILRPALRRAIEEVKALEGSVRELEAQLEAVSAQNPQVQRLRTVPGIGLLTATALVAFVGDLGRFPSGRRLAAYLGLTPREHSSGNRRRLGGISKRGNTYVRTFLIHGARSSLRYAREKKGPQGRLQVWARSVADRRGYNIAAVALANKMARLAWAVCREEKTFSELNCAVETTEATETTA

SEQ ID NO: 83021 - protein, 344 aa, unidentified
MQIRSVGIDLGKTTFHLVALGASGKVLVKKKFTQKHLLAFTANMQTSLIGLEACSGAHFLGRALRQQGHDVRLIAAQFVKPFVKSNKNDFVDAEAIAEAVERKNMRFVPIKTDDQLDLQAMHRIRDRLVARRTAVINQIRAFLLERGMVFAQKPAKLKAAMADVLENADNVLTPMMRNLIGLLWDEWKTVEQQIDELTDRLEQIASTDAGCCRIRQIPGIGPIVATAIVAAIGNGAAFRKGRDFAAWLGLVPRQYSTGGKTKLLGISKRGNIYLRKILIHGARAAAMRIKRDRFAIGGWMNALEARAPRNVLVVAMANKLARIAWAVLSTGEDYRPGGTASVVA

SEQ ID NO: 83022 - protein, 411 aa, unidentified
MRGRKEMPMIFVGIDWAEAHHDVCLVDESGQVLAKRRVDEGLEGVGKLHALVAEYAQEPASVVIGIETDRGLLVGSLLAAGYQVFAINPLAASRYRDRHATSGAKSDPGDARVLADLVRTDRHQHRAVAGDSELAEAVKVLARAHQSLIWSRQRQVNQLRNTLREFYPGALAAFEDLDSPDAIAILELAPTPNRGRALSQAKIASALRRGGRARNLETKVTSIQSHLRQPQLEAPALVAQAYGHSVAANVAVIKQLNQQIAALEQELAASFETHPDAEIYLSLPGLGRVLGARALAEFGDDRTRFAHPKARKNYAGTAPITRASGTRKVVLARVARNRRLADACYRWAFSAITTSEGARRRYDLLRARGQTHHQALRALGNRLVGILHGCLANRDIYREDVAWHSALEVAA

SEQ ID NO: 83023 - protein, 413 aa, unidentified
MDRIIERCAGLDVHKDSITACVRVPGEQGEREQHTRSFGTTTRALLELHDWLAGFGVTRVGMESSGVYWKGVYSLLEGDCECWLLNAQHLKIVPGRKTDLKDAEWICQLMEHGLVRPSFVPPPPIRELRDLTRYRKAQINERTREAQRLHKVLEDTGIKLGSVATDILGVSGRAMLAALVAGNHDPAVLADLAKGRLRRKLPQLREALEGHFRPHHALLVGQILAHIDYLDEAIDALSAEVERKMVPFAEAVALLDTIPGVDRRGAEVLVAETGAEMSRFPSAGHLASWAGRCPGNNESAGKHYSGRMRKGSKWLAATLVECASAASRSKGTYLSSQYARLKGRRGHTKAIAAVAHSILVIAYHVLDRRLPYHELGPDYLLLRDRSEAYKARLVRQLERLGHKVTLEPLARTA

SEQ ID NO: 83024 - protein, 339 aa, unidentified
MSKPIDSLQTAVFCGIDVSAATLAVAVIEQDQPLQQREFANRASGHKALIGWLHKRKAQVRVSLEATGIYSLDLALALNEAPGIEVAVLNPKMANRFAQTLRRSKTDAADALVLAEYSCRMPFTAWRPPSLSALRLRAVGRHIVALVVQHTREQNRLHAAEGSQVAPRCVVQDLKRSLISLERRIVKMRREALALVRSDAELEQRFRLLTGIPGIAATSAVQILGELALLAPQMNVRQWVAHSGLDPVHQHSGTSVHKLSRISRAGNRYLRRALYMPALSAVRWDPHMKAFYELLQTRHKTKLQAVIAVARKLLHAIYGVLRSRAPYDGSKLFPQLRTA

SEQ ID NO: 83025 - protein, 467 aa, unidentified
MEQQAYLGIDVSKGYADFILMDHNKTILEESFQLQDNAEGRGQLRQLIDSWFSKGLKTLCCGVESTGGYENNWFNFLRGLSMDVEVKVARLNARGVKALSDAALKRTITDAVSAENIAVYLIGFADKVLYSHADFAMETSFKEGRQHFCFIRMLLKQKVQLSNQLEKLLYQYFPEITVYCRHGMPSWLLRMLSRYSCAAEVARAKEKKLMAINGITAEKARALIAKTTKAQGGVSKHIQHVISSTCKQLLHKEEMISEEKQYLLDTYKDYELVKLLTTIPGVGVETAVLLLLEIEDPHRFESAKKMAAYFGVHPTYKQSGDGIWSVGMSKKGRGQLRAALYMAGLAAVRYNPIIKATYARFRAQGMKHYQAMGVVMHKLLRIVFGILKTKTGFSVQVDKKNIERSAEKQRDTISKENENKNQKEQKKHRFQQRTTAAPISRIAAKKIKQLASQSSVKEENTGLLSAL

SEQ ID NO: 83026 - protein, 362 aa, unidentified
MQIIGCDLHARQQTLAMLDTATGEFVNKTLTHEGNNVWEFYSTLPGPVRVGIEATGSMKWFLHLMEELGIDCQVGHPATIRAAEPRRQKHDQRDAELLLKLLVENRFPSIWQPSQELLDLRGLLLHRHQWVRLRTRIQNALQAIALANGLRRGSSLWSESGQRAIASLPLATHTAQRRSELQAMYVRFEAEIEQLNQRVLEQAGRRPTAGLLMTHPGVGPITALATDVFLGDAKRFRDGKALASYIGIIPREHSSGGRQRLGGLSKQGNPLLRFLWCEAAVHAVRRDPELRRFYRRKLVQKGVGKARVAAARKLGIRLWIMLRDQIDYQEFCRRGQMQQKSGDACAGMPGERYGAKSHRLID

SEQ ID NO: 83027 - protein, 344 aa, unidentified
MEITAVGFDIAKSVFQVHGADAHGKVVTRKKLKRAQVLAYFATLPPCLVGMEACGGAHYWARKLQQLGHSVRLIAPQYVKAYVKTNKNDAIDAEAIWEALTRPNMRFAAIKSVEQQSVLSLHRARSALMKSRVAQANQIRGLLAEFGIVVPQGICKVFSEVPRLIDEAVDGDLPQPMRALMQRLMDHLRHLERQVGELETQIQLWHRQNAASKKIEAIPGVGVLSASAFVATVGDPKNFHDARQVSAWMGLVPRQRSSGGKQQLLGISKHGEVYLRTLFIHGARSVVKAAQRKTQPDERWRWLLELVKRRGVNIAAVALANKNARIAWALLAHEMEFRADYATA

SEQ ID NO: 83028 - protein, 310 aa, unidentified
MLPSIVYLGVDVSKDSLDVHFLGQSHHLPNSSSGIAKLRKLIGKHSGTVHVICEATGGYERALCSALHAKKIRLSVVNPRLPRDFARSQNRLAKTDRLDAEAIARFAAAIRPQPRPLPDAQRQALIDLITRRRQLVDMRTAEKLRLGSVHKALRPSVLAHIDWLTKAIDTLDTDIDGAVRHSPLWRDDLRLLTSVPGVGPGTANTLIALLPELGAIPISKLTALVGLAPMNHDSGTLRGQRHIRGGRSTVRSALYMATISAIRCNGAIRDFNLRLRAAGKPAKVAITACMRKLLRILNAIAHTKTPWRVA

SEQ ID NO: 83029 - protein, 365 aa, unidentified
MMAAPVGGIDPHQSSFTVAVVDINGVELAHASYANSGAGYIAAIELLSAHGVERVGVEGSASWGSHVAIAVVAAGFDAREVPPVRAAQQRRSRRLAKTDNVDAVSTARALLAEPSLGPVQALEAYDPLVAKLEAVLEHRRMLVQLRTLSLHHIADQLAKLPTEIRDQLSAQGKIEARLVRLGQLESQASTVTTPAGLYRLSWLQAAVDDDRQALAEIRRLERELGRLLDEHGTSLRDEPGIGTIAAATLVVEVGDPFRFASESKFARWCGTGAVALSSGEGSAAPVRHRLDYGGNRRINSVLYIASVTQQRLNSDARTYLDRKLSEGKTRRAARRAHKRHLANRVIRRMWNDESRRHQQQSTSAA

SEQ ID NO: 83030 - protein, 313 aa, unidentified
MLPSLVYVGMDVAKATLDLHASSLSCPQSRQFANSPTGHRALVRWLHGLGSVHVVCEASGGYERTVVQALQQVTLAVSVINPRQVRDFARAQGRLAKTDRLDARVLAEFGQRLQPAATPAPSATQRQLAELVARRQQVQQLRSAEHNRLEHTTHPAVRRQLQRHLVGLDRQLEQLDAWLTELMQAEPSLAHKVARLCAVVGVGRITAVVVLATMPELGTLNRRQAAALAGVAPFNRDSGPHRGHRLIGGGRAVARRALYMAALVAAFTNPRFQPFYQRLIAVGKAPKVALVAVMRKLIILLNQLLKNPQFQPV

SEQ ID NO: 83031 - protein, 343 aa, unidentified
MIKISTIGLDLAKNVFQLHGIDASGAVMLRRQLRRAAVEKFFAQLPPCLVGMEACGSAHHWARVIGRYGHEVRLMPPAYVKPYVKRNKNDGRDAEAICEAVSRPSMRFVPVKSVGQQAALAVHGTRGLLVRQRTMAANALRAALTELGIVAAKGLEGLRELMAVLEKPSAEIPEIMRSALLMLAKHWQALDAAERVLEQQIAKAARCDREARQLMAVPGVGPIIASTILAKVPDAKVFRSGRDFAAWIGLTGRDRSTGGKHRPGHISKQGDRTLRVLLISGASAHLRQQKRRGVSDPWLRELLGRRPYKVATVAFAAKTARIIWAMLVKGEPYRNRASAPAAA

SEQ ID NO: 83032 - protein, 420 aa, unidentified
MAPLSNQQFKAFVGLDWADTKHDICLQQAGDDRREFDCIPHQVTRIDEWAKALHQRFGGPIAVALELATGPIVSVLQKHAFVTLFPINPAMLAKYREAFKPSRAKDDPTDAELALDLLRRHPERFSPLRPQSAGMRSLLSLIEQRRELVGDKTRFTNRLTNALKQYYPQTLEWFEDIDTVLFCDFLTRWPTLPAVRRASRKTLETFFHVHNCRRAKLVEGRLESIRRAVPLTDDPGIVAPHRLLALMLVAQLRTALAAIDVFDREIAAVARTLPDFDLFDSLPGAGPHLTPRLLAAFGEQRDRFKGAEELQKYSGIAPVTERSGKKCWVHWRWQCPTFLRQTFVEWAGQTINKSFWAGAYYRQQRAKGSSYQAAVRALAFKWIRIIYRCWQTGTRYNESIYLNALRKRGSPLLGNLGLPG

SEQ ID NO: 83033 - protein, 336 aa, unidentified
MQIYGIDLSMEKFDVSYIDQEGNEKKRQVKNKLNDIAKFLITVSDGAVLCAENTGVYGDLLVFLCNQMNVNIAMIPGYTIKHSLGLVKGKSDPIDAGRIREYGERFYDKLTFKEYHSEVIIELKALHTLRQQLVKARKLLRTGEHSRNKLPIQSISVNYHINQTLNHLDREIESIEKEMLTIILSNEDLYESFELATSVKGVGPVITIELIIKTGNFMDIDTARKAASYAGVCPFPNESGKMVKKGKTSPFADKHLKSLLHMGAKSAVKHNKEYRLYYQKKQLEGKEHYLIMNNISNKMLRTIYSVIKNKAPYSQDYICLDPRELKNNNSSAKKVA

SEQ ID NO: 83034 - protein, 375 aa, unidentified
MKDVTVLSELSVGIDLHKTQFTVCAISSDGELLLEKQYETNNDGYLAFIEAMHTFEEEKGCTIALAIEATCNARFSRNKMVREFFRVVVVNTSRFELISKSTKKTDKHDAAELAYYLSKDMLPESHLCEEHEEEIRRLLKTRSILVSTEVKIKNQVHGMLLGHGEVTKSAQFQSKKKRQVLIDSLGQDPYTKTVVASLKEMFTILDGLIASVNELERYIKELVADDEDYNLLITIPGVGFVTAATISCYTKNLDRFDGNYKRFCSYVGLTPYIHSSNKTEHIGHITKHGPTELRTAFVQMCMGFLRLTKVTGEWRLLVNYKKMKEAKGSGKSIVATSRKLARIVFVMLSKREEFNPSLMVNAVGHSLTADEVIGA

SEQ ID NO: 83035 - protein, 366 aa, unidentified
MKKISTVAIEGIQVFKENQLTIGLDLGDRTSHYCILNEAGEVILESKLPTTPKGIEEVFSRIPRSRVALETGTHSPWVSRQLTQLGHEGIVAHARNVRLIGESSRKDDQLDARTLARLARIDPGLLGPVRHRSAKAQIHLTVIRARAALVSSRTALVNAARGLTKSYGQRLRKCGTEQMNRESAKGLSQELQDVLDPLLREIESLNERIAEYNRRIEKIAKEAYPQVAVLKQVKGVGPLIALTFVLTLDDPNRFRHSRDVGCFLGLRPGRRNSGMSEPQLHISKEGDRYLRTLLMQGAHYILGPFGQDSDLRRWGLKLAERGGKNAKKRAVVAVARKLAVLLHKLWVSGEVYEPLRNNRKGMAAVA

SEQ ID NO: 83036 - protein, 421 aa, unidentified
MTSILSNTQPTAWVGIDIAKRQNDVLIDRPGHRRRRFRVANRLDDYQSFAKFLSDLPERPVIGFEATGNYHRTLAFFLAEKGFSLRLVSSVAAARTREALYNSWDKNDPKDAQVIIHMLKTGVTQHYHDPLVHEINELQELSKTHFQISLHKVRIQHSILTHYLPLYFPEAEKYMTNTRAQWFTHLIERYPCRAAVTKFSQEEFIEDARSFVGRKVNKTAFLEDFYRTAKNTIGLPVSEDSEAIRMFRIVLREHQRLCGVRADIEKEAESFLGENVDYIRLKTVPGIGPILSLTILAEGGDLRRFAHHRQFLKYCGFDLASQQSGQFRGRSKLSKRGNRRLRYAFWMAATIAIRMRENSFRDKYTRYVESDPTNADLKRKALTAVAAKMARVAHGMIKSETNYRPFHERAVPGGAIPSKGR

SEQ ID NO: 83037 - protein, 366 aa, unidentified
MKQVSRVAAKPSRNNSQPKLTIGLDLGDRNSWYCVVDEAGQIRLEQRVRTNAKALQEVFGALPRSRIALEIGTHSPWISRLLSELGHEVIVANARKVRLIGESRQKDDRLDAQTLARLARIDPELLYAVKHRSAQAQADLMMIRARAGLVRARTGLVNTARGLAKSYGERLRGCNVRNMNPEKAESLSPELQRALEPLLSAIAELSERICEYNERIDELAQTSYSQVALLKQIKGVGTLIALTFLLTLEDPHRFRKSRDVGCYLGLQPGRRNSGQSEPQMHIRKEGDPYLRTLLVQGAQHILGPFGVDCDLRRWGLKLAERGGRNGKKRAIVATARKLAVLLHHLWVSGEVYEPLHNRRAIVAAAA

SEQ ID NO: 83038 - protein, 352 aa, unidentified
MKKTLFIGIDFAKANFVASALLDEDPDPVCLPKSFSNDDKGAKALVSWIVKLLPETCSLSDVLVCGEHTGSYSLLLPRRLFDAGIDCWLENAVCIKNGSGRIVREKSDSADATMIAEYARTFYQKRVRLFVPESPILSELRECNDIRRRLVKEQAGLMCKRHDAEVRLKAKPGSKAIMMNIKILERQLAYIKEQIAKVDRQMYSLIRSEKKLSGIYDIIVSINGVGPVTAIALIVLTSGFTTFGSKRSLACFLGIAPFRSESGTSIQHGSHRSRQADSYYSGLLYMVAVSAMNWNPEIALYRERLLKKGKPRLVVINNIKNKLITIIWAMVKSDTLYDPDHHLKVAQQYQTA

SEQ ID NO: 83039 - protein, 328 aa, unidentified
MKYIGIDISKATFVAAFPVERGYRTETFQNDIKGIRRFISKLSNDTHHCVMEATGKYCFLLLYLLYLLDKVGIRASLVNPKKIKNYARVMLSVTKTDAKDACLIADFGERFKPEPYKFPSEQIMLLKQKKTVIRQLQKQLTATKNLYTSLEPLPVKDKKCIQSLKQTMAFLEKQIKYMQQEMEEVVSEVFAGQLKALTSIKGIGVTLASALIIATGGFTYFDNAKQLSRFAGICPTIERSGTSINIRGHINRNGDEKLRSMLYVAAWSASRHNKACRECYQRLRSNGKSGKLAMIAVANKLIRQAFAVVTSNSSYIDGYISTKPNADI

SEQ ID NO: 83040 - protein, 342 aa, unidentified
MQPTTIAVDVAKSVFEVAVSDQPGQVRERYRFARDRFHRFLSEQAPATVLMEAGSSAHHWARHAQRHGHQVVLVPPHVVRPYVLRNKTDRADTKGLLEVFRNEEVHAVPVKSETQQALAALHRLRSTWLATRTARINTIRGLLREFGVVVPSGAHHLVPHLTAILEDADCGIPGLLRFALAEAAREIREIEQRLRAIERQLETVAAEMLPVRQLQSIPGIGLLTATALIASVGDVRRFPSARHFASYLGLTPRERSSGLRRRLGAISKRGDAYLRMLLIHGARAVLWRARKSATPDRLRAWALQLERHRGHNKAAVALANKLARIAWAVWRTGREFVEAPAV

SEQ ID NO: 83041 - protein, 379 aa, unidentified
MEAQVKKIDFTGQNIYVGFDTHLKSWKVTVMAEGSIYKTFTQPPQPEVLNNYLKNNFPGGIYHTAYEAGFCGYWIHDKLLSFGIKSIVVNPADIPTTDKERVQKEDKRDSRKIARSLSSGTLMPIYVPSIHAQRDRSLLRTRIMLVRDLARYKNRIKSFLYFYGISIAPSFSNPQSHWSNRFMLWLESLEIDNGSGKEALRVLINECKNLRTSILSINRQIRQLSNTERYKDNVKLLKSVPGIGLLTAMIILTELEAIERFSNIDKLCGYIGLVPSTKSSGEKDKTGDITPRGHNVLRTAIIESSWTAIRNDPSLMHSYLTFIKRMESNKAIIKIAKKLLSRIRYVLMNKKPYVCLIEKETYKNKNMSETVTNPLQSLN

SEQ ID NO: 83042 - protein, 350 aa, unidentified
MELHTIGIDLGKTVFHLVGLNRRGEVVVRKKLSRPQLLRFTANLHVQLIGMEACGGAHFLGRALREQEHEVRLIPAQYVKPYVKTNKSDYIDAEAIAEAVGRPTMRFVPIKTDQQLDLQSLHRVRERWVMRRTAVINQTRSLLLERGITLRKGRCHLEAALPGIIEDATARLSSALRILLTQMKLELDQLVMRIEEADAGIKQVAQENEACRRLVTIPGVGPVTATALIAAIGNGAAFRKGREFAAWIGVVPREYSTGGKQKLLGISKRGNPYLRRLFVQGARSVMMHRTKQSSGLSQWLEKLSAHKHHNVALVALANKLARMAWAVLATGQIYRPPVLADLGSAELACR

SEQ ID NO: 83043 - protein, 347 aa, unidentified
MKKLMAGIDLHSNNLVIGIVDETGQRLQHRKLDCNLHQVIGFLQPLKPRLASIAVESTYNWYWLVDGLRARSYPVVLANPAQIDQYSGLKHAEDTNDAFFLAELQRLGILPTGYIYDPELRPVRDLLRRRMSLVQQRTALMLSFKSLYTRTTGQTMSLSELKALDLAKTQTLYEHPANELIACEQKKLMEGLTASIERIEQVVLKCAKALPCYERLLTLPGVGRILGLTITMEVGAIGRFKTPGDFASYCRTVDAQRLSNGKKKGDNNQKCGNKYLAWAFVEAANFAKRSDPRCRRWFDRKVAKTGTVVATKALACKLAKAAWYLMAHEVAYDEARMLPELAIQRAS

SEQ ID NO: 83044 - protein, 412 aa, unidentified
MQVVYARCAGLDVHQKTVSACALVCEPDGKKRRQVHVFSSFTGDLLELADWLREQGVTHVAMEATGVYWRPVWAVLEGQFEQLLVNPQHIKAVPGRKTDAKDCEWIADLLQHGLLKGSFVPPTPIQDLRDLTRYRVELRQSQSRVANRIQKLLEQANLKLGSVASNALGVSGRHMLNAIIAGEDKPEQLAQLARGKLKNKIPQLVQALDGLVRDHHRFLLAEFLEEWDWFEQRIVRLEEKIEKQIRPFEQAMALWQTMPGIDHVTACSLVAEVGVNMNQFPTAQHLASWAALCPGNHESAGKRKSGKTRDGNKWLRRTLCQAAWAVSRKKNCYLSSQFKRIAVRRGLKWALMAVAHTMLVIGYHMLKTGQGYRELGGNYLEQINKNQLQRYFTKRLQKLGFKVSVEPALEAA

SEQ ID NO: 83045 - protein, 410 aa, unidentified
MVVQVAPVTSSTVVVAVDVGKTEFAFSVTDSGRRLLLTPRTGCSMTGPSLSRVVADIGQVLPVDAVVKVGIEAAGHYHRPLLMAGSWPIGWEILELNPGHVTEQRRVLGKRTVKTDAIDLQAMTELLLAGRGHPVRDRGLVFGELTAWSAQRTSRVAMRTATKNQLLGHLDRTFPGLTLALPDVLGTKVGRLVAAEFADPARLAALGSNRFIRFGATRGVRIRRPVADRLVQAARDALPTADAPVARAVLATDLVLLADLDAQVDQAAEQLARLLPLSPFAPLLSVPGWGVVRAGNYGGALGEPGRFTTPRQVYRAAGLNPIQYESAGKRRDGVISREGSVELRRALIDLGIGLWLSDPAAKVYGTQLRDRGKKGLVIGCAMANRANRIAFALVRDQTSYDPSRWTPQED

SEQ ID NO: 83046 - protein, 346 aa, unidentified
MKKVIGLDLGDKENVAVVFEADGTEHKAVKINNTKAAMSKFFGGHPDAVVVMEAGTHSGWVSRLLEGLGLEAWVGNPRRLRVIWDATDKSDERDARVLGLMYRLEPRLLHRIFHRGEETQYELARIKSRQILVATRTKLMNHVRCVVKGVGERMGSCSADSFHKRADNEVPTCLWEALGPVVAQIEQLTGTIREIDKQVEQTASERYPETERLSQVGGVGTLTALAFILTLEEAGRFQKSRDVGAYLGLTPRRDQSGQSDKQLPITKQGNTYLRSLLVGCAHYILGPFGKDCDLRRYGMRIAAAGGKNAKRRAVVAVARKLAVLLHRLWADGSEYQPIREQQRKAA

SEQ ID NO: 83047 - protein, 355 aa, unidentified
MTSTKYIGMDVHKESISIAVRNSVGKVVMECVIETKASMILQFIEGLRGDLHVTFEEGTAAAWLYDLLKPHVARLVVCNPRRNALLKVGNKSDRIDARKLSELLRGNQLHPVYHGEHGLRALKELVRSYLTISKDLARVMTRVKALYRSWGIPCSGTQIYSRLHRVTWLSKISEPGVRLRAAFYFQQLDALRTLRQEVRQELLAESHKHSAWKRLCGIPSIGPIRAAVALGVLQTPHRFRTKRQLWSISGFAIETRSSADHRHVNGQLQKVKKRVSIRGLNQNHNHDLKNLFKGAAVIASTKPGPFQEFYTALLAKGMRPEMARLTLARKIATIVWIVWKRGVSFDAQYLKPQTV

SEQ ID NO: 83048 - protein, 418 aa, unidentified
MNAVGIDVSSRKSTVAVLRPLGEVVCLPFDVTHDIAGLASLAEKLKAIDGETRVVMEHTGRYYEAVAKALHEAGFFVCAVNPLLIKEYGANSLRRVKTDKADAIKIARYVLDNWADLRDFTPMDAIRYDLKTLNRQFQLASKQRTASANNLIALLEQSFPGIRKCFDSPVRSDGTQKWVDFAHSFWHVDCVRKQPFAAFCERYRKWCKLHAYFFKLRNAEKVYALAKSAVVLTPKAKVVKVLVQEAANQLISISRSVEVYRAEMDRLAAMLPEYPVVMAMYGVGKSYGPQLMAEIGDVRRFERKQALVAFAGIDPMPNQSGDKNVRSNKSSKRGSPYLRKTLFNVIRTYLQCAPQDEPVFQFLNRKRAEGKPFYVYMLAAANKFLRRYYAKLRDYFASLDTLQPVSYTHLTLPTIYSV

SEQ ID NO: 83049 - protein, 370 aa, unidentified
MEKSVLHVSLDVHKMSMEVAIAEAGAHGEVRHYGRIGGDLEALDKVTRKLKAKGAELRFAYEAGPCGYQIYRHLTAQGYYCLVAAPALIPRRPGDRLKNDRRDALTLARLFRAGELTPVQVPDADDEAMRDLTRGREDAKSVERRAKQRTAALLLRHGRRYPGKTTWGRGYWRWLLQQAMEHPAQQIVLQEYLDAVRESTSRVQRLTGQIRELVPQWRRAPFVQAYQALRGVSLLVAVTVVAEVGDLSRFNNPTELMAYLGLVPSEHSSGAAVRRGPITKTGNGHARRVLVEAAWAYRLRARITRPLLQRQEGLSETIRQIAWKAQVRLCARYRRLLARGKAKQTIVTAIARELAAFIWAIGQAVEPVTT

SEQ ID NO: 83050 - protein, 344 aa, unidentified
MNKYAGLDVSLEETAIAVVDESGRVVREGKVASEIEAIDGWLRASGAVIVRLGLEAGPLSSWLYAGLRACGWPVVCIETRRLRAVTQAMPVKSDRKDAEAIAQVMRTSWYRPVHVKSDDSQRLRVLLRHRQILQAKRQDIDNELRGTLKAFGLKLGKVGQAGFAARVMKLVAGEPWLERLTQPMLAARAALRQSFAELHKLLLTIVREDTVCRRLMTAPGIGAVNALAYKTAIDDPTRFRHSADVGPHFGLTPRLYQSGETEYSGRISKCGDAMVRSLLFEAATALLHRVKAASPLKLWARRLAKKIGVRKATVALARRLAVIMHRMWVDGTDFNPELGRAAAH

SEQ ID NO: 83051 - protein, 342 aa, unidentified
MENITTIGLDIAKSVFQVHGVNCSGEAVLRRRLKRARMLPFFAKLPPCLIGIEACNNSHYWARELTALGHDVKLMPAQYVKPYVKRGKNDAADAEAICEAVTRPTMRFVAVKSPEQQSLMMLHRVRLMLNRQRTQLSNAIRAHISEFGVVAPVGRLGVDRLLKIVEDESDDRIPDDARLCLQMLAAQLAVVKQQVLENDRRVLASARRTELGCRLMEIPGVGPLLASAFVASVADPKVFKTGRDLAAWIGFVPKQNSSGGKERLGGISRAGNRYLRQMLVVGAMAVIRYAQRHGTTRPWLVKLLERRPAKVAAVALANKNARMVWALMTSGERYREPLPLAA

SEQ ID NO: 83052 - protein, 383 aa, unidentified
MQPTRKEYFTPTEDVLAVALELASGAWKMAFQDGKHEKPAISSVSNEIAGKRLAEAVQEIDKVKRKWKLQAKVRTVRLYEAGQDGFWIQRALEKLGYETMICDPGSIPVERHARRAKTDRLDAIKLVLCLRGWLRGEYDRMHIIRVPNIEDEAQRHLSRDRGELVKERGQHHDRMRKLLRTVGCWEPLNGDIGMQLKQGRYRCQDGSKLPAEMYARLERECERLALVEQQLAYLEDELAHQLPEGTQERIDHLQKLKAVGAVGATRLVLELFWRRFDNRRQVGACVGLVPQPYDSGESRVDQGISKQGNRRVRSLLIEMAWFWLRYQPTSAIAKWYLQRTSGKGQNKRGKRSAIVAVARRLVIALWRYLEQGVIPEGAELKTH

SEQ ID NO: 83053 - protein, 353 aa, unidentified
MNRTQSSVARVYCVDLAKNTFQVNTWSTDGVRLKVATLSRSKFDAFFSPQRSGGARVVMEACASAHHWARTLQARGYQVKLVPPQFVAKQRIGNKTDGNDADAIYAVDRDARVRAVPVKTLEQQDLSAEHCLRDLLVGQRTACINQLRGLLAERGWVAARGAGGMEALLTTLEAPPGGEVTPALIQILVQVKQQIAFIDEQLVQVNRRLAQVAKHHPVARRLDSIHGVGAIIATAVLAQFGNDVRRFADARQFAASMGVTPSEHSSGQTRQLGAITKRGDPYLRRLLIQGSQSVVNVSARRDDPISQLAQRLLPRKPRNAVVVAVANRLARIIYAVIKHGEPYRYGKPAAATV

SEQ ID NO: 83054 - protein, 384 aa, unidentified
MNPDHTDTPAATEYATVFVAFELSKAKWKLRVIVPGSAKMSRHTIDGGDLVALSKLLGVARTKAGRSGRPVRVLSCYEAGLDGHWLHRWLTDQGVINHVIDASSIEVNRRARRAKTDQIDLDLLMRAFLAHLRGEPRACSVVRVPSVEDEDRKRRTREREHLVKERTRHINRIKGLLHGQGIRDAMPLMPGFLSTLDQVRTGDGRPLSPRLKEEIRREHERLVLLCKQIKTIEAEQLAAHRAPAPRSVEAKVVQLAELKSIGPVIAQVLVGEVFYRRFDNRRQVGSYLGLTGTPYDSGNSRREQGISKAGNSRARTVSIELAWLWLRHQPDSELSRWFRERVGNIKGRIRRIAIVALARKLIVALWRYLETGLVPTGAVMRQSF

SEQ ID NO: 83055 - protein, 344 aa, unidentified
MKTISTIGLDLAKNIFRVYGVNANGRCVVSKNIHRDSLAEFFAKLPACVVAMEACGTSHYWGRCIASYGHTVKIIHPRYVAPFRIGGKNDANDAAAICEAAQRPHMRFVALKSQREADIQSIHRVRQGLVKERTATANRIRALLLDNGIAVKQGIRNICSALPAVLGDEENALSGLMRNLLGMQYEHFIHLEKQIKQSEDSLKKLAADNNLCQRLRAVPGIGLLTATSLLALEGVARDFKKSRSFAAFLGLTPRQHSSGGKSRLLGIHKRGDCYLRTLLIHCSRSVLRSFLAGNPIVRQGKLAAWLADIVSRRGVHKATVALANKLARIAWCMLTRNSRFEFSQ

SEQ ID NO: 83056 - protein, 357 aa, unidentified
MQVTTIGLDIAKNVFQVHGIDAAEKVAVRKQLRRGQMLAFFKALPPCLIGMEACATSHYWARELTKLGHQVRLMPAKDVKAYVKRNKNDAADAEAICEAVRRPTMRFVQIKSIEQQGRLMLHRARDLLMRQRTQLINALRAHMAELGIVAAQGREGVKELLKIIAGEQDARLPLDAHASLVVLAAGLQAMQTMIGSIERRIIAQHRSDEASKRLRSIPGIGIVGATAIAATVPDPKVFRSGRDFAAWIGIVPRQDSTGGKQKLGPISKQGDQYLRRILVVGAHAVLKRARHQPEKYPWVHTTSRTQAVQGRGCGSCQQDGARRLGVIGKGRQLSGACTCGGGVRVWREQSEFASVRI

SEQ ID NO: 83057 - protein, 334 aa, unidentified
MTSMIPATGPVTGGVDTHGHTHHAAVLDHVGRQLSDREFPTTPAGYRALGVWLSRHGQLERVGVEGTGTYGAGLARYLRGTGVSVVEVDRPDRKARRAKGKSDPLDAYAAARAALSGAASGCPKTRDGRVEAIRALRVARSGAVKARSQATNQLKALLVTAPAELREQLRQLSTTALIATCARLRPTGDIGDPEQATKTALRRLARRHQHLSEEVAEADTELKALVSATAPGLLALPGVGTEVAGQLLTTVGDNPDRLRSEAAFAHLCGVAPIPASSGRTHRHRLNRGGDRAANNALYIVVLGRLRYDARTRAYADRRTKQGLSKPEIIRCLIG

SEQ ID NO: 83058 - protein, 410 aa, unidentified
MEVLYQRCCGLDVHKETVVACLRIVSGGEIVREVRTFETTTASLMALSEWLAENSCTHVAMEATGVYWKPVWHILDDGDFKLILANASHVKNVPGRKTDVNDATWLADLLAHGLIRASFVPDTQTQELRTLLRTRKQLVREKSSHILRVQKTLEDANIKLDSVITDVMGMSGRAMIEALIAGESNPTKLAGLANYRLKASQEKLREALRGRVTKHHRFLLRLHLNQIDALGAATATIDQQVQAGIAPFRSAVELVTSIPGVSDIGAQVIVSEIGTDMSQFPSESHLISWAGMCPRNDESANKRRSNRVRKGAPWLKTTLVQCAWATVRKKDSYLKAQFLRIKARRGPKKAIMAVGASILTAIYHMLKHGTLYQDLGSDHFQTRSKGQQTKRLVKRLADLGYDVALTPLAS

SEQ ID NO: 83059 - protein, 404 aa, unidentified
MDSYQHVVGIDWGSQTHQVCLISPRRAPEQRQFAHRAEGLAALVAWLTEACGDVGTVAIGIEVPHGAVVETLLEHGFAVYAVNPKQLDRFRDRHSVAGAKDDRLDAFVLADALRSDLHKFKRLSIPDATTLALREVSRCYDTLKVDLNRLANRLREQLQRYFPQLLELCPAANEPWLWELLEVAADPARAATLRKRRVAALLARHRKRAVSADDVIDVLRSEPLTLAPGSLEAVLFHVSVLLPQLQATHAEQRRCRHRLAELCGEAGRLAEIVDSHRGADVIVTAKLLAEAPQALAEHDLQMLRILAGTAPVTRQSGKSHRVVMRRACNTRLRDAVRHWARSNMASDPYGRSLYLSMRARGHRHERALRGLADRLLACLVATLRNDELYDPQRRARRVPEALAA

SEQ ID NO: 83060 - protein, 415 aa, unidentified
MLRIVYPICCGIDVHKTFVVACIASTNEKGVTIYKSHRFSTFSKGLRELSQWLSEGCCRDVCMESTGKYWIPVYNILEPACKIVLAHPKYVKAIRGKKTDKKDAKWIADIFKHDLVCGSFIPPYDIRQLRDLCRYLVKLTSFMTGEKNRAQNCLTVSNIQLASVFSDVFGKSATAIIDHLLDYPDDTDFDFMSLVDGRCKASAEDIAAAVDGKLMLEQAEKLTVIRSHMHGLETCMANLQSQILTLSKGYSHQIELVCTVPGILTLSAIRIIAEIGADMSVFPTSKHLCSWAGLTPQNNESAGKKKTTRIGRAGAYIKPLLVQCALAVVKSEKHPELRSRYLTLKKRRGHKKAVIAIARIMLSAIYNILKKNQPYNPELCKKADVPPQHREVSVDQAIFILQRQGFQILSPDIKI

SEQ ID NO: 83061 - protein, 416 aa, unidentified
MKAWNEISHYAGLDWARDHHDIIIIDRNGQIVADWRIAHSLEGWQDFGAKIKNYAAVAVALETSQGAAVDQLLQLGCTVYPVHPHSAKSYRERKAPSGHKTDRLDAWALADALRLEGQHWRVLQPLDPLTQQIQLLCRDEISLIEQRTALVNQLQQALCEYFPAALEAFDDWTKPFAWDFIIQFPTPAQLVQAGPRRWEKFLHTQKLWRSQTAPQRLEIFQRAEQFCGTPAVTAAKSRLAVSLAKLLHALQEQLDDYRQQIQALFEKHPDRDLFGSLPGAAQTLAPRLLGEIGGDPKRFEDTAHLQCVAGTAPVSFQSGQIHRVRVRYQCNKVLRHTIHLWSQCVLRRCTWAEVYYQQKRAQGKSHACALRCLGQRLLKILWRMVQTRRPYDADLHAKNQQAHGSWVLKLMPKTST

SEQ ID NO: 83062 - protein, 408 aa, unidentified
MTVVGIDVSKGKSMVAAMKPGGELVAAPYEVRHSDIELSRLALDVLCMEPDTRVVMEATGRYHEPVAALLHSEGIFVSILNPLLIKQSGAGSLRKVKSDPKDALKIAKYGLDNWSTLREYTPTEAIRQQLKLCERQCDLYSKNIVMLTNNLISLSDKTFPGVNELFSSPEKADGHLKWVDFYRTFWHCDCINRMSPDAFGERYKKWCKRKGYHFSADATDALYAASCGLYTTLPRDNNAKLLVTVAADQLIALRENQSKLEAEMLNLCKQLPEYETVMAMYGVGKSTGPHLMAELGDVRRFPHRSSIVAFAGVDPGVVGSGKMQLSSVATSKRGSPQLRKALFQVVSTYVKCKPENEAVYQFYVKKRNEGKPFYVCTTAAANKFLRIYYARVKECLNAADSAVQTEEG

SEQ ID NO: 83063 - protein, 376 aa, unidentified
MKRIVYIGMDVHSTNFTFCSLEPKLGGENKFFGCMQSEADVKNVLKYIEGLKKELGDDVEFLCGYEAGCLGFSLYHQLKKQGVECVILAPSTMMASKGKRIKTDARDAKRIAQCLAYGTYHSVPIPSSDDDAVKEYIRMRDDHKIALKKLKQQINALCLRNGRQYTGTKWTLTHLRWLRDMDWQEAVLKETLQEYLMTFEQMTNKLEALDRRIEELAQGAKYKERVKKLVCLLGVKTRTALASIVEVGDFCRFEKGSTYAAYLGLTPGESSSGDTVRRGGLSKAGNAHLRTLYIEAAQGICKGRIGHKSKELQARQAGNSQEVIAYADRANERLRRKYYRLIQREKRRNVAVTAIARELACFIWGLMTNHTERRIA

SEQ ID NO: 83064 - protein, 370 aa, unidentified
MKFVGIDLHTNRFTCCYLFDNSKEKQTETFELDSEGLIRFYSTINKETYILIEATINTFSFVTLFKDLVKEVIIANTYQLKAVGIPGKKTDKLDASKLAEKLKTQVVSDVQQIVPVTIPPKEIRDLRALFTTYRTLRKEIGRTKNRIHSLLKENLYPFTKEYIFGKKTRIKIREISKDNILSFQINLLMDNLDHLEETFEKLTIEIKKAGASFLPLIELLTSMTGISVITALAVIADVINVSRFKNSKHFASYLRSAPRVESSNDKTIIKSTTKAGRKLSITLISQSLNHFRENNKTITRFYERASLYKKKGVVRMAMCRRVITQIYQMLKKEEFHYFRNPVLHEKKMSEYKKFLNKENIIISQKTQFAA

SEQ ID NO: 83065 - protein, 344 aa, unidentified
MQITTIGLDLAKSVFQVHGIDAAGQVVVRKSVRRAQMLAFFSKLPPCLVGIEACGTSHYWARELIRLGHEVRLMPPAYVKPYVKRGKTDAADAEAVCEAVTRPTMRFVPVKSPEQQAALSMHRARDLLVKQRTQLINMLRGLLAEFGVDIPKGLERALLMARQVIEGNAPEVPIEAARIATTLSQQALDIHVRLRQIDRDLAIWLRGNDVARRLMTIPGIGTVGATALVASVTDPHQFRSGRQFAAWLGLTPLQKSSGGKERLGRISKMGDKYLRKLLIVGMTSLVRRAKYAPDKIDPRLADLLARKPTRVATVAMANKTARVIWAIMARGETYRTGHQPALAA

SEQ ID NO: 83066 - protein, 367 aa, unidentified
MTSTKYIGLDVHKESISIAVMNSIGKFVMESVIETKASTILQFIDGLRGDVRVTFEEGTWAAWLYDLLKPHVTEVVVCNPRKAALLKDGSKGDRIDARKLAELLYMNKLATVYHGEHGLRTMKELARSYLTITKDLTRVMNRLKALYRSWGIPCAGNEVYDPRHRAEWLGKISEAGVRRRAEHYYQQLDVLRLLRQEVRRDLLVEAKKHKPWKLLRQIPGIGPIRAALLIALLQTPHRFRTKRQLWNYSGLGLETHDSAQYRVREGQLQRSKKPVTLRGLNKNHNHDLKAIFKGAALRASSAAGPLRDFYEALLAKGRKPTMAHLTLARKIAAITLIVWKSMPTPLLCRLLSANSGWEGLGLRPDSA

SEQ ID NO: 83067 - protein, 338 aa, unidentified
MKLYAGIDLHSSNCYLGIIDEQLEKVLGKRLRNSLPLIIDCLAPYKKDLQGVVVESTYNWYWLVDGLQEHGYTVHLANPSAIKQYEGVKYSDDKWDSLWLASLLKLGILPQGYIYPKETRPLRDLLRRRMLFVRQRTADILSFQSMITRNTGTRVSANNIRKLTEASLGQLFSDPDLFFMAQRYLSIIDLLSQQIKLIEKQAMGKIGLTEPFKWLSTINGVGNILAMVIMMEVGDINRFEKVGNYCSYCRCVKSERISNGKKKDVGNKKNGNKYLSGAYVEAANFCIRYNPQAEKFYQRKKAKSNGIVAIKALSNKLARASYYMMRDQVPFDSQMLFA

SEQ ID NO: 83068 - protein, 329 aa, unidentified
MTTNPPQIVFNHIVAFEVSKEKLVVHTLPDDEQWTIDNKPQAVRRLIKAEIKRNRKKQLGQMLVICEATGGYERHVLDGALEMGLSVHRAHGTRVRHFGHYRGLLAKTDPIDAHLIAQYGLKTENIRLYSPPPPDTAALRALHARRTEIQQMLIAETSRLDHAQHKSVLKSLKAHIASLKAALVAIEADIAQLVEGSEMLRKKVALMQTVIGIGPISAMVVLAYLPDIGQLTKGQAARLAGLAPINNDSGKKRGTRHVEAGRTAIRRALYMAASVAMRANPILKAFSDRLRSKGYPFKYVVTAVMRKLIVILNAVLRDGQSWKGAQMAA

SEQ ID NO: 83069 - protein, 389 aa, unidentified
MVSRKGHDSRILGFQFMHACPSFGGPLLANRKYMTTQQKQSCLFIGIDVHKDTHTAVGISPYGEKMFEITVGNYKEDFEKLEEKVKEHSSVLSPFFGLEDVRGYGERLAVYLYEKYPVYHVPSILVDRLRQNATHPEKSDSLDALGVAKVMIQSIDTLLPYTISEDGEKAKQLKEISIDREDLVLEQTRLKNQVHTLLYRIYNTEYIKVFKYPFSLKALKHWRGAKPKCDLFLLKTMKRKVRRLLDIHTEVFELEKDMKTLLNNNYTIQTASGCGVVLASTIVGEIGDIQRFKSPATLAKYAGCSPRERSSGKKIRHVKTRSGNRRLNCAFHRMALSQISRMGNDKARAYFKRKISEGKSKSQALVCLRRQMVNIVWNMLKYKTVYRTA

SEQ ID NO: 83070 - protein, 376 aa, unidentified
MERGSLMLNTTTFVGLDVHARSIKAVALDAMTGEVRSATFAYDAAAVAEWVRSLDPAAKCVYESGVTGFDLQKRLAALGVDCVVGAVSKMIKPSADRKRKNDRNDAEFLARMLSVGNVVEVWVPDDECEAARDLVRALDDAREDLKRRKQRLSKFLLRHGYAFSETTPTGRRKGNWTAAHWAWIKSISFPEKADNDVLAYYVDAVRQAMEDKARLERLVEAEASKPRWKKRVDSVRCLKGIDVTSAADLVFEAGEFSRFKNARSFAAWLGLTPSEHSSGESVRQGGITKAGNKHLRRVLVESAWHYLGCSPHSKDLAKGQVPDPAARRHAAKGVRRLVERRRAMLERGVHKNKANVATARELACWCWAVGCMVEGA

SEQ ID NO: 83071 - protein, 344 aa, unidentified
MQIARIGLDLAKYVFEIHGVDAHGKTVLRKTLRRHAVSTFFANLPPCLVGLEASNGAHFWAQALSDLGHDVRLISPQFVTPYVKSNKNDRNDAEAICEAVGRPNMRFVPVKSPEQLAVQAVHRIRSRLVADRVRLVNQVRGLLGEHGIVVAKDIGNLRRALARIVGDNEDHALHDLVRSLMGELREELIELDARIGGYDRKIRELYRNSEICQRLGKVEGIGPVTATALVAAVGDRSSFKNGRQFAAWLGLVPKQRSSGGRARLFGISKRGDRYLRTLLIHGARSALGRVRDKQDPRSLWLGRMRQRRHPNIVAVALANKNARIAWSLLTSDNVYDVSLSVRPT

SEQ ID NO: 83072 - protein, 406 aa, unidentified
MLFVGDDWAEDHHDVEVMDAAGRTLAKARLPEGVAGIARLHAMIGAQLGEDAEQAQVMVGIETDRGPWVAALVAAGYTVFAINPLQAARYRERLSVSGAKSDPADAHTLANAVRTDSHQLRPVAGDSAEAEAVKVVTRAHKTLIWERTRHTQRLRHALREYFPAALEAFTDLDATDTLELLGKAPDPASAARLSLNQIRAALKRAHRRDVDTKAARIQALLRAEHLGRPDVITVAYAATTRSAVAVLTSLVEQVKALEKQVDAHFGRHPAAKIILSQPGLGSILGARVLAEFGDDPHRYLTAKCRKNYAGTSPITRASGRKKVIAARYVHNDRLIDALLAQAYSALTASPGARAYYDKQRARGVEHNPALRQLANRLVGILHGCLKTGTLYDETTAWADQADQAAA

SEQ ID NO: 83073 - protein, 401 aa, unidentified
MRAFAGIDWAKDDHAVCIVDEHGRALVRRTVRHDERGLRALIALLGEHAVERIALERPDGLLVDRLLEAGLVVVAIHPNQVKAARPRYTNAGGKSDRFDAFVLAELARTDSHRFRALEPHSDATRALRALTRSHQDLVHTRVALANQLRAELDRVWPAATQLFAALDSPIALAFLKHHPGPTAAARLTHPRLSRFLKRQRYSGRRGPDELLQRLRTAPTGTAGQHELAARQQIVLGLVAALEPIIAQIKTLEREIADTIRAHPDGPIFLSFFHGATLTAARLLAEIGDDRGRYPTNDALAAHAGTSPVARESGRHKSASFRWGCNHRLRNALCVLADASRHRHPWAQHTYASARARGHDHPRALRTLARNWTRVLWRCWQDHTTYDPTRHGNLNRLLATTT

SEQ ID NO: 83074 - protein, 371 aa, unidentified
MQFDDVDAPATNRPAPGMMGPMIRRKEGSVAMKITVIGLDLAKSVFQAHGVDEGGRTALVKKLHRKQMLPFFSNLPPCLIGVEACATAHHWARTLSAMGHEVKLMPPSYVKGYVKRGKSDALDAEAICEAVQRRSMRFVPTKTVEQQAILMAHRTRSLLVRQRTMAANALRAHLAEFGLVANPGIANLAKLSEKALAEPDGLPAYARRALAILVRRLVELTEEIGALDRELGAWHAQNEASQRLAAIPGIGVITATAIAATVTDPKQFRSGRQFAAWLGLTPQQQSTGGKTRLGGISKQGDRYLRRLLVVGATAVMRHAKDKATRLADWVRELLAKKPFRLVSVALANKLARIAWAVLTSGDTYRPQAPAA

SEQ ID NO: 83075 - protein, 372 aa, unidentified
MFNSIVYVGMDVHKKSYTLCCYTFSDDEVRYKQKVQADYKMILKYIESVRKNYPEDTTFLCGYEAGCLGYSLYRELTEHGVDCKILAPSTMAITNNRRVKTDKRDAANIARCLALKTYSEVYVPTEEDNAIKDFIRMRDDQLKMLKMTKQQILAFTLRNGCKFEGGSTHWTNKHLTWLRTLKLDGVYQETLDEYLITYEWLTDKIARLDARIEELALGEEYEEKVKKLSCFIGIKTHTALSLIVEVGDFNRFAKANNFSSFLGLTPGEDTSDERRNGLGITKAGNGHLRRLLTESAQGYGKGKIGFKSKNLKARQKGNSSEVIAYADKANERLRRKFYRLTLQKNVNKNKAKAAVARELACFIWGMMTDNIA

SEQ ID NO: 83076 - protein, 438 aa, unidentified
MTSNIVFNSDDLFISVGIDIGADFSWMSIALPNQQFVGKPYKIIHNCMESLETAVFKIKEAEKLYSLEIRIFLESTGIYHYPFFCYLRDKGFNCSVINPIITKNSTNINIRKVHNDRFDSKKAALVGLKPDLKVSIMPSELALNCRNLCREYYSLMDCRSAYANKLQGELRMAFPQYIGIFSKVTTNTSLTLLETYASPKALIDADEQEVIIIIKSTARFGLKYAENKYNAIIKATNDTNEFGCISYSNIIRIRLYISFIRKYDEEISRLLETMKQLVKANEDTEFVRQLKLIETFKGAGFLSAISLMAEIGDFSAFKKPKQLFAYFGLDPAVKQSGKFEGTKVKMSKRGSAIARRVIHILTLQSISPARNGNAKNPVLREFYLKKCESKPKLVAMGAVSHKVCNMIFAILRDGKPFEIITPRKHIRQYNSSKSNTAA

SEQ ID NO: 83077 - protein, 381 aa, unidentified
MRQVCGLDVHKDSVFVCILNENGVVFQEKFGVLTPELEQMASKLQEFDVSEVCMESTSVYWMPVWRVLEPYVASLKLVNPYFIKQLPGKKSDVKDAEWIANCLLKDLIRGSYVPGDIIQQLRQYDRRISDLNIECIRKLGKLDAAIQRCNIRISNYLSTTDSKSYKEVVRLIAEGTTAAEELVKVIYSRIVKKAGRDVILAALSGVFSNTDIDIIRQLREEIELAQRHKDECQSKMDAICQQYFPKQLKNLQTIPGVKGRSATAIIAEVGSDVSSFQDAAHLVSWCGLKPRNEESAGKIKARSITHGNRYLRKTLIECSWAASRTQGTFLNRFSYYQTVVRRKNKMKVQVAIARKILVAVWHVLHDNVAYRDYTPDIAPAA

SEQ ID NO: 83078 - protein, 338 aa, unidentified
MLYTGIDLHKRTVVIATIDETGKVHSETSLPTSRSAVARYFHWLPEPTIATVEATSSWYWLRDLLEQQEVPLTLAHAKFVKAIAYAKVKTDAVDALTLAQLLRADLIPRAHMVSPELRPLRALLRTRLHLVEKRTSAKNSVQRLLEQYNVPEPLRLPAEATLQASLYAEQIELLSDQIHRIEQQLQPELIPNPDIQRLLWIPGVGKIVAFTLYLEIDGIERFPTVRQFFSYCRVVPGADNSAGKRRHGRRKDGNRYLKLALSHASVRAVQYFPEIKRFYQRKARQKNPAIARTLVQKEIARSAYIVLKEQVDFNHTFKGQPLSKRKASQWPRRANPDV

SEQ ID NO: 83079 - protein, 391 aa, unidentified
MEARVANNLAPAAAHDGAVRCLLAIELSKKSWVAAVNTPLSDKISLHKLKPCDWKELLQLIERIRKRIAQELKKPVEVISCYEAGYDGFWLHRLLEAQGVRNHVIDPASLQVDRRARRAKTDGIDVGKLLRSLMAYLRGEPRVWSVVRVPTIIEEDDRRLHRERSRLINERIQHVNRIKGLLAIHGIYDYEPMHPERIQRLERLRTADRHSLPLRLKAEILRELQRLELVLGMIQTIETERDAIVSVKSKSQQTTSTKKIKHLVKLKSIGPEFATVLVGEVFYRTFNNRKQIGSYVGLTPSPFQSGSTSRDQGISKAGNTKARTTMIELAWLWLRNQPDSLLSVSFRERVGSRKGRIKRIAIVAMARQLLIALWRYLETGVVPEGAVLKCK

SEQ ID NO: 83080 - protein, 409 aa, unidentified
MKLFAGIDVSSKDLKVCIMNHEGSTLKSLTVENNLHGSDFLRTQIIDLADQYSCQDIQIGMESTSVYSWHPAMFLNEDEALRKRQTKVYTINAKLIRKFKEAYTDLDKTDDIDAWIIADRLRFGRLPLTMIMQEQYTALQRLTRMRYHLTHNLVREKQYFLNNLFFKCSAFTSEVDSSVFGKAMMELFLEQLSIEEISSMEVSSLAEFLQEKGKNRFPDPEQVAKSIQKAARSSYRLSKCVEDSIDILLAASIETIRSLKAQIKQLDKAIEKLLDGIPNTLKTIPGIGPVYSAGIIAEIGDINRFKDQASLAKYAGLTWRRHQSGGFEAEETKRIRSGNQYLRYYLVEAANSVKNYEPEFKSYYQKKYREVPKHQHKRALVLTARKLVRLIDVLLRNDQVYTPQRKVNR

SEQ ID NO: 83081 - protein, 414 aa, unidentified
MNSCLFVGVDTHKDSHTAAVLDGYFDVVSTVTFTNNKAGFARLEAVLKKLSRGRDIIFGLEDSQGLGSFLAAYLAGKGYTALEINPVTTDRGRRHTVSRDKSDEADAVVIAKTLIREKNNLFPVRINRNGVALMEMVGYRQLLVGEATRIKNRLHIALFNQYKGVLDCFRSPFGKCALAFFLKYPDPKSLEDIDPDSLSDFLKTHSKGRFSDKKAKAILKSIDTSIADSLTDTRARIISSHIKRLMIIQEELSEIKEALSSLVRASSYYCLVSIPGIDIVTAAKIISSVGDISRFSSASKLARFAGIAPTEKSTGRKKRYKKSKYGNKYLHSAIYYAALAHVSRTRSGADKNPLSRAYFLKKISEGKTKKEAITCLARRLVDIIFAVMRDRSIYSFSKSGSTKKLKSELDPVAA

SEQ ID NO: 83082 - protein, 428 aa, unidentified
MAYAIAGIDVHKRMLAVVVADLAADGEDAFERRQFGSTPAQLRLLADWLSEHPVNEVVMESTAQYWKPVWAALERHWTPRARARAGAGPMAGTLHLAHARSNRARRGRKRDFTDAERLVKRLVAQELTLSFVPAPEQRLWRTVTRTKVQLTRNRVQLQNRLEALLEQAHLKLSSLVSDLLGVSARRMLQALADGATDPGALAALADHRLRATPEQLRDALEACQELSPVYRRLLKMVLEELQLLDSQISRLDQEMAELLCPYQDQVQRLAEVPGLGVDSAQQILAEVGPTAATFPSAGQLASWVGACPGEHESAEVNYSHRSPKGNRQMRRLLNQAANAAVKSKGTIFEILYRHYVPRLGHPQTIGVIAHRLCRLIWKILHQGVRYEERGPALSQKSKRHRTARMIRALRSFGYRVELASAQSTVVPA

SEQ ID NO: 83083 - protein, 458 aa, unidentified
MAKRRKKKTKNVKLLNVIKLNAAGIDIGATEIYIAVPGDRDNKPVRHFDTFTADLHAAAKWLKSCDIDSIAMESTGVYWIPVFQILESYGFDVVLVNARHVKNVPGRKTDVQDCQWLQYLHSVGLLRGSYRPPQEVCAVRSLLRHRDGLIKTASSHILHMQKALTQMNLQIHNVISDITGVTGLAIIDAVLSGERNPQKLAALKHGRIKATKDTIAKSLNGDYLPEHVFTLKQSLQVYRHYQKMITECDQEIENHLNNFDSRIDVAKKPPPPATSTSRRGKGNEPNFDLRTHMYRIIGTDLTQIEGISAVTAHVFFSEVGCEVSKFPKAGNFVSWLNLCPNNKITGGKVLSSRTLPGKNRLAKALQMSAMSLWRSQSYLGNYYRRKRAKNGAPSAITDTAHKLARIIYHLVKTGKQFDESVFYVQEEAHQKRTLKNLTKRAKRMGFQLIECETGNLVT

SEQ ID NO: 83084 - protein, 431 aa, unidentified
MINREATRYAEFCQFRDSIRGNDSYLIIGIDVAKERHHAFFGTATGKTLLRRLIFDNNRTGFESLTQRAKQLMVAHGHRQVVFGLEPTGNYHKPLASWLLAQGHMLVLVTNKAIADNRESLDGRWDKNDTKDSANVADLVAQGKCQFYENASADLNALRSLLSFRKRLKKIEHRTRMQIRNGLLAKYFPEMDRYWGSCLQENLAIVRWCLDPRKIANMSFEVFLQRVTRRDRGLRQTKRLRAIHEAAKVSIGCPVDKAAEFEARLLVGQLTDLRARLEQTESRIATVCRRFRSYKRLLTLPGFGPYVASQVIARIGDPHRFAGRKQLIRLAGYDLNAKRSGKRSDTAVAVISKRGNGELRYALYQAALIATYHNDGFRALFTRYLKGRERERGIKTKMRVKLAVKMLLIAWRLMKTDTDYDPSLLQVSPMR

SEQ ID NO: 83085 - protein, 377 aa, unidentified
MSNVRFIGLDVHAETIAVAVAEPDGEVRSLGVIPNRPESIRKLVKKLGPPGQLRVCYEAGPTGYVVYWQLTALEVKCEVVAPTLVPVKPGDRVKTDRRDALKLARNYRAGDLTPVWIPDAAHEALRDLVRAREAAKKDQLRARHRLGKFLLRQGRRPPTAMKAWTRAHLTWVKSAVHFEQAAQEATLLDYIHEVDHVAGRLTRLESAIDAAVQTAPVRMRTVIEALQALRGVALVTAVTIAAEVGELSRFAKPRQLMGYSGAVASEDSSGQRTRRGGITKAGNAHLRRVVVEAAWAYRHRPAVGPALRKRQATVSPEVNEIAWKAQHRLHGRYRALLARGKCKQQVMTAIGRELLGFIWAIGVHVEARTGRVKPIAA

SEQ ID NO: 83086 - protein, 310 aa, unidentified
MDATVVGIDVSKDRLDVYVYPSAEDFSVARNAEGLDALIARIGPLQAQAIAVEATGGFETVVVASLGGAGLPVIVVNPAQVRAFAQALGKRAKTDPIDAAVIARFVAATKPEIRALPDSETRLLADLVTRRRQIIQMMVAERQRERHLPSRHLKKSVARLLKALEKELSALDQGIDETVRGSPAWREKEDLLKTVPGVGNIVARTLLAELPELGQLDRRQIASLAGLAPFTRQSGRWRGKSLIGGGRSSVRAVLFLSAMVAKKHNPPLKTFHQRLIASGKPKMVALVAVARKLLTILNAILRDQRPWQPA

SEQ ID NO: 83087 - protein, 407 aa, unidentified
MEGEQQMEGPIISVDVSNGCSHFKCFIDKNKAFGKVHKINHNMDGFHYLLDCIGRLKEKTKEDVCVVYEATGVYTKPLIRFLNQHKVKHYMVNPLQAAKMRKTDLHSKKTDKNDPNSIAAVYYDKQLHEYVEEETIHHNLRVMNRNYEDQLDHLRKYKVTFQNLLSIVFPGYNQLFKNPYCDIALAILKKYPHPDTIKNKKPETIAKYLEKHTNHHNKACLIWASKVIDYANKTYPGCDKEDIEVYELLRIIRELEACITSCDKQLEEMIQLAEQSPNYFLILSIDGIGPNLACRILAEIGDVNRFDRVKQLISYAGIDPHINQSGDMDGLHLSISKKGNKRLRCLLYLAVTCNLRLKKEKDPIQQFYQKKKQQSVPLKPKAARVACTQKLLRIIYGMCKSGCFYLN

SEQ ID NO: 83088 - protein, 387 aa, unidentified
MQPIVKNCAGIDVHKMMVMVAVRKEMPEGDIQVLTQKFGTFRKDRELMCQFLQQHQVDLVVMESAGVYWKSIYASIIGRDLKPWVVNARHVKNVPGRKTDTLDSQWLAHLAHCGLVRPSFVPHPDQEQVRLLTRRRDTIVKQIATEKNRLHKTLDDSGIRLGGLISDINGKSGQRMVNALIDGESLQDIIKKADGRLRGDRKQLMASMDEKLSSSHLIVLKSIRSHIAFLSEQQQAVETQILSSIKPWKEAWQLLQTLPGVSEMSAASLIAEIGNDMSQFGGMKEIASWAGLCPGNNESAGKRKSGRTRKGNKMIKTTLCEVANAAIKTKSQFKGKYQSLVIRKGHKQSLIAIAHKLIRVIYTLLKKRQPYIDPDTDYEGLMVRKNA

SEQ ID NO: 83089 - protein, 466 aa, unidentified
MDPFPRGILAKHSPAVGRHRERPCILSYRRRRRLTRYDLQPGPAKPKTTMKNDYAALVALDWGDKTHAFARQSTGADRIERGAIEATAEALHAWLEQLRETCGGRPVALAIEAGRNALLHALLEHPWLTVYPVHPATSARFRKAFTPSGAKDDGPDAVVILTLLRVHRDQLQPLTLDTPATRELAALVAARRSAVDQRTCLSNQLGSVLKRYYPQALTLAGDDLAKPLALAFLRRFPELTAVQKVRPATLSAFYREHNVRAAERIAARLELAARARPLIQDRAVIAPALLEVALLVDLLEVHARHIAGLEARIAEVFAAHPRAALFAALPGAGPALAPRLLVAFGDNLQRYPNAQSLQKYAGVAPVREKSGGTSWTHWRWAAPKFVRQSFVEWAGQTVVHCDWAHAYYRQQRRAGKAHHAILRALAFKWIRVLWRCWHDQTPYNEQHYLAALRHHGSSLPAALQNT

SEQ ID NO: 83090 - protein, 360 aa, unidentified
MNSTQNKKIEQVKETTMIVGIDVGSEKHYFRAFNWRGIELTRKPVAFSNSMEGFNSFYNTIVELMQKSELEEALVGIEPTGHYWFDLGQFMGEKDIKFVMVNPHHVHKTKELDDNSPSKNDRKDPRVIAGLVRDGRYFYSYMPTGAYAELRNASNRRFVLVEEQTRAKNRLQKWIAVYFPEYKGIYTHIDAKGGMLVLKKAPTPEEIVRLGVEGIIKIWKDAKLRGNGHKKAMLILAAAMRSIGLKAGLTEARMEIQDLIEDYELQTKRLERVNDLIKGLCQQVRYADKLLEIKGIGITTVAGFIAEVGDITRFDSTKELQKLAGLELVADSSSKHNGKTKISKRGASVFVIFFLKHRYR

SEQ ID NO: 83091 - protein, 346 aa, unidentified
MTIVDSSRPIVGGVDTHLDNHVAAALDANGGVLGVESFPTTVGGFAALHDWLCAFGPVARVGVEGTGAYGAGLSRYLQSCGLAVIEVDRTNRQVRRMRGKSDPVDAIEAARAALSGRASGIAKTADGNVEAIRALLIAQRSGRQARARCLNQIRHLGFTSPDALREQFRDVPKAHLARQAATLRPRADSDPVVHATKLAMRTLGRRALAISADMHDLDVVLAKLVTATAPELLACHGVGIDTAAILLVAAGDNPERIRNEAAWAHLCGVAPLDASSGKQRRHRLSRAGNRQANHALWRIVFTRMGNDPRTRVYVERRTEEGLTKREIMRVLKRYVARETYRLLPRT

SEQ ID NO: 83092 - protein, 359 aa, unidentified
MNKNSMFFVGLDLGDKHSYIAILDQDGELIEETRLPSTKASFHQRFSTLPPCRVAMEVGSHSRWASYLLKELDHDTLVANARKLRAIYDNPRKGDRVDAEILARLARLDPELLSPIHHRSPQAQADLAVLRSRDALIRSRTLLINHARGIVKSSGARLPSCSANCFASKAAPAIPETLRPALSPILETIASLTQQIHEYNRQIEQLCQDQYPETKLLRKISGVGPITALAYVLTLEDPKRFIKSRDVGPAIGLVPRRDQSGDHDPQLRITKTGNVFLRRLLVSSAQYILGPFGPDCDLRIWGLKLAERGGKNAKKRAVVAVARKLAVLLHHLWKTAEVYDPFYQSQKEETGSAALPAVA

SEQ ID NO: 83093 - protein, 361 aa, unidentified
MKKRTQHLIAEVPRKRGQVELTIGIDLGDVWSHYCTLNQQGEVIDRGRFRTTPKAIDRWFTDVPHARVAMEAGVHSIWISEQLEQLGHEVIVANVRELRAISHSDRKSDDVDAEKLARYARLDPEILRPISHRTVEQQEALTLIRARELLVRLRTAAINAVRGLTKACGHRMPASSTKCFAQRGQAALPPGLKLALGPVLAQIAEMTLKIKQYDREIQHLTQTEYAETQAMMTIHGVGHITALTFVLTLGDKARFRCSRDVGCYLGLRPKRSQSGERDPQLGITKAGNAYLRSLLIECANHILRPDGRDSALRQWGLHLAARGGKQAKNKSVVAVARKLAVLLHHLWTTQESYVPFYLQAA

SEQ ID NO: 83094 - protein, 411 aa, unidentified
METLIPRCAGLDVHKETVEADVRRIEAGGRLHHQTRQWGTMTRDLLAMSDWMAAQGVTHVAMESTGIFWKPIFNILENRFTVMLVNARHLKQVPGRKSDVRDCQWIGQLLQHGLLKGSFIPPRPQRELRDLTRYRTQLVEEKTRTANRIHKMLEDANIKLASVASDILGVSGRAMLEALIEGEKDPAKLAAFAQRKLRGKIPELEKALEGHLTEHHQFMLRLLWKQLAQEEELIAELDAKIEEETRPFTAEIERLDAVPGVDRRVAEVVLAEVGADMKAFPSHQHLASWAGMSPGNEESAGKRRRRRILPGNRWLKPTLVQAAWATSHAKNTYLASQYRRLAGRRGKKRALVAVGHSMLVIFYHMLKGGRTYADLGGDFFDRLEPVRLRRYYVKRLEALGHKVTLETLVAA

SEQ ID NO: 83095 - protein, 410 aa, unidentified
MEDWPGGIPAFQKCEGGMHMALFVGIDVSKEKFDACGIGEQGEKVFVVSLRMNKSGFEDLLRRLSYSDTRLLVGMESTACYHIPLFSYLTAKGYRVAIINPLLINHFAKRSLRKTKTDRKDAYTIAQFLMREEETLSVQAPTHRSSELKDISRRREKLVDQMTSVKNDMKRILSVTFPELETITGIFTKSTLRLLSQHPSAHAIRQAGHDVVADIFITQSRGARPRATIKTLMDAAASSVGVTSPAKDLIIRQEAASLLHLERQAQETTKLLINLCDENMKKDMNILTSIKGIGQKTALNFLIEMGGDAKLFKNDKKLIAAAGLDPSTYQSGKYEGKSRISKKGNRHLRRVIWLMTRRVITSNELFRVHYYKRRKDGLPYKMAVLATAHKLIRVMYAMLIHQTYFEQRRN

SEQ ID NO: 83096 - protein, 411 aa, unidentified
MRRVLFVGDDWATEHHDVELQDEAGRRLGKAKLADGIAGIARLHAMIGEHVDEDAGPVEVVVGIETDRGPWVQALVASGYTVYPINPLQVARFRETERSSGGKSDAADAHTLTDMVRTRRHTLRPMAGDSGRAETVKVLTRAHKTLIWERTRHTLRLRQMLREFFPAALLAFDDLAAPDALELLGRAPDPVLAARLSAAQITAALKRARRRQVSAKAATIQASLRSRQLAQPSAVAGAYAATVRAQVAILTTLGTEITTLEGQVEAHFGQHPDAEIYLSQPGLGVMLGARVLAEFGDDTTRYADARARKNYAGTSPITRQSGKKKTVLARYVHNDRLIDALNRQAFAALRASPGARAYYDQLRARGVGHHAALRQLGNRLVGLLHGCLKTGTTYDETTAWAHHQQDLHTAA

SEQ ID NO: 83097 - protein, 347 aa, unidentified
MDQQCHYVGLDVSLETTSICVIDDAGAIIWRGKCRSDPDTITAIMRQHAPGAVRVGLETGQLSNWLTLSLRRRGVPVVCMDARHAKAALSLQINKTDANDAFGLAQVVRTGWYREVAVKSMDAHTLRMLLVARSRLVSQRQATANTIRGLLKTFGLVVAKGSKGLFPVRVREQIAGNPALIAIIEPLLAVWYAIRDQVMMLDRQMLARARNDDVARRLMTIPGVGVVIALAYTAVIDDPARFRRSVSVGAYLGLTPRRYQSGEVDTNGHISKCGDSLLRGYLYEAAAVLLYRDGRASVLKSWGLGLAKRIGMRRAKVAVARKLAVIMHRIWSDQSEYRWTAIPSTTA

SEQ ID NO: 83098 - protein, 330 aa, unidentified
MKPAVASEQARAAIVGIDVAKAKLDVALKLPSNKWRTKVVANSAAGCQELRTWLAKQAVPCAHVCMEATGIYWERVAEDLADHGFAVSVINPAQIKAFAAAVGVRTKTDVVDAKVIADFCASQAPALWQPASKSVRRLRALVGRRESLVELRTQELNRLEVATTEAVRQSIEKVLAHLNEQIADIERQIARDVDDDPTLRAQRELLASIPGVGDKTIATFLSHYGGELRFEKTRQAVAFAGLDTQQHESGSSVRGKPRLSKKGHSSIRRALYMPAVVAMTRTAWGKAFSSRLLAAGKPKMLILGALMRKIVAIAYGVLKSGTPFNPALHA

SEQ ID NO: 83099 - protein, 452 aa, unidentified
MPAGKDITMHYQKVLKMPESIPYLSVGFDVGADFTWMSIMLPNGILIGKPFKIIHSDPQSRELAISKIKEAQEMYSLESRCFLESTGIYHIPLLCFLRDKGFDCAVINPIITKNSTNMNVRKLHNDKFDSKKAAKVGLDASLKASIVPDDAIIDLRNLVRDYYYFKDLQSAIVLKLHAELKVSFPAYLNVFSKVTTQTSLKLLEAYPLAADMLAAPKDELVEIIRSTARFGETYALARYDAICTAAKDAAVFGRALPSNALRIRLYIKMYREYQAHLDSILEELHQAVGKLEGTPDYDRISFIQTLHGVGFLSAVVLIAEMGAFDLFSSPKKLYAYFGLDPGVNDSGKFHGDRVHMSKRGSSLARRILHMVAINNLKVDKATKTPVNPVIYDYYTRKCASKKKSVAVGAVMHKICNIIFAMLRDNKPFELITPEEHRERYAAEHPESVNTAA

SEQ ID NO: 83100 - protein, 349 aa, unidentified
MALTIVEEARSVTGGVDTHAGAHVAAALDPVGGLLGVREFPATAAGYACLLGWLGGFGTVCLVGIEGTGSYGAGLARHITAAGIRVVEVDRADRQDRRRQGKSDPLDAVSAARAAQSGRARGAPKGRDGAVEAIRTLMVARRSAAGERTRTINQARALVLTGPDDLRARFAGHTPAALITGLASLRPRAGDIAGYATRIALRELGRRAQFLDGQLGRLDELIVPLVTARAPGLLALYGVGPHTAALLLIAAGDHPGRLRSEAAWAHLCAAAPIPASSGKVTRHRLNPGGDRQANHALWRIVFTRLGSDPATRAYAERRTAEGKSKAEIIRCLKRYVAREVYPHLRTAGG

SEQ ID NO: 83101 - protein, 325 aa, unidentified
MTASLSSDNSFIGIDVGSRSFEAAWHRGGCAQYANRPDAIAAFLARLRAEPPTQRIAIEPTGGYEKLLVIELRRAGLPVEIVHTSRFQAYRQLIGVRAKSDGSDARLLAAYAAAPDEIRRQSNRVVLPEDGDREELAALGVRRDQLNRMLHAESCRLANVRSTFVRHSISRHLEALRKEVREIGIAMKAIVRQRQDLSRQKRLLQTIVGIGEVTAVMCLARAPELGRISNKAAAALIGVAPFVHESGGLSAPARIFGGRADVRRVFYMAAVAASQHNPVLAAFYDQLIAAGKPAKVALIAVMRRLVVFANGVLRSDEPWKRGMAA

SEQ ID NO: 83102 - protein, 408 aa, unidentified
MERYYIGVDWGNDFHQAWVSDAQGHKALEKKVVENVEGLAEFGRWLDESRAKGVELWAAIEKPQGRIVDFLLDHGVVVYPVNPKALDRARDRFRMSQSKSDGFDAYVLAEFLRTDHGHLRALEPNSHQAQELKLLTRDQHRLEHQQTRLINQITVTLKEYYPRPLEVFPDLQSKIVLDFLKQYPTPRTLSDLTRRKWNRFAKREHRISEDRCKELWEKLSQPQLAVPEHVVRAKARLVSVLLVQLEALSGAVENYKEEIKRFFASMPAAKLVKTLPGAKTGTIVTKLWAELGDTKNRWQSFRHLQAEAGVVPVTKASGKSHVVQFRFACNKRMRHAAYWLAFVSLNQSEWANHYYRDQRAKGHSHPEALRALGAKWLKIIFVMWRDHKPYDENYHLANITRQKMRQAA

SEQ ID NO: 83103 - protein, 335 aa, unidentified
MYYLGIDLHKDESHVAVLDDDAEVVEEIRVTNANLDDVAEEYAGAKAALEATSNYYTVYDTLDEHLDVVVADPTQTKAIGYAEVKNDRLDAKLLAQLRRAGMIAESYVPSEELRERRALVRGRKRLVEKRTDFKNEVHALLDKHGITYDWDPFSVNGRDILASEDVSLGVVGDQLMESFLSIIDELTAQIEEIESLIEETAASLEETQLLMTIPGVSFYSSLLITSEIGEIDRFDEAKQVVSYAGLDPVVRESGDSRTEGSISKRGSGDLRWILVQCVQTAVHRCNDPYLGRFYARLKQRKNHQIAIVATARKLLVSIFHMLDRTEVYDPPEVSA

SEQ ID NO: 83104 - protein, 354 aa, unidentified
MSGDKYIALDVHQATTVTSVLNAAGRELDGSIIATKAQPIRSYLEGFSGPLHVTLEEGTYAAWLYDLLEGRVAELVVCDPRHNALLKEGSKTDRNDARKLADLLRTGMLRPVYHGSRSLRPLQELAHSYEALVEDTTRAMNRIKALYHSRGIDCAGRGAYTQKQRASWLEKLPAGATRLRGELLHEQLDHTRSLRRKARLALLKESRKHLISARLRQIPGLGPLRVALLIARMQTPHRFRTRRNFWSYVGLGLVTFDSGEYRLVKGRVVRRAQPTKIRGLNRNHSPQLKEIFKSAALTAIRRPGPFKDYYDPRLQQGRDPEMLRLNVARKLAALVLSLGKKGGHYRAEGLPSPA

SEQ ID NO: 83105 - protein, 379 aa, unidentified
MRPASRRNPIQSPTSTDPTDRADANKIQGCDLHARQQSIALLDTETGELIERSLEHGAEEPREFYSSLSGPVVVGIEASGAMQWFLQLMEELEIECRVGHPAKIRAAETRKQKHDRRDALLLLQLLLEKRFPGIWMPTTEQRDIRTLLRDRHQWVRMRTRVQSTLQAIAFNHGLRKGKGLWTHAGIAALQGLPLPRYTTQRRNELLWLYIQLRKRIEELNRQVDQVIERHPQAQRLLTHPGVGPVTALATDVCLGDPHRFADGKAVASYIGMIPSEYSSGTRQRFGQLSKQGNGLLRYLWCEAAMHAVNKDGELRRFYRRKLVQKGMGKARVAAARKLGIRLWIMLRDEIDYQEFCRRRRQEGEVLAGMPDRNNGPAVQ

SEQ ID NO: 83106 - protein, 361 aa, unidentified
MKSTTIIAFDQHAATTVAAVLLPAHRTPALHPLTSDTPTILRFVARLQRQGAVTCCYEAGPCGFELHRALTAKGIPCDVIAPALIPRRAGDRIKTDRRDASQLAVLYRAGALTAIHIPTEQEEAARDLLRCREDIRADLLRARHRLSKFLLRHGRRFTATKKAWSKRHDAWLRTQTWPLPALDQTHRAYVRAVDEVLARLRDVETELRALLDLEPLRARVQRLRCFRGIDDLTALTIAAELGDPRRFATAPRTMAFVGLVPSEHSSGTKRAQGGITKTGNGHLRRVLVESAWHYRHHPFVSATLRARQRGAPADVIARAWTAQQRLHRRYQRLAARGKPKQHVVTAVARELTGFVWAALTQ

SEQ ID NO: 83107 - protein, 316 aa, unidentified
MDQTKPRIVGVDVSKHHLDVAVHDACEVARYANTAEGVSLLLEALGDVAPGLVVAEATGGYEIGLVRACQAGLIPVAVVNPRQIRAFARAKGTLAKTDGIDARIIAEFGCVLRPRPLPQVATGRQAFGELVARRRQLVEMAIAEKNRLEHATSAVRLSIEEILCVFKSQLAGVDAAIALAIDADAELSHRRAILTSVPGVGELTAAVILAELPELGSIGSKQAAALTGVAPINHDSGTHRGQRHIGGGRPGVRCALYMATLSAIRCEPSLKAFYQRLRQAGKKPKVAIVAAMRKLVTLLNVLLQHNQLWRPQQHGC

SEQ ID NO: 83108 - protein, 317 aa, unidentified
MAEVVFEQVVQRGCGLDVHKQTVVGTIDGVGLKSETREFGTTTSSLKELKDWLERAEITHVVMESTGVYWKPVYNVLESSGITLWIVNARHVKYVPGYKTDKRDSKWLCKLLLAGLLKPSYIPPREQRELRDLTRYRRKLIEQISSEKNRVVRLLEDCNIKLSSVLSDTHGIIGTKLIDKLISSGKISMEFIEEIYHGKLKASKEEIYDACEGVVTDHHVFMLQTIKKDILSCEALIFEITSRIKSMLSPYENVIELLKEVPGLNRKSIEDLISEIGLDMSVFPTEKHFASWTGVSPGNNESGGKKKVDALHTATSK

SEQ ID NO: 83109 - protein, 334 aa, unidentified
MKRQETPVGIDVAYRTLCVHIDGESTVREFDNDDSGRRALVAELTRRGRHVRVVMEATGTYHVDAALALSAHDRCRVSVVNPRQTKHFHEAQNIRAKTDTVDAKSLCAYALRMDFVEWTRPTATALALRALVRHHAQLTKEQTRIKNRAHALEVSASTPAMLLEMLSQQREFIDQQRKAIELALEQFEREHPSVAPYVRRFMTIPGFGRTTALSLLSEYLVLDSAMTSKEITAWAGLDPRPHESGTSTRRRSISKRGSARTRAALYFPAVTAARLQGPLQDFYLRITERTGQKMVGITALMRKLLINSWAMHRSATDWDAEKAAPRTQQNQKAA

SEQ ID NO: 83110 - protein, 355 aa, unidentified
MNQEKYIGMDVHDATISAAVKNAQGKLLMECVLETKAATILEFIQGLRGTLALTFEEGTLAAWLHDLLKPHVSRLVVCDPRKNALLRDGNQNDRVDARNLAELLRTNQVKAVYHGKHEIRALRELGRSYLTLTQDSTRVMNRIKSVYRSWAIPCAGTSVYSRRHRAEWLAKLVEPGVRIRAQHLYQELDSLEPLRQAARRELLRESGKHAAVKLLRQIPAIGPIRSALLVALLQTPHRFRTKRQLWAYSGLAVQTYDSGEFRFVRGKLQRNRERITVRGLNHNHNHDLKNLLKGAAISAIQRPGPLQDFYAALVEKGMRPSMARLTLARKIAAITLTMWKKGVSFDPRPLPRQAA

SEQ ID NO: 83111 - protein, 413 aa, unidentified
MAIDTVVQRSAGLDIAKASLVACIRIPGPDGGWRVIKRKFTTMTAELLALQDWLAGHNIARVGMESTSDYWRPVFYLLEQRFDCWLLNARHMRAVPGRKTDMTDAEWICDLVALGLVRPSFVPPPPIRRLRDLTRRRAILLAERTREKQRMEKLLEDAGVKLSVVATDIFGKSGRAMLDALIAGERDPKVLAELALGRLRKKIPALAEALVGRFDDHHAFLARMICDHIDTISRMVAELNTRIDTEIEPYRTEVELLNSLPGVDTRTAEVILAEIGTDMSRFPTAAHLASWAGACPGNNKTGGKSKPSHTRPGDRWLKAALGTAAMGAIRTRQSYANALFRRVAARRGGKRAQTAVAHCLLVAAWHVLATRTPYHDLGGDYFLNRDNPDHRRRRAIAQLERLGYQVTLEPRAA

SEQ ID NO: 83112 - protein, 387 aa, unidentified
MLNYQELKDFKKLANIFNEDMKRPASLSIIRLIILTLMRKESLMATYYIGADVHSNNTELAIEQRGKIVARYSVPTTITAISTVLDSLQGRKILAIEEGPMAGWLYRNLNNKVEQFIVSEPRRNKLISSEGDRDDRIDSGKLAALLRGNFLKAVHHTDDGHRANLKHWINLYHDRVCDAVRHINKIRACCRMHGVRIPRKVVRNNVHRHEWLSGLNNRVLKAQLQMLWIGYDATKEQVEIAKRQFSSYARKYPVIKYWCKLPGVGLIRAATIFAYLDTPWRFKNRAKLYKYCGVGLVRITSGKDKNGRPKPVHLRLPWAVNGRLKNAVIGAATSAIGHGNNGFKNYYERMLSNGIIPTNAKHSVARKMVSTMSAMWKTDSKFDKKRL

SEQ ID NO: 83113 - protein, 400 aa, unidentified
MFCGWDWGSTRHGVCLIDDNGLVVKTWMIEHTERSLSALFAELARLGDPGSIPVAIERGEGLIVGLIAGAGHPVVMIEPAAFKAARPRWGSAGAKSDAADAFMLADFARTDAHRLRRVEPVAQATRELAALVRARSALVEARTAASNQLWAILAEHWPGAAMLFQKLTSQVALAFLTDYPTPQSAALLAEGRMRQFCHRHSYRGGKPPAELVSRLRAAPASVNPIAPQVLEAIVRGSVAHIGLLNTEITNLELHLEAALAAHPKTVLLKALPRVAIVSLAALIAEIGPLIERCENPEQVAALCGAAPVTKASGKSRTVAFRYTANKPARVAITSFADNSRHSSAWAQDCYQRARSRGARHPHAIRILARGWVRVIWACWTTDIAYDPTRHHAEQQLATRT

SEQ ID NO: 83114 - protein, 317 aa, unidentified
MAKAVSEITLGVDVSKETLVICDWESGELTELANEAEQIGRWLRCLGAGPVRLAVEPTSSYHLALVEAAQRRGCTVYLVNPRQLAHYRQAVNARNKTDPADAWLLARYLAHEGEQLRPFEPASGKARELWALLHRRAVVVQSRNQLTQSFREVRFSTRALMSEIHRLLRRLDERLLALVRSLGWEADYRCALSIPGIGPLNAVALVATFRRGAFASADAFVAYLGLDVRLRESGTYKGRRKLTKRGPSELRRLLYCAARPARSYAPFADYHQRQLDKGLPKIAANCILARKLARIAFALIARQQTFQKQEIAYSQGP

SEQ ID NO: 83115 - protein, 306 aa, unidentified
MSKKTAYVGIDVSKDWLDVFSSRNGAERLENKPSSAPLLFKKLPKNSLIALEASGGYEIDITQALREAGATVLVLNPKRVRDFARSKGLLAKTDQLDAQVIAQFAETIEMPQRTVKTQAQEELTQLTQRRNDLVSMRSGEKCRLKQSGQVKDSIKRHLSFLEGEIQLLEKEIHALIEKNVEFKHQSKFLKTVKGVGPVLISTLLGQMPELAELNEKQAASLAGLAPFNCDSGLMRGKRRIYGGRKSVRNALYNAANVSRRYDPTMKAFYERLIEKGKPFKVAIVACARKLLCWLNAILRRNALHTS

SEQ ID NO: 83116 - protein, 310 aa, unidentified
MDAHFVGIDVSKAWLDVHVLPSGESLRFGNDGNGIDRLRSHIGPLAPERVALEATGGLETLAVAELSAAGLPVVVVNPAQVRSFADALGKRAKTDPIDAAVIAAFAAAVRPELRPLPDAETRLLADLVARRRQIVTMIVAEENRARAATVRQAQKSIRRLLTALRRELETIDQDMDGHIRKSPLWLVRQNLLTSVPGVGPTVARTLLAELPELGSLDRRQIAALAGLAPFTRQSGVWRGRSFIGGGRSSVRSALFTAALVAIRHNPALKAFRDRLLAAGKIKIVAVVATMRKLLTILNAIIRDNRPWQPA

SEQ ID NO: 83117 - protein, 411 aa, unidentified
MHNRQNYLYVGVDLHKEHHTAVIINCWQEKLGEIQFENKPSAFSEFLLEVETYVSNGLSVVFGLEDVGGYGRALAKYLVDHEQVVKEVNPALSFLERKSQVMIQKNDSWDAECVARILVNKFNQLPDAKPNDLFWSIQQLVSRRNALVKAQSALKNQLHIQLNHHYPSYKKFFSELDGKTALAFWQQYPSPSCLEGANIKQLTAFLLDVSNNTCSVKKASEILKLVKEDGHTMKEYQETRDFLVRSIVRDIEFKKTEIKYIERELKQLVKLLDYQLETMPGIELVTASALIAEIGDVRRFPNANKLARFAGIAPVYFGSGGKGKTHKSKQGNRALHALFYNLAVQQVQVAKGSKMPRNPVFHAYYQKKLKEGKTKGQALVCIMRRLVNIVYGMMKYKTAYELPIVEEKEVV

SEQ ID NO: 83118 - protein, 309 aa, unidentified
MKQSVVYIGVDVAKAHLDVAWEKRSRRFPNDKSGRAALVAWIKQSPTAVQLICEASGGYEQRLLESLEQSGLKVTLVQANRVRQYARAAGILSKTDKVDARVLSAFGAAMQPKPTVPQSAEQKRLREYEAQRRHLNRILLAEQNRLAQLGSAELRALNRSLMSKIKKQIAVLDTRIGTLMVQNEELRLKAQILTSITGVGERTAALVLAQMPELGQLNRRQAAALGGLAPFNRDSGTLRGKRTIFGGRRALRSGLYMAALAAARHNQILSPFYQRLRATGKPHKLALTAVMRKLLLALNHSLKPIPSPA

SEQ ID NO: 83119 - protein, 457 aa, unidentified
MNRKRSKPKIDRRMPMVHPNAAAIDVGATMHMAAVRAERTPEPVRSFGTFTTDLHRLVNWFKECGVETVVMESTSVYWIPIFELLDARGFTVFLVNARDAKHVPGRKTDVSDAQWLQRLHSYGLLRASFQPKGQIAELRAYVRQRERLLEYAASHIQHMQKALTQMNLQLHHVVADITGVTGVQIIRAILAGERDPKVLARLRHYNCHSSAETIEKALTGSYRAEHLFALEQALALYDAYHEKASACDVRIEAVLKELSIGRGCRSDSLPSSRRRTDQANGLAFDVRAALFALLGKDITQIDGLGPYLSLKLIAECGDDLSAWPSSKHFTSWLCLAPSNKISGGKVLSSRTRRCGSRASALLRLAAVTVGRTDTALGAFYRRLSARIGKAKAVTATARKIAVLFYNAVRHGMEYVDPGASFYETRYRKRVVDNLHRRAKAFGFVLQPMEPTPDVVVS

SEQ ID NO: 83120 - protein, 348 aa, unidentified
MERMLERCAGLDVHKKTVTACVRVPGTHGHRTQHVRTFDTTTAGLLVRRDWLAAHAVTDVAMESTGVYWRPVYYVLEDAFACILANAAQIAQVPGRKTDVKDCVWTAQLLEHGLIRASFVPPAPIRELRDLTRYRKVLIQERTRHANRLHKVLEDAGIKLTSVASRLLGVSGRAMLDARVAGTTDPEVLADLARGQLRQKLPALRQALVGRFRSHHAFLVSQLLAHVDDLDEAIQTVGGHIDEVMVPFTDELARLDTIRGINKRTAEVIIAEIGVDMTVFPTATHLASWAGLCPGNNESAGKHRSGKTRPANRWLRAALIEAALAASTRAAPGAFAARYRRIMPHRGH

SEQ ID NO: 83121 - protein, 368 aa, unidentified
MKQVTTYVGIDAHKKDLFVAMLIGQQKTPVTWQLANEPQAVRRLVRKLEREAPGPVSVFYEAGPCGYALQRQVTTSRVSCDVIAPALIPRKPGERVKTNRRDARKLVELGRAGLLTAVQPPTPEDEAVRDLARARDDAREDLQRCRHRLGKLLLRRGLHYSGRNWTRTHRQWIDSLEWAHAAERAVVDDYLLAIDHTEARLLELDARLAEMAEREPYREPVGWLRCFRGIDTLTAMLILAELHDFRRFASAPALMAYLGLVPGEDSSGEKHRRGRITRTGNALVRRLLVETAWHYQHRPSIGVALTRRRKGQPGRVIAIADKAQQRLCRRFRKLAAEHKPAPKIAVAIARELAGFLWAALQPAPVAVK

SEQ ID NO: 83122 - protein, 390 aa, unidentified
MEARTVNNLPPAAADDDAVRCSFAIEMSKKSWIVAVNTPLADKISRYRLQPCDWRGLLELMARIRRRVAKELNRRVEIVSCYEAGYDGFWLHRLLEAHGVRNYVIDSASVQVDRRARRNKTDGIDAGQMLRSLMAHLRGEPKVLSVVRVPSIAEEDDRRLHRERHRLINERIQHVNRIKGLCALHGIYHYEPMRPLRMRALEHLRTPDGRRLPPRVKAEIIRELQRLELVLKMLDTVEAERDAIASDKNTLAHRNAKKIQDLVKLKCLGPEFASVLVGEVFYRSFANRRQLGNYVGLTPSHFQSGPMCHDQGISKAGNAKARSTMIELAWLWSRHQLKSQLSVWFHRRVGGLKGRIRRITIVALARKLLIALWRYLETGVVPAGAALKKV

SEQ ID NO: 83123 - protein, 352 aa, unidentified
MKQDTVTADLQTIGLDLGDTRSTLCVVDLQGQIVEEKSVSTTREALTLRFRRPRARVVMEACGQSNWISALIEELGHDVYVVNPRQLHLITRSVKKTDRNDARLLARLGRADIGLLQPTHRRGLDCQAARTVLNARRALVQTRTRLVNTIRSAAKSYGFKLRGCSSKTFAKLANTNLPQQVRTLVQPLLDAILNLDQYIERYNAEVERLGREHFPQTNVLRQIHGVGPQVALAFVTTIEEPKRFARSRDVGPYLGLTPRRDQSGDSDPHLKISKHGDGSTRSLLVGAATAIMRDTAPDTDLKRFGERIAGGTSRRDRGRARIAVARKLSVVMHRLLLTSEVYEPLRHAQTAG

SEQ ID NO: 83124 - protein, 371 aa, unidentified
MGNRSMFVGMDVHKETIDISVAEGGRQGEVRHYGVITPELEALDKVVRALQSPHRVVHFVYEAGPCGFGIHRHLTTKHALDCVVVSPSMVPKRSGDRVKTDRRDSGMLARLHRAGELRAIHIPDALDEAMRDLVRAREDAVIVATQAKYRLKAFLLRQGQRYPGRAGWTIPYRRWLAGLSFSSAAQHIALQEYRDAIDETERRIDRLTEQLRQLMPAWRWAPLVAALQALRGVSFLTAMGVVAELGDLTRFGHPRELMAFLGLVPSEYSSGPSVRRGRITKAGNPHVRRLLAEAAWAYQGIPRIGRQHLYRQEGLPKVVCDIAWKAQLRLTGRFRRLVARGKSKPKVATAIARELTAFIWAIAREVSPVSA

SEQ ID NO: 83125 - protein, 356 aa, unidentified
MNTRRVQDFVVKGKEVFVGLEDAKKTWKLAVRCEDMVVHQVSMEATYETLIRYLRHKFPACTIHLIYEAGFKGFTLHDRLTDDGIHCVVIPPHLVTGPKVSKVKTDKRDALRLAHVLQHHDFKDGCHVPDKERREDRQISRTLVAIQKDIVRTRNRIRKALDFHGIDASSADRWGRTEYRALKELQVSQSLKTSLDILLTLLEQLWEYQKQLRDALRALCRKERYRRAFTLAMSLPGIGWFTAIRLVLEFGEDLSHFATGKKIAAFVGLTCGEHSSGETEHKGRITGMGSGFIRAALVESSWIAVRRDPALLAKFMRVWKGRGSKKKAIVAVARVLVVRFRACLVTGTPYVIGTVR

SEQ ID NO: 83126 - protein, 383 aa, unidentified
MLYSPSADASFSHSTRTIYLALELSRRSWLVALHAPDAAKIELHRLPAGDGQAVLDLLARIRTRVERRTGVRPQVSCCYEAGRDGFWLHRLLEAHGVSSHVMDPSSLQVDRRARRVKTDRLDAQALLRALMAWSRGEPKVCSMVRPPSPDEEDARRPSRERATLLQERIRLVNRIQGLCATQGIDDYEPLRPDRRPRLTQLVTGDGRPVPPRLAAEIAHQLDWLELVLCQLAEVETRRDAEAAVAKAATSSKLGALLHVKSIGPELATVLAKEVFYRCFASRRHVAAYVGLTPSPFASGRRSREQGITKAGNARARKALIELAWLWVRNQPDSALAVWFRSRVGSATGRVRRIAIVALARKLLILLWRYVETGALPADVVVKP

SEQ ID NO: 83127 - protein, 435 aa, unidentified
MSSKAYRATRVNEVNWAQIARGKEGLGVTVGIDVGKFDLLVICRWADGRFERPWRVKNPWEIPTLVRVLKQVKADRKLVVALEPSGTYGEALRQALGDTGIEVQRVGTKASHDYAEVIDGVPSQHDGKDAAVVAELAALGKAKPWAYPAADSWEEELAYWVEEMVAQRQMLMPWQGRLEGLLARHWPEASQVLKLSSGTLLRVLKRYGGPQALAEDADAATQLARWGRSLLSPAKIEELLTGARSSVGVRPGPWQQRQIQEYAERALAARQQANRAQRRLRELAVGHPVLQAQGKVVGVPTACVLWVSTGDPRDFDSAGAYRKAMGLNLAERSSGTYQGRLRISKRGSARTRQWLYFAVLRLVQQCGVRPWYEAKKARHEGEARRVLVAVMRKLAVALYHVGVRNEGFQPRRLFGRIGRHSRRSAERSVASKERA

SEQ ID NO: 83128 - protein, 407 aa, unidentified
MRGFGLDVHRDFCEVAVAEGGTIRSAGRIATRVDSLALFAQSLVASDVVALEATTGADKIVSLLQAHGIRVVVANTRKLKSISEAKAKTDRLDARTLARLLVSGLLDEVWRPDERTRTLRRLTNRRERLVRARTRAKNEAHGVLARNLCDRPPVTDAFGKAGRRWLARLQLPVDERLTLDGCLRQVDFLDEEVGALDREIAKHALAWPEVLRLMTVPGVNVQTAATFMASVGDIRRFSSPRKLVSYLGLDPRVRQSGSGPARHGRISKAGASEARHMLGEVAWKVMQTPGPLRAFFERVRARRGPQVAATATARKLTVLFWHLLTREEDYAFARPAMTRNKIRRLELLAGAPAQKGRKASAVSLRLEGDMMQGETVSRARSTTRSRPPRRPTGFLPPLGLRYLRGQR

SEQ ID NO: 83129 - protein, 353 aa, unidentified
MLYVGLDVHARQSTFCVLDLNGRHLRTHAIRGRWDKVLAELAAMKRPFAVCFEATSGYGYLHEQLRKMAKRVVVAHPGQLRLIFRSKRKSDRVDAAKLAKLLFLDEVPPVYVPSAHVRAWRGMIEFRTKLVGERTRVKNRIRALLRTAGIVPPRGLWTKRGLAWLAGQTMGTDFDLVRRDVLIDELKSLDAKIKRVQKVLGAVGGQHPGVHLLMTIPGVGPRTAEAVVAYIDKPERFTRNKAVGSYFGLVPSQDASAEQNRLGHITRQGPGTVRRLLVEAAWQGIWRSEQIRTFFERIRQGNPERKKIAIVATAHYLLRAMHSMLLSGEAWQGPARERIVAGPSRPVVLESSR

SEQ ID NO: 83130 - protein, 350 aa, unidentified
MAIVGGFDVHRKQITFDYVDNDGLVQWGQIRPATRKTLRSWLAKHCPEGAGEFALEGCTGWRYVSEELTAAGVGVHLGDPAEIAALRGPKKRAKTDRADARLLRTLLVEGRFPESWIPPAPVAEIRALGRLYCALMEERRGWQQRIHAQLFHQGCPPVKALLSEPGREVLVAAELSAAGRQYVDTALRRIDELTAEIDPLRMQLVRFARRQSGCRVLQRHYGVGWLCAAIIWAEVGDPRRFSSSDQLVRFAGLDVTVYSSDGKRAPGHLSRQGSPELRWAAFEAAKCAARRGSPDYAYYHNLAAKHEGRNGKNPTLAVERKILRRCYHTLRELGDAVLAMPIAEAEEVAA

SEQ ID NO: 83131 - protein, 349 aa, unidentified
MSERRLVGIDLGIASAHTVRVLREDGSEVCRCRCWPRLDSLLEVEAAALASAPPELRLEVVIEPTGPAWLPIAVFFTGRGHTVYRVSSAQAADLRRFLSRHAKSNGIDAQTLARLPLVDPGGLRPLRLPERDAASLDRRVRATDRLTRQAAEHKRRIKDLVRQLLPMTPLQGQLCKADLAVLERTGAHPRRLLDMGRARLTRLIFKASNGHLGEERAQAWLDAAHLALELYGDHPALAFDDRAAEVVTEVRLLHATEAELPAHESAREQAYLQVDPDQLARSLPGVATVGGPALAALVGDARRFPDGASFRSFTGLAPRASETGEGRPWTWAGPCGRSRQSRRPWGPGR

SEQ ID NO: 83132 - protein, 410 aa, unidentified
MVKENFIYVGIDLHKETHTAVMIDCYNQRLGEITFPNRPAAFPKLVTKVKKCNTDGKEVVYGLENAYGYGRALAVWLIDKGYLVKDVNTAISHRQAKHRGAMYRKSDSDDAEAIALATLNMLDKLPDACPNDAYWSLGQLVHRRDNIMKQRTRLVNQLHEQLCIAYPSYKQFFNDISRPTALYFWEHYPSRKYLKGKSVEDLRAELVPVSHNKCSTKTCEKILDAVASDKVKNNAYQDARDMVTLSIVSDLQHYDSQLTEVDKMLEQMYKMLGCTLTTIPGVNVITAVKILAEIGDIKRFSNANKLAQFAGIAPLHLSSSGKGKDVATKQGNRRLQATIYFLAIQMVQVSSKGTPRNSVVRAYYEKRKAEGKTSQQALICISRRLISIIYGMLKHGTEYRMPVVESAGEK

SEQ ID NO: 83133 - protein, 344 aa, unidentified
MQAAVRTIGLDIAKSVFQVHGVDVDGQVVIRRKLKRRYVLAFFQKVPPCLVGMEACATSHHWSRELQALGHRVRLMPPAYVKPYVKRQKNDAADAEAICEAVTRANMRFVETKTAEQQSCLVLHRTRHLFIRQQTSVINAIRAHLAEFGIVAPVGRKGVEQLFDVVASTKDQRIPEVARACVAALGVQLRALKAQILDFDRQIMIWHRSHETCKRLDEIPGVGPALATALVASIADPKVFRSGRDFSAWIGLVPKQHSSGGKEKLGSISKQGDRYLRSLFMTGALAVIRYAKIHGTAHRPWLTALLARRPTKVAAIALANKLARMVWAMMTRGEHYKEPVALAA

SEQ ID NO: 83134 - protein, 409 aa, unidentified
MEPMYYIGLDVPKRKISYCVKDSSGKVCAEGSLPATRLDLDHWMKTLPQPWSAAMEATMFTGWIYDHLQPHAAALKVAHPLMLRAIAAAKKKNDRIDASKICDCLRCDFLPECYMASTAIRERRRTLRYRHLLVRQMVQMKIKTSSLLMEAGVSYNKQRLHKAGYFRELLASNPDIDEGLGSLLRLCRETVVRLGKTESALVRSLERDPLLVERVERLMTIPAVGPITALTWALEVGDVQRFSSIKKAISYCGLCGAEKSSGNTVQRTPLSKQRNKHLQTTLIEAAKMAPRYSPELAMLYDKEKQKGNANRATLAVARKLVAYLMAVDRGQRNFQVVETKLHRCVERGGEQGGFLRRVACQVLPLSRLGEGAQALDAPVDKFRDWQENTNSIFCSRPLAGLRQQMEVWF

SEQ ID NO: 83135 - protein, 317 aa, unidentified
MSKSFIGIDVSKNNLDVHILPEALSFSYRYETKAIKALIKKLKSYTPELVVLEATGGYEISIGIALSDANLNVAIVNPRQVRNYARALGQLAKTDKIDAYVIARFAQDVKPEARAQMTFKELELKSLVVRRQQLMEMRCAEINRLSRTSVTQIKNGIQKVIRVLDAQIEAIDHELKNEIKNNPTWSKKLELITSFKGMGDHTAHTLLFGLPELGNLNRQQIAALVGIAPFNRDSGMFRGKRTISGGRANIRKALHMPALSAATRWNQALKEFYCRLIAKGKKHKVALTACMRKMLITLNAMLKNNQTYNPKLGINYC

SEQ ID NO: 83136 - protein, 351 aa, unidentified
MSQSLYGSVAVIGIDIGKNSFHVVGLDARGAIVLRQKWSRGQIEARLANMPRCLIGMEACVGAHHLSRKLKAFGHDARLMPAKYVRPYSKGQKNDFRDAEAIAEAVQRPTMKFVATKTAEQLDLQALHRVRERLVSQRTGIINQIRAFLLERGIAVRQGLRFLRAELPRILATPPDVLSPRVVCVIEGLAEDWRRLDERVDHLSGEITALARQDAGCERLMSVPGVGPIISSAMVAAIGNGDTFCKGRDFAAWLGLVPKQISTGDRTILGKISKRGNRYLRVLFVQAAWVVLIKPKSWERHGLKPWIEAAKKRLHRNVLAVALANKLARIAWSVLARGRSFEARPAVASAA

SEQ ID NO: 83137 - protein, 380 aa, unidentified
MEYCTTIGADVSDRTTKICVMTKADGGERRIVVETTCATTKAGFEEAFAKFDRSWPVVFETGTHCRWMDRTFRKMGFKTIVGNPGKIPSITKSNTKNDRNDARELARLALADPAMLHPVFLRDEVYQQMLRFHHARNMLISQRTQTINQIRGFAKSMGHRIEYSSTEKFHELSKAGWPRELEECAWPLMGSLKTINLKIKAYDKLIARLAERPEFKSMVERVRVVYGVGIIGSTVFIAAIGGCPDRFDHTRDIGAYLGMIPKQDQSGDDDKQLHITHAGADIVRTALVECAGVVMMSNAKDTDLKLKGLRIAMRGGKIARKKAKVAVARGLAVAMLALLQHPEREYVPLSEEGKKGFERYRAEMEYLAMSKAAKREKKVA

SEQ ID NO: 83138 - protein, 365 aa, unidentified
MRIDVGVDLHKTQMTVYVRTGKDEGESSQYSVTTEGYREFLKALGKWRSKGADIRLAVESTGNTRYFMHQLEARGYPVVVINTMKFKVITQSVKKTDRHDAYTIAEFLSKDMLPESKLCSEKSEEVRRLLKVRSMLVRTRVSIKNQIHGVLVSRGMEDTRACLQSKRGRQEIQDTLAEAGNGLVVQPLFDTIEALGEEIKAIEAEIEKLMAADKAVKLLQTIPGCGPVTAWTIRAYTDDIRRFARYKQYSSYAGLVPWVECSNETVHYGKITKRGPEELRTAFVQLVMGIRRSRSTLSWRLMVQYESMKRQKGTGKSIIATARKMSKIVWYMLMREEEFKTSLMVDTKLDSVIQSMREKALCESA

SEQ ID NO: 83139 - protein, 352 aa, unidentified
MQAISVGCDAHKHYSQLELQDASGQVLNRVRIDHSPGAVSSFFSRLPGGTPVALESVGNWYWIADEIEAAGCLPLLTNPAKAKLMMGHVNKTDKLDANGLATLLRVGSLPTVWLPPAALRDQRELPRTRMALTALRTSIKNRIHSLLAKYNLSPEDGSQLFSRKGRSWLESSLSRLPPETGRCLAQQLELLDFLSLQIDTLEERIHNMIALTPTMQLLKSLPGVGDMLAIVIEREVGTISRFPSAPQFSSYCGTTPRVNSSGGKTRYGKLRTESNQYLKWAFIEAANAISAHHAQRDWTTRHVSKLYLRIRSRKGSSVAIGAVARHLAESTFWILSKNEPYRESSKVSPRQG

SEQ ID NO: 83140 - protein, 398 aa, unidentified
MHGDYQVFLGLDVGKDGHHAVALNRDGKRLHDAALANTEAKLRQVFDKLAKHGSVLVVVDQPASIGALPVAVARACGHQVAYLPGLAMRRIADLHPGNAKTDARDAYVIADAARTLPHTLRRVDVGDEALAELEMLVGFDDDLAGESTRLTNRIRGLLTQIHPALERAFGKNIQHKAVLELLSRCGGPAGLRKAGRRKLVSIASKNAPRMGERLVERIMTALDEQTVVVPGTAAAEKILPRLADSLREVLQQRDQVAAEVDGILDAHPLAEVLTSMPGIGVRTAARILLDIGDGTSFATAGHLAAYAGLAPVTRRSGSSIRGEHPARGGNKQLKRAFFLAAFAALSDPVSRAYYDRKRAQGKKHNAALICLARRRVDVLFAMLRDKTTYQARPLPAPA

SEQ ID NO: 83141 - protein, 434 aa, unidentified
MGKYIAIGNGKLSAMIYVHNLMSKKAMKKKDEQTYQFLLRLDEGGGIDVHKETFKVAACHENEAPQERTFGTFTKDIYAMRDFLLEQKIKHVVAESTGVYWKPMYRILSAAGIEVSIVNPTRVKQMPMEKTDKKDARWLAKLLMNDMIKKSFVPDEQQEQLREFSRMHTKYIRQMTRVKNQVVRLLESCNFKIRSIVSDISTQTAQKLINAISNGQTDTDLLIALCHHSVRKRQGDERLKLALEGRFTKYMQQQLRMLLDDLHYFEKQKMQTENVLKELFTNEQMEKIKKLDEVEGVSQQQAEIIMAEIGAGIDSFSQADQAAKYAGLTAGQRETADQQKPVRAVPGNKHLRVVMVQIAWSAVKVKNGYWKAEYQHLKKRIGAKKAILAIARKMFKAIYKVLTTEHRYEKWDAKKFYDNRIKTIEFKKRLSIAG

SEQ ID NO: 83142 - protein, 412 aa, unidentified
MQDILTCAMGLDVHRDIIVACLVKGAVDAEPEAETRTFSTLIPEMQKLRDWVIESECRNIAMESTGIYWQPIYEMLESCFDGEISILVVNARHMKNVPGRKTDMKDAQWIATLLRAGLLKGSFIPDKAFRELRHLTRYRKSVVHDITAQKNRIDKFLQSSGFRFTAFLSDTFGASGRNIIRHLIEHGSIDREALDKCLKTKTRNRIDEILVALNGSLSEHQRRFLNMVFRHLEDLEAHKHTVEDEITEEVLKHTDALNLLCSIPGIDVTAAAAIIAEIGTDMSSFPDSQHICSWAGLSPGNNESAGKRKSVHINKGNPYLKSMLCEVAWIMASHRKLYLSGWYWKVKQRKGAKRATIALARKILSIIYTMLKTGTPYNEECYEQRRLRCERKRANRLVNELQKLGYVVVAPD

SEQ ID NO: 83143 - protein, 391 aa, unidentified
MVSVGIDVAKDKHDCFILNSEGEILSDVFTIPNNLGGFSVLLRKIRDCISSQDKIKVGLEATGHYSYNILGFLLDNGLPTYVLNPLRTTLYRKSLSLRKTKTDRVDARTIATMLLSDLDLKPYLDTAYHNEELKSLTRYRFDKVKERAKLKSSVSRLVCILFPELETLVPSLHMVSIYTLLEEFPGAKQVAQAHLTRLKTLLEGASKGRYGREMAVLIRDAARNSIGSRMPAKSLELQHTIRLIRELDAEIEDIEAPIQTIMDETHSPITTIPGIGYRMGAMILAEAGDLSRFDSPDKLLAYAGMSPSTYQSGQLKNCYPHMEKRGSRYLRYALYTATKYVCLWEPTFATYLAKNRAEGKHYNVALSHASKKLVRLIFALEKSRKPYCLAR

SEQ ID NO: 83144 - protein, 324 aa, unidentified
MGQGERYVGIDVAKGWLDVATWPASASLRVGNDAKGVAQLVEELLESAPRAVVLEASGGLEALVASELQAAGLAVAVVNPRQVREFARSLGRLAKTDRLDALVLAQFAQSAHSNGRLQPLALPDQAQLELKALVARRRQLIGFLVAETNRRERAPKVVRKSIVQSIKGLKKALAEVEQQLREVVQRAPAQQAKAALMTAVPGVGPQLSVTLLAELPELGRLGRREIAALVGVAPHAHESGRFKGRRTIWGGRARVRTMLYMAALSAVRHNPVLRARYQALLDRGKAKKLALVACMRKLLVMLNAILRDQRPWNPLHALDFQHSR

SEQ ID NO: 83145 - protein, 424 aa, unidentified
MKVTYQTCCGVDVHKSFLVATIVKTTGGIEPSYQKKRFSTFNNSILEFKQWLLDNHCHDVCMESTGKYWVPVFNLLEDKINVVIANPKWVKAVKGNKDDTKDSKWIGDLFRLGLVKGSYIPCKKVRILREYTRYRYKLVSCRSSEKNRYQNALTVCNAALDSVVSDIFGKSSTSIIDYLLEQSGTSINHEEIASKLLRSLKSKEDAVIESVEGYQMTDAQKYRMRLVRAHMDYITAEINDVDKMIENMISSNPDFENAVQFLCTIPGVKRDSAITIISEIGTDMSQFSSSRRLCCWAGLTPGSNESAGKKKSVRITRAGVYLKPALVQCAHAAVKSDKSPYYKKKYESLVKRRGKKRAIIAIARMILTAIYQMLSTGEQWNPSDLYKIDMPVALVEKQKAKAIKQAKKLLQREGLLPPDEPLAS

SEQ ID NO: 83146 - protein, 347 aa, unidentified
MIYIGMDVSSKSFTIHAINERKKVLFKGDIKPTRSGLRGMIAELGADTKLVVFEAGNQLKWIALTLKKIRGVQIHVVHPNEIKWINQSSGKTDKIDARKLAYLARGDMLPRRVHVVEGKARELRELVSARSTIQSKRIALINSIRGCLKQEGYKLAKGFFNNEKWRDHLKKMRIGNTQKLILEKYMESIEGMVKAESELTAEILGIKGKDIELLESIPGIGGLTSRVLVSAIDDAKRFDNKKSVSKYGGLAPRIYQSGGVTHLGRINRDGRMEMRKVLLQCAHTVTRMKSYEAWPLKAFFERIRKRRGKKIAVVALARKLLTIAYGVLKAKRVYDPEILFIQTESGA

SEQ ID NO: 83147 - protein, 407 aa, unidentified
MRLFVGDDWSEDHHDVELMDATGQVLARKRLPEGVAGMARLHELIGQQVGEVAEDAEVVIGIETDRGPWAAALVAAGYVVYAVNPLQASRYRERHGVSGAKSDRGDAHMLTDMVRTDSHQLRAVAGDSPDAGAVKVVARAHKTLIWERTRQVQRLRHQLREYFPAALAAFEDLNAPDALELLGRAPDPARAAKLTRAQVSAALKRARRRDIAGKATAILAALRSVQLGQPPAVTAAYAVTVRSLIAVITTLNEQVKTLQGQVEADFGRHPDAEIYLSQPGLGPILGARVLGEFGDDPDRYASGKARKNYAATSPITRASGKKKVVAARFIRNDRLTDALMAQAFTALSASPGARALYDAERARGAGHNPALRKVANRLVGILHGCLKTRTLYDEATAWPHHENKLAA

SEQ ID NO: 83148 - protein, 463 aa, unidentified
MGHEPEAEHNPDAFRNNQLSPPTGMSTRECFGFSHPASIACLTEEEFTLQVLYPRCCGLDVHKKSITGCCLWFDAEGRRQEEIRKFGTHTTELRRLAVWLRQHEVKHVVMEATGSYWRPIWNVLEGEGFEQTLANPQHMKAVPGRKTDPHDAHWIADLFQHGLIAASFVPNQQMRHLRDLTRMRTKVTEDRARVINRIEAVLEDANIKLSSVVTDIMGASAQAMVKGLLRGERDTAQLAELAQGRMRAKRPQLQTALEGNLQPHHVFVLQRLLMQSRFLQQQREAIERQIKRRLDPEMRQAIAFWDSIPGVDEDIATILVAEMGIRSDQFADGAHVASWTAICPGNHESAGKRKSGKMREGNRWLRGALTQAAWAATHTKGSYLSALYRRIAARRGSKRAIVAVAHAILISAYYMWKKKQAYHELGDNFLDTLKPEKTADRLLKRLAKLGYAVTVTGFPSPAA

SEQ ID NO: 83149 - protein, 348 aa, unidentified
MIAIGADVHKQQCTLAVQRPDGKLSMLPSMDNTRENWLDLLTQLPPEAQIALEVSTSGHFVMSVLEEAGWRDRAHWVHTAGIDSLRKQKTDRLDAKRLARKLSVMEQDPLPEAWFPPRPIRELRLRARQRCWVAVLRTRVKNRVRSLLQMSGLCAGTNPFTASGRTWLEKQKLSEATRESVEQLLRFHDFLTTEREKSETSLRGMEKDFPEIVRLQTLPGLGHILSAVIWSEIGELKRFHSPSALVNYTGLVPSLYESGERSVRGGITRQGPVWLRWALITAVNAATHGHNAFARRYRRLRRHKLPNVAKTAVARSIARCAYGVLKHGVDYQEQRWGRKADIEMEQEA

SEQ ID NO: 83150 - protein, 417 aa, unidentified
MTDFAATLGLDWADQKHDIWLRPADGSKPQHLRVEQSPEAVHEWVAKLRERFGGRPLAVGIETSRGPVISALMAYDFIVIFPINPKALKDYRAAFCVSGAKDDRTDAQLQEEFVRLHHPKLKALQPDTQLTRKLAGLVENRRRLVDERTRFVNQLHSTLKTYYPLAETLLDGKLNLPMAADFLTRWPDLESLQQAQTKALRTFFHKHNSRGAKIMEERFALLQAAKALTSDPAIIQPARQLVLALASLLRPLHQAIAILDKQIEQAMDQHPDAPIFRSFPGAGPALAPRLLVAFGTNRERFTSALEVAQFYGIAPVVIQSGNSKTTHMRHRCPKFGRQTFHENAGCAFKKEPWARAYYHQHKERHQDKHHQACRALAFKLIRIYFACWKLRTTYAPERYLTALQKHASPLHAKLKLL

SEQ ID NO: 83151 - protein, 490 aa, unidentified
MNDLKLHRVIGLDLGVASQHSAVVLDGTGRVAARRRVSSTAASLGERERVALTGAAEGTTLIIVIEPTGPMWLPIAVYFGRRGHTVVRVSSAKAADLRRFLSRHAKSNGIDAETLARMPMVAPSGLHPVELSGADRASLDRRVRTVARLTREIGQRKVRIRALAQTAIPTIGAALGDDLNRTDLAVLERYAHPRALLAAGPARLTRLVHTESRGKLGAAKVEALRTAARQALELWAGDTAIALSDLAEEIATEIRLLRLTETERARHEQARDAAHAQVDPAGLATSLPGLGPVGSTQLLAAMGRPGRFRSAAAFKAFTGLAPKASETGNTDRKSQPMSKAGNRALRTQLIQSANTARQLDPQLAAIYHAQMTERGANHLKALCVVAARLAERAWLTLSRGEPYTIRDLQDRPVTPAEARALIDEQFTVPAAVRRRRRSKKQAGRAPQHCTRQEKSQPTAGHEVTSPSTTITSTPAAVNPDPTEVLTALPT

SEQ ID NO: 83152 - protein, 440 aa, unidentified
MSIDTTLTHHLRRNPTMKFKMQNKQNQLIERISVKHLVVGVDIAQQLHVARAVNFRGIVIGDPLTFKNNEEGFASLLKWIKNLQRFNNLDEAIVGMEPTGHYWINLSKWLSNQDIEVVTVNPHLVKKNKENRDNTQSKSDKKDALVIADMVKNGYYSEVRYTSESFEKLRVLMSNRDVVVKRLVSSINQLNRWVDIVFPELRQVFKDIKAKGAIATLRLFPTPMELETMQPHDVITGWKSIMKRQPGLKKAMLLLQVARRSVGTRQALDAYKFHLEQLLEEYDLAVTQLERVEKQVTEELNKIPFAKKLLTIKGISEISLAGILGEAGDLSNFSHGNSLLRHAGLHLAEASSGKWKGQIVISKRGRSRLRRFLYLATMSLVMNNPEFKAIHSHNVKVKKVKKMKSIMKLIGKLARIFVGIAKRNESYCPEKLQPLASLAA

SEQ ID NO: 83153 - protein, 412 aa, unidentified
MKDLLEISCGLDVHKEKIVACILTGPLGKPTRSEIREFSTLIPDMIALRNWIVSKNCHHVAMESTGIYWMPIYEILEDAFSGDITLLVVNARHMKNVPGKKTDMRDSEWISTLLRAGLLNGSFIPEKRIREFRDLNRYRKSVIRDITSQKNRIEKFLQSSGFRLSSFISDIFGASGRNIILHLVEHGQIDKTALDSCLKTKIRNRIDEILMSVNGTLSEHQKAFLRILMTHYDSLKKHLAEIETSLEEDMAPFALQVEQLNSIYGISTTASCAIIAEIGIDMKPFKTAEHICSWAGLCPGNNESAGKRKSTSVTKGNPYIKSMLCEIAWVIAGKRNTYLSAWYWRIKQKKGAKKAIVALARKLLVIIYTMLKQGTLFDESCFETRRKHCEQKQLSRYIRELEKHGYHVEAQS

SEQ ID NO: 83154 - protein, 390 aa, unidentified
MLRKNIVQTLDAATSWKVFGLDLAKHDLAVVAIPADGSDVQYVKRYSYADFLEFTAQILSATMVFEPGNGANHFALRLQAQGHTPKMVSGASVKSWITLHMSGQKTDLNDAYALARLSEDPDLKTVRIKSVDQNRLQSLQAMRKQLVEQRTKTIVSIKGIFQCWGILFKKDSRSLKKFKEAANNNKELLGEEVVEAMILQIDRIADLDKDIKHVEELLKKVTMQDPRAQPMLDIPCVGLQTVSRLCAIMGDIKDFETPRSFVAFIGLVPKNMISGNKTTTPSGYEQVGQGKVNRRGDKMARSLIIQCASSMYMNFHKDNFPECALKDWIQKQKDAHKPYGKIMVSLAAKLLRIIYAVLKHGEAFSYEKAGISRSALAALKAAQPAEVGNA

SEQ ID NO: 83155 - protein, 347 aa, unidentified
MRFFTDPHQNYCGIDLHARSMYLCIQNQEGKVVLHRNMEARPEQFLKAIKPFQEDVVVGVECIFTWYWLADLCAEHKIPFILGHALYMKAIHGGKAKNDRIDSRKIAALMRGGTFPMAYVYPAKMRATRDLLRRRNHLTRKRADLLSHIQNTNSQYNMEPFAANISYKQNRAGVLDQFTDPDVRMSMEADLELIVQLERQRGKLELYITKNAKNHDPQALYRLRSIPGIGPILSLVILYETGDINRFPRVQDFASYGRLVKCAKESAGKRSGTGGGKIGNAHLKWAFSEAAVLFLKGNPEGMKYKKRLVKKHGKGKALSILAHKLGRAVYFILKRDQAFNQEKFLRS

SEQ ID NO: 83156 - protein, 415 aa, unidentified
MEPMHQRVAGIDVHRMKHVVTILIGREDGAVSSETREFGGFKRDMRALVAWLQTHRIQQVVMESTGIYWKSVFGHLEAAGIPALVVNAFHVKNVPGRKTDVGDSEWLAQLARFGLLRGSFIPPKDLRELRIVSRYRRKLTGMLAGEKNRLHKLLDDAGIKLGGVVADIDGVCASKMVEGLIAGGKPGELAALGRGKVRATTDILEAAMDGELSARHRLVLDMAYDHLRYLEGKLAALDRYLLAAMQPYAWAWRLLQTIPGIDAVSAAMILIEIGDDPHRFGSPARLASWSALCPGNNESAGKRKSGKTRHGNPIVRYLLCEAANAARRTKTVFRAKYQSLVIGRGHKKTIIALAHKLVRTIYSVLSRRKPYRDSTVDYEAASVAKNAPRWIRALKKYGYWPQVAAPNPPTAATAS

SEQ ID NO: 83157 - protein, 297 aa, unidentified
MIGIDVGARRCHWYDTSDNTTAALTTDQTITRLTTMPPTTVVLELTGPYGRRIAEIAYQAGHTVLIAHDTDSAALRTLLRNRRKTDRLDARLLAHLAQLELPGPNPHLTPYDRIRPLLAARALAHQWRYLVELRAAIRNRNKNPLTEPIPIEDTLTQLIEHYKQRTIETVPTPTLQLLTSIPGVTPPLAALIYVTLGDITRFHNRDAAVSYAGVAPRHTPLSGATAQRPRRYRYAKLLTSHLHMYALRVAQHPDQFDRIGDTYVRVRKRTDGRRALHAVKRHLIRIVYGVLRSFKPS

SEQ ID NO: 83158 - protein, 399 aa, unidentified
MFCGIDWAAESHDLCVVNPAGKVRGRATVAHSRDGFDELVKHLARWARQGEILVGIERPEGRLVDRILEAGYPIVLIPTFAMKDLRRRYAVGGAKSDPGDAYVIADVARTDGHRLRRLEPLSEHTRALRSVVRTRDDLVDQRVALGNQLRACLEAYWPGAAVIFADVDSEICLAFLERYPTPEAAAHLGDVRLGSFLKKVGYSGRRSAAELLERLRSAPTGVCGVEAEGRADAVRAMVRVMRSLNRSIKDLDRAVIAHLGEHPDAEVFTSLPRSGRINAAQMLAEWGDCREAYPEPDSVAMLGGLCPVTHASGKHRDVSFRWACNKRLRLALTTFADNSRHASPWAAEVYRRAVARGCDHPHAVRILARAWARIIWRCWQDRQPYNPALHGAVTRLEAA

SEQ ID NO: 83159 - protein, 411 aa, unidentified
MSDSIFVGIDVSTKSNKVCILDQQGNRLSKLSVENNSHGSARIVERVIEAIVKSNSSSVSFGLEATSVYGDGLIFFLKQEPSLKLYNTKVFLLNPKQVHNFKKAYSDLPKTDDVDAWVIADCLRFGRINLREVYFDEQHKALQRLTRARYFVAQNIVREKNRYLTNLFLKFSGMCQEKLFSNNLGATATELAGSEFSLDEMVHMPLDELATFINTTGKGKFADPEALAAEIQKAARSSYRLPKTVEDSVNQVLAVSVISIKSYLQQLKTLDQSISTLMEAIPNTLTSIKGIGPVYAAGILSEIGSINRFKDQASLAKYAGLSWSRYQSGNFDADNTHLINSGNRYLRYYLIEATNLVRRHDPELKRFYELKYHEAPKSPHKRALALTARKFVRLVYALLRDQRLYSPPRVR

SEQ ID NO: 83160 - protein, 415 aa, unidentified
MKRLGKPSQKALFEACSDSGQSRPLGNYRSWRKDGVIGRLSLWIAEDFWVLRFRLMVKRGPWLRPQASEGEAQHGPFCWTRRFSQEDVCIVDDTGSIVREVKVASEPEALLPVLTNPAYHFKRIGLEAGPLSQWLFSALAEAGLPAICVETRHMRAVLRAQINKTDRNDARGMAQMMRVGLYRPVHVKTLRSQKLRMLLTHRKLLQSKAIAIDNDLRGTLRNFGLKVGVVGTVKFEARIKELVEDLPDLAELVEPLLIVRRTLREQIGILHRRLLAVVRNDEVCRRLMTIPGIGPVVALTYRATVDVPARFRNSKAVGAVFGLTPSKYQSGEINRTGAISKCGDEMMRVMLYEAAQIMLVRLAKWSGLKAWAMKIARHRGMKKAIVALARRLAVIMHRIWVDGTEFQWTREATAA

SEQ ID NO: 83161 - protein, 355 aa, unidentified
MRILSLDLSKYKTVACDYEAETGRHQFATVLTTPKGLHDLIVDRTPDRVVIEICSIAGWVCDLVRSLGIEMQVASTNDERWHWRKVKTKNDRRDSLKLAQLSARNELDLVHVPQSEMRQWRALIAYRQHLVQRRTKIKNHIRELLLREGQLLPRHRSAWTPDALAALEAMVKPLREVSMDELWRGELEVELAQFKAVQAQLTEVVAKLDALGAANHNVRLLQTASGVGPRLAEAVVTMFDDPRRFRRGAAVSAYIGMVPKQWDSGETERLGKITRHGNRLVRSLLVEVAWCALRHNPWARETYQRISGGKKSRKKIAIVAVGRKLLVRCWAMLRDQTAWHWEGQSAVVTPRAPTA

SEQ ID NO: 83162 - protein, 341 aa, unidentified
MKKITTLGIDLAKKVFQLHGVNEHGVAVLRKQVTRAALLRSVAQLPPCLIGLEACASSQYWGRQFERLGHTVKLMSPQYVKPYVKSQKNDQADAEAICEAVQRPNMRFVRPKSLEQQDLQSAHRVRQGLVQERTAVVNRMRGLLGEYGVVMGKRPAIVRRELPEALADSQNGLTAVVRELMADLYEHFAEIDRRILRVEGLIERLGAAHDTVTRLRTVPGIGLLTATALVAAVGDAKEFRNGRQLAAFLGLVPRQDSSGGKTRLRGITKRGDKYLRTLLVHGGRCITTLAQRRPTATSGWINEVYNRRGKQRAYIAQANKNARIAWAVMARGEVYRSAVQA

SEQ ID NO: 83163 - protein, 477 aa, unidentified
MGKDNTKKKRKVKGSAGQLEIVHPNACGIDIGSRTHYVAVRPDRDEESVRSFGCLTPDLHEMGRWLKECQVDTVAVESTGVYWVPVAQVLERYGIEVNVVDGSHVKNFSGRKTDVQDCEWIRQLHRFGLLRGGFRPKEQIRVLRSYWRQRAELVKCCSRSILHMQKALEQMNLQLHKVISDISGVTGLRIIRAIVAGEHDPVKLAQMKHRLVKSGTETIAKALTGEYRSEHLFTLKQALETYDFYQRQIEECDKKTQQYLSTLESKADPEELKLKPRKKNKHRRRKNEPYFDLRAETYRITGVDLTLINGIDAKTAYTIISEIGIDVSAFPSERRFASWCALCPNNRITGGKVRSTRTRRVQNRVAHALRLAAQSLHSSNTALGAYYRRMRGRLGPSKAITATAHKLAVLVYRMLKHGEDYVDKGAQYYEERYKERALKNLRRRATVLGFSLVPLPETQPVSQNTNVHKPPLTGLVS

SEQ ID NO: 83164 - protein, 358 aa, unidentified
MKKIVVGIDISKEKIDASAIDVRDTRLGVVQLDYQVFENRPKGFRSMLSWARHLVKGIGLEDVLFCCETTGGYDRSLCEYIYAKGLDIWREGALQIKRSMGVRKGKDDKADSLMIAEYAMRHMDKAVIYETPSDTVSELKALFLYRQRLVRERTGEKVRLAQMEATAAKSKSMSFILRVSKKIVKDLDEAIAECEKKIQEVKESDEQLKKNYGHITSVSGIGIVNATAFIAYTNNFRSIPNANKMASYWGVAPFREHSGTSVDKKSCVKYYSNSLLKAYLTQAAECTVKEHGIYRDYYLRLQAAGKPHGVVINNVRNKLIHLVLSLVTNDVDYEANHLFNGVQGKGRTKNPAQLENIN

SEQ ID NO: 83165 - protein, 279 aa, unidentified
MELYSGLDLHSRNTYIGILDTDFKRIFKKRIANDLEHILEALEPFRDQLKGLVVESTYNWYWLVDGLMDAGYSCVHLANPSAIKQYEGLKHSDDKHDAFFLAQLLILGILPQGYIYPKEDRPVRDLARKRMFLVKHKTAHILSLQSLIARCCNQRVSSNQIRTFSGADLKQLLKEEHLVLSAQANLDSIAFIKQQIHRLEKVIKSKLKLSQTFNGLLTVPGIGHILAMTIMLEVGDISRFAKVGNFTSYCRCAPTQRLSDGKSKGSGNRKKPVKRLAEF

SEQ ID NO: 83166 - protein, 437 aa, unidentified
MARVIIGMDPHKRSATIEVIDGREKVLARGRYGTDSDGYRAMLATGRRYPHRVWAVEGCNGIGRHVVQRLVADGETVVDVPAKLSARARVFATGQGRKTDPVDAHSVAVVALRTTGLRQVAVDDSTVALRLMVDRRDWLGRARTDTVNRLHALLLDLVAGGAKKHLTAPQARTILATVRPRDLVGRTRRQLAAELITELAVIDKRIKLADQALAELIAATGSRLQQLHGIGPSNAARLLGDIGDIARFASRNHFASWNGTAPLDASSGDQHRHRLSRAGNRRINRALHIMAVVQLRHETEGRAYFRRKLAAGKTPMEAMRCLKRRLSDVVYRQMVADARKASPGGQSGASLTSSAADPTPTVDSSDKPQPGLTGRAYAPFSAVAEPTTAAEADPTSAPKPAAVQPLIRTTKPTRSTTLTSDSRTTTARPRKVSSPKG

SEQ ID NO: 83167 - protein, 367 aa, unidentified
MSTIKFIGLDVHKETIAVAVADDGRSGEIRFHGTILNTPEAIRRLVSRLATPDATLHFCYEAGGCGYGIHRQLLGMGMDCSVIAPSVIPRKPADRVKTDRRDAEMLARLLRSGELTAIWIPDPAHEAMRDLVRSRRQVRQDLVASRQMLLGFLLRHGRKFTGRTNWTKAHWRWLGSQAFEIPHQQFILGESIRRIEEAQQRCDRLDTMLMEALPRWSLAPVVKALQALRGVGPIVAITLAAEIGDLSRFETPKQLMGWLGLVPSEASSGTRTRRGAITKTGNRETRAMLVEAAWSYRLPAREERRYRARVEDLPEEIRAIAWKAQVRLCQRYRTLAASGEALPKVITAIARELVGFIWDIGRRVQPT

SEQ ID NO: 83168 - protein, 577 aa, unidentified
MPRLPPQAKRPRGGSIRERNLAQAAVGGRLINAQVVEVDRSLSGAVKTEHKRGPKFRAPFSGYSLRQHPRLIPIRRLLSYARLGLYLAERITDVSQAKKQSPKPGQEKPAAGPGKRGGKRKGMCLDDRPIIEPNAAGIDIGAREIFVAVPPDRAEDPVQVFSTFTEDLEKMAQWLVSCGVTTVAMESTGVYWIPLYDVLEKHGVRPCLVDAHSMKNVPGRRTDWHECQWLQFLHSVGLLRAAFRPDGEVCAVRSLMRHRSDLVQMTNQHIQHIHKALTQMNVQIHHVINDITGVTGLAIVDAIVAGQRDPLELAKLRHPLIKASEETIIKSLQGNWRPEHLFTLTQSRQMYRHYQEQIMACDAEIAKMLVAFQPRVDPQKKPLPPDRKKKQRLRQKKAKPSPGFDLRTESYKLFGVDLTQIPGLMLMVLTLFSEVGRDMSRWKTPGHFVSWLALCPDNDITGGRVAWRGMRSGVHNRAGELFRMAAYSLHHDQTPMGDYLRRMKSKLGPAGATTATARKIAMIFYTMVKRQVEYDATLWAERDAQREKRFEAKLKRQAQQLGYKLIPIEEKPSHLNA

SEQ ID NO: 83169 - protein, 452 aa, unidentified
MLAMMVPREIEDEEYEQVLERVAAVGVAKATGMVCTRVPHPSRLGRRQARVWRVDADTGSVMELAGHLAAGRIGKVTLGSASGYWRIWFCLLEARGLDVQLVNAREVSNVPGRPKSGKLDCVWQAKLTERGMLRPGFVPPAEIRRLRDYTRLRADLTRERTRHWPRLEKLLEDALIKVTAVASKIGSKPVRDMVEALIDGQRDPEVLAGLARGKMRAKHDRLAGALTGRFDEYHGELARMLLDQVDALTAHIDKITGRVEELIMAMPAAWGVDADGVTGPGAGLGPGAPGLPVVARLDEITGIGAPAAQVIIAEIGLNMAVFPTPGHLVSWAKLSPRTIQSGARSQPGRTGKGNPYLKGVLGEASAAAGRTDTFPGERYRRIARRRGKLRALAAVARSILVIAWYLLAGPAARFREPGAGYYASRIDKNRKTRGHVRQLEALGYTVTLAQAA

SEQ ID NO: 83170 - protein, 356 aa, unidentified
MINRSQLDFTGQPIYAGLDVHKKSWSVSIFTKHGEYKSFSQPPQVETLAHYLRHHFPGALYYAVYEAGYCGFWIHDQLVKEGVHCMVVNPADVPTKTKEQRRKRDRVDCRKLARGLRNNELEGIYVPPRAKLEDRSLIRTRLSMGRKQTRCKNQIKSMLLFYGVVIPEDKEMGHWSRRFIRWIEGIRLERASGDMALQIHLEELSHLRQILAKLNRAILALSRTEQYRRWVSLLRTVPGISTLTAMIVLLELGEIMRFPSLDHLCTYVGLVPDTQSSGEKEHVEGITQRRHSHLRWLLIEASWIAVRKDPAMMMAFNEYCKRMRKSKAIIKIARKLLNRVRYVLKNQAEYVPCVIE

SEQ ID NO: 83171 - protein, 347 aa, unidentified
MLHVGLDLSRKRLDICAISDQGELVDELAAPFDEEGLCRLSERMAEKHAGRVRAVVESMNGARFVHDTLEAQGWDVLVADAQRVKGLAPLACKTDKVDARVLAELSFRDLVPAIWLPDPQVRRERELARFRLHLVRHRSSLKNRIHSTLITFGKPCPVSDLFGVAGRKLLERLDVPEPWRENVEASVVLIDQLDRQIDAVASELKYVGADHPYVPLLVSAPGVGWLVGFSIACEIGDISRFSSPTKLCGYTGLCPRVIQSGESDRRGPISKHGPKYLRWALFEAALNACDHPLYKERYERTKKRLGRQRGPKVAQIELSRKLTEAIWHMLTRNEPFAPAGAPFRLAA

SEQ ID NO: 83172 - protein, 343 aa, unidentified
MAQQTIIGIDLAKHVFQVCMVTPQGTIKTNTTVARGKLLALIARQPPALIFMEACGGAHDWARRFCALGHEVRLLAPQYVTPFRRGQKNDPNDALALTEAGQRPNIPTVPIKTVEQQDLQALHRVRERLVKDRTAVVNQVRGLLLEYGIVIPQGIARLRKRLPRVLEEADNGLSFLMRDLLQSLQSELSALDTRITEVTCQLTRLSHELEACQRLQEMEGIGPLSATALVAALGNGHDFQTGRQVAAWLGLVPRQHSSGGTPRLGGITKGGNSYVRRLLIHGARSVISHVRDKPDAKSAWIRQLVARIGVNKACVAVANKMARVAWALLHTGEQYRRPAVLPV

SEQ ID NO: 83173 - protein, 463 aa, unidentified
MARRRNAKRRAPSARKPAGSLPIVNPNAAAIDVHSDNHVVCVPADRATPNVRTFGANSCELLKIAAWLKECGITTVAIESTGIYWIPLFELLEAQGFEVCLIEPGQASRCGARPKSDVLDAQWLQRLHSHGLLVGSFRPPDVVIALRAYLRQRLMLVSLASMHIQHMQKALEQMNVKLTEVVSAITGLTGMRIITAILDGERDPAVLAAFRDARCKNDEAAIARALEGTWRDEHLFELRQAYELYRTYQMKVTECDKEIEQTLAKLPDRSAGAKLQPKVKKCHRKPNTLRFEATEPVFRAMGVDLTAIEGIEDHTALVILSEIGVDVSKFPTEKHFASWLGLCPNHQESNGKRKSRRVRKGKNRVAIALRLAARSLHRSHSALGAYFRRMNSRLGFKGAVTATAHKLARYVYAMLKHGEAYVSQSLEQYEAATQERIERTLRKKARALGYDLVPRQPSSPAVS

SEQ ID NO: 83174 - protein, 420 aa, unidentified
MKSASNSVSNQLPEDPPNGVTGGLDWARDDHAVSVVDARGRELVRHSVEHSAAGLSELVEVLARAGVGEVAIERPDGPVVDALLEAGLTVVVISPNQVKNLRGRYGSAGNKDDRFDAFVLADTLRTDRARLRPLTPDSDATIALRRACRARKDLVSHRVAVANQLRAHLHNAFPGAVGLFSEIDSPISLAFLTRFDTQDKADWLSPKRLGAWLTSVGYCGRVDPAVLHTRLTGAPRGAVGDHGTAQAHITRALLAVLTTLVEQIKTLSTQISEQLTLHADQHVFTSLPRSGRVRAARLLAEIGDCRARFPTPQALACLAGAAPSTRQSGKIRTVGFRWSCDKQLRDAVTDFAADSRRANPWAADLYNRARTRGHDHPHAVRILARAWLFVIWRCWQDHAAYNPTQHGALQRLLQDQQQAA

SEQ ID NO: 83175 - protein, 363 aa, unidentified
MRDPRTVAVGLDVHKSSVRLAAVRADELLREVTLPYDPERVEQELRAWPGARVAYEAGPTGFGLYRHLVAGGIDCEVVAPGLVPTRPGDRVKTDKRDARRLAALHGGGLLTAIFVPSPELEALRDLVRAREDARLDRMRARHRLGKFVLRHDRRMPTTCWGPTRRAWLGRQAFELPGQQQAFDDYLFNVDQIDRRIGVMEAEIARLAADGPHAELIGRLRCLRGIDTLTAVGLVCEVGDFERFKTAQQFMSFVGLVPSERSSGEGRRQGSITKAGSAHARRLLVESAWNSRRRPTVGYELARRHRDQDPAVLERAWRAQQRLHRRWQRMAGRGKPHQKIVVACARELAGFVWAIATNQPLRTA

SEQ ID NO: 83176 - protein, 444 aa, unidentified
MSKRVTGSSFEVVNPHAAGIDIGDRAHFVAATDSTGVSVVRRFDTFTQDLYAIADWLRQCGITTVAMESTGVYWIPLFEVLETRGFTVCLVDTRRLKSVPGRKTDVRDCQWLQQLHTFGLLQSAFRPEDQIVRLRTYLRQRAMLITYASHHIQHMQKAMQQMNIKLTTVLSDITGLTGMSIIQAILDGERDPVKLAHLRDPHCKNSEETIVKSLQGHWRDDHLFELRQAVDLYRFYKQKIVECDLQVQTMLESFPDKEHQQPLGAKRTKRNRHTPSFDARTLLFQKTGVDLTTIDGIDVGTAMKVISEIGTDILRWPSEKHFTSWLCLCPGSKKSGGKILSSKTRRSKNRAAAALRIAAQTLERSRSAMGAYFRRMKARLGAPSALTATAHKLARLIYNLLRHGQPYVDVGQEAFEEKYQQSMLKNLTKRASQFGYTLMPINPG

SEQ ID NO: 83177 - protein, 315 aa, unidentified
MVSAVYVGIDVAKGWLDVAARPGAAPWRVDNDPAGVALLVAQLDTLAPALVVLEASGGYERPVVAALAAGGLPIAVVNPRQARDFARATGQLAKTDALDAKALARFAEAVRPPARVQPTVEAQALTALLTRRRQLVAMRVAEQNRLETALPAVRAGIAAHLTWLREAAAAIDEELRRAVAADPAWREAEALLRSVPGVGPVLALTLLAELPELGTLTRQQAAALAGVAPLNRDTGRQRGVRTVWGGRAGVRGALYMGALTATRWNPTIGAFYRRLCDAGKPRKVALVACMRKLLTILNALLRTRTPWQPVPPAQG

SEQ ID NO: 83178 - protein, 446 aa, unidentified
MVSLQTHNGVTRRLILEKKPNMKATKIASTAQLDSLLDVCFDISKAKLNVYYVLGDQAFDDEWPNTTRQIEKRLRHCVDLAHQHGLRGLRVVCEPSGGYEKKLLHTARRMGHLTAYVNGEAVAKFRVVETNDNGKTDIKDPHIISTLAKLNKTLRVRDLPEEYLLMRKCGNLYEQADKCVTRVRGHLHRSLVELFCDYSFAKDFLYTASGRALVDKYGCNPYRIVRAGKKRFEKAMHGRAARMRQTTLDRLWDNAVTSARHEVTWDYAELLELQLRQQYEEFLLYAGRKAAFGDQLVALLHRLRERDPKIPEPTSGVISPKNLARLIGETGPITDFANWRMLLRYAGLNIQMRQSGQYKGQYKIAKRGRPLLRKILALIVLPLVRRKDLYGPYYHEKRKTMPGQKAMVAVMRHFLRKFHGWYRSGQAFDQKRYFTSITQLDLREAA

SEQ ID NO: 83179 - protein, 360 aa, unidentified
MTGTMTCAAMDVHARSTYAASLDVVTGELSRQRFDTGAVEPVVGWLAGLPGPVRCCYEAGPTGFGLYRAAVAAGIDCQVIAPSKTPRPSGDRNKSDRRDTDLLLRQLMAGGLTAVVVPSATCEAARDLARAREQVRVDLMRCRHRLSKLLLRHGRVWDRSAWTKVHREWLSAQTFEQVNTELAFIDNLAACDGLTARKDALDERLSWVVSDPEFWPLVRRFRAFRGIDTLSALIVTLEVCDFARFSRAVQLGSWLGLVPSREQSGESDHHGSITKTGSKYARRILVEAAWHYARPPRIGRTLYERQEGLPAHVLQIARRAQSRLYRIHRRMRERKKPGNVITVACARELACFLWAAATAP

SEQ ID NO: 83180 - protein, 310 aa, unidentified
MNSIICGVDVSKDWLDAHIRPGAAFARFANDASGLSELLVFCHGHCVELAVMEATGGYERLAFLWLWENGLACGIVNPRSVRRFAEAMGTFEKTDRIDAAVIAHYASVKQIAPTVPPSAAQQRLKALVSRLSQVTGDITVNKQRKSATTETLASLSTVLTCLKREEKRLAGEVASLIDDDPLWAKLDKTFRFFKGLADRTVVRLLAEVPEIGIVSNKAIAKLVGLAPFANDSGKREGPRNIRGGRAGPRGILFIIARHVARYDPHLRAFAERLQKAGKTKMVMRMALARKLLVILNAKARDARIEFANAT

SEQ ID NO: 83181 - protein, 316 aa, unidentified
MSEPVYVGIDVAKASFEVAVSGEAQTLSLGNDEAGHAELCQVLVPLAPRLILLEATGGHERLLALALVAAGLRVSVINPRQARDFARCMGKLAKTDRIDAQVLRGFAALLDAQGHEPRALLDEQQRELTALVTRRRQLVAMLVAERQRLALAHPKAKASILAIMDAIAAQLHDVDGQLREHVQAHHADLAKLLTSVKGVGPTTASTLLAQLPELGHLNRKQITSLVGLAPMNRDSGTLRGQRHIFGGRADVRRVLYVAALVGTRFNPVLKAFYAKLLAAGKPKKVALVACMHKLLIILNAIARTKSPWSHEIAGIA

SEQ ID NO: 83182 - protein, 410 aa, unidentified
MSSLEVALDPTTVIVAVDPGKVANRIWVSNGAGLLTDPVSLPVSRDGIGRLEQMLETHDAATPVIAIEATGSLHRAWATELERRHPGGVRLFAPSETKAARTQLGSGRFKTDDRDCAALTYLARQGAGRGQSEELAVDSLRSAVRHRRGLVADRKVAQQRLHDQLNALVPGLSAPSGHGRSLAIETPTGQAVLACAAAFAGRPPTRRSLTARAPGRLTRATGEYWVQRWKGCLPPPADAEQRARRLARDLDRYQRLQTDIAALEEEVAVLLAATDGQILTSLPGVAVLRSAAFAAHSLPVARFPDAEHLYSATGLAPALYQSATLRRRGRISRQGLAEHRDALMGIAWGLSVYSPSFAERNAELRARGMAPIQARVALARNACRLAYRLLVTQQPFDEQRYRQGRLSRGR

SEQ ID NO: 83183 - protein, 421 aa, unidentified
MSPDAKRAYARSFPVHVGVDTGKHFHVLVAQDAAGRRTAAHKVLVARPSFEQADAQLQTWFPGIRREQMLVGLEFAGHHGFTFARYLADRGYPVVNVLPAHTKRAKEIEDNSPLKSDPKDAAVVCSLLGHGVFVRFPFLTRPYVELRLLTTHRHRLTVEATRYKNRLQSLLDLVWPEFLEQFSTIEKATPLALLERWPLPRDILASAPRTVRSFIHDTSRGHIGADRVRDLLASAKTTIGLPDAPEERRLEIQYLLARWRLVREQTDELERRIGMLVEICPEAKTLLTVPEVSAVCAATLVAELGTPADFDHPRQVLKLAGMNLVSASSGQRDQTRVPKWQSKRGRPALRRQLFLLAGRWCHERGLYRADYEALRARGSTKTKAVCTLARKLVPMLLAVMRTGELFDVTRWTANRRERAAA

SEQ ID NO: 83184 - protein, 341 aa, unidentified
MKNLFIGVDFSKEKVDVAIIFADGLTETAARVFNEFKTTVSGYKQLVKWVEQNSYGIDSSLWLFCGENTGDYSKGLCNFLYGKGYDMWLENAKSIKDASGLRRLKSDRADASMIAEYAMRNYDKAVMYEPLSESLAQLRELFLYRQMVVRHRCSFQVRRGEKRLTMEKSPIKTMISQSGRHIVSELNKEVEKIDKRITELIKSDEELTEVFTIVTSVPGIGTQNAVCLMVYTDNFRRFNYDSRKIACYYGIAPFGKDSGTSVHSDPHVHYMANRQIKAMLTQAALAAVNFNPIMARYYMRLVERGKKKQVALNNVKNKLVHLVTAMVRNRQTFTPEYKISA

SEQ ID NO: 83185 - protein, 335 aa, unidentified
MNQARMHIGVDVGKESLDVCYPNGNKEHIKNTKRCRAKLIKEAKRLGAIISFEATGPYEESLEVECLSAGVPAVRLDAWKTRKYAESQGILEKTDAIDCEMIRDYAASLKLEKLHFVKKASEGYRRLKRASGVRRNLIKAKVLIANQLENAMDADIRASIVRLVDSLDRQIEKMDDVCSAAIASDENMNALAKRLEQVVGIGPVLINTTLATCPDIGSFTAKGIAKFAGVAPLDNKSCTIKKKPKPRRGRRDLRSALYMAAVSACHSNHRLQPMYKGLLARGVPKRVALIALARHIIVLMNYIAKYPDFNPAIDPKKAAMLALPRRGSGRPRKNP

SEQ ID NO: 83186 - protein, 410 aa, unidentified
MRDVIQHTEHEEARVGTRAWIGIDAAKRHHWALALDQDGRVLASRRVANDQAAITQLLGEMAALADELTWAVDLSNSFASLLLALLWTRGQQVLYVPGRAVNRAADGYRGEGKTDAKDALIIADQARLRRDFTPLRPAPQLLAELRLLTSHRQDLAADRVRMLTRLRDHLSAIFPALERALRVTSTGPLVLLARWQTPDGLRQAGLEAVTAYLRAHKVPKAAALARTALAAAEQQTVQLPAERLTAQVIAELAGALLALRGRLKDLDATLTKRLAAHPQAGVLTSLPGIGALLAAEFLVAVGDLATFAGPDQLAAYAGLAPVPRDSGQRTGNWHRPLRYNRTLQRVFYVSAWVSATRPGLSRDYYQRKRREGRRHVQAVLALARRRVNVLWALLRDNRTFTPDPPATTTA

SEQ ID NO: 83187 - protein, 414 aa, unidentified
MRIIYPKAAGLDVHKKVVVAAITVLSSDGQSYQEKRTFETKTADLLALSDWLMSHGVTHVAMESTGEYWKPVFNILENNFTVLVVNAQHISKVSGRKTDQSDAEWIAELMQFGMLKASFVPPLEQRELRELTRYRSTFVRERVNLVNRIQKLLESANLKLASVATDVMGMSGRAMLEAVIVGTASPKEMAELAKGRLREKREQLVKALEGRVKAHHRFVLTELLCQVDSLDESIARFDEQIDAYCRPFEEAVQLLDTIPGVSRRAAEVLVSEIGTDMSRFPTADHLASWAGVAPGNNESAGKRRSGKTRNGSKPLGVTLNQAAHAAAHTRNTYLSAQYHRLAGRIGKKKAIVAVEHSILVIGYHLIQRKEPYHDLGGDYFDKRRPEATAKRLVKRLEKLGYQVSLQQQPVTVAA

SEQ ID NO: 83188 - protein, 321 aa, unidentified
MTSAGAYIGIDVSQGWLDVALQPGGEAWRATNDEPGIAGLIDRLRALQPTAVILEATGGIELPVTGALLAAGLPAAVVNPRQVRDFARATGRLAKTDAIDAQVLARFGEAVRPELRPLPDEATQELAALVARRRQLIEMLTAEKNRLRLAARAVRRDIQQHIRWLERRLSDLDGDLAQQVRSSPRWREQDDLLRSAPGIGPVSSVTLLAQLPELGQLNRKEIAALVGVAPLNRDSGTLRGRRKVWGGRAHVRAALYMATLVGTRHNPVLKTFYERLLAAGKPKKVALTACMRKLLTILNAMVRTETSWQSGHLTLAHQDSC

SEQ ID NO: 83189 - protein, 430 aa, unidentified
MTKPQLTPTQGILVAIDIGKTRNEVLIEIPGHVRRRRLTVLNTQADYDRLIDLLSGLGQPVTCAFEATGNYHRPLAWRLLQAGFTVRLISSLALARTREALHNGWDKNDPKDAQVALHMLRIGASQHYHDPLAAGLNDIQEVSKTHEAISKAKTEVLHRILTHHLPLYFPEIGRFRHNSRSDWFFAFLDRFPTPGSITALSKEAFIAAAWGVVGRKVAKERLLGDIYETARASIGLPIPIDAPAVRLFRLVIAEARSLIEQRNALEAMAIELLHESPDYKLLCRIPGVGPITALTILAEAGDLRRFGHHRQFLKFCGLDLATHQSGAFRGQTKLSKYGNARLRRALWLAGQVAIRQKENSFRDKFERYIARDRHNPDLRRKALTAITAKMARVVHAIIKSGADYRPFVEGPVPGGRTSLSMGREGATATL

SEQ ID NO: 83190 - protein, 373 aa, unidentified
MKQSTTKLFVGLDVHMDSIAVAYAPEQRGAEIISLGNFGTRQCDIEKLLKKLLKHGCSLVFAYEAGPCGYWLYRYLTKKGHTCLVVAPSLIPKRPGDRVKTDRRDAITLARTLRAGDLTPVYVPNVEDEAIRDLARAREDAKRDLRSAKLRLKSFLLRQDIRFEGSANWGPKYLRWLGNVACETPAQQIVFQEYVRAITERHERVERLEAELRDQVDGWRLKPVVVAIQALRGIQFITAATLIAELGDVTRFDNPKQLMGYLGLTPSEHSSGRRRKQGGITKAGNSHARRVLVEGAWSYRFPARVSRHLQYRLERVPQKIQDISWKAQVRLCKRYHRMIAGGKHKNKVVVAIAREMAAFVWSIAMVTPIEDVN

SEQ ID NO: 83191 - protein, 362 aa, unidentified
MEYIAFDCHKKYTWAVVEDERGRVVREGRIPHQRGSLREFLSHCCEGSPVAVETVGNWYWIVDEIEQAGCKPRLVHASKAKLMLGAVNKTDKLDARGLNKLQRTGTLPEVWIPSRELRDKRELPRTRMVLVQERTKLKQRIHATLAKYGIRVEGSDLFGVKGRQLLLEGLPLLPPQTRYVTEGLLRQIEALDEEIRAIEGRMKEVLSPTREVELLQTLPGVGFILATVIALEVGDVGRFPGPEKLASYAGMVPRVHSSGGKTRYGRTRQDVNRYLKWAYSEAGNVVARYHEIQPRRHVSLLYARICNGIRCLVPGGPGRERGGHMGQKRPSEVIARRPGENLMPQGRRRDVSHRNGPKAIWA

SEQ ID NO: 83192 - protein, 320 aa, unidentified
MRNAVGLDISKLTFNASAMVGNAEYSAKFDNDSKGLDQFSDRLKSLGCQNLHICMEATGNYYEEVADYFAQYYSVYVVNPLKISKYAESRFKRTKTGKQDAKLIAQYCRSAQESELVKRQKPTDEQYRLSRMTAAYAQIKSECAAMKNRHHAAKDEEAAKAYAQIIKAMNEQLEVLKEKIKEQTEKPNCKEGVKRLETIPAIGRMTAAVLFHHLTSSKFETSNKFAAFAGLSPQQKESGTSVRGKGKLTKFGNRKLRAVLFMPAMVAYRIRAFPDFIKRLEEKKKPKKVIIAALMRKLAVIAYHVHKKGGDYDPSRYKSA

SEQ ID NO: 83193 - protein, 421 aa, unidentified
MKEWKDITHYAGFDWARDHHAVVIVNSQGEIVADFEFKHSLEGWKSFQEKTAAWPNLAVAIETNQGAAVDQLLQRSYTVYPVNPVASESYRKRKAPSGNKTDHVDGWGLADALRVDGHGWKTLQPMDPLTHQLRLLCHDEVSLIEQRTLLVNKLQQALVEYYPAAREAFDDWTCSFTWDFIIEFPTPQALVQAAKRRWEKFLHTHKLWRPETAEKRLALFAQADHFKASDPITQAKSQLAVSLCKLLRTLQQQLNEYRKQIEALFKSHPDHDLFGSLPGAKKVLAPRLMAAIGTDPQRYGSHNVLQCFAGTAPVSYQSGQINKAKVRWACDKFLRHTVHLWADCFRKASAWGQTYYEKKREQGMSHACALRCLGQRLLKIVFKILTDKKPYDAELHARNQQKHGSWVLDLVNKIPAPKPCD

SEQ ID NO: 83194 - protein, 433 aa, unidentified
MTFAGLDLHKKEVEAVILDEDGHILHRSRFAATRAALEAFARTRLSPDSTTVAVEATTNTWPVAAILQPLVHKVVVSNPLRTKAIAGAKIKTDKIDALALAQLVRTGYLPEVWIPDDETRLMRQRSTERAMLSADRTRIKNRIHSVLHQRLIEAPPGDLFCGKNLAWLKALTLESLDPFGRDSLDRHLRQLDRVDQELAALTAQIAVHAHQTPAVKLLMTLPGVDFTVAETILAALGDLSRFATPDKAASYLGLVPSTRQSGDHCYHGPITKQGARHARWLLVQAAQHAATHPGPIGAFFRRIAKKKNRNVAVVAVAHKLVVLAWYMLKNNEPYRYAQPLTLQAKLSRLRILATGQKRKGGLVKGQPRTQQYGKGRTKAVPGLDHLYSAEGLPPLSTPSKPGEQAMLERQGLAVLAAAVRVPKRVACGIKPKA

SEQ ID NO: 83195 - protein, 334 aa, unidentified
MKKFDFFLGIDISKNTLDYCLLDDQCKVLEKGKVNNEPVSLSKFFLKFENEYCCKTTLLIVFENTGIYSKPVARFLNENKWCYSEVSALEIKRSKGVSRGKSDRVDAHQIAQYGFRNLDKIMLCTEPELIHQQLKILNTEREKMLSAIGSFSRTGEAEEFLGKEVFKVVKTHNRQTLSALRKQLKQLDDKISALLRSNEDLKKKQELLKTIPGIAEVGSLYLLLATKGFTRFKNWRKFACYCGIAPFEYSSGSSIRGRNRVNPLADKKMKSLLHLLALTSIRHDPELKLYYERKKEEGKHSLLALNNVKCKLVSRIFAVIKRETPYVKTHQFAN

SEQ ID NO: 83196 - protein, 359 aa, unidentified
MKIVGCDFHPSWQQIAVFDPETGEIAERKLLHGDGEADRFYRELEGPALIGIEACGNSQWFIDLAERLGHVVWVGDAAQIRASYVRKQKTDRRDAEHILKLLMESRFPRLWTPTAEQRDLRQLLIHRHKLVEIRTRVKNGLQHLALNRGLQKKSSLWSVRGRACLEKLPLTGWTARRREDLLRLLGELDRHVAELDEAVARAAEEHSQARLLMTQPGVGPITSLAFVLTIGDVGRFKHSNQVASYLGLIPREHSSGGKQRLGSISKQGNRFMRQLLVESVQTVNRLDEGFRKEYAARCHHKPKGVAKVAAARKLAVRLYWMMRQNVGYPEIALIESSSRVPLTGGSHVATLNEPSRTQQ

SEQ ID NO: 83197 - protein, 359 aa, unidentified
MSKLTKIDRFFNNVKLTADDELFVGVDVHKKSYHVALFLNDAPAIDFVMPAKKEQLSQKLKTMLPALQKVVYETGPTGYNLARHMNQEKLPVSVVATSKIPRPSAGEDKTDKLDSRKLAQYASKGLLKSIAVPSPKQEADRQLYRMRHRQVRNLAKVKTQIKSFLLMHGLDEPAGLSYWSQNRIAQLQKLRLRKTLRLSLNELLNDLDYYSCRVKELNKFLAEHIDTGKLAQRMTLLKTHPGVGTVVACQFVTELFHYRDFNNTRQVYKYFGLSPKIFQSGNSCTRGSINKASNSRLRRNLIQAAWRWVAVDVKAKKIYLRLYNNCGRIKQKAIIAMARKLAGHLWMMLITNQPYDPNK

SEQ ID NO: 83198 - protein, 412 aa, unidentified
MQVVYARCAGLDVHKKTVSACVSVREADGSKQQQIRIFGTFTRDLLALADWLRKQGVTHVAMEATGVYWRPVWAVLEGQFEQMLVNPQHIKAVPGRKTDAKDCEWIADLLQHGLLKASFVPPSPIQDLRDLTRYRAELRQSQNRVANRIQKLLEQANVKLSSVASDTLGVSGRQMLEAIIGGEESPEQLAQLARGRLKNKLPQLEQALEGRVREHHRFLLAEFLDEWEALGERVRRLEAEIDHRMGPFEGAVALWQTIPGVDRVTACSLVAEVGVDMNQFPSAQHLASWAAVCPGNHESAGKRKSGKTRDGNPWLGRTLCQAAWAATRKKNCYLSAQFQRLAARRGVKRALVAVAHSMLIIGYHVLKTGVGYHELGGNYLEQINKDQLQRYYLKRLERLGLKVTVEPLPDAA

SEQ ID NO: 83199 - protein, 401 aa, unidentified
MSHSPNKRFIGLDVHKRSIMVVGLDGQQAVVLPPRRVSLVEFEGWARKVLQPSDEVILEATSNAWYVHDLLEPLVERIAVVNPRDVKLIAASLVKTDKRDAQILARLLVVNLVPEVWVPPVVVRQLRGLITHRRQLVKQRTAARNRLQGVLQRQHLVPPETGLFAQASRSWWPKQDLSVTEHLRIRHDLALLDHLQPQLTEVEAELARLSASQPWQPQTAFLIQLPGIGLISAMTLLAAIGDIRRFPTAKKLVGYSGLGSRIYATGETRRTGAITKQGRRELRTVLIEAAWSAVQHDPYWQAQFERLLTRTTKTKAIAAIARKLLVVVWNVLTAQAADRQAQPEAVARSLLRWADTHRLATRLNLSRAEFVRRELERLGLAHTLTQFEVNGRRIRLEPDPN

SEQ ID NO: 83200 - protein, 316 aa, unidentified
MKEQSVFVGIDVSKDTLDVAVKPQNLVFAVPNTEQGHRALCKRLKPLSPTLVVVEATGGLELDVVIALNEKGIVIAIVNPRHVRDFARACGQLAKTDRIDAAIICDFAEKIRPQARPLPSEETRALDALITRRRQLVDMLAVEKNRLASAGRAMKKDVKRHITFLEKAIAQMDQDLQKMIKNSPTWRQNDDILQSVSGVGPTTSTTLLAQVPELGMLNRKKIAALIGVAPLNRDSGHKKGRRMVWGGRASVRAVLYMSTLVATRHNPVIRDFYNHLISQGKLHKVAMTACMRKLLVMLNAMIRDQTHWQPEMGLPK

SEQ ID NO: 83201 - protein, 349 aa, unidentified
MNYVGIDIHKRYCVCAAQDEQGHELGLARVEGTGGASLASFLGQLGGVSTVAIEACWNWGKVFDALEGLPAVAEVVVAHPLKTRLIGEAQIKTDKIDARALATLLRGHFIARVHVPPKAARRRKDQLRQRLYWSRLRTRIRNRIHALLDRQPELALPQCSDLFGVKGRAHLRRLELPEPDGTLLREDLALLELLGVQIKAQEQRIAAANDADAATRQVQSMPGFGPILAALIATEIDDITRFADADHLCAYAGLVPMTRASGGHTRHGPLLRAANRWLRWAFIEGAWVAIGCSAYFGALYRRQRDRGKAANTAITIVARRMARIVFHLLHEQRDYTPTPPQTFPGRSVC

SEQ ID NO: 83202 - protein, 337 aa, unidentified
MIVIGVDVHKHSLAAVAVDGLGRQLDALESSDGEELLAWSKRVSRRRLWALEDCRHVTRGLERTLQQHRQRLVRVPPRLTAPERRRGRTRGKSDLIDALAIARAALREHGLDSPRPEEGRLRELKLLVDHRDDLVDERRRCQQRLRWHLHELDPTLRVPLGALDRTIWLDRIARQLARRDQTTQVRISRDLVGRCRSLTRAIAALDRELHAHTNALAPRLLELPGCGPLSAAKLLCEIGPINRFRSDAQLARHAGVAPLDASSGKHQRHRLDRGGNRQLNCALHRIAITQGRVHPPARAYLERKQAEGKSRREAIRCLKRQLARTIYTTLRSQPSLT

SEQ ID NO: 83203 - protein, 345 aa, unidentified
MTVYIGVDFHARQQTVSYLTTEDGEIQGRQLDHGKPNEVRAFYQQFAGQRVVVGFESSGYAAWFEELLEELGCEIWIGHATAIRMFARRRQKNDRRDADLILDLLLRGDFPRIHRYSRESREVLQQLRYRQRLVKMRTMVVNSLVFMAASRGVSLRSQLQSRRGQERLRQMALPDPLREQRDELCQLLLELKTKLDKVESWLAAKAKSDVRVQRLRTHYGIGPLTGLCLVHTLECTERFANPRKVTAYVGFDPVEDSSGERRRIGSISKQGSRLLRFLLVEAGQIAIRKDQDLARVYQRVLVRRGHAKAKVAVGRRLLVRAFIMLRDEIDYAEFCRRGVAARSSR

SEQ ID NO: 83204 - protein, 442 aa, unidentified
MKKIHQNTAGIDIGSRSIYVDIEGKEVASFETFTSDFRKAAVYLIEAGVTSVAMEATGSYWVILYDILTEAGLDVWLVDGRQTKQVPGRKTDVKDCQWINQLHAHGLLNRCFVAEGLMKELRSYQRLREDHIRSMSMHINHMQKALIEMNIRLPEVLSQVHGASGTVMIEAILQGERDPQKLLSLCHHSLIKKKGEKIVKALEGFYTEAGLFALKQAYEAYRFYKAQISDCDKKIQDTFNKQNMDLYEFPKGMKRKQIRHNKPDVSDLGKYLLKIFGGKDATKLSGFTDYTWFQVLTETGPDLSRWKTEKHFTSWLGLSPGQHQSGRKKKNKSKGRPKAGQIFRVIAQGLLNSKKIALGAFGRRLCGRKGPRVAIKAMARKLAEQYWRLMVKGSDFVEFGIKYYEEIMQKQKMKLIQRLAVELNMDIVPQEIEEKILNLHEE

SEQ ID NO: 83205 - protein, 381 aa, unidentified
MSVAPAGESVETDTTTQGDEMGHRRLVGIDLGIASAHTVRVIDEAGQTIAKRKCWPTTVSLGEVEAAALATTPSGTRLEVIMEPTGPAWLPIAVFFGSRGHLVYRVSSAKAADLRRFFSRHTKTNGIDADTLARLGLVDPAGLQPLELPGPGRRGVHRGPPAQSRPGRTGSPRRGAGKLLSLGRPWGLARSLPGLGEVGGPALVATMGNPARFRRGKAFRSFTGLAPRASETGDTDRKGQPMSKAGSSLLRTTLVRAADTARKQDPQLARIYYIQMVERGKDHLGALCVVAANLAERAWAVMDRGMPYVICDTDDTPVSAEQAKAIIAKRWTVPAEVRARRRSKRAGKAPKNVLGGQSKPGAQGAGERGGLPLPPSSALAS

SEQ ID NO: 83206 - protein, 408 aa, unidentified
MARFHVGVDVGRTQHVARVLDTETAQMSRSFQIPVSSEGFGSFRRYLEGFSPDRQDFFVAIEATGAYHVPLAGYLFDCGYTLALVNPARAKAFRKAEGHVAKTDRVDAGVLCRMISGVGLRPAMPKPEEQERLRILTRWYFRLQQDRTRALNRVSAAVDIVFPEFWQVFSEITQVTPRAVLRTYTTPDKLVEANTIAIAGLLRRVSRGRYLLKDAKYLQALASRTVGIRKLTVPIAPQIRQALDQIDLIDQQIRELEPLIEQEFHAMGFAAEEFPIGGVTTIATIVAHLPPPQNTPSVKSLHAYVGWCPRDRQSGQYKSSRPRMAKGCPPLRWALYGLALASMSHVEGYKRYVTRRKSEGKKGGYILFIIGRKLLDYIWSIARTKVIFTPVAPTLLADLGEEKAVAAT

SEQ ID NO: 83207 - protein, 427 aa, unidentified
MSGKETVQPELKFVALVGIDWADQKHVWCLQAAGSTEREYGELEHKPETVEAWVGELCRRFGPGPIAVAVEQVKGALVCMLRKYECLHLFPVPSTMSAAMRKALYPSGAKDDPRDADLLLDLLVQHRDRLRHLKPDNEETRRVQNLVEERRKLVEEKTAQVNRLIGYLKIYFPQMLEWFARMDTKLVCEFLERWPSLEELKKVPPAELRKFFRQRRGRHQELTEDRIQGITQAMPAIQDRAVIEAKRAVVQVIAQLLRSLLEGIANLDRKIEEAAGAHPDFFIFQSLPGAGAALAPRLLAAFGSQRDRYGSAEEVQKHSGIAPVTETSGKKKWVHFRWACAKFLRQSFHEWAGHSIAQSVWARAYYQQQRERGQDHHAAVRALAFKWIRIVFRCWQDRVAYDENKYLAALAKRGSPLNFVLASATTV

SEQ ID NO: 83208 - protein, 337 aa, unidentified
MDYFAGLDISMDETHVCVLDREGAVVRESKAASTAEAIAGELSKAPSCRRIVFETGRMAPILFHGLNQLGLPVVCVESRQAYQALKLLATHKTDRNDARGLAHLARTGFFKPVHVKSLRAHALRSLISARKKLVGQRVTLENQIRGLAVVFGVRLPRALTTAFIDQALKASEGVAGLSAAMRGLSAARVAVMTAVAAIDADIRRMTRASAACRRLMTIPGVGQLTALAFVAAIDDPSRIRRSRDIGAYLGLVPRRYQSGEVDYTGGISKCGDGRVRTLLYEAANVMLTRYKGQLKLKDWAFAIAKRSTMRKARVALARRLAIIMHAMLRDGTEFVPT

SEQ ID NO: 83209 - protein, 335 aa, unidentified
MKKIYVGIDISKEKCNLCYRSGLEIVREEECSNDVKALKKAFKAAMKALDASMDDVLVCAEYTGRYIYPLTVACQELDVFLWMDDPTRIKNSMGLTRGKNDAIDAARIAEYAFRYSDKAVRYAIPDAALVSMKNLLADREFLLVDKKRYQSQLTDQKKYMAPGDFKHKNSRWKKIIKSLDEQIAAIDAEIESLIAADPVLARQKELLVSIDGIGDRIAINMIAITGGFTRFQNARQFCSFAGLTPYKYDSGTSVRSKAKISKRANQTMKALLHLAAVGVATHMKEGEYKDYYERKTKEGKHVMCVLNVIRAKLVHRMFSVIKRNSEYTKEYKPAC

SEQ ID NO: 83210 - protein, 311 aa, unidentified
MTLPQDIIGVDIAKGWIDVFHLSSSRHDRIATTKQALARFAKDATGALVVLEASGGYERPVTGALAKAGVGCARVNPRQAREFARASGRLAKTDRVDAEVLARMGRALELRPAPPQDPDRARLSDLVARREDLTATIRAEKNRAGTTRDPWLVREIAALIEVLQAHLKALEAVIAALIATRDRLANEARRLRSVPGIGPSISAVLLARLPELGSLDHRRIASLAGLAPQACDSGLSRGKRRIWGGRADVRRALYLAGFIASRHDPALKAFRARLEATGKPPKLAITACARKLLTILNAMFRDGKDYARQTA

SEQ ID NO: 83211 - protein, 354 aa, unidentified
MPETAQKTIAVVGIDIGKNSFHVVGLDERGAIVLRQKWSRGQVEARFANMPPCLVGMEACVGAHHLSRKLNSLGHVARLMPAKYVRPYSKGQKNDFRDAEAIAEAVQRPTMKFVATKTADQLDLQALHRVRERLVSQRTGMINQIRAFLLERGIAVRQGVRFLRAGLPGILARPPDVLSPRMARVIEDLATDWRRLDARIAGLSSEIEALARQDSGCERLMSVPGIGPIISSATVAAIGAGDAFSKGRDFAAWLGLVPRQISTGDRTILGKISKRGNRYLRVLFVQAAWVVLIKPKSWERHGLKPWIEAARKRLHRNVLAIALANKLARIAWSVLAWGRNFEARKIDDAAAQPV

SEQ ID NO: 83212 - protein, 319 aa, unidentified
MQSKLTFGMDIGKNEVVVACHEGAFAILKMANAVAGLRRWLATVPAGSRLGLEATGGYHEPVAELAYSLGFTVYILNPKDVHFYARALGARGKTDRLDAQIIAAYVAEHSVRLHPFVPLSADEKLLRELARRRATLVNAKSMLQQSLRVLPGFEREARELLRAMGSFADRLERKLAQIAARSSERATLVKRLQTIDGVGTLTSIRCATLFTRVPLHSSDAAVAFFGLDPRPNDSGQHRGRRRLSKRGPSEDRRLLYNAAMSAIRTPTWRPLYQHLRSRGLASTEAIIIIARRIVRIAFAMYRNHSNFNPRLVPRPYCPA

SEQ ID NO: 83213 - protein, 382 aa, unidentified
MQASTVDTPTAGYCGTVFVAIELSQMSWLVTLHSPERDRISRHKLAGGDHAGLLALIEKTRSRAEQKLGSPVRVASCYEAGYDGFWLHRLLLAAGIMNFVFDAASIPVEQRGRRAKTDRIDGELLLRSLMAHLRGEPRVVRIVQVPRVEQEDARRASRERERLVKEQTAHSNRIKALLRLQGMAAGYPRRRDWLRWLAQQRDWQGQPVSPHLLAEVTREHARLMLVWEQLAALEQAQAAQPSPVPEAMAKRRDRLQQLKALGPSLATTLTSELFYKDFDNRRQVAAYCGLPPSPWRSGGIDREQGISKAGNPRARVKAIELAWLWLRHQPESELSRWFNTRTANAGKRARRIAIVALARKLIVALWRYLATGLVPAGAALKA

SEQ ID NO: 83214 - protein, 356 aa, unidentified
MSRLRRALTIGIDLGDRVSRYCVLDDEGNVLFERSAATSKKGLAQAFASVAASRIALEVGTHSPWVKRLLESWNHEVIVANPRRVKLITESTRKDDRMDARTLARLARADPQLLSPIRHRSETAQAHLVMIRARAALVDARTKLVNSARGLTKSFGERLPSCDTDRVSVGVLVDLPPSLQAALQPLMTVARSLTEQIHIYDQKIAQIARSEYPETARLRQVTGVGELIALSYVLTLDDPQRFRRSRDVGGFLGLRPKRRDSGNSRPQLRITKEGDGYLRKLLVQGAQYILGWRGPDTDLRRWGLTLAARGGKNAKKRAVVAVARKLAVLLHRLWVTGDRYQPLRPSQAAPNSSAAA

SEQ ID NO: 83215 - protein, 404 aa, unidentified
MNAVGIDVSKGKSMVAAINLSKEVTLTPREFEHTEIGLEQLIYSHLLTLDGDVRVIMEATGRYHEPIAAALHEAGIYVSVVNPIVIHGYGNNSVRRVKTDRKDALKIARYGIDNWAELREYTPLDTMRQQLKLMSRQYNFYMKHVVRLQNNLIALLDKTFPGANELFSSPARKDGRQKWVDFAATFWHCDCIARTGEGAFALRYKKWCKRKGYNFSEEKAFDVYVSSLGHFTTLPKNAYAKLLITTACAQLTATSKGLATIKAELLRLSALMPEYEQVKALYGVGNITAAQLMAEIGDVRRFDNRNSLIAFAGVDPSTYQSGKYESKSGKSSKRGSAHLRKTLFQVVGTYVKRSPAHEPVFQFIDRKRAEGKHFYVYMTAAANKFLRIYYARIKAYLISLETTC

SEQ ID NO: 83216 - protein, 416 aa, unidentified
MDTMYERCCGLDIHKKTIEACFRSGKKKTHMSFGTTSAELRKLTMWLMENDCQSVAMESTGSYWKPIFNILELSGTDMKIIVVNARHMKNVPGRKTDVNDAEWIAELLQYGLLRPSFIPDREQRELRELSRYRKSLVGERAREINRLQKMLEGGNIKLTSVVSEVTGYSSRRLLDRLLRNDEPMTEDVISGLVHTSLAGKSKELETALDGLLSELQKELLIKVLDHIDDMSRRIADLDDFCRKQMKKYEDALDKLDEIPGIARRTAETILIETGLDMSRFPTAKHFARWAGLAPGNNESAGKRSSGRTTKGNPTLKSTLIQSAKVAARKKDSFFKARYQKIAARRGANRASVAVAHSMLIAIYHILKFGERFKDLGEDYYNQFNKEKKKKYYLKKLTKLGVNLKEATLSISIQAAT

SEQ ID NO: 83217 - protein, 343 aa, unidentified
MMNIAILGIDLGKTVCSLAGLDKDGAVIFRRRIKRFKLLDFLDELSPCIVAMEACGGAHHIGRFCLTKGHEPRLMSPLYVRPYVKVHKNDDRDAEAIAEAATRSTMTFVAIKSEEQLDLQAIHRHRERLVQSRTRLINQARGLLMERGISIGTGRHVFQKALKMLTSKAELDLSPRMIVMFESMASELAALNKQISGLDQEIRSTAQHDNDMRRLMEIPGVGPAIASALVAAVGAAENFGKARDMAAWLGLVPRQVSTGGKAKLIGISKHGNSYLRKLFIHGARTVLHLVQDRNTPITQWVDRLKERAHVNVVAVAMANKMARIAWVILTRGERYNASRLIEV

SEQ ID NO: 83218 - protein, 355 aa, unidentified
MTETVYCGVDFHARMQTIAYCETANGEIQLAQLDHRKDDVRGFYSQLTGQVIVGLEAGGYSSWFEAMLEELGHTVWTGHASEIRRRANWRQKNDRRDAELILEIMLKGDFPEVHRHSRESVEVLRMLRYRARLVKMRTMISNSLQAIAISCGVSERSRMLSLAGQQRLKSARMTPAFKYQTEEWFTLLVPINERIRRVDKWLKEQATVDQRVKLLMTHPGVGVLTALGLVHTLEPFNRFSKQRSVVAYVGLEPMERSSAERKRYIGISKAGSRLLRFLLGEAAQVAVKFDPELKQFYERVGKRRGKQKATVAVARKLLIRCWIMLRNNINYAEFRSRGVEARLAPNNPRPSVSVG

SEQ ID NO: 83219 - protein, 483 aa, unidentified
MESKPEEQNKRATNHPTQHQWHEMNRKQRREITRQIQSEDLSLEVIHPDAGGIDIGNESHYVAVPPGRDNQSVRRFGCTTAQLKAMAAWLKQCRIRTVAMQSTGVYWVAVYDILEQAGLEVYLVNARDTKNLPGRKSDVQESQWLMKLHTYGLLRNSFRPSQEIREMRTYWRQRNDLVQSAGRHILRMQKALTQMNIQLANVLTDISGTTGQAIIKAILAGERNPHKLAEFRDPRVKASEEQIAQSLEGNWQEDLLFVLKQEHKGYEFCQKQMAECDRQLKQYLQQREDRSHGAPLPEEKRKGRLKKKKGNAPQFDLREGLFRMTGTDLTRIDGIDVMTATTIISEAGWDMSKWKTEDHFVSWLRLCPDNRISGNKVIGKGRLPTNNPITIASKMAATTLRLSKTYLGAQFRRLRTRLEAPIAIKAMAAKLARLVYRMLRYGMKYVDQGAAVYELRHRELQIKRLKAKAQKLGYRVTPIPAAA

SEQ ID NO: 83220 - protein, 335 aa, unidentified
MERLVLGVDISKASFVAALWLGKQAQDLGVMANEPGGFGQLHEQVSVYQRQTNAQRIHLIVEPTGGYELALVAFAYSQNWDVSLPNPKQVRDWAKGEGRRAKTDRQDARLLAQFGADKRPQPQQPLAREVSELDTLLKRRQDLEQLLRQEKNRLGELQGRPGVPPAVEHSLQEVIVALEKALAELEAAITQHLRQYDHLQQQADRLLSLPGIGQKNVLPLLVLLYRWHTLTHGQGSAKGLTALVGLDPQPFESGSSVRRTASISHMGNAEVRRLLYMGALGALHGQNPLHDFYDRLVGRGKAKKLALVAASRKLLTWSWAIFSTGTVWNPALLVT

SEQ ID NO: 83221 - protein, 387 aa, unidentified
MPLAADLPAQTQPVPRPAQVLYVSLELSPSKWLVTSLLSGTGRMSKHLVIGGDGNALLRLLAALRTRAEQRAGAPVVIVAIQEAGLDGFSVHRLLEANSVESWVVDPASVAVPRRMRRAKSDAIDGETLLRTLLAFRRGEPRVCSMVHPPSVEEEDRRRITRERRTLLRERIEHTNRIKGLLMGQGVTGYDPLGKDRWARLESLETRDGHALPPRLKAEIGREIERLELLARQIRQVEAERDALAATVPEVAASPAALLLRLKGVGPEAATLLWLEGLFRTFANRRQLAAYAGLAPTPWLSGRIRREQGISKAGNPRLRTAMIELAWLWLRHQPESALSRWFGERVRAGGGRNRRTTIVALARKLLVALWRYLAHGQVPDGAVLKLS

SEQ ID NO: 83222 - protein, 401 aa, unidentified
MTAHRDIAWVGIDVGKTHHWACMVDAEGKMVSSIKVANDEAAIVALITDASSQATQLVWAIDIIGAPSALLLALLARADQSVRYASGRVVAAMSAAYAGEGKTDAKDAYVIAETARLRRDLSVVDTGTDLVRELAVLTGHRADLIADRVRTINRLRDLMTSVFPSLERAFDYSSHKGALILLTGYATPDRIRRIGQTRLTGWLRNRNVRGAADVAARAITAAKAQTVVLPGQELTASIITELATAILGLDDRLKALDAQIEATFAKHPQAAIIRSMPGFGPFLGASLLVGANDLRAFPSAGHLAAAAGLVPVPNDSGRRTGNLHRPSRYSRSLRHVFYLSAQTSMMRAGPNRDYYRKKRARGATHSQAVIALARRRVDVLWALLRENRTWTAAPPPLVQAA

SEQ ID NO: 83223 - protein, 366 aa, unidentified
MLIHVPNHVPVLAMDVHKSTISTGVLEPDSTSPLVDKISTDDESVRRLIARFPEPGRVWACYEAGPTGYELARVLRSAGMHCEVIAPSLIPSRPGDRVKTDARDARHLALLFRAGQLTSVRVPTVAEEAVRDLCRARADMVIDRTRARHRLGKFLLRHGRVWREGTNWTLKHQVWIRAQRFEDPALTATFGHYQATLTAREAAVDAIDADLAQWFARAPFADPVARLAAYRGITELGALTLAAEVCDWHRFPTAAMFMGFCGLVPSEHSSGQRTQRGGITHAGNTHVRTQLVESAWAYKSRPAAGAVLTKRHEGLDPAVVARAWAAQLRLCGKFRRLDERKTNRKTVVTAIARELAGFVWAEMTAA

SEQ ID NO: 83224 - protein, 344 aa, unidentified
MSKVTIGLDIAKSVFHLVFMNQSGRVLRKKKLRRHQMLSYFSQLEPCIVVMEACGSCHYWCRELTKAGHEVKAIAPQYVVAYRKGNKHDYNDAEAIAEASQREGMRFVPFKSQDQQDIQLMHRIRERMIAQQTALSNQIRGLLSEYGIVYVRGVATLVKELPFTLEEADNGLSMLARRQFQGLLNDLRKLREHIKEMDKELKAFSQSQPVCERLMSMTGIGPLIATALYAGIGQGQAFNSGRHLAAWLGVVPKQHTTGDNPRLLGISKRGNTYLRTQIINGARAALRHIGDKTDKVSEWCRACLARMSFNKACVALANKMVRMAWAMLHYQQDYQPGLINKAAA

SEQ ID NO: 83225 - protein, 343 aa, unidentified
MESIHYIGLDVHKKTIAYCIKTVAGKTVQHGTVRSERQALREWQAEIPGPWMGAMEATLFTGWIYDFLKPYAVELKVAHPEMLKAITAAKKKNDRADAEKLADLLRVNLLPECTMMSEELRELRRILRYRNMVVRTSVKMKNKISGLLMEVGASYEKRRLHSRSYFNQLLERVEDVPESVKELLKLSRSNLELFEAVQKKLIKTLRQEDKIKERVECLMSIAGVGEISALTWVLEVGDPARFSNSRQAISYCGLCSAQKESAGKEHRGPISKKRNKHLQTILVEAAKLAPYWNPHLAAVHEKELARGNRNRATLAVARKLVEYMLAVDRRCTPFISEEPPQVV

SEQ ID NO: 83226 - protein, 349 aa, unidentified
MILLGVDPHKSTHTATAVEPESNQQVGTVRIEASLTDYRWLPAWAKRWPQQKWAVENANGLGRHLAQWLIARGESVVDVPAAATSRVRELSRGGRRKNDQIDAAAAATVACLQGDGRDVEPEDHTTALALLDERRVNLAQARVRAVNQLHALLRDLLPGGAPTQLSADLAAKLLRSVRPAGDIETVRKDIAGDLVAEIRKLDKQLTDNAARMQSLVEASGSALMDTPGIGPVLAARLIGRTRRAHRFPTSAAFANYAGAAPVEIASADRARHRLSRSGDRQLNSVLHTIAVVQIRMPKSPGHAYYQRKLAEGKTPKEAKRCLKRRLADHVWRVMIADERKAKSRLSQAA

SEQ ID NO: 83227 - protein, 359 aa, unidentified
MVGIGVGRVVVGVDAHKRTHTLVAVDQVGRKLAERTVAATSAGHLQAVRWAAQWPQPQVTFALEDCRHLTRRLEADLLRAGHRVVRVPTRLMATARRSGRQPGKSDPIDALAVAQAALREPDLPVAHLDGPTRKVRLLADYRADLVVERTTLCNRLRWHLHELDPELEVPSRGLRRYKVIDQLAAHLAGVDGTVAQIARELLGRCRELTVRINQLERDLRDLVRVLAPGLVAIPGCGVLAAATIVGETAGATRFRSRHAFARFNGTAPIPVWSGNTVRVRLNRGGNRTVNWALHMIAVTQARGVGPGAAYVERLLAGGKTRTEALRLLRRRLSDVVYRVLLADEHRQAEPVLASTPQAA

SEQ ID NO: 83228 - protein, 345 aa, unidentified
MKIIGCDLHTRYQQIAMLDQETGELIERRLEHGSGEARAFYAELAAPVRVGVEATGYTRWFERMLAELGHELWIGDAAQIRAAMVRKQKTDARDAAHLLELLLSERFPRIWRPTLEERDLRQLVWHRQKLVWMRNAVGNQLHALAMGEGVCRKKKLFTKKGRVELESLKLGRWASHRRQELLTMLDQLEASLKELDQAVAKQAEQNPAAVLLMTHPGVGPVTSLAFVLTLGPVERFAHSKQVVSYLGLNPREHSSGGRQRLGSISKQGNPMLRSLLVEAGHTAARLDRELRQDYQRLKLRRGSGVAKVAIARKLAVRMYWMLRGQTSYAQLVRMQDSPWATLVQK

SEQ ID NO: 83229 - protein, 429 aa, unidentified
MNYNTQNAKIASITEKTLIIGIDVGSETHYARAFSWRNYEYSKKPFAFSNDEAGFAAFKEWMDDIAEKHEMEVIIPGMEPTGHYWLNLGAYLQEQGMKPVHVNPHHVKKSKELDDNNPSKNDRKDPKTIASLVNEGRFSYPYIPTGIYAEIRNLSNLRIQTQEEITRIKNRMARWFSIYFPEIKDVYRDPDAVSGLMVIKQAPMPCDIRELGVEGVNKIWRDARLKGAGIKRATTLVTAAEHSIGNTEAPRSARKEIRNLLEDYEGYKKRMDELMEEIEKTLSEIPYIDKLMEINGIGIKTVSCFIAEVGDIGRFDNPKQVQKLAGYAIVADSSGKHNGESRISHRGRKRLRYALYEAAISVIGKNKEFKEIHSYYRTREKNPLKKMQSVIAVACKLIRIFYTILTKGVDYDGQKMLNDIVRPEIQPAA

SEQ ID NO: 83230 - protein, 338 aa, unidentified
MRYVGLDVHWRQSTICVLDSRGRKLSTQTIRGGWSKVLEELGKIKKPFAICFEASSGYGYLFERLATIARRVVVAHPGQLRLIFRSKRKNDRVDAEKLAKLLFLDEVPPVHVPSVEVRSWRSMIEHRRKLVAEQTRTKNGIRSLLRSQGIEAPRGLWTRRGLTWLASVQLATELDTLQRDIMRERLESIASMIQRVERVLNRKGTAHPGVQLLRTIPGVGPRTGEAVVAYIDKPDRFHSNKAIGCYFGLIPKQDASGRSNRLGHITREGPSVVRSLLVEAAWQGIRRCPQIREVYERIMRDDKQRKKIALVATAHYLLRAMLAMLQTGEVWRYSEKAA

SEQ ID NO: 83231 - protein, 344 aa, unidentified
MKKNLFFIGLDISKADFAASIYKTPGESIVTKEAIPNDRKGFEMLLLWLNDYHINKKNCRICLEATGVYSQAIAYYLLFQGFPVSVEPPLKVKRAFDPVGHKTDPVDSKQIAEYAYRFQDELTSWQPRDEILEKIRQLLSVREQFTKQKVALDNSLQAYSKQRVQVALIKKAQKETLNQLKKQIARIDKELEKLIKQDPQIFQRASNLDSIPGCGMLLAAHLLVITENFTKIQNSKRLASFVGIVPYQHQSGTSVYKRAKIRHFGPGPSRKLLRLAAQSVATHNATFRRYYLRKLDQGKPKPLVLNNIANKLLKIACTIIRNNTRYIKDYRSINPMYLKSLKSA

SEQ ID NO: 83232 - protein, 408 aa, unidentified
MAAPKDVSVRIGLDVGKEDHFADVPGDDGERLFSRAVANDQADLEALLDQAARHGTPGLVIDQPGSIAQLAMAVAASKATPVAYVPGLVMRRAADLYPGEAKTGRRDAYVIADTGRTRRRQVHWLDAGSDEQLAELRVLNGHDLDLAADQNRLASRLRDMLTATGPALERAVGPRLHQAGIRDLLAAYPTMTALRAAGRDQIEHAIKTRPPRIAAKASTAVMAALAAQDLTLPAEAATGRVIADLAGELSRVTARRDALAAQIEDAFLAHPFGEPLASMPGIGPRTGTRILAEISDGAAFADSGKLAAYAGLAPVSRQSGKSLDSESRSRRGNHRLTNAMLLAASASLRDPASKASYDRKRADGKRHNAALTCLARRRCDVIPALLRTGQPYQPQRPGTTGDNPPLAA

SEQ ID NO: 83233 - protein, 348 aa, unidentified
MTVVAEQFEHVVGIDTHARTHTYCLVHAPTGALVDTATFPTSPAGNARAVSWIARRSKKTTVLAAVEGTSSYGASITALLTETGISVAEVRPAARTSHAHTGKSDLLDAEAAARYALAQDLEHLSHPRQTGDRTALRVLLTARSHIDQQRTANRNALNALARSTDLGIDARKPLTDAQVKTIAAWRTSRNTGTLRVLRSEAKRLATTIGEQTDLLTVNHRELAALTEKLAPGLQELPGVGPVTGAILVTAYSHRGRIRSEAAFAALGGIAPLPASSGNNTRHRLSRSGDRQLNRAIDVIVRTRMSYDTPTRTYVERRRNEGRTPREIRRCLKRYVARSMFRQLQARMT

SEQ ID NO: 83234 - protein, 315 aa, unidentified
MAEVSFPSQVLRGCGIDVHLKVVVATIKGEGIRKETRSFDTFTSSLTELKEWLLQNGITHVAMESTGVYWKPVYHVLEDAIPNVWIVNARHIKNVPGHKTDKMDNEWICKLLLAGLLKPSYIPPKEQRQLRDLTRYRNKLIQHVSSEKNRIMRILEDCNIKLSSVVSNTSGTTATKLIDWLCEGKFITLQDVESIYRMSATPEELLKACTGFVESHHVYMLQMIRRDIDQTTVLIDELGAKIRDVLSKYDNAIELLKEIPGFSDKVVEDLVAEIGFDMSKFPSEKHLASWAGICPGNNESAGKKKAEESPTETNK

SEQ ID NO: 83235 - protein, 349 aa, unidentified
MHHITVLGIDLAKHVFQLHGTNEKGEVVLKKRIKNRETFSRFIAELPPCLIGMEACGSAHHWGRRFQSYGHQVKLMHPHYVKAFVQRNKHDAADAQACNEAARQGVIKSVPVKNTEQQAILMLHKLRARLVANQTRLSNQIRGCLYEFGLIIPQGKAALLQRIPEILEDTENGLPDLVRRLLSDLSEEYRALKHQVSIYDKQMKSLGKTDESCQRLQSVPGIGPITATAFVATLSGYEFDKGRQAAAMLGLTPKEHSSGGTRRLGRISKQGNRYLRCLLIHGARSVVLTSKHKTDRLSLWVQRMVREKGYNKAVVALANKNARRAWSILANGGSYEADFADYFEYQHAA

SEQ ID NO: 83236 - protein, 419 aa, unidentified
MKVRYGSVAEDAVWAGVDTHAAANWLSVVDARGSELFSGEFATDPEGYRRLCDEIRRLGSPVAAGVECTGTYGAGLVRAMAAYGITCYEVITPGRPRRGPGCDKDDAADALRAARQALSGENLAVPKSQDGWVEEVRNMAVAREELVKQCTSLANLALATVRKGPDEVRERLERLGTAKMMGVLAGWDEAEADPACDAVMLSLAALGRVWAEARRSARLLEGRIEKALKAGNPALASMYGCGPISAAMLAMAAGDNPERMGSEASFAALCGVSPIRASSGKVKRHRLNRGGNRNANKALHIIAMHRMRTDPRTIEYVERRRAEGLSDREIRRCVKRYIAREAYRLIMHPYDVPIEGKGPEMRAERIAAGVSQKDAAIALGVTASTLCDLELGHHQFRELALRYRQWIDDGFPLEAGIAS

SEQ ID NO: 83237 - protein, 316 aa, unidentified
MAETFVGVDVSKAKLDIFMNGETWQVNNDLSGISELIVRLKAEPPSLIVLESSGGYESFALGELYAAGLPVARVNPGRVREFAKSIGQLAKTDKLDARILARYAELVRPALARLPDEEEQQLAALVNRRRQLVEMCVAEQNRLGTAPKKLRPGIRTHIDWLKAEIHRIESEMDDFIQQSPLWSEKDALLKSVPGVGDVTARTLLSELPELGELDRKEIAALVGVAPFNHDSGRMRGKRRIRGGRTSVRNVLYMATLTATRCNPIIRTFYNRLVQSGKEKKVALVACMRKLLTILNAILRTHQPWRAPLFSCQALDI

SEQ ID NO: 83238 - protein, 405 aa, unidentified
MKQPATLHYAGIDWATRTHAVCVVDQTGAVRARFQVPNTGKSFAGLCKRLAKLGVAGVAIERPDGPLVEAMLDAGLKVVVITPRQVKALRSRYAASGAKSDPADAYLLADVLRTDGHRLAPLTPDSEPTKVLRALSRTRKDLQEARVALCNQLTAQLERCFPGAIGLFADLHSPVAVAFLRRYPTSHAAAGLTQAKLAAFLRRLHYPGRTPVATLLGRIQTAPLSGIGPAEAAGRAVCVLALLDAIQVTARQERELEAEIIERLEVHADAHVFTSLPKAGHGVRAAALLGELGDVRARFPDNDCLAALAGAAPVTITSGKRRVVKFRWACDKKLRNALIDFADDSRHASPWAAKVYADALARTGRHPHAVRILARAWIRVIWRIWQDGVAYDPAKHRGAVRLLAA

SEQ ID NO: 83239 - protein, 388 aa, unidentified
MQTVADRPEAPTAIRTDLGAIFVSLELSRSTWLITSLSPGGGEKMSKQVVRGGDVAGLLERFARLREKARARTGKVFPFVVIQEAGLDGFWIDRALQNEGIESHVVDPASIATSRRRRRAKTDGIDGEALVRALLAYKRGEPRVCAMIKAPTPEEEDRRRLCRERKVLIVERVRHVNRVKGLLFSQGISGYEPLRRDRRRRLDTLQTGDGRLLPVHLKAQVCRELDRLELLLEQIKAVEAERDVLLAAQQVAAPAPAAMLLDIKGIGPEFAAILWSEGLFRHFDNRRQVASYAGLAPTPWQSGSVDREQGVSKAGNPRLRTTLIQLAWLWLRHQPHSALALWFEERVRRNGGRLKKTTIVALARKLLVALWKYVTAGVVIEGAVMKRT

SEQ ID NO: 83240 - protein, 343 aa, unidentified
MNFVGIDLHKKTISVCVVNQERKVLTRKTLACLPAEKIREFFAALGTFQAVVEATASYEWLWLLLEPLANRLVLAHPKKLCVIAESTRKSDRLDAQVLAEFLALDMIPEAYRPTPRQRQHRALVRQRFYLRKRIVSVKNRLRRILSDYNADRRDLFSPEGLAFLKGVAVSATDRFILNQLVAEWEGHEQQLMQLTKELKAFAKKAPQPEQEARAVLATIPAVGPVTIDVVVSELGPIERFRSAKRVVAYAGLAPGQRESAGHSRDLGITKDGSRYLRWALVEGAWRLIRRSAHWRAVYEGIHKRRGKKKAIVAVARRLLTVMAALLRSGQAYAFAAEPAGARG

SEQ ID NO: 83241 - protein, 424 aa, unidentified
MASHEFAAFVGIDWGDQKHAVCLRTEGVEVEHELSQKADEIDAWATELRTRFGGRPVAVCLEQSRGPLIYALLKYEFLVLFPLNPLQATRYREALYPSGSKDDPLDARLLCLFVETHHGQLRAWKPDDEATRLLRLLAEDRRRFVDQRTAHKNQLRQRLKEFFPLALELLRSGDLEDEWFLQLLIKFPSHAELRRAPPRTLERMLPKHHRLPDDESLDPRVARIRAAVPLVTDGAVVKAARLQVMELARLLLRLNTTIAEYDHELSAELARHPEAELFRSFPGAGAALLPRLAAAFGTDRERYADAQDLQQLSGIAPVQIRSGKSCSVRRRRACPKFLRQTFHEYADHSRKRSLWAKAYYRMLRGRGLRHNAAVRALAFKWLRILFRCWQTRTPYDEHRHLKQLRLKQSPLLQYLDLPDPVEQT

SEQ ID NO: 83242 - protein, 343 aa, unidentified
MAQQMIIGIDLAKHVFQVCMVTPTGTLKTNTTVARGKLLTFIARPPPALIFMEACGGAHDWARRFCALGHAVRLLAPQYVTPFRRGQKNDPNDALALTEAGQRPHIPTVPIKTVEQQDIQALHRVRERRMKNRTAVVNQVRGLLLEYGIVIPQGIARFRKRLPRVIEEADHGVSFVLRDLLQSLQSDLHALDTRVVEVTCQLTRLSHELEACQRLQEMEGIGPLSATALVAALGNGHDFQTGRQVAAWLGLVPRQQSSGGTTRLGGITKGGNGYVRRLLMHGARSVIGHVRDKPDAKSAWIRQLVTRIGVNKACVAVAKKMARVAWALLHTGEQYRKPVVLLA

SEQ ID NO: 83243 - protein, 343 aa, unidentified
MQIVRIGLDLAKYVFEIHGVDPQGKTVVRKTLRRHAVSTFFANLPPCLVGMEASNGAHFWANALSDLGHDVRLISPQFVTPYVKSNKNDRNDAEAICEAVGRLSMRFVPVKSAEQLAVQAVHRIRSRLVADRVRLVNQIRGLLGEHGVVVAKDIGNLRRALARIVDDEDRVLNPLARALMAELREELAELDARIGGYDLKIRELYRNSEICQRLGKVEGIGPVTATALVAAVGDRSSFKNGRQFAAWLGLVPKQRSSGGRARLFGISKRGDRYLRTLLIHGARSALGRVRDKQDPRSLWLGRMRQRRHPNIVAVALANKNARIAWSLLTSDSVYDVRLSVRAS

SEQ ID NO: 83244 - protein, 468 aa, unidentified
MVGPGGVVSFTANGGTLVSVHPTDPALARVQVGIDAAVVADHHVTIRATLSDGQVQLSHFHVPPTIAGLSRLGERLSVFPGVVAVAEPTSMTWLGLHVALQRAGCDLSLVGTRHSARLRGAISGKSKSDVIDADVLSLASDVFALSPLDPPLPAELALRRAVVRRGKLVIDGNRARRRLISLARWAFPDVWTAFVGSWPTAIAVLTRWPDLRALAAARRSSVTAVVAAHTRGVPGVAERAGAIRLAAAAWVEFWDGRLDLEALAWETAEHLRDITIASEQIERATTQAQRYWAGLYGDDPLLLSLPGMGPMTAPTIRAFLGDGTRFVSAKAAASYVGLTPSTWSSGTVVQPSRAITKEGPAVLRLAFYQAANGARRVDPQLAAYYQHLMVERGHCHTQATVAVARKLVERTWTVLTRGQPYQFRDATGQAVTRIVAKDQARHDHAVPDDVRARARARSAATHRSKLTK

SEQ ID NO: 83245 - protein, 426 aa, unidentified
MNYTQNQKISQVTETTLIVGVDIGSETNFARAFNWRGQELSKKVFRFNNSQEGFQSFLAYINTYTTIASAQQIIVGCEPTGHYWFNLARYLEENNIKLALVNPYHVKQIKELDDNSPKKTDLKDPKTIAKLVVDGRYSYPYLPEGIYADLREAVSSRERIVKELNAITNRIKRWLKIYFPEYLVVYKNFSAESGLTVLETVPLPQDIVQLGPEGVNQLWRDKKLRAVGMKRALTLVEAAHNSIGLPGGNCARMEIQLLLEDFRTKQSQLEMITEVLEEETLSVPYADKLLAIKGVGLITVAGFLAEVGDVRRFDSPKQIQKLAGLEVKENSSGKHRGRSSISKRGRKRLRKILFQVMLPMIQNNAEFGEIYQYFTTRQKNPLKGKQAIIAAGCKLIRVFYAILKHGVDYDPGKLRADMIHPELEAA

SEQ ID NO: 83246 - protein, 358 aa, unidentified
MSIVAHLYNFFIGVDTHARKHVYTIITNTGILVATGSFPTSRAGIKRALAWAGRWTKGDLDTLWVVEGTASYGAVLTGHIAATEYPVVEAGRMDAKARYGVGKSDELDSYRIAKSVLALHTDQLRWPRQGEGVRQGLRVLLAARDAMTTERTRMINSLTALVRIVDLGIDARNSLTDTQFVEIAKWRDRKEDIGLATSRDEAVRLAKRVLDLDDDLQDNHDKLAELVEASPASVLLAEPGIGTFTAAVFFTAWSHPGRVRNAAAFAALAGANPIPASSGNTQRHRLNRGGDRQLNRALHTVITNRMIHDERTRDYVAQRFGEDPTKKSKRELKRKLKWYLARRVFKILNGLETIPTPA

SEQ ID NO: 83247 - protein, 341 aa, unidentified
MGEVSTIGLDLAKHVFQVHGASASGAVVIRKKLRREQVLTFFAGQPRCQVAMEACASAHHWARAIGELGHEVRLIPPAYVKPFVKRQKNDMADAEAICEAAQRPTMRFVAVKSEAKQASAVIFRTRDLLVGQRTQITNALRGHLAEYGFIAPQGLSHVERLIAEVEDPASGIPDAARSCLVRLVGMLRHLQTEIAELDREIAARAKADDLARRLMTVPGIGPVIATAIEALAPAPETFRSGRDFAAWVGLTPVQRSTGGKERLGRTSRMGERTLRRLLIIGASGVVRWAKRKGVPPGSWLGRMLARKPPMLVIVALANKIARIAWALIAKGGVYRAPAVAA

SEQ ID NO: 83248 - protein, 455 aa, unidentified
MEKQIPTLPVVNPQAAGIDIGSREHWVAVDQNKENVRSFGVYTQDHQQLIDHLRQHGITSVAMESTGTYWQTLFNALQQAGFAVLLVSGSQTKNVQGRKTDLIDCLWIQKLHSLGLLSGSFLLSDALQELRTYYYHRQHLIEQLATYTHKMQKALRLMNLRLDVAIRDITSKSGLAIINAVLGGQRDPHELASLVDIRMKRSKEEIAQSLQGNWRQEHLFELKAALGFYRQYQHALLDCDQVIEQALRRNIPAELIIQPAPKTPETAKKKSSKNAPSFAISGLAYQYFKTDLFAISGVSHSTVLCLLTTLGKDIHKFGSAKSFASWLRLVPNNKISGGRIISHRTPTGKSSIAIALRQAANSIGNQANHELSPFFKRIAYKKGRVAAITATARKLAVIIWNMLTKEEPYKKAQVMDKAQKTKAAGLRQVQRRLVALDLSQDELMRLFAKASLSVE

SEQ ID NO: 83249 - protein, 349 aa, unidentified
MAMVAESVDAVIGVDTHTDTHTACLVDPTGRQVTAVTVAASPDGYAELLAWAVEQAPGPRLLWAVEGTRAYGAGLSRLLLAAGQRVVEVGRPERAGRRPGGKSDPIDALQAAREALTAAHHATPRADGDREALRILLVAREHANSTRTAAVNVFKALLLTAPDQLREPLRHKSTPRQTAACAVLRAHARHSASEGVMRQTLPGLAQQIRLLDKEIRANERQLHELVTALMPALLAEPGVGPVSAAHLVVAWSHRGRCRSEAAFASLAGVSPLPASSGRITRHRLNRFGDRRLNRALHTIVNWRMIHSHQPTQHYLSRRRAQQKTDAEIRRCLKRYTARHLFRLMEHYNS

SEQ ID NO: 83250 - protein, 411 aa, unidentified
MNPVVGLDVAKGESQVQAFLDKKKPYKRSFKVAHTIEGLESLHQYLREIENVTGIRPPVVLESTGHYHTPVVQYFEERGYLLIIVNPLISYRAKSSSLRKVKTDLIDARHLCELYYKEDLEPYKKRGIQLLNLRNLSRQHANITGIYVQTKLQFQAVLDQVFPEYRGVFGDLYSVVSLLTLLEFPTSEDISAVDEETVANRINELCPSRSRKWANTQAEKLMAASARNPFQRTLYQSHILSLEMYIKMLLEYQKHLSKFEEEINALAKEIEEYKIIQSIPGIGEKIATTIISEIGEIDRFNHPKKLVAFAGIDPSIFESGKFKGSVNRITKRGSGRLRHALYMAVRCAIRDCRKKKTTDEIIPRNKRLREFYDKKREEGKPFKVAVIACANKLLQWIYARLQNNSTFQDLT

SEQ ID NO: 83251 - protein, 339 aa, unidentified
MNTTQNSPKSKIVKVIGVDLAKDHCDVIGYDENGKICLRLDGCSYAKLREILANLPQAVVLMEACKGSMFHARSIADLGHEVRLVKGTDVKALRNVNHKNDLRDAAYIANLYFVPGIKYVYIKNQQQQSLQFLQNEYKSLQELRIQVGNQIHAGLEEFGCPVRKSSKFIKTRMVAHLEKHAELIPEDVMASFKRRREIWLNLLQQEEEAKRRLEQVAATDANAERIMTVPCVGPQTAVGLLVHVGVDFGRFKNSRQFAASLGLVPKQNSTGGNNTLNHITKCGPKSLRSNLVQCAQLVLMYAEKWKGNFGDWVRKMRDSGKKHGVIVCAIAAKDYEGNY

SEQ ID NO: 83252 - protein, 404 aa, unidentified
MFVVLGGSSLVMLGRGLDRLAVQSLKHGGRAVVEHTTTYVAFDNSKDTLAVAIAEGGLRGEVRFWGRIPNQPEAVRKLVAKLAAKHPVLSFCYEAGPCGYGLYRQILGLGHPCLVVAPSLIPTKPGGHIKTDRRDATVLASLFRAGELQGVWVPDAEHEAMRELIRGRQTAMQEVRRSRQLVLSFLLRHDRVVPTRQHWTRAHRVWLARQSFSHPAEQIVFEELIQRMEAACSRQTRHEDVIRRLLPTWSLAGVVTAIQSMRGVALMSAVTLVAEIGDFGRFTSPRQLMAWLGLVPKEHSSGRKVARGNITKAGNTRARRVLVEGAWTYRLPARMGEDITRRNEGLPETIRATAWKAQVRLCTRYRRLQRTGKPQNVIVVAIAREMAAFVWAIARMAQPVIGAA

SEQ ID NO: 83253 - protein, 405 aa, unidentified
MDIQPIFRCAVGMDVHLAVIHVCVILQEAGCEPEVHRRQFGAFQRDRRAMAEWIAGFAPDTVVMESTGIYWKSPYAALEQVGIRALVVNAQHVKKVPGRKTDISDAEWLAMLARAGLLRGSFIPPEKLRNLRHISRYHHRTTAMLAAEKNRLVRLLSDAGIRLTAAVSDPHGVAARAMIDCLLDGGTPEQALRYAGRLKAPPEELLASLQGELSEEHLFVARMIRQHIATLQTQLADLEHRLFDELKPYEAAVQLLLTIPGIDRLAAAKLLVEIGVDMTAFATPDRLSKWAGVCPGNHESAGKRKRGKTAPGNRYVRAILCEIAWAASRTTSQFKSKFQGLVIRRGTKRAIIALAHKVLKTVFVLLSRQVPYRDSTVDYEALVVQRNAPRWIRQLKKFGYLPKIA

SEQ ID NO: 83254 - protein, 399 aa, unidentified
MISVGIDVSKGKSTVCFMKPYGEVVAGPVEISHIDSELKMLVKLIKSMNDEVRIVMEATGNYHLPILSFMKDQSLFVSVINPYKMKQFRNQGLRRVKTDKADSVTIAQYGLYNWDSLNDYVDSGGSYKELSILSRQYRHYMEIHITALLGLTHLLDYAMPGIKQLLSTWNPENGKDKLSDFVEQYWHYDVITKKTEQQFVESYLKWAKKKGYHCNRNKAAKIYSLAKEGIPTLPADQTTKMLVTQAIEVLRRVDETLNTILTRMNEIAKSLPEYPVVRAMGGVGDVLAPRLIADIGDVRRFHSGKALIAYAGIDAPPYQSGSFIGTNRSISKRGSPLIRKTGYEVMRSLKSHEMPEDDAVYRFILKKEAEGKPRKVAKIAGLNKFLRIYYARVMEVYNN

SEQ ID NO: 83255 - protein, 417 aa, unidentified
MEVLYPRCAGLDVHKDTVVAAVRLVEEGSVLREVETFATTTPGLIALSDWLERHACPTIAMEATGIYWRPVWQVLVAEGSGEERTLILANAAHVKNVPGRKTDVADAVWLSDLLAHGLIRPSFVPDEGTRAMRDLLRTRKQLVREQASHVQRIQKTLEDANLKLASVLTDIMGQSGRAVLAALAAGETDPDRLRALVAPRVKATPEAIRAALTGRPGPHHRFLLGLHLGQIDALAAAIAAIDAKVERDLGPFREAVALLVTIPGVAELTAEVVLSEIGLDMSRFPSAGHLVSWAGLCPRNDESAGKRRSTRLKKGAPWLKTALVQAAWAAARKKQGYFNAQFQRLRGRRGARKAICAVAASILTTIYHMLNDGTVYTDLGPDHFHRNQPITRAKALVRQIERLGFACSLSPAVPVSI

SEQ ID NO: 83256 - protein, 335 aa, unidentified
MQIYGIDLAKEKFDVSFFDLTSKKVSNQPSHKVVTNNLKGIGKFLKDLPSDAVLVAEHTGVYGDTLLKCCMDSNVKIAFVGGYVIHRYRATPDRAKTDVLDCALLRDFGERYPDKLKYKTFPEEALYELRQLARHREMLVEQRKQLITADKSEDCRPIRSLAVKRSMDRLKEMLDTEIAETEKEMLKVINGHDSIHHNYEIIKSVNGVGLITAVELLVKTDNFTKITTARQYSAYAGTAPYEKSSGKMDKGAHISKIGNRRSKTLLYICAESARLHNKEIKLYYERRTLIDKKPRHYVLNAIANKLLRIIFTLVEKGEYYDANFIRQDPRVVKHN

SEQ ID NO: 83257 - protein, 412 aa, unidentified
MDRVVERCCGLDVHKASVTACVGVAAGGEVRREIREFATTTRGLLLLRDWLVSFGVTLVGMEATGVYWKPIYYMLEDDFECWLLNARHLKNVPGRKTDVKDAAWICQLVEHGLVRPSFVPPKEIRELRNLTRYRKAQIEERTREVQRLDKVLQDAGIKLSSVATRVLGASGRAMLDALIDGTTDPEILAELARGRLRSKIPALEEALEGRFSSHHALMVGRILSHVDYLDESIGELSAEVERVVAPFSEEVELLDTIPGVNRRTAEVLIAEIGADMSRFPTHAHLASWAGMCPGNDESAGKRRSGKTRKGSKWLRGALTEAAHAASRSKGTYLSAQYARLRGRRGPKKAAVAVGHSILVIAYHMLERKVPYEDLGEDHFQRRRCDQAYAKRLVRQLEKLGHGVVLESLPQPA

SEQ ID NO: 83258 - protein, 460 aa, unidentified
MNRKRSKSRVDRTLPMMHPNAAAIDVGATIHMAAVRADRAPEPVRCFGTFTTDLHRLVDWFTECGVETVVMESTSVYWIPIFELLDARGFTVFLVNARDAKHVPGRKTDVSDAQWLQRLHSYGLLRASFRPKGQIAELRAYVRQRERLLQYAASHIQHMQKALTEMNLQLHHVVADITGSTGLRIIRAILAGERDPEVLACLRHYSCHSSAETIAKALTGSYRTEHLFALEQALALYDAYHEKASACDVRIEAVLKELSIHRGRDIGSVPPASRRQHRTDQANALAFDVRAALFALLGKDITRIDGLGPYLSLKLIAECGDDLSSWPSAKHFTSWLGLAPSNKVSGGKMLSSRTRRSGGRAAALLRLAAVTVGRTDTALGAFYRRLSSRIGKAKAVTATARKVAVLFYNAVRHGMEYVDPGASSYETRYRMRVVNNLHRRAKAFGFVLQPLEPKADAVVS

SEQ ID NO: 83259 - protein, 428 aa, unidentified
MLKQNTEPDPAPDFAAFLAIDWADEEHAFHLQVVGQSKIETGTLEQKPHVLGPWVAKLRERFGGRPIAVGLEQSRGALIHGLMSYDFLVLYPIHPTTVAKYREAFKSSGAKSDPLDAGQILEILTKHQDRLHRLNPDTVETRLLGRLVEDRRKAVDLRTTHVQALGANLKEYYPQALELTNDNLSSRLAGDLLIKWPTFEDFQQAKPSTLKRFYYGHNVRSPEVIERVLTLAQKSQALTTDPAIVESGRRLTQMYARLIQALHPAIADYDQRIQQVFNAHPEAKLFRDLPGAGPALAPRLLAFFGTDRSRYAAAFNVQSFTGIAPVTKSSGKSKVVYARAACPKFDRQTFHEFSRLSVTRCQWARNYVQYYTDKGKKYHTIVRALAYKWIRILFKCWQERTPYNEDKYLETLKLRGSIFATWHLQKKS

SEQ ID NO: 83260 - protein, 402 aa, unidentified
MISVGIDVSKETSTICMLRPYGEVVSSPYEIEHSLSAAKALRDRICGIEDEVKVVMEATGRYHLPLLNALKEAGVFVSIVNPLVMKKYASTAIRKGKTDKIDSVRIANFGIDNWFKLVDYSMPDKIYAELKLLGRQYSHYITMKVASKLSLSDILDRTMPGIKKLLTWGTRADVPTKDKLCDFVEEYWHYDNITKRSESQFINSYCRWAQKKGYQASEAKAKKIYAMASRGIPTLSSSAASTKMLTLEAVRVLREVNRTLESILAHMLVLASALPEYSVVREMSGVGIVLAPRLISEIGDVRRFHSGSALVAFAGIDSPPYQSGNFTGTQRRISKRGSTLLRKTGYEVMKCLKTVKPTQDAAVYQFMIKKELEGKPKKVAKIAALNKFLRIYYARVMEVYES

SEQ ID NO: 83261 - protein, 407 aa, unidentified
MRPIYERCCGLDVHKKTVVACRLTPEGSRTQTFGTMTDELIRLREWLLEAGVTHVAMESTGVYWKPVFNLLEDHGMELVVVNARHVKAVPGRKTDVKDAEWLAELLQHGLLKASFIPDRESRERRELVRYRRSLVEQRAHLVQRVQKLLEGANIKLGDVASDVMGVSGRAMLQALAEGVDDPAAVAGMAKTALRSKIPELERALTGSVRHHQRFLLRSQFRLLESIEAEIASLDEEVAERMRPFQVALERLDEIPGIGLRAAQQILVETGTDMSRFPTSAHFASWARVCPGNNESAGKRHHATIGGGNRRLRNALLEAAWTVSHSRKPTFFTARYRRIAARRGKKRAAIATAHSLLVAIYYVLKDGVVFQDLGPASFERRNRDAIVRRSLHRLEALGYRVTVEAMTA

SEQ ID NO: 83262 - protein, 397 aa, unidentified
MKGGVVMTRFIGLDIAKYKHDCFIMDENGNVITDSFSFSNDAEGFNTLLNELQKLDPIQEKRIGLESTGHYGSNLKIFLETNGYSFMEFNPLLVHRFFNGQTLRRTKTDKVDARKIAIYLQSKEYKPNPNSSYHLECLKSLCRLRWSLVDERSLQLVRMTNVLDKTFPEYKAFFEDSLDSATSLYLLENYPGASKMARMSQKSYKKMASELRHAISYARFCKLKDLAKNTIGNEDEILMFELSVYLELFKELDKRINEVESKIQKEFSLMKCHIQTIRGISDITAASILSEIGDINRFDSPNQLQAYAGMEPSKNQSGTHDSGGHMVKHGSSHLRRYLMMAAGNMLKFNPVLYDYYIKKRDEGKTHNVAVSHVARRLIRIIYYLEKNDSDFDIEKMR

SEQ ID NO: 83263 - protein, 470 aa, unidentified
MTPRIEKKLRQARSREQMHVTHRHAAGIDIHPSVHWVAVPPGDAPPAAADHPPHLPAHVRSFGTCTADHIALAKWLTECGVTTIAMESTGIYWIPLFELLESRGFEVLLVEPRQSRHAPGRPKSDVLDCQWLQRLHSYGLLTASFRPADQIIVLRSYLRQRQMLISYSGQHVQHMQKALEQMNVKLAEVVSDVSGVTGMAIIRAILRGERDPLELAKLRNDHCKRTQGEIARALYGNWRAEHLFALRQAVTLYECYRQQLRLCDEQLQAYLSTFTDRSEGRPRPPRQVRRVRERRSNDPAFDVAPWLYRMSGVDLTVLEGIDASTALVILSEVGPDVSRFPTAKHFSSWLGLSPLHRGTGGKIKSRRVKRGASRAGRAFRLAVLGCHHAKHALGAFYRRIQARAGSPKAIVATARKLAERVYRLLKYGAEYVCQEMEAYEAAYRKRLIKGLARRAAELGYRLELATPNGS

SEQ ID NO: 83264 - protein, 456 aa, unidentified
MKIPQSTIRLLTGRLVKILLNREVSTMKSNTQNAKIEAITEKTLVLGIDVGSETHYARAFDYRGIEYSKKPFKFSNTEAGFVTFKEWILDLKDRHEKEKVVPGMEPTGHYWFNLGKFLQDNEMKPVLVNPHHVKKSKELDDNNPTKNDRKDPKVIAGLVREGRYMIPYLPDGVYADLRTASNIRFQLQAELTRIQNRISRWFNIYFPEYKTVYGKPDAKSGMLILKAAPLPEDILTLGIDGVNQIWRDAKLRAVGKARAKTLIEAAGHSVGSKEGAMSARMEIRMLLEDYESRNMRLQEVMVLIEELVKGIPMAEKLLEIKGVGIRTVSGFLAEVGDISRFNNPKELQKLAGLALVENSSGKHKGGTTISRRGRKRLRYLLFEAAMSLVAKNPEFRELHNYYTTRRRNPLKKMQSLMAVATKLIRVFYAMLTKGVDYDPKKMVSDIRRPEAYLQAA

SEQ ID NO: 83265 - protein, 359 aa, unidentified
MNSNKYVGMDVHTATISVAVREAAGKLIMESVIEAKASTILQFIQGLRGNLYVTFEEGTWAAWLYDLIKPYVTNVVVCDPRRNALLKEGSRCDRIDARKLAELLRVNLLRPVYHGEKGLRTLKELARAYLTISKDLTRVMNRVKAIYRSWGIPCAGKSVYNPRHREEWLSEIAHAGVRCRAELYYQQLDALVVLRKQVRQELLAEGKKHQAWKLLRSIPALGPIRAAVLMAIVQTPHRFRTKRLLWKYSGFGVVTHTSADHRYVEGQLERSKKPVSVRGLDPGHNHPLKDLFKGAAIQASTREGPFREFYETLVAKGMRPEMARLTLARKIAVIAWVVWKKGVAFDAKYLKPQTALECF

SEQ ID NO: 83266 - protein, 366 aa, unidentified
MGNYDYTGKQVYMGIDVHKKTYICVSVSEGYIVKKDSMAAKPKVLIAYIKNNFSNSEIETAYEAGFSGFHLHRELTKAGIKNIVVNAGSIEVASRDRVKTDKRDAKKIATQLAAGRLKCIYIPTLEQESKRTTTRLRDSIVKLRHQIGQKLKSLLFTQGLIGDTDDTVLRKKWVNNKVKQVKELNYPTGFYYTIKNYANQWLIFTSDLFRIKKELLAMQSEEENKLLSIYKSVPGIGDITALKLKDELGDMSQFSNEKKLFNYLGMTPTEYSSGENVRYGHISRQGRAVLRRIFVESAWIAIRKDLDLMKIYERIKKTRGAKKAIVGVARRLAGRVRVCLKKEEVYKINFLKTENANIVVEHRISA

SEQ ID NO: 83267 - protein, 325 aa, unidentified
MEHYAGIDVSLESASVCVVDASGRIVREAKVASEPEALITWFGKLGVEVSRIGLEAGPLSQWLYAGMREAGLPVELLETRHVRDAFKAMPVKTDRNDARGIAQLMRLGWFRPVHCKSLPAQELRAVLTARKLVQGKRHDIEMSLRGILRGFGLKVGPTTPRSFEGRVRQLVEGHPTLLAIADALLLARATLAEQLGKLQKRLVSLASDDTRTRLLMSTPGVGVLVALTYVAAIDDPARFRSSKAAGAHFGLTPKKYQSGETDITGRISKIGDASVRTALYEAANVILTRPVKGSCGRPNSRSLLFYMAAAALSAANCVPSASLTE

SEQ ID NO: 83268 - protein, 420 aa, unidentified
MKVVYQTCCGVDVHKSFLVATIIKTSSGVQPSYQKKRFSIFNNSILEFKKWLLDNSCRDVCMESTGKYWIPVFNLLEDEINVTIANPKWVKAVKGNKDDTKDSKWIGDLFRLGLVPGSYIPCKPIRILREFTRYRYKLTSCRSSEKNRFQNALTVCNVALDSVVSDIFGKSATSVIDYLLKQSDNSINHEEISSRLLRSLKKKSESVLESIEGYQMTDAQKYRMRLVHAHMDYITSTLADIDSMIDSLMEPYENAVQLLCTIPGVDRSSAISIISEIGTDMTQFSNSKRLCCWAGLTPGNNESAGKKKSVRITRAGVYLKPALVQAAHAAVKSNKSPYYKAKYERIMKRRGKKRAIIAVARMILTAVYHMLSTGEAWNPTDLYKIDMPEPLKNKQKEKAVKQAMKLLIAEGLIKESQLAS

SEQ ID NO: 83269 - protein, 329 aa, unidentified
MAIKVKRSKINFKGKMVNIGIDMHKKSWRITALVEGDIVMAVTLARPNYDSFKKLLVQFLGNYVRIVYEAGPGGFDLYDRLTDDGVECIVTPPSLIPTASGSKVKTDKKDSYKLARLLESNMLKQVWVLSPEERAHRQLARTRRQIVNHRSDVMRQIKSLLLFHSIEIPFSSRQQWTGPFTKWLHGLDLGDEYLNKSLEALIKLFDYLSIEKKSLTHEVIKLAREEKYASRVKLLKSVPGIGALSAMEILVELQDIARFKTADELAAYLGLTPSQHSSGEHTRMGHITHAGNDRVRTTLVESSWILIGKDPEIKKKSHFLDRIDGMFRI

SEQ ID NO: 83270 - protein, 344 aa, unidentified
MVTTIGIDPHKATHTAVAIDGSEIVLAEITIRADKDQATKLIDWAASVDGDGRLWAVEAATGLGHLLSQQLVASGETVVDVPPVLASRIRVLSSGKSQKNDPNDARSVAIAALRRDGLGEVKREDEAAVLRMLAKRHRELTALRTQAVCRLHAMLAVLKPGGMGHRLSAKQAARMLGGIRGLDTVGEQRRQMAKAHIVDIRRLDRDLEAVKAQIRTAVTAADTTVTDIYGVGPVVAAFLIGYSPSIDRFTTADRYAAYNGTAPIEVSSGGKVRHRLSRRGNRTLNHAIHTAAVTQISHQTPGRVYYDKKLDEGKTDKEALRALKRRISNAVYRRLVADARRRSV

SEQ ID NO: 83271 - protein, 343 aa, unidentified
MKSMHYIGLDIHKKIIVFCIKTISGSVIKRGALPATRQALNTWLEDLPRPWMAAMEATLFTGWVYDFLKPHAYELKVAHPEMLKAITAAKKKNDQDDAEKIADLLRVNLLPECYMAPVELRELRRILRYRNHILRTAVREKNKISGLLMEVGATYNKKRLHSKKYFAELLENIENVPESVINMLKLSRSNLEIFTGIQKRLVKTLKENILIQERVKRLQTIRGVGEITALTWVLEVGEPDRFNSIAQAVSYSGLCAAQKESAGKEYRGPISKKRNKHIQTILIEAAKLAPYWNPQLAEIHKKELARGNKNKATLAVARKLVAYMLAVDKNKKDFQIIESKKAA

SEQ ID NO: 83272 - protein, 311 aa, unidentified
MNPQEFFIGIDVSKDTLDVAVRPTGEKMVFANTEDGLVMMTDFSKPFSPRLVVLEATGGWERSAVGALAAKGLPVVVVNPRQVRDFAKAKGILAKTDKIDAQVIAQFAESIRPEVRPLKTEEAQKLEALLSRRRQIVQMLTAEKNRLHSAPVWIRKDIQIHIQWLEKILDKFNKELDRLVKKSPIWQAKDKILQSAKGVGPILSSTLISGLPELGTLNRKKIAALVGVAPLNRDSGKFRGRRTIWGGRSAIRSVLLMATRVGIRFNPVIRAFYERLEKAGKKRKVAETACMRKLLTILNAMMKNRTCWQSV

SEQ ID NO: 83273 - protein, 543 aa, unidentified
MVTKTRRRTRRSQRRAQVAKPSGSISPRVQKVGPEHFGILAVDCAKARSKWMLADFYGRILVPETEVEHTRQGFAAAVAALRQALAAEEIQDLVAAIEQTGHYHRPIQRALAAAGFETRIVHPLTTQQFRIPADPGNKTDETDLKAIHRAALNGFGLIEPPRDPIHDELRMLARHRRDLVEKNAALRNQLHAELDALLPGLTGVVSNLLDHEPAWIIARHAGSAQRIRTLGLEGLARLLEDRGIRYQRRTLTKILAWAETAHDIDNFTEVHKKILESLDDERQARLGRIRTLERDLAALLVQTPYVLLLSWPGINVVSAAELAGEMGPIQNYPGDGAITGRAGLFPSRYQSDKVDRSDGPLVKRANRALRYILLLIAENLMLCNAHFRRLGQQWKAQGVDPRIGHVRIAKHFCRIAYQMVAGRQVFRHPSCQKRHKILEKLSIFHSDHDTQIEQLLRDLTAAAAWIPRSEYATEAEPFLASLPPGTATHAPAAPSQPRPPARPRITSRRDTGPRPLSAILPELLLTLGVPMVQSKTSEETDLT

SEQ ID NO: 83274 - protein, 425 aa, unidentified
MESNANMKEVPFQEQFRAFAGFDWAGDHHDVVVFDPVGTILLELTFADDAAGWAGFAKRLTEGLGLDPSGLAVAIETNNGPAVERLLALGCAVYPLNPKAAESYRERKNNAGCKDDHLDALSFGDALRTDGHRWRRLKADDPITQELRLLCRDEIQLIAQRTALVNQLRAALREYYPAALEAFDDWVSEGPWAFVQAFPTPQDLVSAGKRKWEKFLHANKLYRPQTYAKRLEIFARADQFCGTPPVTRAKSRLALTLAEQLRLLERQLSHYRLSIEALFAQHPDHDVFGSLPGVGPKIGPRLVGELGNDPHRFATHESLQCYGGSAPVTKQSGKNRWVSFRRACNKTLRTTLHQWADMSRERCAWAQAYYQHKRDHGHSHAAALRCLAQRWTKILWKMWQTHTRYDETLHTRNQVKHGSWVVALK

SEQ ID NO: 83275 - protein, 315 aa, unidentified
MQKLLNIGVDVAKDAVVVGCDEQGSAVRSVPNQRTALTAWLTSLPSGSRIGMEATGCYHELLADLAYQSGHTVFVLNPKDTRHYAQAVGLRAKTDRVDALLIARLIAHEHARLHHYHPATCAQRQLGRLLRRRAQLVKLKGALKQTMRGMTGLVRDTSALVERMDALIAKLEQRMDALIASMPGTREDRRRLETIDGVGAVVSAALIEPLTRLPFSSSDAFVAFAGLDPRPRDSGHKVGKRRLSKRGPAELRRLLFNAAMAATRTHVWKPIYEHYRARGLPTTAALVIIARKIARIAWSIHRYHTNFDPQRLKTT

SEQ ID NO: 83276 - protein, 415 aa, unidentified
MKYAPVSRPGPHPGGVTAGIDWASADHAVCVVGGAGEVVSRFSVEHSAEGLRALVSRLARAGVREAAIERGDGPVVDALLAAGVTVVVITPRQIKNLRSRYGSAGNKDDRFDAYVLADVLRTDRARLRPLIPNSPATVTLRQACRARQDLVRHRVAVTNQLRAHLLCVFPGAVGLFCRLDSAISLAFLARFGCQDRAGWLSEKRLAAWLKGAGYSGRISPAVLYERLRSAPGGATGEQGAASAQVTRALAAVLASLNTQIKALEAQIAGQLAAHADGHIFTSLPRSGTVRAARLLAEIGDCRARFPDPQALICLAGAAPSTRQSGKHKAVTFRWAVSKQLRDAVCDFADGSRHASPWAAKIYNDAITRGKDHPHAVRILARAWLYVIWDCWQHHAAYDPAQHRALQRLLATGQAA

SEQ ID NO: 83277 - protein, 332 aa, unidentified
MMAQNELVVVGIDVAKDKVDGCIRSLAQRQTFPSTAEGRRALIRWLRKYKVGKAAMEASGGYERDWAKALREAGLEVRVVDPKRVRSFAKSAGRLAKNDPIDAEMIAWFAETFVEAKSQAHDAAREKLVQIVNARQSLLDMQTSLQNRNEQSTPEVVQKMQGRLLKEIASEVAKLEAAIAAQVKATRHFAELAEIIESVPGIGKTTSAGLIAAMPELGQVSNEIAAALLGVAPYDDDSGRRQGQRHIKGGRRKVRNLFYMACLGAATQHNPVLKAFYARLVAKGKEKKVALTACMRKLIVILNTMIARRQKWDVTRYKASDHARPLPSACPA

SEQ ID NO: 83278 - protein, 309 aa, unidentified
MFTCAGIDVSKDTLEIKLEPQGNGSTFLNNINDFPRMIAWLKLDQVSRVLLEATGGYERAAMKALQAEGFDVIRVNPCRAKSFAKAMGQQAKTDPIDARLLAQFAAVIKSPSSRITSVELDDLRALVQQRENFVQQRDDDKRRLKSATSEVVKPALQSHIEYLQTALKSINELIRQSAESLDREKISRLCSVKGIGLVTAASLMSYLPELGEVGRHQIAALAGVAPYNDDSGTHKGKRNIGGGRFAARRSLYMACWAVIRFQPEFNARYKALREKGKCAKVALVACMRVLLIRLNAMIRDGSEWKEHVV

SEQ ID NO: 83279 - protein, 370 aa, unidentified
MAKTTTFFVGLDVHKDSIAVAHAEAQRTDPPHFVGTIGTRQADIDKLIRRLQSKAAHPVFVYEAGPCGYGLQRYLTRKGFECQVVAPSLIPKRPGDKVKTDRRDATELARLFRSGDLTPVYVPSVEDEAVRDLCRARDAARVTLKAAKLRLKSFLLRLGLNYVGRADWNEAHKRYLAKVVCPTPAQQIVFQESIRAVNEQVERLARIEQELLELAPTWRLWPVVEALQGLRGVQWIVALTVVAELGDITRFDNPRQLAAFVGLIPSEHSSGAKRRQGAITKAGNSRARRVLVEGAWAYRFPAKISPHIQKRIEQLPKPIQDIGWKAQVRLCKRFRRLSSRGKHANVVVTAIARELVAFMWAIAKEVPIAN

SEQ ID NO: 83280 - protein, 340 aa, unidentified
MGEQYVGIDLHRRRSVIVRMTGEGEVLEIVRIANDPVALSLELAKAGPDPEVVLEATYGWYWAADLLQACGARVHLAHPLGVKMFGYQRVKTDARDSRNLAELLRMGRLPEAWLAPPQVRELRELVRYRAKLVALRSGLKAQVHAVLAKEGVRVPMSDLFGVAGSRLLDELHLGRAYGLRIASLRSLIGVYDQEITALQREVAAVLAGDVGYLAIQAIPGVGPVLAAVFVAEIGDIHRFAGAPQLCSWAGLTPRHRESDTTVRRGPITKQGPRLVRWAAVEATQRLPRGSKQAASFHRIADRRGTGIGRVAAARKLLTLVYYGLRDGQVRCLTRLAAEAG

SEQ ID NO: 83281 - protein, 414 aa, unidentified
MDVVHPRCAGVDISKRDAKVCVRIAGSGRAKAKSVVTTWGAVTNQVLALRDHLIAEQVTLVVMEATSDYWKPFYYLLEDGPFEVMLVNARHVKNLPGRKTDVSDAAWLAQLGAHGLVRGSFVPPEPIRQLRDLTRTRTTLVRARAKEIQRLEKLLEDAGIKLSSVATDISGVSGRAMLEALIDGQRDPVILADLAKRRLRSKIPELTEALTGRFSEHHGFLAQIHLDLIDNHTLAIDELTGRIEVVVEPFRHVRDLLVTIPGISTLVADVIIAETGGDMSRFPTAGHLASWAGTCPGSNESAGRIKSTRTRPGNPYLKGALGIAAMSASRSKDTYLAAKFRRIASRRGPIKAIVALEHAMLVAIWHMITNGTAYGDPGGDYFTRLNPDKAKHRALDQLHKMGYSVTLEPLAVAG

SEQ ID NO: 83282 - protein, 411 aa, unidentified
MNNTLFVGIDISKRSNVATFMNCEGKVVGRLAFSNNGSGADRLVAKILSYYEKEDFEEIRIGMENTSVYSKNLVWFLYEHEALNEHKLSIIPLNAIMVANYKKSFLDMDKDDITDSFAIADFIRIRPGLLPFKLDDRQEALKILTRSRYNYVQALSRMKSQFLTRLFLSFSEMEAGKPFYSIFSKTSLSLLEEEFTLDELAEKPIPELVEFLQEKGGGKFQNPEEIAKVLKKAASSSYRVPAMVRESLNRTMASDMEIMRILENEIHNCDKNIEKLMKSVPAILVSIPGIGPVLAAGIMSEIGDISRFQKQESLGKMAGFKWKRNQSGKKESEDKAAVLSGNKKLRYYLVEAANRVRIHDPVFEAYYRKKYAESKTHAHKRALILTARKLVRVIFYLLKENKLYKPDVGIS

SEQ ID NO: 83283 - protein, 341 aa, unidentified
MQVATIGLDLAKHVFQIHGIDAAENVVVRKQLRRSQVMGFFEALPPCLIGMEACATAHYWARELTKLGHEVRLMPAKDVKAYVKRNKNDAADAEAICEAVRRPTMRFVGVKSAEQQGQLMQHRRRDLLMRQRTQVINALRAHMAELGIVAAQGREGTKALLAIIADDGDERLPVDARASLIVLAAQLQALQTLIGSIEKRIIAQHRASEASKRLATVPGIGILGASAITTMVTDPKAFRSGRDFAAWVGLVPRQDSTGGKHKLGPISKQGDRYLRRILVVGAHAVLRRARQHPEKYPWLTRLLARRPFKVVAVALANKMARIAWALLAKGGSYRVPRLAAA

SEQ ID NO: 83284 - protein, 351 aa, unidentified
MMIIGVDYHPSFQTIAFLMEETSECGERQLNHSEGEAERFYRDLKQRGIRVRVGIEATGYSRWFERLLAELGFELWIGDPAEIKAKRIKKQKTDRNDARLLLRLMREDNFPRVWVPSPENRDLRQLLWHRHRLVQMRTRIMNQLQALAMNEGYRWKKKLFSEQGRAQLEKLMLAPWASRRRQELLGLLDRMNPTIEELTAAVEREARKRPEVLRLMTHPGVGPLTALAYVLIIGTWERFHCGKQIGNYVGMIPCEDSSARKQRLGHISKQGNSLLRFLLVEAAQAAVRSNAEWRRRYMHLAMRRHKSIAKVAMGRKLGVRLYWMWRNGCEYSPSLEFGSYAGQLGIRHGVN

SEQ ID NO: 83285 - protein, 402 aa, unidentified
MKYNNVGIDVSKYKFDACVMNDEGEILLEPRTYFQSKDDMDRFILDIENTRTDYDTGLKIGLESTGTYHRNLMGYLLHHGYEVKEYNPIEICTLRKGTIRNAKTDKIDAKLVAKAVRLDFIQNTERYLSDQDHIRMRELGLLHNNLAEKVALLKTELKESLTVLCPGYDIILTDVLGKSSKEILRKSVKLTALFDISQKEIENIMLKNFMSPTNASDKSNRIKRIFDHSTVPEYYKESLIVDVKFILDQHDLLQNQKRMLDKRIERAMRDIDPVSLSIPGMGPISCAIILGILGNVKRFKNSRAVVAYAGLDPRVIQSGKSVNRRGGISKRGNRYLRKALHNAVLVGINKNPVLKRKYARMKDNGKNPMVALTACSRKLLEIIYSVEKNQKRFYIPKYVLDD

SEQ ID NO: 83286 - protein, 544 aa, unidentified
MTLTWRHLVGVFCERTGQQSKPFNHWCVCPYVSLAPVRRLNVGEAQAALPWTRISVWPTRAVLFGKAVSRMRISREKTKQTDNEDGVAGLPVVRSRVAGIDLGSTSHWVCAPDKDGANREVEQFGATTPELERLVLWLKERSVESVAMESTGVYWIPPHEVLERHGMEVVLVSTRELARVPGRKKTDRVDCKWIQRLHSCGLLAGSFRPNEQVCMLRTLVRDRGNLVAEAADWLRRMQKSLDQMNVRLHRAVSQIYGVTGLATMRAIGNGERDPRKLAQLRNRRCHKSEEEIAEQLSGHWREDHLFSLKQALKMYDAIQERIADYEKEILRKLTEMEKEERRGQQAPKLSNSQKSRTIKTRGQEPMRQALYRMSGVDLTTIDAVGVETVQAVLSEYGPDLSRFPTEKQFVQHATLAPHRPTSGGKPTKKKKRGSASTRVAGALRMAAVTLRHTETALGAYYRQIARRLGPDVAVFASARKLAILIYRLLRWGQPYIDEGAAAYEKRYQEARLRRLASAAKNLGFQLTPQPANIDSLQVSAQAQQ

SEQ ID NO: 83287 - protein, 320 aa, unidentified
MTVYLGIDIASKKFDVAELCDGNYRCRAFANTSAGFLAFYKWLNTENKQDIHACLEATGDYGTGLATFLYERNLKVSVVNPARIKGYGASELSRTKTDRADSKLIARFCKAANPERWKPMPAPVRKLQALVRRISALNGMLRMECNRRENADANIQASLDRIINQLKKEIESVRQELHAHVRSHDELKKQDELIQSVPGIGAISSHLILSFISGKEFRKAKEVTAYLGLNPRHHQSGSSVRGKTRMSKMGDARLRSALYMPALTALKHNPDIKAFGQRLLLAGKPRMLVVGAVMRKLIHIVFGVLKSNIAFSSRDLLPVD

SEQ ID NO: 83288 - protein, 318 aa, unidentified
MAKSTMVCAGIDTGKRRLDVALGGSDERLQVDNSPAGHARLSGWLRRHRVERVGIDASCGYEGAVVAQLRRDGFVVILFQPAQVRAYARFVLRRAKNDRLDAALIAACTAAANRIPAPADPRLTALAGHLTMLDQLGQDIACLKNRRESCRDPRIGQHWKAEIARLKAVRRAELKELAAAIRRHPDLAQRLDLLASIDGVGLPTAIAILVRLPEIGQLSREQASALAGLAPYDDDSGERQGRRHIAGGRERLRHALYTAAFAAAFHWNDQLKRCYRRLILAGKPHKVALVACARKLLIYANTVVARGTPWCANPAGAP

SEQ ID NO: 83289 - protein, 349 aa, unidentified
MGIIGGLDVHRAQITYDYIDSATGEIRRGRIEPALREDVREWLERFHRQEDVAFALEGTTGWLYVVEELHRAGIRPHLAEPADTAALRGRKRRAKTDAADAKLLRELLLTGRLPESWIPPAHVEQIRTLVRLRKALLDERRAWHQRLQAKLFHHGLPRLGELSPEDRREWFGRLQLPPASLQVVGVAIACIERITEQMVPIDAQLKWIAHHQPGCKALDRGIYGVGWLTAVSIWAELGDVRRFGSSRRAVRHTDLDITVHSSDGKRSPGHLSRQGPQILRWALYEAAMSAARPGSPDHSYYVDVKAREGSGRALLSQARRIARRAHHILLGMGEEALAPAPALPLAEAA

SEQ ID NO: 83290 - protein, 348 aa, unidentified
MTESLFAGIDLPSNNLMIGIMDQNGQRLKHQKLDCDLQQVVNFLEPFKPRFKSLAVESTYNWYWLVDGLRARSYPVLLANPAQIDQYSGIKHADDKNDAFFLAELQRLGILPTGHIYDPVLRPVRDLLRRRSSLVHQRTALLLSFKSLYVRTTGQPMSLSRLKSMKLKEAKTLYEHPANCLIAAVQKEHIEQLDQSIERIEKAVLKSARELPSYDQLTTLPGIGRILGMTITMEVGDLQRFKTPGDFASYCRTVDSKRMSNGKKKGDNHQKCGNKYLAWALVEAANFAKRYDDQSRKWFDRKSAKTSQVLATKALACKLAKAAWHVMAEQSDYDPKRMFAESAQSPGK

SEQ ID NO: 83291 - protein, 339 aa, unidentified
MKIYTGIDLHSNNSFVALVNEENKVIYKKRLPNDLALLLEELKPYKDCIEGIVVESTYNWYWLADGLQEAGYKVHLANVIANVQFSGIKHTNDESDAIWLANLLRLDILATGHIYPKEKRGIRELVRKRLILVRQQTSCLLGVQGMITRYENTQVSSRKIKCSSSKEITDLVKDENVRFAAQSQLKVLNCIMEQIDLLEKQIQEKIKSDPLFELLKSIPGVGPILAMTILLETGEIGRFKSVGNYSSYCRCVESKRISNEKKKGRNNRKNGNAYLCWAFIEASNHAIRSCPEIKKYYQRKLNKTMRVVALKTIANKLSKACYFMLRDGVEFDMKKSFMQ

SEQ ID NO: 83292 - protein, 341 aa, unidentified
MTAIIGIDPHKATHMAVAIDGDERAIARLEVRADGAQTRRLLAWAALLGAERTWAIESAGGLGKLLSQELVAAGEHVVDVPPTLAARVRLLGSQKAAKNDGNDALSTAIAGLRHCGLRVVRGDGHSSVFRLLAGRYDDLIGLRTQAACRLHAVLRELVAGGAPRRLSADRAAKLLRGVRPGGLVEGERKRLAGDLLADVRRLDRELAVIKTRIRDAVDASGATLVELHGVGPIVAGLILAYVGDPARFATPERFASYNGTAPIEASSGPHKRHRLNPRGNRKLNHAMHLIAVTQIAHDTPGRVYYERKLVEGKTKKEALRALKRRISDAVWRQLQLDATAP

SEQ ID NO: 83293 - protein, 347 aa, unidentified
MKKIFIGIDVSKEKCDATAISAENGLTEVEKLDYLVFENRPKGFRTLLSWAKKLKPDIIQEDILFVCETTGAYDRALCDYIYSKGLDIWRESALQILWSSGVRRGKDDKTDSLMIAEYAMHHMDRAHLYESPDGRILEIRAVFLYRRKLEQEKTSKLVRIKEIEATAGKSKTLTFILRDAKKSIRQLEKSIRECEEKIRELVEEDDALVKSYQHLDSVKGLGIVNITALIVYTNNFKAFKTSRKMATYWGVAAFRSKSGTSVDKRADVRNLSSSMLKSYLTQAAMHTIAKGGIYHDYYQRKIAEGKTHSIALNNSKNKLLHLAMSLVTHDRDYEENHEFLRTQRAAN

SEQ ID NO: 83294 - protein, 420 aa, unidentified
MQEQSEFAAFIGVDWADRKHDICLQAADAEAVELSVIEHRPKAIEDWARGLRDRFAGQRIAVCLELSQGPIVSALLEHDIFVIFPVNPSTLAKYRRAFTPSRAKDDPTDAAIALELLRRHPEKLKPLRRESPNMRALRRLVEARRDLVQDRVRITNRLTFTLKAYFPQVLEWFRDKETEVFAAFLERWPSLLDAQRARRETIVDFFHAHSVRRTSVIDRRVEAIRTERPLTSDAAVIEPSRLLVEALLPQLRAVSAGIARLDDEIARRCQQLPDFHLFADLPGAGRVFSARLLAAFGEQRDRFADAAAFQKYAGIAPVTERSGNKHWVHWRWSCPTFLRQTFVEWVASSIPHSFWARAFYERHKAGGASHNATIRALAFKWIRILFRCWIDRTPYDESRYLSALQKRQSPLLKFVAGHPS

SEQ ID NO: 83295 - protein, 380 aa, unidentified
MNTTTVGVDLAKNIFAVCEGDGRGHGGRSYVLKQGEFLKWLRTLPAGTVVAMEACSSAHNWGRTMQALGLEPRLIAAEFVKPYRKNQRIKNDNRDAEAVLTALHAPGMRFVTIKTEEQQERLAWHRLREGWKAERTALFNRVRGLFTEFGIVVEVGAVKIRRKLAELEGDDAYPQNIRLMAQSVREQVGVLDQRLAECERQIARQSKNDPAVTRLRSRPGIGLLSADAIVATVGDARQYKNGRQFAASLGITPRQHGSGGKTHLGAITRRGDSYLRGLLVQGARCVLQAALRLHKNKPDTLNRLQLWMVKLNDRVGYHKAAVAIANKHARQVWAMLTRGEAYNADAYKDWEAAHANVCPGDINRASDDDLSTAALAAASV

SEQ ID NO: 83296 - protein, 416 aa, unidentified
MNAAGIDVSSRKSTVAVLRPFGEVVCFPFDVVHNAEGLASLAEQLKELDGETRVVMEHTGRYYEPVAKALHDAGLYVSAVNPLLIKEYGANSLRRVKTDRADAVKIARYALDNWTDLRDYTPMDTIRYDLKTLNRQFQLASKQRTACCNNLIALLEQSFPGIRKCFDSPVRSDGRQKWVDFAHTFWHVDCVRKQSLNAFSERYRKWCKRHGYFFKQRNAEEVYSLAKNAVVLVPKSEVTKVLVQEAVNQLTSISRSVETYRAEMERLASMLPEYPAVMEMYGVGKSFGPQLMAEIGDVRRFGRKQALVAFAGIDPMPNQSGDKNVRSNKSSKRGSPYLRKTLFNVMGIYLKCAPQDEPVFQFLDRKRSEGKPFYIYMTAASNKFLRRYYAKVRDYLATLENLPPVDMDSTGLQGGN

SEQ ID NO: 83297 - protein, 353 aa, unidentified
MQKPTKGQIVVGVDTHKEVHVAAAVDWQGTLLDEKSFATTRQGYRQLESWARSLGTVLRVGVECSGSYGSGLTRHLVKNGFTVLEVAFPDKTVRRKRGKNDFIDAEMAAEAAFTGARTVTPKTRDGMVESLRMLQKTRATAVAARKTALQMIRAIIISAPEELRDQLRGMTRMHLIRHLVATRPDSTDYRSPTGSAKIALKRLAKRYVDLDDEVDELDDMIRALLEEAAPLLVQCKCVGAQSAAQLMVTVGDNPERLRSEAAFAMLCGVAPVPVSSGMTYRHRLNRGGDRRANSAIHIIAIGRLRTDERTQSYVAKKVAEGHTKMEAIRCLKRYIAREMYYVIKKQYKIVNCS

SEQ ID NO: 83298 - protein, 387 aa, unidentified
MARKRTLSTLDTSIAYEAVGLDLAKEDVALAAFDSDHKEPYLIDRIPYDKLYELLADMAPTLVAMEPCSGAHQIAEQIQELGHEVMMISGRHVQAWVKDHCNGQKTDLNDAFAILNLAYDRWLTPIRGKTREECRLLALQASYRQLKGQRTKTMVHVKATLHAGGFPIRAGSFNQKVLHELIDTNREAFGDEVVETLHLMINRVRDLDHDIATVLKLLTEATKRDPRASLLRSIPGFGILTMSRWCAVIGDIARFDSPKQTMAFVGLVPNNRITGHHTETSSGREARGQGRMLKRGDKMLRSLCILGAASLCLMVRNDRLPDCPFVASIKERLASPRPWFKVLVYVAAKLVRIATALLKYGETFSYEKAGISKAVLKQWELEQAKAA

SEQ ID NO: 83299 - protein, 372 aa, unidentified
MKNVSIFVGLDVHKDSVDIALVEGDRNSTVRYYGTIGGNLADLDKAVKKIKKAHPEASFHFVYEAGPCGYGIYRYLTKAGHECMVVAPSMIPKRSGNRIKTDRRDSIMLASLHRAGELTPVFVPREEDEAMRDLVRARQDAVKAARVAKQQLKGFLLRHGIKFAGKGDWRQSHVTWLAGLTMSIPAQQIVLQEYINTVKDCTERVARLTYQIQEVLPSWELAPVVKALQAMRGVSLQVAVTTVAELGDLKRFDNPRQLMSYLGLVPSEHSSGSSRRTGSITKAGNGHVRKALVEAAQTYRLKARIGKELLARQEGLPKQICDIAWKAQVRLCNRFHKMEARGKKHQTIICAIAREICAFMWAIAREIKPTTA

SEQ ID NO: 83300 - protein, 587 aa, unidentified
MSTDTPLDRLGVGIDTARYGHRVSFLRPDRRPAAKPLTVLENRAGYRALQERLEQLHQQHPQAHFHVRLDAAGQYAVNLEQFLRGLDLPMTLSIGEPKRNKDYQKAHFPKRTTDDTESQAMARFAVVELPAATPPSSSAMVLLREVAGRLQAKVKQSTQAINRLHNLLARVFPELAILTDDIAAAWVLRLLDKYPTAQDIAGARLATLQKIPYLSAELAQQIHLAAQQSTASLRGEIAAALIRDLVAQVRHCQKAEHKIRQLLGQAYADLPASGHNQLITIPGIGVATAAVLAAKVIDMDRFPTPEHLVGYFGVFPEEDSSGVDKHGKPLPPGTLRMSRKGNDLARYYLWNAARSALRCNPAIRALYRRLRAKGKRGDVALGQCMCKLLHLVYAVWKTNRPFDPSHFPWEQTTDTNRSVAATDTHRSVAAPGADVPSASNDKAVGHKRDKPAGKVVTTAPLTVAPTPVRVNPAAPARRPKVDFAFLRQQLTMQQVVEHLGLELRGRGQQRRGPCPIHSQANDRQCTFSVHLGKNVFQCFQADCAAHGNVLDLWAAVHHLPLYEAGLRLAETFGLRRNREEEPVRATR

SEQ ID NO: 83301 - protein, 354 aa, unidentified
MTVQMKRTVGDIIVGVDTDKKHYVFTVREQGVNIMHKTLVAVPAALHNYIKKQFPGKNPIYVYEAGPTGFGLYDYLTALKVPCHVISTLSMPVAKCETVKNNGIDSRKLAEYMEAGKLRSIRVPMNEYRELRHLTKVRELCVSYRTKAKQRIKGLLLYSSISDSKLDASKHWSTGYIGTLRDLKITPAERYRLDCLLEDLDYARLNLIKTHKELKTFCKTYPNVRKNVKYLESIPGIGFITAVTILGKIGEPSLLRYSKEIASFLGLTQWEYSTGDVQSRGSITHFGNKVLRKLLVECAWAAIRKDVRLNQFYHRIKNRNNPKYASQIAIVAVARKMTQIIYRVLKEQRCYAQY

SEQ ID NO: 83302 - protein, 369 aa, unidentified
MENSSTIVGLDVSKEWIAAATLPPGAPRPTETIKLVNEPHQVDRFVRRAATRGPVVFVYEAGPCGYDLYRQITALGYPCVVIAPAMTPRRPGDRVKTDRRDAEKLARLHRAGELTEIRVPTTEEEAARDLVRAREAALEDRLSACHRLLKFLLRQGRVYREAKSWTRAHRSWLQSQRFDLHSTQLTYEAYVRAFEEAETRLAVVEHQVLDLAQDGRYADAVRCLRCLKGLDTLGALTLMTEVFDFRRFQKARAVMGYSGMVPSEHTTSFDPRRGRITKTGNAHLRRILVEAAWHYSRRRGYSQAIADRRQGCPAEVVRIAKKAEDRLHRKFWRLTQRGLPRNKAAVAVAREMLGFAWAIARQAPVPTEA

SEQ ID NO: 83303 - protein, 363 aa, unidentified
MTHSTSTVSSSHLTVGLDVGDRQTHFCVVDADRKVVTRGSFATIREKLVAGLSAFPGARIVLEAGSQSPWMSRVLRGLGHAVQVADPRRVELISKDPRKTDRRDAEMLARMGAAMPELLGSVHHRGERAQAHLSIVRARDLLVRQRTMAVQQTRSICKAFGVRLPSASTDGFTAKMESLIPELLRPALAPVLVTVTHLSRSIQAFDKLLAKLAAEHYPEVQRLQQIDGIGPVISVAFALSVEDPKRFASSRQVGSWLGLCPRSRSSGDSSPQLRISKAGDGRLRRLLTQGAQRILGPFGTDCDLRRFGLQIAARGGKSAKKRALVAVARKLAVLMHKLWLTGRDYEPLHQANRRAKAAVPASV

SEQ ID NO: 83304 - protein, 430 aa, unidentified
MTELNSTPAPATLVAIDISKHRHEVLIEAPGQARRRRLTILSTKVDHDRLVEALAAYGSPVLIGFEATGDYHRGLAYRLLSAGFELRLVSSVALARTREALHNGWDKNDPKDAQVILHMIRIGATQRYVDPLATGINDLQELSNTHEAISKAKTETWHRILTHYLPLYFPEVERFAGNSRSDWFLALLERFPTPSSIVDLDRDSFVQEAWPVIGRKVSKARLLNDIYETARSSTALPVAEGSAAITMFRMVLAEARSLIRQRDQIEDLAHAMLADHADYRRLRTVPGIGPIHALTILAEAGDLRRFGHHRQFLKFCGLDLATRKSGTFRGRTKLSKYGNARLRRALWMAAQVAMRQRDNSFRDKLGRYTARDRHDADLRRKAVTALTAKMARVVHAVIKGGTEYRPFFERPVPGGRTSLCTGREGAPATL

SEQ ID NO: 83305 - protein, 353 aa, unidentified
MTAPEIAVIGGIDTHTDIHQAAVIDSVGRHLDTQPFETNSAGYEQLLAWLRAQGDVIAVGMEGTGAYGAELARFLTTSGITVVEVDRPDRKARRAHGKSDPIDAYAAATAVLSGRASGTPKSRDGIVEAIRALRVVRKSAVKARTQTINQIRALMVTAPSALRDKLRGLPTSGLIDTLARFRPGGDLTDPACAAKTALRRLARRYQALQQEIKEADADLAPLVTRAAPSLVALPGVGTETAGQLLITAGDNPDRLRSEASFAHLCGAAPIPASSGRTNRHRINRGGDRNANSALYTIVLVRMQYDSRTRDYVARRTAEGMSTKDIMRCLKRFVAREVYRHIKATGVPVLAPAT

SEQ ID NO: 83306 - protein, 316 aa, unidentified
MICGVDVSSKSLDARIGRDGAAACFTNDPKGIAELAEFCRCHKVHLVAMEATGGYEKKPFALLWAAGIQVAVVNPRAVRNFAHGMGLLEKTDRIDAGVIAWYAQTKGCVAISPASAEQQQLKAMVTRLRQLTELRAAQRNQRLLVTDKVVLKSFRKLLDLVQKQIRDLEVAIAGLIDADAVWHKLDQSFRSIKGVADRTVARLMAEMPEIGTLSNKRISKLAGLAPLACDSGQWKGKRSVRGGRRTIREILFVVAAGVSRYNADFRAFRERLAAAGKAKKVIRIALAHKLLVRLNAKARDVLQQLREAPPAAVLLS

SEQ ID NO: 83307 - protein, 345 aa, unidentified
MVVLGADLHKQSHTVVAIDEAGRKLAERRVMATTEGHLELQRWAAQWPDRRWALEDCRHLSRRLEIDLLRAGEAVVRVPPKLMAGARRSVREPGKSDPIDALAVAQAALREPNLPVATLDGPERELRLHVDHREDLIGERTRHEQRLRWFLVELAIAEPAPRSLGRSVVQDALEVALVARTEPVARFARDLLVRIRELTVAIRALEREINRLVRSLAATLLALPGCGALTAAKLVGETAGIGRFRSKEAFARHNGTAPVPVWSGDATRHRLSRGGNRQLNAALHRIAITQLRIDERGRAYLDHRRQAGDTKTQAIRALRRRVSDEVFRRLQADEAARTSLLVAAA

SEQ ID NO: 83308 - protein, 422 aa, unidentified
MLEQSQDEEQIITHVAGVDIGKASLVCCARVPDEARPGRRLQEVQTYATMTRSLIGLAQRLAVLGVTRVVMEATSDYWKPVFYLLEAHGFEVWLVNARDVKHLPGRPKTDKLDAVWLCKVAERQMIRPSFVPPAPIRMLRDLTRYRVDLIAEAGAERNRAEKLLEDAQIKLSVVVSDLFGISGRAMMAALIGGQRDPGTLAELARSSLRRKIPVLQEALTGHFTDHHAFLLGKMIKRVEAIEADIGEVDARIEEQLVPFAPAAARLLEIPGIGPAAAATIIAEIGVDMTRFPTPAHLAGWAKFAPGVKESAGRRKGNGSTGHGNRYLARVLGQIAVTAARTDTFLGERYRRIARRRGAKRAIVAVGRSVLTIIWHLLSDPAAGFRDLGAGFYLSRTDTERRKRNHIRQLEALGYHVTLDLAA

SEQ ID NO: 83309 - protein, 331 aa, unidentified
MSNIIGIDVSKASLDCAYLSDPDQKRTKRLRCENDVSCFTTLVAWAEARSGLPVQSLAFVIEPTHVYHEQVVQFLYNTGATVYLVNPGRVRKFAEGIGILSKNDLVDADLLVRYGLMARNLIAYAPVAQEINDLRSLLNRLDVLERSLRSELNRQEKSGKTMVFHRLEQQSIARNVKRLKAEIKTFKGAIRQCVKSASSLQLSFELLCSIPGVGAKTAWIMMVILGSRSFRSAPEVASFLGLNPIEKRSGNSQYRRPRLSKSGSGHYRQQLYFPAMVATRKNPDIKALYERLLAADKTKMCALGAAMRKLVHICFGVVKNQAPYMAQTIQS

SEQ ID NO: 83310 - protein, 389 aa, unidentified
MGEAIRATVAYLGIDVGKRSHSACGLGEDGEVVFRSDLENRPADIDRLLERAGAGALVVVDQKRNIGALVLARAFAHGNPCAHLPGYAERQARGMFPGVAKTDAIDAEVIARTARGMPGALRPLAEEPEGAASLRILSSQREFAAAARTRAKNRLRATLLEADPALERAVDPSRGWHVAPLAEFGSAAGCSAAGWRRFSAAARRAGAPAAGARAPWESMLASAGSGRALPAGEDVAVRMLAREIAALDADVAELEGLVADSLAGDEVYECLLTVPGIGPKTAAALVTSVDVSMFRGHDELASYCGVAPAGSRSGTSVRSTSPQRGGNKQLKNLLTFSCNSLIGTQNRFGRYYDECRARGMRHNKALKAVARKRLKVIYAVMRDAVPYAA

SEQ ID NO: 83311 - protein, 329 aa, unidentified
MYYVGIDISKRFIDVCLLIDGIKGKRKTKVLPNDPNSAQALAQWLILQKCDPSQAHIIMEATGVYHEHLADGLHQSDILVSVINPHRVREFAKGMGILTKTDKVDAYVLACYGCLKQPENWLPPSQEIRKLKALLQHRDSLLNDKQRIENRLSTLKSTTAPEEVLTSLESIERNLKDELARIERLIAEHIDKHPGLKNDLKLLKSIDGVGEQIGWNMLAIIRGNNFRSAEQVAAYLGVIPVERRSGTSVCGRARLSKIGPPGIRAKLYMGAIAAISWNSHVRALYERLRLKGKAKMVAIGAAMRKLVHLCYGVLHTQRAYDKNYGMTPH

SEQ ID NO: 83312 - protein, 359 aa, unidentified
MESQSQLEKSFFENKELFVGMDVHKAKWVVTVRTYDLELKTFIMQPLAEMLEKFLLTTYPQAKYKIVYECCFSGFWIYDYFSEKGYKIIVTPTNRIYKDGSSIKTDKIDSRKLAFQLSRGLLKEVMVPGKKIREYKYIFRIYDKQKMRNGQILRQVKAILEQKNHPLKWEKWNKGLVEKLKLLTFEDKLFDLKFGNLLKEYEYVVSQIKDSEEIIGKIKEDEILGQRITRMENINGIGIISSVRMSVYLFDRKDRFDSSEKLNHYLGLTPSERSSGEKVSRGRSGMCGNRQLRSIIIQLAWKTVRKDGALLDKFDRVYKKSGSKQKAIVAVARKLMTKLFAIIQKEEEYRINTKTVQAA

SEQ ID NO: 83313 - protein, 387 aa, unidentified
MQKPHDNSKASPAAFMQDNTLIAVIELSLSNWLVAGLIPGVSREPLKKLEPNPEDLLKLLHGWRDEAIKAGRPITRIAVAYETGRDCFWLARWLRERGIDAHVIHATSVAVSREHRRAKTDRLDTAMLKRGFLGWLRGERGHCTVAIVPTMEEEDAKRPHREREGLVHEQTRVVNRMKSALIQFGVRNFNPKLRKASVKLETVRTPEGKSLPPNTIAALRRDMERLKIIKEQIKAIEQTRLQQFEQKPEALANRMVYLLVRIYGLGLETAGLLVHELLSRTLRDRKAVARYAGLTGSPDESGSKRREKGLSRSGNARVRKIMIQLAWRMVKFQPDSALVQWFKQRTENAKGSRKPLIVALARKLIIALWRYANDGVIPEGFRLHSAA

SEQ ID NO: 83314 - protein, 343 aa, unidentified
MKLHVLGIDLGKTVFHLVGLDSTGKVVIRKRCSRRQLLAFTANLQVQLIGMESCSGSHFLGRALRDQGHEVRLMPAQYVKPYVQTNKSDYIDAEAIAEAVQRPRMRFVPIKSEEQLDLQALHRVRERWVMRRTAVVNQIRSLLLERGLTLPKGRRYVEEALPRILEDAELLLSGSFRLLLAQLKLELEQLSARIDQLDVVILQRAKEDDACQRLTTIPGVGPVTATALIAAVGNGSALQRGGDLAAWIGMVPGEHSSGGKQTLLGISKRGNSYLRRLFVQGARSVLQQRHRQSPGLCSWLKQLLARKHQNVVVVALANKVVRMAWAVLCKGERYRAPVLAVST

SEQ ID NO: 83315 - protein, 421 aa, unidentified
MKVVYPICCGIDVHKRFLVATMITSQGITPHYSKKRFSTFNNSILLFKQWLIENNCYDVCMESTGKYWVPIYNLLEDSIHLTVANPKWVRAVKGNKDDTKDSKWIGDLFRLGLVPGSYIPDKPIRILREYTRYRSKLTSCKSSEKNRYQNAFTVCNVALDAVVSDMFGRSATSITDYLLTSDTFDSEHCASYLKKSLKKKAAAVIESIEGYQMTLEQKERMIMIRSHLDFIQNSIAVLDDRLDGMVKPYENIIRLLCTVPGISRSSAITIISEIGTDMSQFSNSKRLCCWAGLTPSNNESAGKKKSVRISRAGVYLKPALVQVAHAAVRSNQSSYYKDKYEHIYKRRGKKRAIIAIARMILTAIYHILDTGEVFNPCDLYKTDMPQEMQNKQKEKAIKQAVKLLVSQGLISSADISIPLTA

SEQ ID NO: 83316 - protein, 338 aa, unidentified
MKLYGGIDLHSNNSVVALLDEQDHTVYEKRLPNDLAMILSGLSPYGNAVEGLVVESTFNWYWLVDGLMDAGYRVHLANTSAMKQYEGLKHTDDHDDARWLAHMLHLEILPEGYIYPKAGRAVRDLLRKRSHLVRQRTANLLSFQNLLRRNTAESMSAAAIKRLDEAQIEELVSNRELALAMNSTLAVIRCLGEQIQIVEAQVLSQVKLEPAFQLLMTVPGIGPVLALTIMLETGDARRFDSVGQFASYCRCVSTTRLSNGKKKGEGNRKNGNKYLAWAFVEAAQHARRHCPSIRRFHDKKKAKTHAVVAIKAVAHKLSRASYHVMRDNVAFDLTKAFG

SEQ ID NO: 83317 - protein, 401 aa, unidentified
MKYVLALDVAKGKSMFMLSSDVGEILLEPTEYTHNKSDFEKIDSNINKLNIKDNLTIIMEATSIYHKAPERFFKENNYHVIVFNPLIGKEITNTIRKTKTDKQDCIKLTNLFWKGSIPDRKYTEDEIYTKLNELSRQYYHLDEGLTRHKNRYKELLHLCFPEFELCFKDGKIYDLTALNFIKEFPHAYIIKGKRVDALAYNMANTNNRHLNYYKRKANVIKEYAINSYPGVSQNSKDVDNLKQLADVVVDLTKRKDEVKNQVIQLAKETKNYECINSLFGIGELSASLIIAELKDITRFNNIKQINASCGLDPTIIQSGKSINYHGPISKRGNRYARKLLFNCSRNIITLSAKCNKENSIYVYYLKKKQEGKHFYACLTACSTKLIRIIYALCMNNSTKQN

SEQ ID NO: 83318 - protein, 327 aa, unidentified
MTQPILGIDVAKETLDTALKKEGRMLNKQFENTPSGHQQLAIWLKKQESAQAHVCLEATGQYGDGVAEYLYLQGFPVSVVNPARIKYYANSKLRRNKTDKADAQLIAEYCEKEKPVLWTPPPDSFKHLQALVRHLDDLLETRQQEANRLGSGVRTEPVVVSLKALVVFLDEQIHQCKQAIQNHIDHYPELRRMQNLLVTIPGIGRLTAARLLGEIRNIPDFENARQLAAYAGLTPRNIVSGTSVHKKSRLAKTGNAHLRKALYMSAISAKHHNPIVSQFCTRLSENGLKPMEVIGAAMRKLLHIVFGILKSGCPFDPNYLVYSQAHS

SEQ ID NO: 83319 - protein, 329 aa, unidentified
MKIYVGIDIAKLNHFAAAISSDGEIIIEPFKFTNDADGFQLLVSKLESFDKNSLIIGLESTAHYGDNLVRYLVTELYQVCVLNPIKTCQMRKNNVRKTKTDKVDTYVIAKTLMMQDNLRFVSFFDLDMMDLKALGHFRQKTIKQRTRLKIQLTTYVDQVFPEIQYFFKSGLHQHAVYALLKEAPSPKEIASMHMTHLANLLKVNSHGHFTKEQAKELRVLAQKSVGANDSAISIQITQTIQQIELLDSQLEKIEAEMTDIMKFNDSVIMTIPGIGYINGGMILGEIGDIHRFSNPNKLLAFAGLDPSVYQSGNFQAKTTRMSKRGSRVL

SEQ ID NO: 83320 - protein, 354 aa, unidentified
MMIIGCDYHPAFQQIAFVDTDTGELQERRLQHREEAEKFYRDLAAQGMKVRVGMEASGQARWFERLLAELNFELWIGDAAEIRTKRVRKQKTDRQDAQLILKLMLKDDFPRIWVPSWENRDLRQLLWHRHRMVQARTRIMNQLQAVALNEGLRCKKRLWREAGREQLEAFRLAPWASRRRRDLLELLDRLNPTITDLTRTIEQEVEKCPEAQRLMTHPGVGPLTALAFVLIIGTAERFQCGKQIASYLGLVPLEESSGNRRRLGHITKQGNALLRFLLVEAAQVSARSIPEWRNKYFHLAMRRGRKIAKVAMARRLAVQMFWMWRKGRDYEQVRKFGSHAGQPGNRDGVQSNTE

SEQ ID NO: 83321 - protein, 273 aa, unidentified
MTQSYAIGIDISKSKIDCAVLSSDYQVLIEKEVPNTDGEITAFIQDVLKTFNIAFSELLICCENTGIYNRPLERACIKMEICLWVEHALKIKRASTDMRGKNDKKDALRIAEYALRYQDKKMLFQKSSKAVQELKEYLKIRDTLLNQKVAIENQLREAKTHDKESYKLLKKGYNKALTAIIQSILNAEQKMNDLIHQDNNLRENIDLMTTIPGIGKQNAINFIISTNNFESFKSAKHLACYAGVVPFQSQSGTIIKRDRVSKMAIPVHISVSE

SEQ ID NO: 83322 - protein, 418 aa, unidentified
MSVLNSLFVGIDVSKNSNQVYAMNFDEKKLLSFSSPNDSEGASKIENKLLECLVKNNYENIVIVLESTGMFSFHIATYLSSSEALLKYNVLVYCIDPKTSCNFRKSFSEMDKTDPKDAYILADMARAGKVNKLNPVKGPQKLALQRLTRHRRHISEQIVREKLYVLNNIFLKFSAFDRKYDGIQPFSDPFSATAQEILLEYKSPEEIINTPIEDLTSFISTASKNRFADSKKVAEILTKCARMSYRLDKTAYEPINTAIASSLAILRCLENEIKHIDKEIANLSKGYNSDEYTCLISIPGIGPVFAAGILSEIGSIKQFDNEEALAKYAGLTWRRHQSADVEHEDTPMTKTGNAYLRYYLCEAASMAVLHNPVYKEYYQKKFAEVKTHQHTRAIALTARKLVRLIYGLLSKNQLYKNQ

SEQ ID NO: 83323 - protein, 347 aa, unidentified
MNFYTAQHNYYCGIDLHAKQMYVCILDQLGKVIIHKNIKATADSFRPIIEDKKDLVVAVECMFTWYWLADFCEDENIPFVLEHALYMKAIHGGKAKNDKIDSHKIATLLRGGMFPQAYVYPRNMRSTRDLLRRRTHLMRKQSGMKAHVTNTLSQYNFPSLGSSLKYKFTRQEAKTLFKDPSVQKAIELDTELIGHYKRELESVERYIEKYAKDHDYHSTMILQSIPGIGRILSVVIFYEIHDINRFPSVQDFASYARLVKCRKESAGKVYGKSGAKIGNAHLKWAFSEAIPLMMREMPEVKQRVEVLAKKHGKGKAMTIMSHKLGRTVYFMLKRKKYFDRERFINWK

SEQ ID NO: 83324 - protein, 415 aa, unidentified
MALKIVYKICCGIDVHKTFVVACIASTDKHGVTSYERHRFSTYTKGLKNLLQWLLEHNCKDVCMESTGKYWIPVYNILEKDCSIVLAHPKYVKAIRGKKTDKKDAKWIADLFKHDLVAGSFMPPAGIRQLRDLMRYRFKLTCFKSSEKNRLQNCLTVSNIQLGNVVSDTFGKSAQAILDKILENPEDTSFDLEPLVFKSLKKKLPELRDAIDGYITPEQAGKLKIIKAHYESLESRKAELEELILALAAPYQQELAILQTAPGISSDFTAIGIISEIGTNMEAFPSAKHLCSWAGLTPTNNESAGKKKSVRVSKAGCYIKPLLVQCANAVVKSSKHPEMRNRYLRLKKRRGHKKAIIAIARMLLTALYHMLKNGENYNAELYRKSDLPPVDREITVEQAILIARNQGYKIKSATA

SEQ ID NO: 83325 - protein, 340 aa, unidentified
MGQVATIGLDIAKSVFQVHGVDAEGGVVIRQKLTRARLLKFFEKLSPCLVGIEACGTAHHWARELIGLGHDVRLMPPSYVKPYVKRQKNDMADAEAICEAVTRPTMRFVPVKSPAQQSVMVLHRTRSILIRQRTQISNAIRSHMAEFGMAAAIGRQGLQSLIEVVDNPADERVPPEARGCLAMLGVQLRLVNEQVLETDRLIRTNARSTEVGRRLMEIPGVGPLLASALVGTIADPRAFKTGRNLAAWIGLVPKQNSSGGKERLGGITKQGDRYLRQMLVVGALAVVRYAVRNGTRRPWLVQLLARRTPKVAAVALANKTARMVWAIMTSGERYREPLAA

SEQ ID NO: 83326 - protein, 367 aa, unidentified
MQKVSTAVAKQSRNISRQRLTIGLDLGDRNSWYCVLDEAGTIQLEERVRTTAKALQDVFGAMPRSRIALEIGTHSPWISRLLSELGHEVIVANARKVRLIGESRKKDDRLDAQTLSRLARIDPELLYPVKHRSAQSQADLMMIRARAGLVRARTGLVNTARGLAKSYGERLRGCNVRNMNPEKAENLSPELQRALEPLLAAIEEVSERIVEYNDRIEALAQASYPQVELLKQIKGVGTLIALTFVLTLEDAHRFRKSRDVGGYLGLQPGRRNSGQKEPQLHISKEGDPYLRTLLVQGAQHILGPFGIDCDLRRWGLKLAERGGRNAKKRAIVATARKLAVLLHHLWVSGEVYEPLHNRSRVTVAAAA

SEQ ID NO: 83327 - protein, 369 aa, unidentified
MGKYSEAFVAFDVAKMKHAVAIAEGGRTGEVRFLGDVENAALPIERTIKRLAARYDRLHVCFEAGPTGYGLYRQVKALGHDCLVVAPALIPKRAGERIKTNRRDAVTLARLHRAGELTGVWAPDPAHEAVRDLARAREAASDDLRRKRQQLLSFLLRHGRIYSGGGHWTLAHRRWLAGQKFDHAAQQIVFQEGIDTIEDALQRLRRLEKQLALVAPEWSMAPVVEAYQAMRGASFLVAVTFAAEIGDVRRFDTPRQLASFLGLVPAESSTGDTIRRKGLTLAGNRRARRALVEAAWTYRYPARVSETLRARLEGLPKPVRNIAWKAQVRLCARYRRLSATGKKPPVVVAAIAREMAAFLWAIGREVAPA

SEQ ID NO: 83328 - protein, 425 aa, unidentified
MGLAKPVDSKSNPKGGENVNQLFVGIDVGSRDNTVHIMLPDGSKHSSFAVQNNLGGAKTISKRVVSVLTDKSLPDVAIGIEATGVYGDSLMYFLREDGALGRFGRKLHVLNPKQVSKFKEAYSDLPKTDDVDAFVIADSLRFGRINTAVYMDDYRYHSLRNLTRARFFAVQNLTREKQRFMNHLFMKCSGLAQEKVFSNNYGAAALAVFEEFETPDDIADMDTNELAAFIAEKGKNRFPDPDEIAKAVQAAAHGSYRLPKTVNDSVNQVLSISVSSMRAIEAQIKALEKEIERQFENIPNPLISIPGIGKVFSAGIIAEVGDINRFNGHAGLAKYAGLAWGRHQSGMFEGQHTRLIRSGNRFLKYYLCEAAFSLARCDAEFKRYYNLKFKEVNKYQHKRALALTARKLVRLVFRLLKDNRLYRPA

SEQ ID NO: 83329 - protein, 356 aa, unidentified
MSEKLNSEIAVIGIDIGKNSFHLVGQDGRGRIVLRQKWSRGQVEARLANLPPCLIGMEACTGAHHLSRRLQALGHDARLMPAKYVRPYSKGEKNDYRDAEAIAEAVQRPTMKFVATKSADQLDLQALHRVRERLVGQRTGIINQIRAFLLERGIAVRQGLHFLRAELPAILAKRTDVLSPHMLHVIEDLAGDWRRLDERIDALSDEIMTLARQDKGCERLMTVPGIGPIISSAMVAAIGSGDAFSKGRDFGAWLGLVPKQMSTGDRTILGSISKRGNRYLRTLFVQAAWVVLVKIKPEGWERYGLKSWIEAAKKRLHHNVLAIALANKLARIAWAVLHKGRAFECVKTNATAPRPA

SEQ ID NO: 83330 - protein, 359 aa, unidentified
MADAMDTTTKPHLLAIDVARRSNAVFVELATGEQRRFKMTNSAQDFDRLVQFLKATTGSWRAALEPTGDYHRPIAHRLLEAGVDVVIVSSIAQARYREAKFNSWDKNDPKDASVILDMLKHGMVMRYIDPMVAGHHDLQELSKTYYQVTRARTKVLHAIANHHLPLYFPEMRRYWQTTRTEWWLRFMLEFPTPAHVRQLSQEAFVRQAWELVGRKVEKTAKLNEIWQMAEHSAALPHAPGCLAVETFRVSLRQAQHLNELRRSLEQRAEDVLASNKDYEQLISLPGIGPIIALTVLAEVGDIRRFSHHRQFLKYCGFDLAKLQSGGQRGREQLSKRGNARLRLAFWMAGQVAVLNRTEF

SEQ ID NO: 83331 - protein, 366 aa, unidentified
MMETETTKILGLGVDISKKRAEICLKNPAVADSFAVSNDDQGISTLLRKLKPYVEAGLVVKGAIESTGNLWMRVYEALEQSGIDIALANPLKTKAIAEARIKSDGIDASILADLARADLVAKCYVPDKRTREVRSLVRYRVDLAQRSTELKNKVHNILDKYSLRYDGLLFTDRGLEWLNEQVRNRLSVIDGQLVNSYLKEIATMEELIASVERQMAKLAIKDKKVELLLGFTGIDYYYGALLLLYEIGDITRFSNPRKLVSWAGLAPSLHQSGIVSYTGRITKQGNRRVRWYLVEAAQRAARYDPKLKPFYERIAQRKGHQKAIVAVARKILVSVYWVLTRNEPYDGYRDDVKTRKLKRLERLSAC

SEQ ID NO: 83332 - protein, 400 aa, unidentified
MRTVFGIDVSKASSEVAILVNGERVYGYTMPNDIIGFSRLLEDLKTVSNPEIIFEATGVYSRRLQAFLEEYSYDYTRLNPLEAKKQLDGLRVRKTDKIDAEKLASSQFVLNRKPTYVQEEVYQNLHDLSRFYQNLTEDIVRTKNRLHKVLQIAFPEIENLLSTPTGEQYWNLVSIFPTKHWVLELSEAELKEAIRNSTSKRISENRVGNLTEKLVGLAKQSYSGISKTSPMVEEVKYDAQELIRLTNRREQVLQQLIALAEPLPEYEILLSIPGIAETTATSIIGELGDIRRFKSANQINAFIGIDLKHYESGDFLGQEHITKRGNPYARKILYKCIHNIASASHTNPCHIADFYEKRKRQSQITSTKPHTIASIHRLIRTMYYLIMHNKLYDYTLAQSH

SEQ ID NO: 83333 - protein, 346 aa, unidentified
MNQIARIGLDIAKRWFQIHAVDETGREVLNRKLPREKILGFLAALPACDVALEACSSSHYWGREIGRLGHRVSLISPNYVKPYLKRGKSDAHDARAICEAASRPDMRFVRVKSEEQQAALMQHTSRQLLIDQRTAVANSLRGQLAEFGVIERKGIENVGELVRMLDDDDEGVAHVPASALTAMKILADQLRAVDAHLAAIDEQIEAWQQESAAAQALKTIPGVGTLISAALAAHVPDPSMFRSGRDFAAWLGLVPRQNSSGGKERLGRITKQGNPYLRRLLALGATASLRWLHKRPGPLAAWTKRLLQRRPARLVTVALANKLARIAWAIMTTGELFRLEAPIAPA

SEQ ID NO: 83334 - protein, 442 aa, unidentified
MNAKPTPLTVLSPHAAGVDVGSEKMHVSIAGGEPRVFETFTVGLGRLRDWLKENGVRTVAMEATGVYWLPLYQILEEASLEVVVVNGRHVKNLPGRKTDMQDCQWLATLHAHGLLRGGFVPPAAIRRLRDYQRLRQDHLSMGGAHIQHMQKALERMNVKVHDVLSQLTGASGLRVVQAILKGERDPEKLADLCDGQVLVKKRERLIESLRGTWEAEHLFALRQAVAGWEFYQQQVVECDGEIRRELGQLAGPEPEKPPGKSETGKPAKVLKHNAPQIPDLKRMLMRACGGQDLSVLPTLTDYTVLQIISETGTDLSRWPTAKQFVAWLGLAPGSRQSGKRKKAEHVGMGRAGRLFCVVARALGRSKYLALTGFYRRLRAIRGGQVAVVACARKVAILFYLTMTKGLKYVEEGLAKYEERFREQHLRRLEKSAQKMGFKLVAA

SEQ ID NO: 83335 - protein, 405 aa, unidentified
MPYILALDVSMGHSYSVLYKDNTCLFEDEIEHTQRGFHALLEEIQHLPERPLIVFEATGIYSRPVEKFFQDHHFSYCLLNPLEVKKQMEESTLRSWKTDKSDAHRLAQTHLKNQRQPKEVQSNFYLEMRDLARFYQEIEKKITRLRMDLHNCLQLTFPELEQFFSNRLTPYALTLIRLFPHPDFVLASTRTKIKNKLINETRKKISANRAEQKADQIIHYAQCAYPAVEKDSIHCQKTIYYAELLQDLLEQKEALATQMIKKAEGSPCFLLYQTFPGIGALTAALLLGELGDITRFKTHKQLNAFVGIDIRRYQSGKYTGQDRINKRGNPKARKIIFFTIRNMIRQQRAAPNHIVDYYYKLKKQPIPKKDKVATVACMNKLLKCMHAMVRAHTEYDYAYAVSVDH

SEQ ID NO: 83336 - protein, 355 aa, unidentified
MVIIGLDYHPSFQQIAFVDDETGEFGEKQLVHGNQEGESFYRELKKRGVRVRVGMEATGHAGWFEKLMTELGFELWIGDPAQIKAKRVRKQKNDREDARLLLQLLMENRFPRVWVASLENRDLRQLLWHRHRLVQMRTRIMNQLQAVAMNEGVRRKKGLWTKSGREQLEAFLLAPWATRRRKDLLELLDRLNPTIAELSTAIEQEAKKHPAVVRLMTHPGVGPLTGLAFVLIIGPPQRFRCGKQIGSYLGLIPCEDSSAGKQRRGHISKQGNSLMRFLLVEAAQIAARHDPNWRRKFLHLAMRRGRKIAKVAMARRLAVCLYWMLRKEWNYQQLLKFGSHAGQLETGHGVKEITA

SEQ ID NO: 83337 - protein, 354 aa, unidentified
MSQTPNTTVAVIGIDIGKNSFHVVGHDARGAIVLRQKWSRGQVEARLANIPPCLIGMEACVGAHHLSRKLASLGHDARLMPAKYVRPYSKGQKNDFNDAEAIAEAVQRPTMKFVATKTAEQLDLQALHRVRERLVSQRTGIINQIRAFMLERGIAVRQGIGFLRTELPTILATRTDALSPRMLRVIEELAGDWRRLDQRIDGLSGEIEALARQDQACSRLMTVPGIGPIISSAVVAAIGTGDVFSKGRDFGAWLGLVPKQISTGDHTILGKISRRGNRYLRVLFVQAAWVVLVRIKNWERYGLKSWIEAAKRRLHHNVLAIALANKLARIAWAVLAKGRAFELTRTDDAGVRPA

SEQ ID NO: 83338 - protein, 349 aa, unidentified
MIIIGVDFHPEFQQIALVDTDTGELEERRLHHPDEAEAFYRDLVSQGKTVRVGMEASGHGRWFERLMGELQIELWVGDAAEIRTKRVRKQKTDRQDAQLILKLMLKDDFPRIWVPSWENRDLRQLLWHRHRMVQARTRIMNQLQAVALNEGLRCKKRLWRTERPRLESFPLAPWASRRRHDLLELLDRLNPTIAELSQAVEREVEKFPEAQRLATHPGVGPLTALAFVLIIGEAERFQCGKQVASYLGLVPLEDSSGNRRRLGHITKQGSSILRFLLVEAAQVTVRSLPEWRSRYFHLMMRRGRKIAKVAMARRLAVCLYWMLRQRWDYQQWVEFGSYAGQPGNRHGVQ

SEQ ID NO: 83339 - protein, 348 aa, unidentified
MKEISTIGLDLAKSLFQVHGVASAGHVVVRRQLRRGEVLSFFGKLAPCLVGMEACGGAHYWAREIAALGHEVRLIPPAYVKPYVKRGKTDAADAEAICEAVTRPTMRFAPVKSAGQQASAMVLKTRDLLVRQRSQTINALRAHLGELGVVTGTGVAKVASLIVIVRDHEDARLPAAARFALTALADQIDRLTNEVEALERQLVAEVRRDNDMRRLTTIPGVGPITAAAIKALVPDIAGFTSARHFAAWMGLTPKPHSSGGKERLGSISKMGNATLRTLLVVGATSVLRHVRNGANGPEWLVGLLARRPAKVVAVALANKMARIIFALLTKGGEYRKPEWASGMEPVAA

SEQ ID NO: 83340 - protein, 406 aa, unidentified
MDVVYTHVCGLDVHKKNVVACVITPETKEIRTFSTMTDDLILLVDWIKCKGCTHVAMESTASFWKPIYNLLELEEIQTLVVNAKHMKNVPGRKTDVKDAEWIAGLLRHGLLQGSFIPSRDQRELRELIRYRRSLIDERAREVNRVQKVLEGANIKLSSVASDVLGKSGRAMSEAMVAGEENPELLSELAQRRLKNKKEDLKRALNGLMGNHQKLMLAAQLRHIDYLDEEIGRLDEEIKRRMLPFEEDLELLDTIPGVARRTAETIVAEIGTNMDQFPSAAHLCSWAGLCPGQNESAGKRKSGKTRKGNKKLRSTLVEAARAAGRTKNTYLSSQYHRIAARRGANRAAVAVAHSILMIAYYILKRRQPYIELGPTYYEERKRDTIIRQSLKKLESLGLKVTVESVAT

SEQ ID NO: 83341 - protein, 355 aa, unidentified
MQRYIGMDVHAASCTLAVISEKGRKLRDFPVETNGQALVEAVRMIPGHKHLVFEEGLQSAWLYETLNPHVDELVVAGITQSRGPKSDKRDAYGLAEKLRVGNLDKPVFKAPRQFTRLRELSRIHMTLVGDVVRVQSRIKSLYRSRGVLVTGVDVYSSRRREAWQKQLCSSAQTRVTRLYEHLDFLLEQKKQAEADLLREAKQHPIVRILETAPGFGPIRAARVVPIVVTPHRFRTKRQFWSYCGLGIVTRSSSDWVQTADGGWIKTRVPQTRGLSRQHNRALKSIFKGAATTVITQRNKDPIHARYERLLDGGTKPTLAKLSLARMIAATVLRMWKDEEVYDPGRAGPFTQTREG

SEQ ID NO: 83342 - protein, 438 aa, unidentified
MSLSTAVPVQEPEWAAFVAMDWADRKHFWRLLPAGSQVSEQGELVNTPEDVEEWAVRLRQRFGGRPVAVCLEQSRGALVYMLTKYPHLVLFPVHPTMSANYRKTFSPCGAKSDAGDTAALLDLLLRHRDKLRCLQPDTADTRLLHLLVEERRQQVDERTAQSNRLRDCLKLYFPQILSWFEDVTTPLVGDLLVRWPALEKLQRANPAVLRRFFHQHNCRNENLIDERIAAIYQAMAATSEEAVVEACMLKAQSLVALLAALRSNIAGFDRRIEELVQSHPDASLFASFPGAGPVLVPRLIAAFGTRRDRFQNAVEMQTFSGIAPVKEASGNSEWIHFRFACPKFLRQTFQEFAGHSIGHSQWARAYYEHLRNDEKKEHHAAVRSLAYKWIRILFRCWKDGKLYDENIHLQSLRRRSPLVTRLGWDAIAGFQKPSEKIS

SEQ ID NO: 83343 - protein, 428 aa, unidentified
MNQPSNNDDTQNDYAAFIAIDWADRQHVFSLQVAGQTTKETGTLEQKPEVIGPWVAKLRERFGGRPVAIAVEQSRGALIHALMTYDFIVIYPLHPTTVAKFREAFKSSGAKSDPLDTDQILQILTKHRELLKALNPDTEQTRLLARLVEDRRKAVDLRTSHVQALTAALKEYFPQALELVNGNLTSRLACDFLIKWPSFEAFQQAKPSTIKRFYYGHNIRSPEVMEKVLGLVKTAQPLTTDSAIVQSGSRLSQMYAQLIRTLNSVIVDYEERIEKVFHDHPEANLFNKLPGAGPALAPRLLSFFGTDRSRYEAAGNVQSFSGIAPVTKSSGKTRVVYFRHACPKFDRQTFHEFARLSVSKCQWARNYVDYYTAKGKKFHTIIRALAFKWIRILFRCWKNRAPYDETKYMDNLKKRGSIFATLHLEQKS

SEQ ID NO: 83344 - protein, 341 aa, unidentified
MKQFIRIGVDLAKNYFQIHALSSEGAPAIKRKVTRRKMREFFSQIAPCCVGMEACASAHYWARELKAMGHNVLLMPPAYTKPYVKRGKNDAVDAEAICEAVSRPGMRFVPIKTAEQQATLMLHKTRELLVKQRTMSVNAVRSHLAEFGIVVAKGIGRVEELLELAEADATLPNATVMAVQVLGRQIEALDRGIEDLEKEIAKAHARSEMSQSLSEIPGVGKLVASVIAASVPDPSVFGSGRHFAAWLGLTPRQNSTGSKQSLGAITKAGNRYIRKLLVLGATSLLNVVSKRKGGLRDWIVGLLAKKPARLVTVALANKLARIIWAMMKNGECFRTEMFAKA

SEQ ID NO: 83345 - protein, 403 aa, unidentified
MNAVGIDVSKGKSMVTILRPFGEIVSSPFEIKHTSSDILSLIKLIHSIEGESRIVMEHTGHYYEVLAQQFSAAGLFVSAVNPKLVKNFNNDSLRKVKSDKADSIKIARYALDKWQNLKPYSIVDELRTQLKAMNRQFHFYVKQKTAMKNNLINLIDQTYPNANTYFNSPPRSDGSQKWVDFVYTYWHVDCVRKMSLNSFVKHYQNWCKQKKYIFNKSKAEEIYTQSTELVPVFPKNEITKRIIRQAIAQLNSTSATVETIRILMNETASKLPEYPIVMQFKGIGPSLGPQLMAEIGDVTRFTHKGALTAFAGVDPGVNESGSYAQKSVPTSKRGSSNLRKTLFQVMDVLIKTMPQDDPVYQFMDRKRAQGKPYYVYMTAGANKFLRIYYGRVKEYLCILSESS

SEQ ID NO: 83346 - protein, 400 aa, unidentified
MTMRRRAWVGIDVGKTSHHACAIDETGKVVWNQKVSNEQRAIEQLVTRACKGAEQVRWAIDLTSPMALMLITVLLCAEQSVVYVPGRTVNTMTHAFRGEGKTDAKDARVIAETARLRNDLSNVVLPDELVVELTQLTGYRADLMADWVRGINRLRALLGSIFPGLEAAFDYSTRTPLILVSGLCTPAEIRAAGIDGMTAFLVENHAWPTGIVKSAATAVALANEQPLALPGEAGTAALIKRLARKLLELDREIKDIDKTITERFREHPYARIIESLPGFGPGLGAEFLVVTRGDLASFATAGRLASYAGLVPVPKDSGRITGNLRRPKRYNRRLRRVFYLAALSSLRADGPSRRFYDRKRAERLIHTQALLALARRLIDVLWALLRDDREFTPEKPTAAA

SEQ ID NO: 83347 - protein, 414 aa, unidentified
MKSCLFVGIDTHKDSHTAAVLDGYFEVVATISFTNSSSGFTGFEEKLKKLRNGKDLIFGLEDSQGLGSFLASYLIGKGYKALEINPITTDRGRKHTVSRDKSDERDAVVIAKTLIRERSNLHPVRIDRNGVALREMAGYRQMLIGESTRIKNRLHMMLFNQYKRVLSCFKDPFGKCALAFFLRYPDPFSLKEADPNSLSDFLKTNSKGMFSGEKARAILSSTGNNIADSLTDTRAHIIASHIERLLGIQEELKKTQDMLKDLVIASSYHCLTSIPGIDIITAARIISAVMDISRFSSASKLARFCGIAPSERSTGRKKRYVKSKHGNKSLRSTIYFVALSHISRTRDGRDKNPISRAYYLKKVSEGKTKKEALTCLTRRLVDIIFAIMRDRSIYNFSKSRFTKHHDSLINTVAA

SEQ ID NO: 83348 - protein, 342 aa, unidentified
MEKITTIGLDLAKSVFQVHAITEDGHVAVRRALRRSQVLEFFRHIEPCLVGMEACGSAHYWANAIGEFGHTVRLMPPAYVKPYVKRNKTDAADAEAICEAVTRPTMRFVPIKSPEEQAAGMVLKTRELLVRQRSQTANAMRAHMAELGIVAATGMTSIAKLVAILRDDRDGRLPNSARAALLEMADQIERLTERVEVLDSKIIAAVKADEAARRLTTIPGVGSIIAATVRAAVPDPAAFRTGRDLAAWIGITPRANSSGGKERLGKISKRGNKQLRTLLIVGATSILKQARRGSKLPGWVVSLMARRPYKVAAVALANKMARTIWALLVKGGTYQVPAMARE

SEQ ID NO: 83349 - protein, 423 aa, unidentified
MSYRIAGIDVHKKILAVVVADVSAEGEYDFERRQFGSSPDQLRLLTEWLIEQKIQEVVMESTAQYWRPVWQTLEQHWKAECQTWEGAGPMAGTLHLAQAQSNRGPRGRKRDFVDAERLLKRLVAQELILSFVPDAEQRLWRTVVRRKYQLTCDRVRLQNQLESLLEEAHLKLSSLVSDLLGASARRMLKALAVGETNPAALAALADRRLRATQQQLCDALGASKELNPVYRRLVKMALEELQLIEQQMDQLDHEIADLLSQHQTAVQRLAEVPGLGVDSAHQIIAEVGAAAATFPSEKHLASWVGVCPGEEESAGVSASNRSPKGNRFMRRLLNQAANAAVKVKGSIFEIVFRRLLPRLGFQQAIWAIAHRLCRLIWKILHQGVRYDERGPAVSQRSRGARTAKMIRELRSLGYDVELSGNPA

SEQ ID NO: 83350 - protein, 343 aa, unidentified
MFKIFRKNCCGLDVHKTWIYACIGITDANGRTDYKQARFSSFTNGLHKLSVWLAGFSCKEVCMESSGKYWIPVFNILEKSCWVTLREPFGATNVRLSCPEGKPVAHPKYTKPQKGNKTDRKDAKWICDLFMCDMIKPSFIPPPDIRHLRDLVRYRFKLTNILTGEKNRAQNCLTVSNLKLDDVFSDVFGKSASSITNYILEHPGEPFDVRPFVDGRCKHPVEEIQAAVDGSISPEQAVKLREILHHIDELETHKHNIESEISRLAEPYVQVLELLHTVPGFSANPMTAIAVLSEIGADMSVFPTAKNLCSWAGCCPRNDQSGGKRKSTLPCWRLSQTAPGSSG

SEQ ID NO: 83351 - protein, 337 aa, unidentified
MSIIRIGLDTAKHVFQLHGVDEKEQPVLRRRLSRKEVEPFFAKLPPTRIGLEACGAAHYWARVLRGLGHAAVLLPPQYIKPYVKRGKNDALDAEAICEAMSRPGMRFVSVKSAEQQAALMLLGTRELLVKQRTMLINAMRGHAAEFGVVAAKGLGNVGELLQHAHAEAAGVPALALQMLDLLASQLDALELRLKTIEAKLMAWHKADPVSQCLATQPGIGPIGAVSFALKVTDPKAFRSGRHFAAWLGLTPKENATGGRSRPGRISRQGDESLRRLLVLGATTVIQFAKPGRASPWLIQLLARRPRKLAAVALANKMARVLWAMMVSGELYRRPQPA

SEQ ID NO: 83352 - protein, 405 aa, unidentified
MEIFVGIDWAEAHHEICVLDEPGTVLAKRRIAEGLEGVGQLHTLLADHAAEPNQVVIGIETDRGLLVGALLAAGYQVYAINPLAASRYRERHVTSGAKSDPGDAKVLADLVRTDRHNHRPVAGDSELAASLQVLARAHQNLLWSRQRLVNQLRNNLREYYPAALAAFGTELAHPVALGVLDAAPTPAMGRTLSRAKLAAILRRAGRQRGVEEKAAAIQDELRAPQLAAPALVSEAYGKSVAATVRILRDINAELASLEAELSPSFEKHPDAEIYRSLPGLGIVLGARVLSEFGDDRTRFAHPKARKNYAGSSPITKTSGKSRVVLARLARNRRLADACHQWAFCALTGSAGARDYYHRLRLRGKTHHQALRAVANRLVGILHGCLDHRQTYREDIAWPRSLPVAA

SEQ ID NO: 83353 - protein, 472 aa, unidentified
MKAKQQKRPASGGRIRPSESLPVINVHAAGIDISPNGHAVCVPEDSVPAGASPVREFGAFTRDLDDLVEWLRSCRVRTVAMEATGKYWIAPYERLEAAGFEVVLVNPHDLKHVPGRKSDILDCQWIQRLHSYGLLAGSFRPPEDIRKLRTLLRHRSNLVVGCGQAVQHMQGAFDEMNIHLHRVVSDLDGETGLRIVDAILAGERDPEKLVELRDEHIRKSTVDEMKAALRGFWQEEQVFVLRQARENYRYFQSKIQECDDQIQKVLQAVRSNPVTVSPQVAPPNPVGKVTRKKKKGAGGNAPRHDFTAELTRICGLDLTQVIGLNVLSVLMIISEIGVDMSRWRSPKAFASWLGLCPGSKISGGKRLSSRTRAVANRVSILLRHLAPTIGRTDTWLGIFHRRMKGRLGPAAANTATAHKLALIIYHLLRYKEDYIDVDALLYQDKWRHSRLNRLRKQAKELGFELVEQPTAA

SEQ ID NO: 83354 - protein, 463 aa, unidentified
MMDNEVRLGIDVACTAAHQASLADERGGFLWQGWKFRTTTADLELLWSKIPAGARVVAVMEPTRNAWVPLAAWLQARGVEVSVVPPEQSADLREYFNKHTKTDRLDSKMLARMPMLHPEGLRTIDSLGPADPFKRATRHRTSVQKRRVASAMRLDALLELLGPGWAELFGTVSYGKTAVAVLERYANPHAIKKLGRSRLAKLLIRASRGHWREAKADEILAAADETLALWAAGGLDFDELADDIVIEVRLIKALDAEIAALDDRIEALYEQADPDGIVASAPGIGVTLAAGILSRTGDLNRFDSLAGVRSFTGLVPKIDQSGASDHHNGPTKTGDPGPRQALFLAADLARKVDPTLAERDQRLYVDAGKHHNSAICTLAAVLVTRIAACWRNGQLYELRDTDGRRITEAEGRAICAKRYKIDPATRAARRNPTNTPKRVGRDKKESQSAPVTDPPTINATQAA

SEQ ID NO: 83355 - protein, 340 aa, unidentified
MRLIGCDLHASQQSIAMLDRDTGEIVEKTLAHEGGTVREFYASIPRPVVVGIEATGLMGWFLRLMEELEIPCRVGHPAAVRKAETRRQKHDRRDAALLLQLLAEDRFPIIWMPSTELRDLRALLLHRHQWVRMRTRVQNALHAIAMAHGVRRGHTLWNREGQTLLASLPLPPHTADRRSELQALYQHLEEHIDRLDDRVQQVANERARATLLMTHPGVGPVTALATEVFVGDPARSLDGKALASYVGMIPREYSSGKRQRLGALSKQGNPFLRFLWCEAAAHAARRDPDLRRFYRRMLVQKGFAKARIAAARKLGIRLWIMLRDEIDYAEFCRRGLARQS

SEQ ID NO: 83356 - protein, 433 aa, unidentified
MRRKAYRGVRVNDVDAHALGQQRPGEEVVVGVDVGKLDLRVVVRWADAEFERPWRVINPHEIGVLVQRLQVLAQGRQMRVALEPSGTYGDALRQALHDAGLRVQRISPKAAHDYAEVFDGAPSQHDGKDAAVVAELAATGKGKDWVYRERDLWTQELVYWVQGLENERRIWMMWMGQLEGLLGRHWPEATRILKLSSGTLLRVLATYGGPAGLAADAEAAQRLRQWGGRLLSPEKLEALLQSARQTVGVRQDRWTRDALREFAEQALQARQKYRHKQRQLRRLAADEPVLQAQGKVVGVPTACVLWVSTGDPRGFDSGPAYRKAMGLNLTERSSGRYQGKLRISKRGSARSRQWLYFAALRQIQQGGVRSWYEAKKARDGQQAKRAVVAVMRKLALALYRVGAHGEKFESRRLFGRRGKPAASGSSSSSGQRR

SEQ ID NO: 83357 - protein, 408 aa, unidentified
MYAVGVDVSNGWSTVAVLRSKTDIVIRPFNVTHNSQGFASLLEKLGTLDGEVRVVMEHTGNYYESIANVLHKSGLWVSAVNPLLIRNYGDNSLRSVKTDKADAKKIARYTLDNWEELRQYSPMDTIRYQLKTLNRQFQLASKNRTACSNNLIALLEQSYPGVRSLFSSPVRSDGSQKWVDFANAFWHVDCVAKLSLNAFTVKYQKWCKRHGYNFSEAKAAAIHENARTLFPLVPKSETTKLLVREAITQLNTISHTAEVFRAEMNRLAAQLPEYDTVMAMTGVGPSVGPQLMAEIGDVRRFAQKSSLVAFAGIDPGRDDSGSKVSNKGRIGKRGSPHLRKTLFVIMSILLQLKPEKDPVYQFLDKKRFEGKPFYVYTTAGGTKFLRIYYGRVRDCLKEKGLWDESVTD

SEQ ID NO: 83358 - protein, 362 aa, unidentified
MTQHGKVKKPKKRRIVGGVDTHGDTHHAAVVLLNGTRVADAEFAATAAGYALLLAWLRSFGRLFAVGVDGSGAYGAGLARHLAAEGVRVVEVNRPDRRQRRIKGKSDPLDAYAAADAVLSERATVTPKLGTGIIEAIRALHTTRAGAVKARTAAMNELRALLVTAPADLRDRMRGLTPVALVAACARLRPTGDTADPQVAVRAAIRSLARRHQALTGEIADLDVQLRPLVERACPQLLAIHGVGYETAAQLLVTAGDNPDRISSEASFAALCGVAPIPASSGKTRRHRLSRGGDRQANRALHMIACTRLATDTRTRAYRDRRAREQLSPKDILRCLKRYLARQVYKALTSTNTERDEIPTAA

SEQ ID NO: 83359 - protein, 319 aa, unidentified
MSVSKTEKIFVGVDVSKFHLDVFLPDTGVLIKLENTESAVDEFCQSLVKKKLTVMVAMEATGGCERLLLNQLAKHKIEATVLNPRRVRDFAKGIGADAKTDAIDARIISQYAAVVNPNPTAMKSDHEQKHSALVTRRNQLLELINQENNRLKQSWDEDAKASIREVLEVLKKQLKSIDSQLSTMLKNDTENQRTIEILGSVKGVGPVTISTILAELPELGALNRGEVAKLVGVAPINRDSGNKSGKRFIGGGRGQVRRVLYMATIVAIRHNPAIKAFYTHLKSHGKASKVAIVACMRKLITILNLLIKTNQLWENKMSV

SEQ ID NO: 83360 - protein, 310 aa, unidentified
MPTLTSKHIGVDIAKTNFVADLSGTTATFAQSPQGFALFIKSLPPAATVVCEATGGYEQAFVAALHAARVPVAVVMPKRVRFYAKSLGLLAKNDPIDARLLSRFGQANAGALRLHQPVACAQLRELLRTRDELVEQIKLEANHAEHPVSVPLLLKQAARRRRLFEQQLQQIEAAIRALVDSDPSLRQRNGRIRQIQGIGEVSAWTVLAELPELGTLNRGQAACLLGVAPFCQDSGSKTGLRCISGGRPRPRRVLYMAAVCAAQHNPVLKSFYQRLRSNGKLPKVALVAVMRKLSELLNLSLKYPDFPLVG

SEQ ID NO: 83361 - protein, 360 aa, unidentified
MQILALDVGKSKSVAYAVDLKTGECGFTTVRTRPSALGRLFARHRGAHLVMEIGPMAGWIRDQARASGIREVQVAHVGHEAWRWRNVRRKTDRSDAVRLAEMAMAGRLPQVHVPAAPTRQWRRLIGYRAKLRDRRTAVKNRIRSILGSVGETLPPGKAGWTRQGRAHLASLARPLTTCGPEDLWRGELALELETLEHLDAQVAEVEARLDRLAETDPRVARLRTIPGVGPRLAEMLVALIDDPHRFRRGNQIGSYLGLVPRQFQSGSMDRRGRITRHGNRLARSLLVEASWVALRYNPRLRMIYERVHRGSRTRRKVAIVAVARRLAVIAWAMLRDGTRWQPDRAGSPTAAIEAMAGANG

SEQ ID NO: 83362 - protein, 366 aa, unidentified
MKKGTTFVALDDSKRKLVVGILQPGAEEPEVREIPNEAKLLRRLFERLRREGPVAACYEAGVSGYDLDRQITGLGVACQVIAPALTPRRPGQRIKTDTRDAKKLVRLVRAGELTAIRVPAEAEEGVRDFVRCREDVRRDVGRWRHRVVKFLDRHGRRYVAGRNWTGRHWTWLRSQRFEIPALQRTLEVSLFTLEQALARQAELDREIEALAQSEPYREPVGWRRCFRGIDTLAAMILLVEIGDFHRFQRPRELMAYLGLGPSEHSSGERERRGALTKAGNTHARRAVVEAAWHYRHRPGLGRALARRSEGQPDACRGHAWRAQQRLHRRYRHLVGHGQRPPGAVAAVARELVGFLWAAMTHRPLVA

SEQ ID NO: 83363 - protein, 349 aa, unidentified
MVTIGADLHKRTHTLVAVDETGRKLAERTAPATAAGHLELVRWAARWPARTFALEDCRHLSRRLERDLLVAGEHVVRVPPKLMAGARRSSREPGKSDPIDALAVARAALREPDLPVAVLDGPERDLRLLVDHRDDLVSQRTQIENRLRWHLHELMPGDEPAPRSLGHAVVLTALERRLAEPSSTVARIARELVARIRELTAAIDALQREIARLVAALAPSLLALPGCGSLTAAKLVGETAGIGRFHSRAKFARHNGSAPLPVWSGNTVRHRLSRGGNRQLNVAIHRIAITQLRLGGLGRAYFDHRLAEGDTRTEALRALRRRISDEVFRRMRGDEAARAAWPNGLAAAA

SEQ ID NO: 83364 - protein, 290 aa, unidentified
MTNDTAGLRRLKRELDALGQMPRSALRIVMEATGKWHRAVQRSLHADGFYVSVVDPLRARLFAKACGFLAKTDRLDARFLAIMGEALKPVQTPPPDQALEALQELVNARSAANGERTALSNRMKTAVTAFLRKELTRRLAALDTHIARLDAEIQRSICADPEMRRRLDILISIPGIGAVTAASLIAGLCELGACSGKQAAMLTGLAPLACESGERAGHRAIRGGRPAPRNAIYMAALSASRHNPDLARFAERLKKVGKPNKVVLVAVMRKLIVLANTLITKNRIWTPNPP

SEQ ID NO: 83365 - protein, 440 aa, unidentified
MSKRAYRATRVNDVNWDQVAQGKDGLDITLGVDVGKYSLWAVCRWADGRFERPWRVQNPGEIPTLLTLLKRVSAGRKLVVAMESSGTYGDALRQALADNQIEVQRVGGKAAHDYAEVFDGVPSQHDGKDAAVVAELAALGKAMPWEYQPADPWEQELAYWVEWMVAHRQMLTIWQGRLEGLLARHWPEATQVLKLSSGTLLRVLKRYGTPQALAADGEAAKLLARWGGAFLAPEKIEQLLTGAGASVGVRLGEWQQRQIQNYAQQALAARQEANRAQRRLRSLAAGHAVLQAQGKVVGVPTACVLWASTGDPRKYHAAGAYRKAMGLNLVERSSGTYQGRLRISKRGSPRTRQWLYFAVLRLVQKCGVRPWYEAKKAHDEADARRAVVAVMRKLAVALYYVGVHNEEFQPRRLFGRIRRRSGSPGEQKSRTKRRSRAEQI

SEQ ID NO: 83366 - protein, 288 aa, unidentified
MSIIGCDLHTRYQVIARIDTETGEMTTRRLEHENGEAKAFYASAPKPSLIGIEATGYTQWFERLVAELGHELWVGDPAEIRARAVRRQKTDTRDAEHLLDLLANQRFPRIWVPTPAERDLRQLLKHRDKLVRMQTSIRNQLHFLAMSQGLCRKKKLGTVKGRSELEALSLGDWARQRRQELLELLDRFDPSLEKLSQAVKEQAERRADCQEMMKLKGVGPVTSLAYVLTLGPVGRFANSRSLVSYLGLNPSEHSSGGRQRLGHISKQGNQMLRWLLGGGGSRSGPVRS

SEQ ID NO: 83367 - protein, 343 aa, unidentified
MQVTTIGLDIAKNVFQVHGIDGDENVVVRKQLRRGQVMRFFEELSPCLVGLEACATSHYWARELTKLGHEVRLMPARDVKAYVKRNKNDAADAAAICEAVRRPTIRFVQVKSAEQQARLMQHRARDLLMRQRTQLINALRAHMAELGLTAAQGREGISELLEIIEDEGDARLPLDARASLMVLAAQLEAMRTSIGLLEKRIVVQHRWNPDSKRLETIPGVGVIGATAITATVTDPAAFKSGRDFAAWVGLVPRQDSTGGKPRLGPISKQGDRYSCGGSSLAVQFLFCAVPSSVHRDIHGSHRCWRDDRSRWSPLRSPTRWPVSPGLCWPRVEPIRDFGLRQSE

SEQ ID NO: 83368 - protein, 346 aa, unidentified
MMIIGCDFHPSWQQVCWLDTATGESGEQKLVQASGDAERFYRQVAAPALIGMEATGNCHWLVDLLAEIGHELWVGDAAQIRASYVRQQKTDKRDAVHILKLLVEGRFPRIWMPSSQVRDLRQLLLHRYKLVMIRARVKNELQHLCLNQGVQRKRKLWSQAGQQVLRELPLKPWAGRRRDDLLKLMAMLDQQIGPLEEAVKADAQGDKMARLLQTQPGVGPITALAYVLTMGDVGRFPRGKQVARYLGLIPREHSSGGRQKLGAITKQGNRMLRMLLVEAAQIAARYDPEFRRQYLHRCHQKPKAVAKVAATRKLAVRLYWMLRTQVAYPEIVRIESSPRVPLVGAS

SEQ ID NO: 83369 - protein, 368 aa, unidentified
MTSILYIGMDVHTTNYTLCSYTLETQQAFGRMQVEPDYKQILKYIEKMKEAWGDDIEIVCGYEAGCLGYSLYHSLTDHGVNCIILAPSTMASAPNERKTDKRDAEKIAKCLAYGTYSPVYVPTQGDEAVKEYIRMRDAHKANLKRIKQQIIALCHRYNKQYAKQSHWTQAHLAWLKAQRFNEPILQETFEEYLIQYHQAVEKLERFDKRILELSGKEEYAEKVRKLVCFNGIREHTALSAIVEIGDFNRFPSADRFAAYLGLVPGEHSSSTNIHRTGITKKGNSHLRTLLTESAQCYSRGQIGRKSVALKSRQEGNEPAVVAYADKANERLKRKFKRINFSRPHNVAATAVARELACFIWGMMTGHIN

SEQ ID NO: 83370 - protein, 313 aa, unidentified
MSEQVFVGIDVSKDRLDVCVLPDAEKAAFENNDEGAEALGSKLAERGATLVVLEATGGLERLVVAHLVAKGLAVVVANPRRVRQYAQAAGILAKTDTLDAHVLACFAQDIRPERRPGRSPQEELMKELMARRNQLMRMRVAEMNRMTRMTDKGIIADIKAAVRFLDRQIAKVDERIDDEVNSNPTWKQTDDLLQSVPGVGKKTSRMVMAALPEIGTLSEKEAASLAGLAPFANDSGKMRGKRMISGGRVSVRRALYMATLVAIVHNEDIRTFYRRLRGAGKSGKVAVTASMRKLLITLNAVVARGSKWEPKRA

SEQ ID NO: 83371 - protein, 343 aa, unidentified
MQTITTNGFDIAKSVFQVHGVDAQGNVVLRRQLKRRYVLAFFQKLPSCLIGIEACASSHHWSRELQALGHTVRLMPPAYVKPYVKRQKNDATDAEAICEAVTRPNMRFVATKMAEQQSCLMLHRTRHLFIRQQTSVINAIRAHLAEFGIVAPVGRNGVDQLLGVVADTLDKRLPEIARLCVAALGAELRMLKAQILEFDRMIRAWHRSSEASMRLDAIPGVGPALATALVASVADPKAFRSGRDFSAWIGLVPRQNSSGGKERLGNISKRGDRYLRSLFTTGALAVIRYAKIHGNRQRPWLTALLARRPTKVAAIALANKIARMAWAMMAKGERYKEPAALAA

SEQ ID NO: 83372 - protein, 325 aa, unidentified
MEEKKRCCGIDVSHTTLDVCYQNNLGELFHLKVGNNNQGFAKILEHTGAGYHFVMEATGVYYIRLAFYLHGQGCRLSVVNALSIKRYIQMHLERNKSDKKDAAWICRYAIEQQPPYWEMPDSTYFECKQLYNTIREYAEQMKRFNNQLHSLRLLPVPSKDTIKSLEKINQQLEKEMKSLEVKLEAQLQQWQPEQLKSISSIKGIGKRATAMLIVFTQGFKYTKNHRQLISFAGLSPTEYSSGSSIQGKPRIYKRGGKNLRDVLYMCSMNAIKTNPACKALYERLRANGKTGKQGLIAVCNKLLKQVFAVVKNNSLYQPNYCSAKQ

SEQ ID NO: 83373 - protein, 457 aa, unidentified
MSNGSSRRLSRGDRRRNEKLARLRAVITRESAVLAFDLAADKQVCALTDPDSRVLARRTVRVKAWELSEAVSWGLARAAEAGYSSVVVACEPTGHRWRVLDQIVAQHGARLVCVQPLLVCRAREAEDFTRNKNDDTDAMIIARLVTELRCYLPERADPTWARLRHLGARRTALTVDTGAARQQVRDLLECAWPAALSAASQPLDSKSWLAAVTVALDRIGDTGDLSVIRRWGWRNFAAAVRRELGPTRWYSAIVRAVFDAATDPTLATVGVADQRAGALERVRFALADLAHARAQITVIEHRMRGVLDDLGLTELVSSIPGVSAIGAATILAEAGDLTRFTHARALVKHAGLCPRDNSSGTYQGRTSISGRGRPELRLAAWRAVFSALQHNPVLAARHAHLTGRAENPLTDTQARVAVAASLLRQLHAVVLTHTPWDPIIAAGLDRADRTDQEAAAA

SEQ ID NO: 83374 - protein, 350 aa, unidentified
MDIVGGFDVHRKQITFDYIEMDTAQSHRGEIRPAERENLKEWLDEFTERFDGRQAAFALEATTGWRYVVEELGRAGIEAHLAEPADTRALRGRKKRAKTDRIDARHLRELLVIDRLPESWVPPEHVQEIRTLMRMRHSMVEERSAHLQRIHAQLFHNGCPRQENGMLSAAGREHLEGSDLPVAARKVVGVCLKMVEHINEELAPMEAELRAYARAQRGCRALMEHYGVGELTSLALFSELGDTRRFSSSKKAVRFAGLDVTVHSSDEKRVAGKLSRQGSPVLRWAAYEAAKGAYRKGSPDHEYYLKTRERVGTNRAALSIARKLIRRAHHTLRELGEEAMSEPVAFGSSA

SEQ ID NO: 83375 - protein, 340 aa, unidentified
MTITTVGIDLAKNVFAVHGVDQNGKTVLIKSRVTRTALPGLIAGLPPCVIGMEACSGAHYWARLFRQYGHEPRLMAAKFVSPYRMAGKSGKNDAADAQAICEAVCRPHMRFVPVKDESQQAMQCLHRTRQGFIEEKTATYNRLRGLISEFGVIAPQSTDALRHMVSAQKNSLPLQVQQCVDDLLEHVARIEANIAEYDRILSRMAKTDHRSQQLMELKGVGPTTACALVASIGNAHDFKNGRQLAAWLGLTPSQYSSGGKSKLGRITKAGNSYLRTLLVQGARSVLIGAEKRTDSFSRWVCSLVERRGYWRAVVAIAAKNARLCWASLHYGDDFRLYSAG

SEQ ID NO: 83376 - protein, 368 aa, unidentified
MPPTSFSQSSYRFTHVGMDVHRDSISVGILSPDFDTPEVERISVDDAAVRALLARLGDPARLRACYEAGPTGYGLARLLRSIGVHCDVVAPSLIPRAPGDRVKTDKRDCRRLARLHRMGELSGVRVPTVSEEGVRDLCRARGALVADRRRARQRLTSMLLRHGQVYRAGSLWSHAHRDWLGTRRFADPAVQATFERYLAVCTIRDADVAAIEADLEPWCDTELVWDTIRRLIAYRGIDRLGALTLAVEVCDWRRFASAHAHMAFCGLVPTETSSGASVRRGGITKTGNVHVRTQLIESAWAYRYPPKLTRAIAARHVDADPDTVARAWRAQLRLTRRFRALARTKPSTVVVAAVARELAGFVWAEMTA

SEQ ID NO: 83377 - protein, 357 aa, unidentified
MKIVGCDLHARQQTIAMVDTETGEFTEKTLFHEGNAVRAFYAALEGPVVVGIEATGAMQWFLELLEELGIEGRVGHPAKIRAQETRKQKHDRRDARLLLKLLSEDRFPEIWMPSSEQRDLRTLLRDRDQWVRMRIRLQHTLQAIALNHALRQGRALWSATGQRALEALPLPPYTSQRRTELLGLYTQLQKRIQELDQAVEQQAQRRAQARRLLTHPGVGPVTALATDVFLGDPSRFATGNQVASYIGMIPCERTSGKRQRLGKMTKQGNSLLRYLWTEATMHAVGKDPELKRFYRRKLIQKGMGKARIAAARKLGIRLWIMMRDQIDYEEFCRRGKSRQSGEAHAGMPDYNSGPARQ

SEQ ID NO: 83378 - protein, 385 aa, unidentified
MSKPDDLSKPLVALDHDSTLVCVIEMSGSSWLVAATVPGVDRRPLQKLPVDPARLLAQVERWRQEAARAGRTITRTVVAYESGRDGFWLARLLRGHGIEVHVIHASSVAVSREQRRAKTDRLDTEMLMRALLGWLRGEPGHCRVVAIPTIAQEDARRPGREREGLVAERTRLTNTIKAELALWGIQGFKPGLRKAAEHLEALRTVEGEPLPPNTLARLHRLLKRRTLISDQIKAIELAAAQAIERDPTGPNAMVLMLAQIKGIGLETAQMLVHEVLSRNLRDRRAVARYAGLTGTPDESGAKRREKGISKAGNPRVRRGMIQLAWRLLMFQPDAALVRWYRERTAGGKGAIKKTMIVALARKLLIALWSYATAGVMPEGVVLKAV

SEQ ID NO: 83379 - protein, 402 aa, unidentified
MTSCSYFAGIDWASQSHSVCVLDAAGRIELRLDLPHDNEGIERLIRQLSSFAGLVIAIERPSGLLVDALVEAGLQVVPIHPNVLKASRARYRGAGKSDPADAYMLADILRTDGHRFRALEAQSDDIRALRALVRSRDDLVAERIALANQLRSLLESFWPGAAEIFADIDSPIALAFVARYPTPQSAAHLAEKRLASFLAQHSYSGRRPVGFLLERLRAAAVGRNGELEAEAKGELVRSLASILERLVAELAKLSARIEHTVANLADGQIIMSFPRSGRICAAQILAELGSVRERFPTEAQLAAEAGVAPVTYESGKHRSVVFRFACNHRLRRALTCLADQTRHAHPWAADVYHRARSRGCDHPHAIRILARAWVRVVWRAWFTRTPYQPHLHRGATAFAAMG

SEQ ID NO: 83380 - protein, 356 aa, unidentified
MSHKLNSVITVIGIDIGKNSFHAVGQDKRGAIVLRQKWSRGQVEARLANMQPCLIGMEACVGAHHLSRKLQALGHDARLMPAKYVRAYLKGQKNDFRDAEAITEAVQRPTMRFVATKTVDQLDLQALHRVRERLVGQRTGVINQIRAFLLERGVAVRQGLHFLRAELPGILAKRTDVLSPRMLNLIEGLLDDWHRLDARIEALSEQIGALACKDPACDRLMSVPGIGPIIASAMVAAIGDGSAFAKGRDFGAWLGLVPKQISTGDRTILGSISKRGNRYLRVLFVQAAWVVLARIGPEGWERYGLKAWIEAAQQRLHHNVLAIALANKLARIAWAVLHKGRAFECVKTHASSSHPA

SEQ ID NO: 83381 - protein, 371 aa, unidentified
MEESSKSLYVGLDVHKESIAVAYAPEERGTEVVSLGAIGTRQCDIDKLIRKLQAKGAPLVFVYEAGPCGYWLYRYLTRQGLSCHVVAPSLIPRKPGDRVKTDRRDAVMLARLMRSGDLTAIYVPTVEDEAIRDLSRGREDAMRDLKATKYRLKAFLLRQDIRYEGRANWNAAHLRWLSAVVCPTPVQQIVFQEYVRAVTEQHERVQRLETELHEHVKTWRLYPVVEAIQALRGVELTGAVILIAELGDLTRFDTPRQLMSYLGLTPSEYSSGERRRQGGITKAGNTHARRALVEGAWAYRYPAKVSRHLQLRLEKLPAEVQAIGWKAQVRLCKRYRRLIARGKHANQVVVAIAREMAAFAWAIARLVPLAP

SEQ ID NO: 83382 - protein, 392 aa, unidentified
MIYVGIDVAKDKHDCFITNSDGEVLFKSFTISNNRDGFETLFQKIESVSDDLNKVKVGLEATGHYSYNLLGFLLDKGLTTFVINPLHTNLYRKSLSLRKTKTDKVDSRTIATMMMSDMNLKSYSDISYHNEELKSLTRYRFGKVKERAKLKSSVSRLICILFPELEELVPTLHMASVYALLSEFPGADAVANAHLTRLSNLLSESSKGRYGKDTAITFRDAAKISIGSYMPAKSLELKHTIKLIQELTVEIDEIEAAIKRIMDEEIKSPILTIPGISYRMGAMILAEVGDFSRFDSADKILAYAGMSPSTYQSGQLDNCYSHMEKRGSRYLRYALYNATKYVCHWDKSFGAYLEKKRSEGKHYNVALSHATKKLVRLIFAMEKSGKAYLPAA

SEQ ID NO: 83383 - protein, 387 aa, unidentified
MIYVGIDIAKLNHFASAISSDGEIMLQPFKFTNDYDGFHLLLHKLDSFDPDSLIIGLESTAHFGNNLFEFLVKHNYKVCVINPIQTSAMRKNNIRKTKTDKVDTYIIAKTLMMDPHRFFSQHDLSIMHLKELGRFRMKLIKKRTQGKIQLMSYVDQAFPELQYFFKSGIHQKSVYAVLKEAPTTKDIASMHLTHLSHLLEVSSHGHFKKDTATELRILAQKSVGCNDSSISTQITQTIELIELLDSQVHDVESEMELIVNSLASIIMTIPGIGFINGGMILGEIGDIMRFSSPSKVLAFAGLDPTVYQSGNFNASHTKMSKRGSCPLRYALINAAHNVVKNNKTFKDYYDQKISEGKSHYNALGHCAGKLVRIIYKMLTDNVSFNLD

SEQ ID NO: 83384 - protein, 317 aa, unidentified
MSESVYVGIDVAKDTFHLATCPNIIKTCLPNTPDGHHQLCQALQNHTIALIVLEATGGYERPLAAELLNAGMPVVVVNPRQVRDFANGLGQWAKTDPIDAQVLAKFAQIVNPAPKPHFKPQIAELSELVRRRRQLNDLRTQESNRLLMIHHPKVKKSIQKMIKTLDFQIDQLDQLIREHIEADDDFKNKDRILQSTPGVGPQTSAMLLANLPELGSLNRQEIAALAGLAPWDRSSGKSDGKAHIWGGRKDVRRVLYMAAFTACRFNPVIRALALRLKQKGKAYKVILTACMRKLLIILNTMIRNQALWSPKISIKNA

SEQ ID NO: 83385 - protein, 350 aa, unidentified
MIIGVDYHPSFQQIALLIEETGELEERRLNHSEGEAEKFYRDLQQRGIGVRVGMEATGYARWFERLLAELGFELWIGDPAEIKAKRVRKPKTDREDARLLLKLLLEDRFPKIWIPSPENRDLRQLLWHRHRLVQMRTRIMNQLQALGMNENKCGKGKLWSAAGRAALEKLPLAFWASRRRQELLELLDRMNPAIDELTAAVEKEAGKRPEALRLMTHPGVGALTALAYVLIIGTPERFAGGKQVSNYVGLIPSEDSTGGRQRLGHITKQGNSLLRFLLVEAAQAAARCNPDWRRRYRHLAMRRRKNIAKVAMGRRLGVRLYWMWRNGREYSPSFEFSSHAGKLETGNGRQ

SEQ ID NO: 83386 - protein, 420 aa, unidentified
MKVVYQTCCGIDVHKSFLVATIIKTTSGVEPSYQKKRFSTFNNSILQFKEWLVKNQCRDVCMESTGKYWVPVFNLLEDEINVTIANSKWVKAVKGNKDDTKDSKWIGDSFRLGLVPGSYIPCKPIRILREFTRYRYKLTSCRSSEKNRYQNALTVCNVALDSVVSDIFGKSASSVIDYLIEQPDNSINHEEIASRLLRSLKKKSDRVIESIEGYQMTDSQKYRMRLVRAHLDYITSTINDIDTMLDSLIAPYENAVQLLRTIPGVDRNSAITIISEIGTDMTPFSNSKRLCCWAGLTPSNNESAGKKKSVKITRAGVYLKPALVQVAHAAVKSEQSPYYKQKYERIMKRRGKKRAIIAIARMILTAVYQMLSTGEAWNPTDLYKIDMPEPLKEKQKEKAIKQAKKLLISEGIISESQFAS

SEQ ID NO: 83387 - protein, 346 aa, unidentified
MEYIALDVHKKYTWARVESEKGDRLFECRLAHERGTIKNFVRRWSPGIPVAIETVGNWYWVVDEIEAGKGKPQLVNARRAKLMMGNVNKSDKLDAKGMNQLQRTGTLPTVWIPPSAVRDARELPRTRMVFNKHRTQLKNRVHATLAKYGLNVEGASDAFGKRGREIMAGMLKELAVHTEGALRMVLDELDHGQENLEAIEQQMQEVFAPCPESTLLESLPGVAEILAVVIWTEIGTIERFGRAEQLASYSGLVARENSSGGKTRFGPVRRDVNVYLKWAFVEAANSAVLNRERCDYQHISRLYERIRARRGHGKAIVAVARHLSEASFWMLKKAEPYREPQLSTQR

SEQ ID NO: 83388 - protein, 420 aa, unidentified
MEEITEEPGALTERVAALDIGKAQLTACIRVPHEDKPGARRQQVRSYATTTPALLGLRDWLVCQGVTLVVMEATSAYWKPPFYLLQDDIECWVVNARDVKNVPGRPKTDKLDAVWLCKLAERGMLRASFIPSRPQRQLRDLTRYRRTLTQERTREKQRAEKLLEDAQIKLSVVISDIFGASGRAMLDALIGGQASPHQLAALARGKMRAKTSALQEALTGHFTEHHAFMLGMMLDRIDALTTQIATLTARIEQAIAPLAAQVAQLDEIPGIGVTAAQDIIAEIGTDMSRFPAPGHLVSWAKFAPRARQSAGRAKTATTGKGNPWLGGTLGEAAAGAARTKTFLASRYKRIARRRGKNRAVVAVGNSILTITWHLLSDPAAHFTDLGPDWHDRLAPLRRKRQLTAELERLSGKKVTLHDTV

SEQ ID NO: 83389 - protein, 416 aa, unidentified
MKKGQDTRGYKRYMALDIHREYLVVGAWNEEKEWVLTPRRVGVEKFPEWAKKNIRRGDIVVLETTTNVWTIYDIVAPLASRVLVANAAEVGEIAGARVKTDKEDIKRLLKLLIGGIVPEVWVPPMEVRELRAFISYRGRLVKTSTMIRNRLQSLLHKHNLMLSDAGLLEQAWWEAQKNISALEKMQIRQELALLQEVEKLKDAVDEELQRQSTSTTWGKQALQIMQLPGVGFVVAMTVLSAIGDISRFENAKQLVGYAGIGAGVHDSGKTHKEKKITKKGRRELRWAMVEAAWRAVRMSPFWKTEYEKHLKRMRKPNQAIVVIARKLLVAIWHVLSKEETDIHASEDDLAYKMLLLSWSLSEDVRMGLTYKQFAKYALMKLGVETDITRFVRRNVPRRLAPREEVLARMTELGLTA

SEQ ID NO: 83390 - protein, 325 aa, unidentified
MIDGVLGIDVSKNTIDVSMSAGCNKVRARSFANSTDGWRHLLAWLITQKIQLVHACLESTGRYSLGIASALYEAGHVVSIVNPAQIRDFARTKLGRNKTDGVDASHIREYCELFKPKPWAPASEAHRRLGELQTIRAGIIAGLTEWKNRKNSGMIDAVAQSLADVTISHFTSQLGAVDKAITLTIDNDPVLRRKRDLLLSISGVGETLAGVVLAELPGPDVLRSSAEVVAYAGLNPRLHQSGTSIDRMTRISKIGNAVLRAALYMPAMSAMRYNPAIAALVARLKSRGRLKPKQIVVAAMRKLLVLCFGVLKTGKPFDPAIAMGC

SEQ ID NO: 83391 - protein, 382 aa, unidentified
MEVLYPRCAGLDLGKDALVACVRIHGREVQQECRTFGMTTRELLALSGWLTGYGITPVAMEATGTYWKAVWHLLEPAFALVLANAAHVKGVPGRKSDVNDAMWIADLLAHGLIRGSFVPPEPIQDVRDLTRTRKQLVREIAQHTQRIQKTLDIANLKITGLISDVLGVTGRSILRALIAGETDPVRLADLARGTLKAKRAALIEALTGRVTAHHRRLLKLHLHLIEQLEAAVAEIDQQLGETLAPFREAVTRPTHEHLVSWACLCRRLDDSAGKRKSTRTRKGACWLKTVLVQCAWAAVRTKDSYLRAQFLRLRARRGPKKAIVAVAASILTAIYYIVRDGVEYRDLGGRYFETLDQAQITKRLVQRLERLGYRVELQHVAA

SEQ ID NO: 83392 - protein, 422 aa, unidentified
MLEQSQDDEQIIARVAALDIGKAEVMCCIRVPRDAPAGRRRQEVQAYSTMTRSLLVMADRLRELGVTRVVMEATSDYWKPVFYLLEAHGFDPWLVNAKDVKHLPGRPKTDRLDAVWLCKIAERQMIRPSFIPPPPIRQLRDLTRYRVDLVSARTAEKNRAEKLLEDAQIKLSVVATNIFGVSGRDMMAALIAGERDPRVLAQMARVRLRAKMSQLEEAFHGHFTDHHAFLLAKMLARVDAISADIAEIDERIEAQLRPFADAVTRLQQIPGIGPVAAAVIIAEIGTDMGRFPTAGHLASWARFTPTVKQSAGHNKGNGSTGRGNPYLARILGEAVVAAGRTRTFLGERYRRLARRRGKQKAIVAVGRSMLIITWHLLSSPSTQFADLGPSFYDSRIQPDRKKREHIRQLEALGYKVNLEPAA

SEQ ID NO: 83393 - protein, 430 aa, unidentified
MKSNTQNAKIEAITEKTLVLGIDVGSETHYARAFDYRGIEYSKKPFKFSNTEAGFVTFKEWILDIKERHEKDKVVLGMEPTGHYWFNLGKFLQDNEMKPVLVNPHHVKKSKELDDNNPTKNDRKDPKVIAGLVREGRYMIPYLPDGVYADLRTASNIRFQLQAELTRIQNRISRWFNIYFPEYKTVYGKPDAKSGILILKAAPLPEDILTLGIDGVNQIWRDAKLRAVGKARAKTLIEAAEHSVGSKEGAVAARMEIRMLLEDYESRSIRLQEVMTLIEGLVKQIPMAEKLLEIKGVGIRTVSGFLAEVGDISRFNNPKELQKLAGLALVENSSGKHKGETTISRRGRKRLRYLLFEVAMSLVAKNPEFRELHNYYTTRRLNPLKKMQSLMAIAAKLIRVFYAMLTKGVDYDPKKMVSDIKRPAVYLQAA

SEQ ID NO: 83394 - protein, 414 aa, unidentified
MEVVHRRCCGIDVHQASLAVCVSIKEEGQSEKYRLRCGTTTGELLRLLDWLHEHGVTHVAMEATGVYWKPVWHVLEGQFELLLANPTQVKALRGRKGDFKDGERIADYLQHGLLAGSFVPPQPIQELRDLTRSRTMLKQEQVRVSNRIRKVLEDANVKLSSVMSDVMGVSGREMLRAISQGETDPVVLAELSRGRLRGKIPVLQEAAKGRLNEHHRFLLQQWLAMWDQLSERIRQFEERIEEKIRPFEPVVKTWASVPGIDRTAAWTLVAELGADMTQFPTAAHAASWAGLCPGQKESAGKRQSGRTRRGNVWLKRVLCQAAWGASFTKGSYFKALYHRLAGFTGKNKQEGKKRAIIAVSHSLLVTGYMLLWTGKKFEDLGANYFERIDQQRLTKRLVKRLERLGHKVSLQPTA

SEQ ID NO: 83395 - protein, 403 aa, unidentified
MEVVYSRCCGLDIHKTTVVACVITPGNKETRTYGTVTPELLKLKEWLSQCHVTHVAMESTGVFWKPIFNLLEDAFSLLLVNAQHIKAVPGRKTDVKDAEWIADLLRHGLVRSSFVPERSQRELRELVRYRRTMIEERASEVNRIQKVLEGANIKLSSVATDIMGVSGKSMLEAMINGVDNPQVLAEMAKGTLRKKRASLEEALQGIISNQQKVLLKIQIEHLEFLDKQIEQLDEEINTRMQPMEESIKRLDDIPGMDRRNAEEVLVEIGTDMTRFPTSAHLSSWAGLCPGNNESAGKRKSGRTRNGNRWLCSALVRAARATTRRSNNYLAALYHRIVRRRGDKRAIFAVAHSIVVIIHSMLKSNSVYHDLGDLYFDKRDQERLVRRTVQRLEKLGYNVSLQAA

SEQ ID NO: 83396 - protein, 388 aa, unidentified
MSKPFDLSKSLTALDQDSTLIVVIEMSQSSWLVAARAPGLARDPLKKLPPDPEQLFKLIDRWREESRRSGRVVRRVCVAFEAGRDGFWLARLLRQHDIEAYVIHPTSIPVKRDHRRAKTDRLDTELLMRAFLGWLRGEADHCSMAAIPTLAEEDAKRPTRERESRVNARSRLVNRMKGALARLGIRGFNPKLRKAAEKLEELRTGAGEPLPPNTLAELRRDMAQLRFVADQIKQIEKAREARLEKAPREGAHPMVLMLASIKGVGLETAEMLVAEVLSRKLRDRRAVARYGGLTGSPDESGSRSREKGLARSGNARVRRGMIQLAWRFLMFQKESALAKWFEARTANGPRGVRKTMIVALARKLLIDLWRFVEDGTMLVGVELFDSRA

SEQ ID NO: 83397 - protein, 369 aa, unidentified
MKSTAQSTAQLNPAIGPARHVFKLGLDIDLHFVVTAVQCDHGAIKPAQKLTREQLLGWVQKQVAAGHTVHTVYEACGFGYTLHEQLTAAGAHSLLTTPMRLWPERRRKNDRLDALALCVRLARHLDGHRHELSPIRIPSQAEQQQRELGRQREFWKRQLRRLENHGRALRLEFEHATLPAGWAGARKWKRIAPECSEFVRGQLQPVVEHIRASQQQIDHLTAQLEARVAHEKIPAGLGALTVALLDGEVCDWQRFAHRKAVGSYTGCCPSEHSSGGEQRFGHIDRHGNKHVRVLLVEAVWRLLRWQPGWHARLKYLPKLKHGVSLKKKMAVALARQLAIDLWRWRTGRCTAAELGWTLRRAPDEGRGVK

SEQ ID NO: 83398 - protein, 344 aa, unidentified
MKDVRILGVDLGKNSCSIVGLDGEGRVLLRRRTRREGVIALAAKLPGCVVAMEACCGAHHLGRLLVEQGHEVRLMSPEYVRPYVKAQKNDDRDAEAIAEAATRPTMRFVALKSEAQLDVQVLHRVRDRLVGQRTSLTNQIRSILLERGIVVPQGRRSLLEALAVLSSEPDGSQVGTRVQRLLDDMLDQWRALDARIKALDDEFAEMARNDPAARRLATIPGIGVLNATALVAAIGDGRTFSRGRDLSAWLGLVPHQATTGGRPKLLGITKRGSKYLRKLVIQGARAALPSLARTATPLGGWLRGLLARAHGNTVVVALASKLIRIAWALLRNETRFVAGGAAVA

SEQ ID NO: 83399 - protein, 429 aa, unidentified
MSYRIAGIDVHKRVLAVVVSNVEVESEFQFERRMFGANPEQLRLLAAWLLEQEAEEVVMESTAQYWKPVWGALERYWKPIREKREGAKRRSGTLHLAQAQSNRGRRGRKKDFVDAERLVKRLVARELTLSFVPDAEQRLWRAVTRKKYQLRRDVVRLHNQLESLLEETHIKLSSLVSDLLGVSARRMLKALADGETNPAALAALAHQRLRATPEQLCDALGACTELKPVYRRLLKMTLEHLQILEQQIGQLDQELATLLHPHQDAVQRLAEVPGFAVDSAQQIIAEVGPAAATFPSEKCLSSWVGACPGEEESAGVNYSHRSPKGNRHMRRLLNQTANAAVKAKGSIFEIIYRRCVPRLGHNQAIGVITHRQCRLIWLILHQGTRYEERGPAVTKRSRYQRTWRMIRQLRNLGYRIELPNPQASQAQAQ

SEQ ID NO: 83400 - protein, 347 aa, unidentified
MHYKTIKSEFFCGVDVHSKKSYLCILDNTGEKHVQMNIQNSFQLFKDILTPYIPNIVVGCESTYTYYWLADGCRQANIPFYLGHALYMKAISKNKHKHDPLDARTIADLLRTSFFPEAYPYPREMRPTRDLLRRRQRYVAIRAEAFTHIQMVAHQNAIHSIGSYEVKKRDEQARLIRLFTEHGLETLIHPDIETINAFDPIIARIEQEIRENAIAHNPRDMMLLKTAPGIGDILALIILYETHDIRRFPKHQNYASYSRVVRCPQTSSGKITGIKNQNIGNPYLKYAFNAIIISAQQQSAQISKYYKKLESKFGKKKARARMAHKFNTAVYYMLKNRIPFDEKMFLK

SEQ ID NO: 83401 - protein, 322 aa, unidentified
MAQDDLVVVGIDVAKDKVDACIRAFALRQVFPSAAQGHRKLIAWLRKHKVTKAVMEASGGYERDWAKVLRQAGIEVRIVDPKRVRSFALSAGRLAKNDAIDAEMIAWFAETFSEAPSQRHDAAHEELLALVKARKGLLDLKTRLQSQNEHAALGPVQKAHARVVKSLATEIAKLEAAISTKIKATPDFAERTEIIESVPGFAETTSANLIAGMPELGQVSNKIAAALLGAAPYDDDSGHRRGERHIKGGRRWVRNAIYMPCLGAATQNNPVLKAFYHRLIARGKPPKVALVACMRKLIIILNSLIARRQKWDPSRYPHSERA

SEQ ID NO: 83402 - protein, 461 aa, unidentified
MAKRPDPASRRPPHPLTSKPQPALTVKNPRAAGIDVHDGVHWVAVPPDRDPQPVRPFGAFTVDLEAIADWFTQCGVDTVAMESTGVYWIPLYELLERRGFRVYLVDARAVAKVDGRPKTDIHDCQWIQRLHSYGLLEKAFRPQDDIVVLRGFVRQRQVLISYASQHIQHMQKALVLMNLKLTLVVSDIVGKTGMAIIKAILAGERDPVVLSQWRDERCKHTREEIAKALMGNWREEHLLALRQAVELYEFYHRKISECDQAIDAYLSRLPNRAGDRPMEKRPAKRKNKDNEPMFDARKRLYEMLGVDLTAIDGISVGVALTIASELGCDVSAFRNEKAFSNWLGLAPNHKITGGKIKSRKTRPGANRIATGLRMAAASLLRTPTALGAFGRRMRSRVGSPKAITAIAHKLAKLVYRMLKYGEDYVRQGAEEYEAKYQERRLDALRRTATALGFRLEPQAAQ

SEQ ID NO: 83403 - protein, 314 aa, unidentified
METSTQPVFVGIDVSKNKLDVALWPSGESFAVERNAKGLNSLCARLAALNPVTVALEATGGFETVVAAALAAASLPVAVVNPAQVRAFAHALGKRAKTGPIDAAVIARFAEAAKPAIRPLADAETQLLADLIARRRQIVDMIVAEKQRLGHAPAKRLKKSIERLLKALEKELSNLNGDIDTAVRASPLWRANEELLTSVPGVGPTTARTLIAELPELGTLTRKEIAALAGLCPFTRQSGQWRGKSFIAGGRANVRASLFMAAMVAARFNPILKTFYDRLAAAGKPKKAALIAVARKLLTILNAIVRDKKPWQTA

SEQ ID NO: 83404 - protein, 377 aa, unidentified
MKRIKFVGLDVHAETISVAVAEQGGEIRSLGVIPNREESIRKLVKKLGPVEELRFCYEAGPTGYALYWQLTRMGAQCEVVAPTLVPVKAGDRVKTDRRDALKLARNYRAGELTAVWVPDAAHEALRDLVRAREAAKKDELRARHRLSKFLLRHGRRPPMGVKAWTMKYLEWVKRDVHFEQMAQEATLLDYLHEVEHGAARIARLDGAITEAVKSAPPQMRSVIEALQALRGIAHVSAVTVVAELGELSRFARAKQLMAYGGIVPSEDSSGERTRRGNITKTGNAHLRRVVVEAAWAYRHRPSVGATLRKRQEHVSEEVKEIAWKAQQRLHERYRKLLARGKNKGVVVTAVGRELLGFIWAIGIQVETAQKESLQRAA

SEQ ID NO: 83405 - protein, 450 aa, unidentified
MEILYANCAGLDVHKKTVKVCLLRRPSTGQPHKEFRTYLTTTEELVQLGDWLKEQGCTHVAFEATGVYWKPVFNLLEGSFELLVVNAHHIKQVPGRKTDVKDAEWIADLLQHGLLKASFIPSGPQREVRDLTRYRVRLTEEKAREVNRVQKTLEDTNLQLGDVVSDIMGKASRLILQAIADGETDPGRLAALAVGRVRAPQEQLEAALRGHVTDHHRFLLSEHLTQIRHLEQAIERVSAEITRRFTPPPPDEAPPSHKEEEARQELSLASPSPQESASASQATVSWAAAVVLLCSIPGIGERAAMGILAEIGINMQQFPTAAHLASWAGVCPGNHESAGKRLSGKTRKGNPWLRCLLVQAAHSASHQKQCYLAEQYRRIAKRRGAKRAAVAVAHTILVIIYHLLRNQTTYQEKGESFLEEQERQGAEKRLVRQLARLGYHVELQPIALAG

SEQ ID NO: 83406 - protein, 387 aa, unidentified
MSQANDLSRSLIPFEQATTLVAVIELSLSSWLICGTIPGVERQPLKKIVPDGTELLRVLDRWRDEATRNGRIIARIAVAFEAGRDGSWLARWLSSHGIEVHIIHSNSVAVSREHKRAKTDRLDTAMLIRVFLGWLRGERGHCTMVMVPTIEEEDAKRPSRERENLVGERTRTINRVKSALVRLGIRGFKPQLRNAPQRLEALRTPEGSPIPPNTLDEMRRDLTRLALLRDQIKAIEQDRLTRLAQARPTGPNAMVRLLASISGVGIETADMLVQEVLSRNLRDRRAVARYAGLTGAPDESGSKRREKGLTKSGNARVRRGLIQLAWRFLLFQKDSALAQWFRSRTDGVRGARKTKMIVALARKLLIALWRMVTTGEVPHGVVLRQAV

SEQ ID NO: 83407 - protein, 387 aa, unidentified
MGVIIGMDPHKRSATIEVVDERGQILAVGRYGTDRAGYAEMLQAGRKHPDRLWAVEGCNGIGRHLAHRLVHDGETVVDVPTKLSAQARVFATGNGRKTDPVDAHSVAMVALRTPNLLRVEVDDDLIVMGMLVDRRDELGRARTQTINRLHRLLLELFPGGAPQFLSSHKARVMIATIKPRDLVGKTRRRLAVELIVELEAIDKRIKAVKKELAVLVEARGSTLMGLTGIGPSGAARLLADVGDIHRFADRDRFASWNGTAPLDASSGDQKRHRLSRAGNRRINRTLHIMAVVQLRNPTEGRAYFDAKKAADKTSMEAMRALKRRLSNVVYAQMTADQKRREAASPGGHSGTTLQSSVTDLTPDIGSSDKPLPGPATSQPKPALPAVS

SEQ ID NO: 83408 - protein, 458 aa, unidentified
MGRNRSTDKSRRAMPMVHPNAAAIDIGATMHMAAVSADRTPEPVRSFGTFTTDLHRLVDWFAECGVDTVVMESTSVYWIPIFELLDARGFAVFLVNARDAKHVPGRKTDVSDAQWLQRLHSFGLLRASFRPKGQIAELRAYLRQRERLLEYGASHIQHMQKALTEMNVQLHHVVTDITGATGLRIIRAILGGERNPAVLARMRDRRCHATVETIEKALAGNYRAEHLFALEQALALYDTYQQKASACDARIEAVLKELSARRGREAGPLPSPRQNRSRQQNSLLFDVRTALFALLGKDLTQINGLGPYLALKLIAECGDDLSAWPSAKHFTSWLCLAPSNKISGGKVLSSRTRRSGSRAAALLRLAAVTVGRTDTALGAFYRRLSARIGKAKAVTATARKIAVLFYNAVRHGMDYVDPGASSYEIRYRARVIDNLHRRAKAFGFMLQPMAPTPGMAVS

SEQ ID NO: 83409 - protein, 407 aa, unidentified
MYYLGIDISKKSFTISVLDEEGEAITKSLTYPCTRKGFEKLVDKISSLKLKKSEVMIGIEATGNLWENLYSFLEGYKVIVLNPYQTRKYHQVLSKKAKTDKVDSLVIAGLLRSKEALASYVPEEEVQVLRELVRLRHHLQKDKKNYLRKAYTLLNLVFPEYTNLIKNPFRKVSSMILKKYPTAVDMARARRTDLVKMARKIQGNNYSSELAEKLIQVAKESIYSGKASEVRGMALRILIDEIESLKNKIKEIEDKIEEILSSNQPSSPQKRLLGIPGVGPKTIAAFLGEVGNDVTRFSSANKLIGFIGWHPRISESGESKNLHPKMSKKGPSALRASLYMAAVASLKHNPYLRSLYHRKISEGKESKQALICVGKKIISIIYSMLKYEADYDPQRIFFQFDKEQVLI

SEQ ID NO: 83410 - protein, 345 aa, unidentified
MKITTVGIDLAKNVFQVHAVDGHGKVVLRKQLKRKDVVRFFANLEPCLIGMEACAGAHYWARKLGELGHTMRLMAPQFVKPYVKTNKNDRNDAEAICEAVTRPDMRFVPVKTAEAQAILGLHRARQGFVKARTAQANQIRGLLAEFGIVIPKGIEHVTKRLPAILEDAQNGLPGMMRRLLECLAEQLKELHRQVEDLERQIKLWHRENEQSRKLEEIAGIGPITASALVASLGDAKSFKNARQVPAWLGMVPRQDSSGGKQMLGRISKRGDVYLRTLLIHGARAVVSRFIGKANQPDGWLKSLLARRNKNIAVVALAARNARIAWALLAHDRTYRSDYVAKRATA

SEQ ID NO: 83411 - protein, 411 aa, unidentified
MDIVHYRCAGLDISKRDAKVCVRVQEPTRARASSTVTTWGAMTNQILALREHLIEQKVTLVVMEATSSYWKSFYYVLEDGPFEIMLVNPRHVKNLPGRKTDVSDAAWLAQLGAHGLVRGSFVPPAPIRQLRDLTRARTTIVRERSREIQRIEKFLEDAGIKLSSVVTNLTGVSGRAMLEALVAGERSPDVLADMAKRRLRPKIPALTEALTGRFNAHHAFLVKVHLNLIDGHTRAIDELTARIEEEMIPFQAARDLMITIPGISTKVADVIIAETGADMSRFPTAGHLASWAGTCPGSNESAGRVKSTHTRPGNPYLKGALGIAAAHSHNTYYSAKYRRIAARRGPIKAVVALEHAMLVAIWNMLQTGATYNDPGDDFYARRSPDKTKSRALNQLRNLGYTVTLEPMTEVA

SEQ ID NO: 83412 - protein, 320 aa, unidentified
MMAQNDLVVVGIDVAKDKVDACIRSLSLKGTWPSTVQDRRKLIAWLGKHKVGKAVMEASGGYERDWAKALREADIEVRIVDPKRVRSFARSAGRLAKNDAIDAEMIAWFAETFGEAPGQAYDAAREKLSQIVNARQGLLDLQTNLQNRGEHAGPEPVQKMRARLLKQLALEIDKLEAAIAAMIRATPYFAERAEIIESVPGVGGITSAGLIAAMPELGQVSNKVAAALLGTAPYDDDSGRRRGERQIKGGRRKVRNLFYMACLGAATRHNPALKAFYRRLIAKGKKAKVALVACMRKLIVILNIMIARGEKWDANRYAVG

SEQ ID NO: 83413 - protein, 322 aa, unidentified
MASEKFDVSFIDEDGRARHIVVKNTFAQIEKFLDRLPAEAHIVAEHTGVYGDLLLYLADSRGVAVSYVQAYAIKHSMGLVRGKSDPLDCARIREYGERNTDRLVPTHFPSESLYRHKELHATRRLLVDMRKLALTSQRGDRMRPLHSAVAESAKAAAIEELNARIDEVEKEMQRIIDEDPALKKTSEIVQSIPGIGPVTTTQLIIKTDNFTRVATPKKCATLAGISPWPNSTGKSDRGCHVSLMGDRELKSLLYMCARSASVYFEKMRIYRMKKQDVEKKHFFVVMNNIANRLLKIIYALVRKGEMFDPNFVTIDPRLKTCI

SEQ ID NO: 83414 - protein, 339 aa, unidentified
MRLYAAFDLHSSNSYLGIVEESGKRKFRRRLKNQPELIRETLLPFKDDIVGIVVESTYNWYWLVDFLMEEGYRVHLANPSQIQQYSGLKHSDDKDDAFWLAEMLRLKILPEGYIYPKEHRPLRDLLRKRGHLVRLRTSLIVSLQNILARNVGKKMNTNALKALKEDRVTPLLAGNDDISLAGRVSKEAIDSLTRQIWAIEAAVEKKIDLRKPYNLLLSMPGVGRVLALTIMMETGPMNRFKKVGNYVSYCRKVPSGRFSNDKKKGSGNRKNGNKYLSWAYAEAAGLARRIDSKARAYHDRKRRRTNTPIAYGALAHKLARAAFYIMRDEVPFMHEKAFA

SEQ ID NO: 83415 - protein, 366 aa, unidentified
MDEITYVGLDAHAQTTAIAVAEGGGAAPRFIGTAGARFAELTKVLGKLGKPGRLRVFYEAGPCGFAMVRQLRHAGYHCEVVAPSKIPRKPGDRVKTDRGDALSLAGLARAAQLTFVTVPDERGEAMRDLSRARVDAVRARLKARQQLKALLLRHDRRYTGKTSWSAAHERYLAQMSFAHRAQEIAFVEYRRGIGEAQARVELLTQALSRELVGWRMRPLVQALMTLRGVDELSATSLVAELGEMKRFAHPRELMGYLGLVPSEYSSGQKRALGAITKTGNSHARRLLIEAAWNYRFPARITLPLQKRQEGQPAAIRDIAWRAQLRLTQRYRRLTARGLQHNKVCVAIARELAGFVWSISQQVSIAN

SEQ ID NO: 83416 - protein, 370 aa, unidentified
MNSIIYLGIDVHKETYTICSFFYAEDAVKYTQTFSADYKNILKYIDWLRTMYGVDAYIVCGYEAGCIGYSLYHQLTNHGVNCIILAPSTMAITNTNRVKTDKRDAGNIARCLAFKTYSEVYVPTKQDEAVKEYIRMRDAQKDHLKRCKQQILAYVLRLGFRFDDGSYWTVKHFKWLKSLEMDPLFKETLDEYLITYYQLTDKIQHLDERIEEFALEDAYREKVSALKCFIGIKTHTALAIVAETGDFNRFPKAESYAAFLGLIPGENSSGQKQNRFSITKTGNSHLRTLLIESAQGYTRGAVGFKSKELKHRQKGNVPEIIAYADKGNVRLRRKYYRMTLQKEKKSNVAKVAIAREMACFIWGMMTNHID

SEQ ID NO: 83417 - protein, 387 aa, unidentified
MTVRTVISLPAAMHVETARCLFAIELSKQSWVIGFITPFSAKISRRILSGGDWKGLLELIEEVQTRISRETGRAVEVMSCYEAGYDGFWLHRLLEAHGIRNYVIDPASLQVDRRARRVKTDRIDTERLLRSLMAYLRGEPKVWSVVRAPSIAEEDARRLHRERDRLVSERVQHVNRIKGLCALHGIYDYQPLRPQAMARLEQLRTAQGISLPPRLKSEIKRELQRLELVVEMIATLEAERDAIVEDAASTHINAKKIRDLYKLKAIGPEFAAVLVGEIFHRNFNNRRQLASYIGYAPSPFQSGNVAHDQGISKAGNRKGRTTGIELAWLWLRYQPGSDLSAWFQARAGATKGRIRRIAIVALARKLLVALWRYLETGLVPRGAVLKG

SEQ ID NO: 83418 - protein, 357 aa, unidentified
MKRPHFIAFDTHCDSTEVAAVSASGKLKFRQHSPTTIPDLVAALNHVPRPRILTFEEGPLADWLWRNLLPHADQIIVCEPRRNHLIANDSDKDDPIDAEKLAHLLRGGYLKPVHHPHSLDRMIFKQHVLLYQDRVRLRVAEANRIAALFRRFGVFVREKDFSNPDSRPALLGRLPNSSVVRANVGLLWQSYDVLAEGVLQMRKRLRELARKEEVIRRFTQVPGVKWVRAAQFFVIVDTPDRFPSKSALWRYLGLGLERRRSGNGPMRVKLVRRTNRQIKSVLLGAARSAIRSEEGPFAEQYRRWRKAGCSPTIALRNTARSLAATLWGMWKSGSVYQPQRVGAGNQPAKPKVAEARR

SEQ ID NO: 83419 - protein, 348 aa, unidentified
MTVTIVETRAITGGVDTHAGTHVAAALDPIGGLLGVQEFPATPAGYAQLLGWLAGFGTVCLVGVEGTGSYGAGLARHVTAAGVRVVEVDRSDRQDRRRQGKSDPLDAVSAARAAQSGKASGAPKGRDGAVEAIRALMVAKRSARAGRTQTINQARALVLTGPDDLRIRFCGHTTADLADELASLRPRPGAVVGYPTRIALRELGRRAQFLGRQLERLDELIIPLVTARAPGLLALYGVGPDTAAMLLVAAGDHPERLRSEAAWAHLCATAPIPASPGKVTRHRLNPGGDRQANHALWRIVITRMSSHPPTRAYVTRRSKEGLSKKEIIRCLKRCAARQVYPCLRAPAG

SEQ ID NO: 83420 - protein, 344 aa, unidentified
MSVVSIGLDLAKSVFQVHGVNAAGHNVLRRRLARGELVAFFAKQPACLVGMEACSSAHHWARELVQLGHTVRLIPPQYVKPYVKRNKTDAADAEAICEAVGRPNMRFVPIKTREQQAVLALHRVRSLLVRQRTATINALRGLLAEFGVIAGKGTQRIGDLNERMGKLSAEALPDEAREALTCLFNQIDDLGLRIHAMERRIIAWHKASEASQRLASAPGVGPITATALVAAVGDGTQFKSARHFAAWLGLTPRVRASGENERIGRITKGGDRYLRTLLIHGARAVVGTTFRKGVAVRPWLAALVKRRPVNVAATAVAHKTARALWAMLTRGEAYRRSAGLSAAA

SEQ ID NO: 83421 - protein, 344 aa, unidentified
MDHFAGLDVSVKETSVCIVDDAGKIVREVKVASEPEALLAVLTNPAYHFKRIGLEAGPLSQWLFSALAEAELPVVCVETRHMQALLKAQINKTDRNDARGIAQMMRVGLYRPVHVKTLRSQKLRMLLTHRKLLQSKAIAIENDLRATLRNFGLKVGMVGTARFETRIKELVENLPDLAALVEPLLIVRRVLREQIVILHRRLLAVVRDDEVCRRLMTVPGVGPVVSLTYRATVDVPARFRKSKAVGAVFGLTCSKYQSGEIDRSGRISRCGDEMMRVMLYEAAQSMLRSKKWSWLKAWAMQVARRRGMKKAIVALARRLAVIMHRIWVDGTEFRWTREQAPAAA

SEQ ID NO: 83422 - protein, 350 aa, unidentified
MLIIGCDYHPSFQQIAFVDTETGEFQEQRLSHREEAERFYRDLAAQGMKGRVGMEASGHARWFERLLAELKVELWRGDAAKIQAKRVRKKKTDREDARHILQLMLKDDFPQIWVPSWDNRDLRQLLWHRHRMVQMRTRIMNQLQAVALNEGLRCKKRLWGERGRQQLESIGLAPWASRRRRDLLELLDRLTPTIAELTKQIEQEVEKYPAAQRLMTHPGVGALTALAYVLIIGEPERFECGKQIAAYLGLVPEEDSSGERRRLGHISKQGSGLMRFLLVEAAQVTVRSDPEWRSKFFHLALRRGRKIAKVAMARRLAVRMYWMWRQQWDYEQLKKFGPHAGQPGTAHGVK

SEQ ID NO: 83423 - protein, 329 aa, unidentified
MYDHYIAVDWAQSNMAIARMTKEASAIKVINVPSSVKELQIFLSRLKGKKTLTFEETSTSQWLYVELKDYVDEIVVCDPYRNHLLSDGPKTDELDAAKLVKLLKEGFLKPVFHSADEFIYLRKLVSGYEDMIKAGVRLKNQRSALFRAQGKDKREKNLTQKSESFVLEGVDRGIEVYEKERMRYEAEMEKQQKKHLMIRNLDGIHGIGIIGAVKIAARVVDARRFKDKGKWLSYCGLVRQEKLSGGRSYGWKNPRYCRTLKGVFKTAALGVIGGENNFNKYYDFLLTKKHYSEHNARHAVARKIATIAWAVMKSGKPFDPKRMDQEVQK

SEQ ID NO: 83424 - protein, 430 aa, unidentified
MSLDPHEEPAAIQTHIGAIFISLELSRSKWLITSLVPGGGQRMSKHWVEAGDLAGLLARFWAIRDKVLARTGKSYPIVVIQEAGLDGFWIHRSLVKEGIESHVVDAASIAVSRRRRRAKTDKIDGEGLLRALLAFKRGEPRVCSMVRVPTPQDEDRRRICRERKTLTAERIRHVNRIKGLLFSQGIGDYEPLRRDRRRALEAARTGDGRALGANMKAQIGRELDRLELLLGQIAAIEAERDAMLARQVEAEAAQGAQGAPARVQKPMDLNGPGAETVPEAEAAPGVQSAQSAPAHVQKLMELNGLGAETVAMLWTEAFYRSFDNRRQLAAFGGLAGTPWKSGSIDREQGVSMGNHRLRQTMIQLAWLWPIHQPNSALTRWYRERTKGATKLQKKKMVVALARKLLVALWRYVDAGVVIEGAVLKRAVRAR

SEQ ID NO: 83425 - protein, 380 aa, unidentified
MVPLQHHRGTTMDHYAGIDVSLEYSSICVVDATGQIVREDKIASEPEVLIAWFGSLGYALTRIGLEAGPLSQWLYAAMKKAGLAVELLETRHVRDAFKAMPVKSDRNDARGIAQLMRLGWFRPVHCKSIGAQEIRAELTARKLVESKLRDTANSLRGILRGFGLKVGATTERSFPGRVRELVKGHPVLEAIAESLLSVHEVLLREFNGFQKRVQSAACSNVKAKLLMTTPGVGPVISLTYAAAVDDPARFKSSKKAGSHFGLTPKKYQSGETDRSGRISKIGDASVRAALYQAAHVILTKPVKGCPELKSWGMRLAKRAGQEKAKVALARKLAVIMHRMLADGTPFNPTAKAERMAATAAKAARKVLALPANGATVTEAV

SEQ ID NO: 83426 - protein, 339 aa, unidentified
MKEVTTIGLDLAKNVFQVHGVDHAGAVVVRRALRRSQVLAWFAKLPPCLVGMEACATAHYWGRELRKLGHEVRLIPPAYAKAYVRRNKNDAADAAAICEAVSRPAMRFVAIKTEQQQAMAGIHRVRDLLIKQRTMLRNQLRGLLAEFGVVAAQGRRGLNELLAILSDPEEQRIPSPLREGLTAVMETWRGIERKLEAIDRQMVAAGRADATYRHLVTAPGYGPILSSAMAALVIDPGAFKRGCDFAASLGLVPRQDGTGGKVRLGPISKRGNGYLRRLLVNGATALIKCQRARQDPWVAKLLASKPRKVVAVALANKLARIGWALMTRQEDFRSRPAAA

SEQ ID NO: 83427 - protein, 330 aa, unidentified
MFNYIGIDVSKATLQVYIPIIDENISIENSKKALISLYSKLKKYYKKGIKELVIIFEPTGSYSVLLKRFCSEKKIYAFSINPRQSANFAKALDNRSKSDIIDAEMLYRFHVMLSANEISVPIINSVQEELSEMLTYFKFIQKERVSFSNHLEALEFKNGSVMIVKKLKKEIKHLKSEEEDMIISMKELLLSDLKMKQDFENITSIVGIGDRAAIVLLHLFITYPEANRQEIVALCGLDAIENSSGTSIQRKTRISKKGSSLYRSMLFMPVLSAIQHNPYMKIFYDKLKNNGKHSTVAQIAVMRKMILIAHSLYKNNVKFNKKIYEKSIGI

SEQ ID NO: 83428 - protein, 457 aa, unidentified
MQSVSVCQCASGNSHDGQCGGPITDRLVCRDRSILRGDGGSVTSGPPPWLEARARLGCQTAGELGAPAISSIPNGCQGTSPHQQGRGTKVGEPYNVGIDVSIDRLDVAIRPGGRAFCVTNEAAGWAELVARLPRGTIAAIGLEASGGYERGVVRALLAAGLSVRRINPNKLRQFARAAGALAKNDRIDARLIADYVTVMPTRVVERNPDVERLAETVTMRRQLCDEHIAVESQASHLEDALLQRMAKRRLIRIKADIALLNKRLAELVAAQPELAGRFRLLCSMPGVGATLAYTLLALLPELGQIGRKQIAALVGLAPYDFDSGRFRGQRHIYGGRIGVRNTLYMPALAAIRFNPALRAFHRRLVGVGKKPKVAIVAVMRKMLTTLNAMLRDGNSWTDEHSDRHTVRPSDGSSAQRAGRVKAAGAHRAVARSASLCVGHVRQFGGESPLCNLMEVKH

SEQ ID NO: 83429 - protein, 339 aa, unidentified
MKYTPVGVDIAKHLIQVHFIDEHTGEVVDKQLRSKDFLTFFSNREPCLIGMEACGGSQHWARELKKLGHAVRLMQTRFVKAFVMGNKNDVMDARAIWMAVQQPGKEIAVKTEEQQSVLVLHRSRRQLVKFRTAQINALHGTLLEFGETIHKGRAAMERELPAALERMKVKLPPYLITVLEDQYNRLNELDSLIDGLEKQLNSVARQNETCKRLMEIPGVGPLIATAAVATMGEAAAFKSGREFSAYVGLVPKQTGSGGRVRLLGISKRGDTYLRTLFIHGARAASLVAKEPGPWITELKKRRPTGVAIVAMANKLARTVWAIAAHDRKYDKNHVSIRPY

SEQ ID NO: 83430 - protein, 417 aa, unidentified
MQYAPVTLSDQPVNGLTCGIDWARDDHAVAIVDSGGRAVYRGVIEHSARGLADLIVVLNRAGATEVAIERPDGPVVDALLEAGLTVVVINPNQVKNLRSRYGSAGNKDDRFDAFVLADTLRTDRARLSPLTPNGPQTAVLRALVRARKDLVIHRVAVANQLREHLKRVYPGPIGLFDALDSPISLRFLTRFDCQDRADWLTPKRLGAWLVTMGYRGRTDPAVLHARLTASPRGATGTQGCAHAGISRALVATLSTLGDQIGLLAVQIGEQLADHADAHIFTSLPRSGTVRAARLLAEIGDCRGKFPTPDALACLAGVTPSTRQSGKMRSVSFRWACDKQLRDAVCDFANDSRRANPWAADLYTRARARGHDHPHATRVLARAWLHIIWHCWQTNTPYDPGRHRALQTLLTQQPHATT

SEQ ID NO: 83431 - protein, 352 aa, unidentified
MSQITTVGVDLAKDVIVVCAGDRTGRPVYTRELSFHGFAQWASNLPQATFGLEACSSAHYWARWLTERGHTAKLMAAEHVGPFRMSRGAKNDRNDAQAILAAMVQPTMRFVAVKTVEAQAMLALHTVRQGWKTERTALINRTRGLLSEFGIWLGHGTGHLLRALPELTDSERLPHRVRLVLRQISEQLALLDQQVRATDIEIRKHAKYDNTVKRVQAISGIGPVTASALVATVANANDFRNGRQLAAWLGLVPRQWSSGGKERLGRITKRGDSYLRGLLTQGARATIHAAQRKPPEKRTRLQNWIVETHDRVGYGKTQVAVANKHARMLWAILAHGEAYDPNAWQRHPMASA

SEQ ID NO: 83432 - protein, 346 aa, unidentified
MTIVESTRPVTGGVDTHADVHVAAAVDPNGGVLGVASFATTPSGYVALAGWLSAFGPVERVGVEGTGAYGAGLARHLRGEGVLVIEVDRPNRQERRRNGKSDELDAIGAARAALSGRASGIAKSADGDVEAIRALLVARRSGRNVRIKYLNQIRHLGFTAPAELRERLRDVPRDQLARTAAAMRPTVGSDTIVYATKLAIATLGRRVVALEADGERLDRLLATLVHRRAPSLLEVYGVGTHTAAILLVAAGDNPHRLKSEAAFAHLCGVAPLRASSGKVDRHRLNPGGNRQANHALWRIVFTRMSSDERTRKYVARRLAEGRSTREVMRVLKRYVARELYPHLVDA

SEQ ID NO: 83433 - protein, 365 aa, unidentified
MDVVYSHCCGLDVHKKNVVACVITPEGKEIRTFTTMTDDLINLVDWIKAKECTVAAMESTGAFWKPIYNLLELEDVKPMVVNAQHIKNVPGRKTDIKDAEWIADLLRHGLIKGSYIPSRDQRELRELIRYRRSLIDERARETNRIQKVLEGANIKLSSVASNVLGKSGRAMIEAMIAGEEDPEALSALAKGRLKNKKEELMRALNGLMGPHQKLLLETQLRHIDFLDQEIKRLDEEVKARMLPFEEVLELLETIPGVGRRTSEQILAEIGIDVEEQFGSAARMCSWAGLCPGNNESAGKRKSGRTRKGNKKLRSALVEAARAAARTKNTYLSSQYHRIAARRGANRAAVAVATFLPEIGLFTQNY

SEQ ID NO: 83434 - protein, 384 aa, unidentified
MSTAISKTPSCSLYVGLDVHKESITIAVLPERAATPTRVDKLPHDLNTLRRYFARLAADGAIRACYEASGAGYVLERALRGWGYHCEVIAPSLIPQKPGHQRKHDRYDAKQLARLYRRGELTPIRIPTEAEERVRDFVRCRATFQRELLRARHDVLKFLTRRGLRYTAGKCHWTRAHHAWLASLVKPGVLVAEDRAVFSEFLGLLHFVAQRRDALDEQIEALALAPALKTSVAWLSCCRGINTAAAVTLATEVVDWRRFGKPTQLMAYLGLVPREDSTGARERRGSITKAGNRHCRHVLVQAAWAYRHAPRLGAALARRQRGQPAVVVSHAWKAQQRLHKLYHRLAARKGPQVAVVAVARELVGFLWALMQECPMGEVSHATAA

SEQ ID NO: 83435 - protein, 442 aa, unidentified
MSSLTVLDPHAAFVDVGSEKMHVSIAGEPPVVFGTVTSQLHALRDYLTKHQVRSVAMEATGVYWLPLYGVLEAAGLEVVMVDGRQTRNLPGRKTDMKDCQWGATLHAHGLLRAGFVPPAHVRRLQDYLRLRGEHIAAAAGHVQHMQKALERMNVKLHEVISSLTGASGLAVIRAILAGERDPQTLLGLCDVQIRKAKAERVVESLRGNWAEEHLFALAQAVQSWDHYQTLIAACDRQIEVVLRQMPTTKAPSEASTKKAKRRTRPGVNAPDIADLREILAQICGAKDLTTLPAHTEYSVLQLIGEVGTDLTKWPTEKHFTSWLGLAPGSAQSGKRKGTVKRRRNRAGQIFCVMGRALVRSKHVALGGFYRRMAARRGGLVANKALARKLATLFWRVMVKGLDFVETGVAQYEAKVLETKHRILRRLARQLGQQILPNPATGA

SEQ ID NO: 83436 - protein, 411 aa, unidentified
MRVHHNVCCGIDVHKKSVTACLMWGPADKEPQFEIRRFGTMTRDLQKLAEWLKQAGCEAATMESTGSYWKPVWNVLEGRIPKLILANAQHVRALPGEKTDRKDGKRLAELTRHGQIRPSYVPPRAILELRDLTRYRNKLLSAGSSERNRVQKVLEDANIKLGSVLSDVFGASGQKMLQALVKEDTVDTAKVAQLAHWSLKPKIEAIQHALEGKLTDHHRFLIGASLQHMRFIEEQLVRLDKEIQRRLQPYQEEYALLQTIPGIKETGAARILSEIGADMSPFPDGDHLSSWGGACPGNNESAGKKFQSKIRKGNPHLLAALTECAWAATKKKDCHFRNKYYRLKSRRGSQRAIVAIDHAMLKCIYVVLSQRKPYEEPKPTSLTQAQKERKASSLCRQLRALGYDVKIQKAA

SEQ ID NO: 83437 - protein, 407 aa, unidentified
MEVMHKTCAGMDVHKDSIVVCVRSMKGSKVDREVRTFGTKTLELIELGDWLEERGCEIAVLEATGVYWKPVWHMLTGRVELVLANAHEVRNVPGRKTDMNDAMWLADLIAHGLVRASFVPPEPIADLRDLTRTRKQLTREVVEHTQRIQKVLETCNIKLASVASDILGKSGRAMLEAIVAGESDPSKLAELARGTLKAKKGTLIEALRGRVRDHHRRLIATHLRLIDALRASIAEIEKQIEDDLRPFAKAVELLQTIPGIGSTAAQTIIAEVGDDMTRFPSAGHLRSWAGLCPRMDESAGKRRSTRLRKGNVWLKTMLVQCAWAAIRKEGYLRALFLRIRSRQGAKKAIVAVAAAILTAVHGILRDLAPYRDLGAEHFNRHDRQRTASRLARRIRSLGYEIEMRPAA

SEQ ID NO: 83438 - protein, 434 aa, unidentified
MSESEVLRQEPEFAALVGIDWADQKHAWCVQAAGTTQRESGEVEHTPEAVEAWVGQLCQRFGSRPIAVAVEQVKGALVFMLSKYEPLHLFPVPPAMSAKMRAALYPSGAKDDPGDADLLVDLLLKHRDKLRRLSPDSEATRRIQNLVEERRQLVEEKTAQSNRLTNHLKIYFPQMLEWFDRLDTELVCALLEQWPTLEALQKVPPARLRTFFRKQRCRYPELVERRLIGIQQAMPAIRDRAVIEAKSAVVKVSVQVIRSLIRGVAELDRKIEEAAAAHPDFFIFESLPGAGAVLAPRLLAAMGSQRERYANAAEVQAYSGIAPVTEQSGKKKWVHFRWACPKFLRQSFHEWAGHSIAHSQWARSYYQQQRERGKGHHAAVRGLAFKWIRIVFRCWKDRMAYDESRYLAALAKRNSPLAAVTLVQQACEIFVDTL

SEQ ID NO: 83439 - protein, 341 aa, unidentified
MKKISFFIGLDISKADFAASIYQTPRESIVTKEAIPNDPKGFNLFLLWLKDHHIDKTNCRICMEATGVYSQAIAYYLLFQGFPVSIEPPLKVKRAFDPVGHKTDPVDSKQIAEYAYRFQDELTAWQPKAEILEKIRQLLSTREQFTKQKTALKNAMHAYSLQRVQVALINKAHRETLAQIEKQIARIDKELSKLIKQDPLISQRANHLDSIPGCGMLLAAHLLVITENFTRIQKHKRLAAFIGIVPYQYQSGTSVSKKAKIRHFGPGPSRKLLRLAAQSVATHDVTFRSYYLRKLAQGKSKALVLNNIANKLLKVACTVIRNNTRYIKEHRSIHPMYLKSA

SEQ ID NO: 83440 - protein, 338 aa, unidentified
MSLVLQSFLPYPDSCQGTSPHKQGRDTKMETLSYCGIDVSKDRLDVVLLPEQSFLSVSNDPIGWAELVARLRPLAISAIGLEPSGGYERGVIRALLASGLSVRRINPNKLRQFARARGVLAKNDRLDARLIADYVAIMPTRVVQRDEAVEKIAAVVTMRRQLSDEHITVLNQAAHIEDIMLRRINKRRLTRLETDIRLLDNRLRELLADDAALTERYHILISMPGVGPVLAFTLIALLPELGRMSRKQIAALVGVAPYDFDSGKLRGHRSIYGGRMPVRNVLYMAALSACRYDPALKAFHQRLTAAKKKSKVVIVAVMRKMITTLNAMLRDHAEWKSA

SEQ ID NO: 83441 - protein, 354 aa, unidentified
MSSVTLQTVVTLQTVFVGLDYHAASVQVCMLSSDGRVLMNRSCANDWRAIMAAVRQRCGQEADVQAAIEACCGAADLADQLIARGWSVNLAHAGYVARMKQSPDKTDFSDARMLADLQRVGYLPRVWLAPEEVRELRRLVHYRQSLAKERKNLKLQIGASLREARQKAPPTVNPWTKAWLAWLDASAALSPNARHITTCRLRRLAALQAELRQVDQRLERQTREDPLVQKLLTIPGIGLVTAVTIRAEIGRFDRFRTLIINTAKQLGRFCGLSPRNVSSGQKQADAGLIKAGNNELRRVLVEAAHRLIRCEQRWTALAAQLSRRGKPTGVVIAAVANRWVRWLFHQMQPACLAA

SEQ ID NO: 83442 - protein, 347 aa, unidentified
MRFYNTSHKNYCGIDLHTKMMYICILSSDGEICLHENIPTQPHRFLKLIGPYRDDIVVGVECIFSWYWLADLCIEEGIPFILGHALYMKAIHGGKTKNDKIDSEKIAKLIRGGNFPLAHVYPQEMRATRDLLRRRNYFVRRRSELQTHIKLTNYQYNLPSINKKLERKANRDDVVGRFSDSSVQKNVAADIHMMDSMEEQIKSLEAYIIRHAKGYDPRTYYRLQTVPGIGTILALVILYEVQDIARFPSVQQFCSYARLVKCPKESAGKRYGFSGGRIGNAHLKWAFSEAVCLFMRESEQAKRYVAKKARKHGKGKAMSILAHKLGRAVYTILRKKDSFDEKYFFSN

SEQ ID NO: 83443 - protein, 347 aa, unidentified
MRDRNAAYVGCDVGDKFTQLCAVDRTGAVIQARRVRTEKTALLQALGKFRRARVVLEAGTHSRWVEEALSGAGHEVVVANPRQIQLIWGRRKKTDRSDAMLLARLGRVDLSLVAPVHQRSRAAQTDLAVLRSRDLLVSVRTKLINHVRGLLKQFGIRVESCSTAAFARRADESISADLRPALEPVLEALRTVTDKISLHDQQVERLFDASPPARRLMEIDGVGPITSLAYTLTIEDPAKFKKSRVVASFLGLVPAKDQSGESDPQKHISKAGNPFLRRLLVQCAQRVMGAFGPDCDLRRWGLGLCARGGSAAKKRAIVAVARKLAVIMHRVWVTGRPYDPNFCLQPA

SEQ ID NO: 83444 - protein, 338 aa, unidentified
MEQVITIGLDLAKNVFQVHGIDAAGKVLVRRQLRRGDVLRFFGGLPRCLVGMEACATAHYWARELTKLGHTVRLMPPAYVKPYVKRGKTDVADAEAIAEAVTRPTMRFVAVKTADQQAALMLHKVRDLLVRQRTMLINALRGHLAEFGIIAARGPGGVTAAIISLHEAQDSLPELARVALHGLIDQLRIVRDEIARVEKRIVAWHRASNASRRLATIPGIGPITASAIAAAVPDATLFQSGRQFAAWLGLTPRAHSSGGKERRVGISKQGDGYIRRLLVTGATAVIRLARQGNASKSWAAKLLERKSARLVSVALANKTARIAWAVLARNQSYVAPAM

SEQ ID NO: 83445 - protein, 416 aa, unidentified
MNAVGIDVSSRKSTVAVLRPLGEVVCLPFDVTHDIAGLASLVEKLKALDGETRVVMEHTGRYYEAVEKALHEAGLFVCAVNPLLIKEYGANSLRRVKTDKADAVKIARYALDNWADLRDFTPMDAIRYDLKTLNRQFQLASKQRTASANNLIALLEQSFPGIRKCFDSPVRSDGTQKWVDFAHSFWHVDCVRKQPFAAFCERYRKWCKRHAYLFKLSNAEEVYALAKRAVVLTPKAKVVKVLVQEAANQLSSISRSVEVYRAEMDRLAAMLPEYPVVMAMYGIGKSYGPQLMAEIGDVRRFERKQALVAFAGIDPMPNQSGDKNVRSNKSSKRGSPYLRKTLFNVIRTYLQCAPQDEPVFQFLNRKRAEGKPFYVYMLAAANKFLRRYYAKLRDFFASLDTLQPVAPIPTILKATL

SEQ ID NO: 83446 - protein, 344 aa, unidentified
MIYVGLDISGKSLVLHGMNEKKKTVFTGEIPPNKRALRKAMLGLGMETRLVVFEASNQLKWIAQCLRKIKGVHIHVVHPNELKWITQSNGKTDKADARKLAELARGNLLPPKVHIAEGVIRELRELISARNTAMRKRVSLTNCLRSYALQEGFSVNAGFLLNPNWPELLPSLKISENLKVIFTTIMPAVDALKDAEEEFLLRIKDIEDDRLDLVRTIPGIGPLGSATIVSALDNVERFANKKCVAKYGALAPTIYQSGNVARLGHINFDGRREIRRVLLQSAHIIIRMKSPAAKPLRDFYDRIKARRGKKIATIALCRKLLTIAYGILKTGTPYDPFVLTPNAV

SEQ ID NO: 83447 - protein, 342 aa, unidentified
MGTITTIGLDIAKSVFQVHGIDATGEVVVRRRLSRGRILAFFERLPRCLVGMEACNTSHYWARELIALGHDVRLMPAQYVKPYVKRGKNDAADAEAICEAVARPTMRFVAVKTPEQQSTMMLHRVRLMLNRQRTQLSNAMRAHMSEFGVVGPVGRMGLERLMAVIADREDLRIPPDARVCLEMLAAQLAVVKEQILENDRRIRARARETEVGRRLMEIPGVGPLLASAFVASIADPTAFKSGRDVAAWIGLVPKQNSSGGKERLGSISRAGNRYLRQMLVVGAMAVIRHAERHGTKRRWLIQLLARRAKKVAAVALANKTARTIWALMTNGERYREPTVALP

SEQ ID NO: 83448 - protein, 490 aa, unidentified
MQRRLVGIDLGIASAHTVRVLDGAGREVCRRRTGPTVAELSRIEDAALHDAEPGTRLEVVLEPTGPAWLPVAVFFCGRGHVVFRVSSAKASDLRRFLSRNAKSNGIDADTLARLPLIDPDGLRPLQLPGPQTAALDRRVRATDRLTRAAAEHKVRIKDLVRQLLPATPLTGDLGRADLAVLERWADPRALLAAGLSQLTAVIVTASNGHQGTDRATAWRGAAAAAVELYSSYPAMPFTDLAAEVASEVRLLRAVTAELAEHAAHREDAYRWADPGQLARSLPGLAAVGAPALVAVVGDAARFPSARHFTSFTGLAPRASETGDTDRKGQPMSKAGPALLRTTLVRAADNARRQDPQLARIYYTQIVERGANHTKALCVVAAALAHRAWTVLRRGMPYVVCDTDGNPIDPALAKQIIAERWTVPAEIRARRRSSKHPTARPKTGKAPQQVPTGQDRSDTRRRRQTRRPSPPVILTRSTTTTQEDRLTADPP

SEQ ID NO: 83449 - protein, 341 aa, unidentified
MQITTIGLDIAKNVFQVHGIDAEEKVVVRKQLRRGQIIGFFQELSPCLVGLEACATSHYWARELAKLGHEVRLMPAKDVKAYVKRNKNDAADAEAICEAVRRPTMRFVQVKSAEQQAQLMQHRARDLLMHQRTQLINAMRSHLAELGIIAPQGREGVKELLAIVTKDANTHLPNDARASLIVLAAQLQALQTTIGAIEKRITEQHRANKESRRLQTIPGVGVIGASAIAATVTNPRIFRSGRDFAAWIGLVPRQMSTGGKSKLGPISKQGDRYLRRILVIGAVSTLRRAKLNPQRYPWVTRLLARRPFKVVAVALANKMARIAWALMISGKTCRSAWFAAA

SEQ ID NO: 83450 - protein, 341 aa, unidentified
MYYIGLDVHKKTISYCVKDVSGHVQQRGTMAATRTELDNWMKTLPQPWTVAMEASIFTGWVYDHLRPHAAQVKVAHPLMLRAIAVAKKKNDRIDASKIADCLRCDFLPECHMACTSIRDRRRTLRYRHLLVRQMVQMKNRVSGLLLETGVRHNKERLHQVKYFQELLTDKEVTESIRPLLRLSHETIRRLDKTETALIRSLERDPVLAERIKNLKTIPGIGVITALTWALEMDDVSRFRSVKQAISYCGLCGDERSSADKVLRTPISKQRNKHIQSVLVEAAKFAPQQSHELALVYEKEKQKGNSNRATLAVARKLVAYLLAVDRSRRPFIPAENFTSAVA

SEQ ID NO: 83451 - protein, 362 aa, unidentified
MPKMIWLGMDVHAASITVARYEDQAATAMVQTIANDPAQVRRLVRRLPAGCDVRACYEAGSCGYGLHRQLTALGVHCDVIAPALIPRRPGERIKTDRRDAEKLGRFHRSGELTTITVPTPSQEAVRDLVRAREDVRRDRTAARQRLAKFLLRHGHRYPGSHWTKRHWEWVCGRPFEGAARTVFVHYCDHVLALNERLAHLEREIHTFADSPVYQPVVARLSCLRGLATLSALMLIAELYDLRRFRTPRELMAYLGLVPSEHSSGARERRGRITKTGNALARRLLIEAAWAYRHPARQTRRVHQALTTQPPAVHAISDRALHRLTARYRRLLSRGKTHHHAVTAIARELCGFVWAIALVPDLA

SEQ ID NO: 83452 - protein, 340 aa, unidentified
MDKRYIGIDLHRNRFTCCIRLENERTYVTEWELEDLGKFVKKLRPTDEVAVEITGNTRLFYDAVAEHVARVVVVNTNQFRVIRQSVKKTDPNDARTLALYLSKNMLPEVRMKDKEHGQLASLTQTRDTLVKLRTALKNKVNNILSARGLNLAKEALSSEKKLAEVLTLPFDEIVRIELRVIVEQIRSLNKSIAELEKTIGEEGSKLEGHKGLASIKGIGKITGAILLSVIGDIHDFADEGHLASYFGIVPRVSNSNETEHSGRIHKRGTKLGRTALVQSALIAANYSPYLKRFYEQVKARRGAGKAIIALAKKFLGIIYRTLKNKWVFEDFPNFVLAEAS

SEQ ID NO: 83453 - protein, 313 aa, unidentified
MTSRICGVDVSSTALDAHVGHAGKLVGRFDNSEAGIAALAAFCARHHVALVVMEATGGYEKLPFALLWAANIPVAIANPRSVRRFAEAMGLLEKTDRIDAAMIAWYAEVKRIRPRQPPTEAQARLTALVTRLRQLTELRVSQINQRRLVTDPGVSASFESILAVVAGETRACEASIAELIGSDPLWREFDRAFRAIKGVADRTVARLMAELPEIGTLSGKAVAKLAGLAPIADDSGRRTGKRAVRGGRESVRAILFVVAELVRRYDADFKAFHARLTRAGKAKKVIRVALAHKLLVRLNAKARDVRNELAQAA

SEQ ID NO: 83454 - protein, 393 aa, unidentified
MVYVGIDVAKNKHDCFIVNSDGEVLYDVFTIQNDMDGFEDLFFKIKTASRDLSKVKVGLEATGHYSCNILGFLYNKGLCTIVINPLYTSLSRKSVSLRKTKTDKVDARTIASIIMSDVSLKPYSDTVYHNEDLKSLSRYRFDKVSDRARLKQSVSRLVNILFPELEKLVSTLHTKAVYELLSEFPGAHQVASANLKHLTALLATASKGHFGREKANEIREAARRSISSYLPAKSLELRHTIKLIRELNAEIAEIETEIKKIMDPIDSPTLSVPGISYALGAVIVSEVGDFSRFDNPDKLLAFAGCSPSTYQSGQIYSTHAKMEKRGSKYLRWALLNAAKYVCKWEPTFAAYLRKKLAEGKHYNVAVSHAAKKLVRLLYHLETTGEKYIPQTLS

SEQ ID NO: 83455 - protein, 446 aa, unidentified
MSITLAVQDPLAAFVDVGSEQMHVSIAGGLPEVFGTVTSELCRLRDWLLQHGVKSVAMEATGVYWLPLYGVLEAARLKVSMVNGKQTRNLPGRKTDMKDCQWGATLHAHGLLQAGFVPPAQIRRLQDYLRLRADHLASAAASVQHQQKALERMNVKLHDVISSLVGVSGIKVIEAILAGERDPERLLALCDVQIQKKKAERVKESLRGTWAPEHLFALRQAVENWQHYQRQIAACDQQMAAVLREISGPDQPGGPEGKTQAIKRGSVNAPQIEDLHHLMGKLCGGKDLTVLPAHTDYSILQLIGEVGTDLSQWPTEKHFTAWLGVAPGSHQSGKRKGSVRRKRNRAGRLFCLMARSLARSKNIALGGYYRRMSSRRGGLVATVALARKLAQLFWRVMVKGLSYAEAGLQAYEDQVLETKRRVLCRLAKQLGRVVLPNLAELQVTKA

SEQ ID NO: 83456 - protein, 317 aa, unidentified
MSKLRFVGLDVHADTIVVAVAEAGGEVRSLGVIPNRLESIRKMMGKLAPLETLKCCYEAGGTGYVLYWQLTQLGVACEVIAPSLIPTKAGDRVKTDRRDAEKLARCYRAGELTPVWVPDANHEALRDLVRAREAAKKDQLRHRHRLGKFLLRHGKRPSDAGKAWTQKYLNWIRIHVHFEQPALEATLKHYREEVDHIEERIAKLEQAIDEAVKQASPEMRAVIEALQALRGVAQTTAATVVAELGSLSRFARPSQLMGYSGLVSSEYTTGNRVQRGAIIDRPIFRHFSVVMRSSCSATAKSRLSRRRSLCWILGSSR

SEQ ID NO: 83457 - protein, 322 aa, unidentified
MSFVGVDIAKRTFDIATPLANGKVRTKARLTNDSNGFQQFEAWLQTYAEPGAWVVMEATSVYHEALAEYLHARDYRVCVVNPASIAKFAVLELRRVKTDKADAKIIAAYAQHKGDSLRQWAPESEAQKRLRALVRRLDDLKEMQQMEQNRLEVAPLAVQPSITAVIGHIANEIKKTCEAIKQTIDDDPDLRGRRDLITSIKGLGDTTAALLLAELGDPLKYKSPASIVAFAGLNPTVHQSGEKVGQTAISRVGSSRLRAGLFMAGTVAMRYNPVVKALADRLEARRKAYKQIVCAAMRKLLYLVYGVVKSGKPFDPQIALAR

SEQ ID NO: 83458 - protein, 399 aa, unidentified
MPKYSTAFGMDVHLRSTTVCALDADTGEAVTRRFPGNPWGEIAGWMDGFPGPSLAAYESGYLGFAPQRELAGLGVECVVAAVSKIPRSAADSASKNDRNDAARMAKAILAHDISPVWVPSPEVEGIRDLAGAYDGATARLATAKQRLLAFLAKRGFAYGGTTPAGNPRKYWTYDFLRWLDKVRPEDDGGVRTLAALRNEVEAAAEARADLLSEYRAAVDASPIAAEAAALQSIKGCAFALAAAFSAEVGDFTRFRSGRQVTAYFGLAPSQRSSGDSVRLGGISGAGNALVRKLAVEGSWCYAAARHQPKLMPRDTGVPLEIRMHGRKGSERLLRRREEMLARGMPQAKANAATAAELVRWLWALVSVNIFFTIFTNVFSPIAPTRMRRIRQRGCAAFGV

SEQ ID NO: 83459 - protein, 408 aa, unidentified
MGRAAEVVAPSSSIRTDGGYPVAQVNDLSRSLTAFDPISTWVVVVEMSKASWLVSGAVPGVERQPLKKLEPGAAALLRLIERWRNEAVRAGRPISRIALAYEAGRDGFWLARWLIARGIEAHVIHSASVAVSRERKRAKTDRLDAAMLMRVFLGWLRGERGHCGMVAIPTLEDEDARRPSRERESLVNEKSRITNRMKSTLARLGIRGFKAHLRKAPQRLEWLQTPEGTGLPPNITEELRRDMIRLALVREQIAAIEKARMERLQRAPNTGPHLMVRLLARVVGIAIETADMLVREILSRNWRDRRAVARYAGLTGSPDESGTKRREKGLAKAGNARVRRGLIQLAWRFLQFQRESALAKWFRLRTEGPSGARKTTMIVALARKLLIALWRLVTTGEVPDGVELRPAA

SEQ ID NO: 83460 - protein, 402 aa, unidentified
MNCVGIDVSKGKSMIAVIRPFGEVVVSPFEVRHTANELSELAGLLKSLDGETRVVMESTGNYHAPVAWLLHDAGLYVSVVNAMLVHDYGNNSLRRGKTDKKDAVKLANYGLDHWLTLPRYVPEEDARLMLKTCYRQYQQYSKVQTMLKNNLISLLDTAFPDANRLFTSPPRADGSEKWVDFVATFWHCECVCGLSKKAFTAKYQKWCRKHGYNFSQDKALDIYASACGRFGVMPKTNTAKLLVEQAISQLQTTSAALAALKQEMQSLAASLPEYPVVMEMFGVGPTLGPQLIAEIGDVRRFHSKKALVAFAGIDAPPYQSGQIDVRSRSISKRGSASLRRTLFLVMGVLLQCAPMDEPVYQFMNKKRSEGKPYRVYMMASANKFLRIYYASVKAYLDSLEHD

SEQ ID NO: 83461 - protein, 423 aa, unidentified
MNVVYPICCGVDIHKKFFVATLITTKGIQPEYQKRRFSTFNNQILSFKEWLLENNCYDVCMESTGKYWIPVFNLLEDSINVTVANPKWVKTVKGNKDDTKDSKWIGDLFRIGLVPGSFIPGKDIRILREYTRYRFKLVSCKSSEKNRYQNVFTVCNVALDAVVSDMFGKSASSITDYIINSDTFDSAHCVSLLQKSLKKKADEVIESIEGFYMTDPQKNRAKMVKEHYEYLMAHIKKLDDMIDELAKPFEPAIQLLCTIPGINRDSAITIISEIGTDMSQFGSSKRLCRWAGLAPGNNESAGKKKSVKITRAGVYLKPALVQIAHAAVKSNASPYYRLKYERISKRRGKKRAVIAIARMILTAVFNMLTTGEVWNPVDLNQIDMPPELREKEVQKSLRRAAKLLLSHGIISPDTVLFPEAASG

SEQ ID NO: 83462 - protein, 323 aa, unidentified
MVNLEKKVVGIDVSSKFLTVSFKNEKDQEMVYNVSNLKTGINGFLKKLKTEEYKIVIEATGSYSSKILHYASSLGFDVYQISPLTIKKYAEVKNVISKTDDEDAKLIRDFGEKMEMSLYKPKKENLEYLDQELNLWQDLEQEKARFSLKLKSLRQKARLNENVIKHYESLIKGIEKNIEKLLKRLPKLEDEELKDNKKLLKSISGIGEKTSLLLLVATNHFKDFGHPKSVSKYFGVAPRMYHSGNKKITIGKCRTTKGHIRSILYICSWSAVKSNAQCKALYERILEKGKCKKLALMAVCNKLLRQAFGIIKSKQEYQPDFAK

SEQ ID NO: 83463 - protein, 387 aa, unidentified
MKKLYSKVACSGMDVHYEFSKVTFRDKAGRVVRRERLDHRDRERLRERIARWPKGLPVVLEASFGWGWLSDLLEEAGLEPHLSNCYKVEQMRKARGWVKTNEKDADLVSLLPFETSSWWEVWRAPPEVRDQREQMRFRADLVALQTCVKNRIHAVFHRHGIFHDFSDLFGGQGRAFLSELCLHNPTGLPPQAWLALRGQVRLLDHVRHQLADIERNLHRQWTTTPLVRRLKTIQGIGLVLAHVLSAEVGRIERFGNHKRLASYSLLAPRANDTGQADPTTAPLGRHLGTRGNRTLKWAFIEAAHGAVRSGGRWRAMFDRVTEGGRKDRNRGYIKVARELVKVVYVVWAKGVPYSSTPPARPGRGKNQKPSRSGTGQLCHPMVHALPA

SEQ ID NO: 83464 - protein, 315 aa, unidentified
MHLGIDVSKNTLDCCLISDGIFYERKFKNDSVGIDKLKKWLDEHGADHTLHCCCEATGTYYEESAKALARRYKMSVVNPRTIKGFSTAVMNRSKTDRQDAKLIARYCQAMKPEQWQPLTSEHRQLQELVRYIVRTKRQRAAEQIKRQTAPDSLKPHIQSTIEHLTELLTRLEQDLKAHYRSHPEHDSRRKRLKTIDGIGENAAAVLCSVITDRFTHAKQLVAYLGLDPKEHQSGTSVRGRTRISKIGKSDIRAALYMPALVAYRMGAFPDFTARLEAKGKPPKVIIVAIMRKLAVIAFNLLKNGEEFDRSRYRKI

SEQ ID NO: 83465 - protein, 418 aa, unidentified
MIDQDQAPATPATTPAATPAPTAGIDWASSDHAVAIVDPHGVQQDRFTIPHTAPGLRQLVARLHRAGVNEVAIERPDGPVVDALLEADLGVVMIAPNQVKNLRSRYGSAGNKDDGFDAYVLADTLRTDRTRLRPLTRDSDATIILRMTVRARQDLVAARVAMANQLRAHLQTTLPGVIGLFRDIDSAITLRFLTRFPSQDKADWLSPTRLGNWLRSIGYNHLANLDRLWDHLNQAPRGTTGAQAAARAEITLALVAALTGLRVQIKALEKQIADQLAGHPDAAIFTSLPKSGTVRAARLLAEIGDARGRFPTPESLVCLAGAAPSTRQSGKVKVVTFRWAVDKQLRGAVVDFAGDSHHANPWAADLYQRARARGHDHPHAVRILARAWLHIIWRCWQDNQPYDPAKHRALQRLQHQAA

SEQ ID NO: 83466 - protein, 382 aa, unidentified
MITMTCPAETTAPTGGLLLAFELGQRSWKLGFTVGMGQRPRIRQIPAGAVGTLVTEIERAKTRLGLPADSPVISCYEAGRDGFWLHRYLVAAGVTNYVVDSSSIEVNRRARRAKTDCLDLAGLLSLLARYVLGDRRAWRVVRVPTVAEEDARHLSRTLEALTQDRTRLMSRLKSLLATQGVSLPINAQFLHRLEAAQLWDGTPLPPGLQERLTRTWRQLQEVDGQLRDLKTLRLTRPEHLTPATSRALTQLLTMRAIGPIGASVLATEIVGWRRIRNRRELGALVGLVPAPYQSGETNYDQGITRAGNAHVRRVIVQLAWGWIRHQPDSALTHWYQQRFGGGGKRVRKIGIVALARRLLIALWRYLETGVVPVGAQLKPIEV

SEQ ID NO: 83467 - protein, 323 aa, unidentified
MTKFTGIDISKQSFDCSITLENEKIESRKFSNDLEGFAKLKKLLCSESHVVMEASGPYYLRLATFLHQEGIKVSVVNALIIRRFCQMRMMRTKTDKKDAIMIREYAKLENPGLWKPDEPLILKLKNLNTMVELLDKGITATSNQLEAFKEMPGTDKSVLDQLKSILEFNEKSKENIELEMEEIVKENFSNTYKSLLSIPGIGKKTAALLIAITGNFKKFDHYKQLIAYVGLNPRVFESGSSVKGRGHICKMGTSRLRKTIYLCSWSAKKSNPQCIEMYKRLKEKSKPNKVINVALANKLLRQAFAMGKYQREYEKNYQKIFVN

SEQ ID NO: 83468 - protein, 385 aa, unidentified
MQKLNDLSRSLTALEPDGTLIAVIEMSLSSWLVAGIVPGVERQPLKKLAVDESALLKLLHRWREEAEKAGRRIERIAVAFEAGRDGFWLARWLKVRGIEAYVIHASSVAVSREHRRAKTDRLDTELLKRSFLGWLRGERDHCKMVEIPTMKDEDAKRPNREHDSLIGERSRIVNRMKAALVRLGIRGFNPKLKRASTRLDGLRTPEGEPIPPNALAELRRDMERRRLVNNQIRQIEEERLKRIEQAPCDGPHVMVRLLARVMGVGIETADMLVHEVLSRNMRDRRAVARYAGLTGSPDESGRKRREKGLARSGNVRVRRGMIQLAWRFLLHQKNSALTKWFRSRTENARGTRKPMIVALARKLLIALWRLVREGIVPDGVVLRAA

SEQ ID NO: 83469 - protein, 408 aa, unidentified
MQVLYPRCAGLDVHKDTIVACVRCISPPMHQEVRSFGATTAELLKLADWLAEHDCTHVAMEATGVYWKPVWHVLEDEFELVLANAAHIRNVPGRKTDVNDAMWIADLLAHGLIRSSFVPPQAIQQLRDLTRTRKQLVREVSQHSLRIQKVLEDANLKLGSVLSDVLGKSGRAMLDAIVAGETDPACLAALAQGTARNKSAELREALRGRITDHHRTMLRLHLQVVDALQRTLAELDAAVGKALAPIQERARLLTTMPGISDLTASVVVAEIGVDMSRFPTAGHLVSWAGLCPRSDESAGKRRSARVRKSGTWIKTTLVTAAWSAVRVKTSYLRAQFLRIKARRGAKKAILAVAASMLTAAFHMLRDGTEYNDLGSAHFDRQDKSKTIRRLLKRLQDLGCDVPELAHTA

SEQ ID NO: 83470 - protein, 347 aa, unidentified
MSITMIGLDTAKSVFQIHGVNEAGKAEIRRKLRRSELIAFFEKQETCTVVMEACGAAHHWARLLTGLGHTVKLVAAETVKPFVKKGKKNDAADAAAICDAASRPDVKFVPAKSVEQQGILALHAARSLLVKQQTMLANAMRGLATEFGLTVPKGIRKLEELMALVDGDETIPRQACQAITGLHDRCRELAEGIETFEAEIVAHARHDETARRLATIPGIGPITASLIAATVGDISLFKTARQFAAWLGLVPGQNSTGGKTRLGRITKTGNREIRKLLVLGATSMVHRADGWNSAVGAWLRTILERRPVRLVTVALANKMARIAWAVMTRKEVYRPKGGVAVGAQAAA

SEQ ID NO: 83471 - protein, 316 aa, unidentified
MDIASRSLEARVGQQGAAGSFANNPEGIAALEAFCRAHQVELVAMEATGGYEQQAFAQLSEQGLPVAILNPRAVRQFAQSMGSLEKTDRIDAGMIAWYAEVKKSRPVCPAPERQQHLRALVTRLRQLTEMRVAQVNQQRLVTDRAVQSSFKKLLAVLARQIRELEQRIAALLDQEPLWRELNQAFRTIKGVADRTVARLMAEMPEIGVLSNKTISKLAGVAPLARDSGQHQGRRAVRGGRATVREILFIVASVVGRYEPDFIAFQQRLRAAGKPSRVIRIALAHKLLVRLNAKAREVRQRLQLSNPLPPAVPAGSL

SEQ ID NO: 83472 - protein, 389 aa, unidentified
MKIFVGIDIAKLNHFAAAISSDGEILIEPFKFTNDADGFQLLVSKLESFDKNSIIIGLESTAHYGDNLVRYLVAEFYQVCVLNPIKTCQMRKNNVRKTKTDKVDTFVIAKTLMMQDDLRFITFFDLDMMDLKALGRFRQKTIKQRTRLKIQLTTYVDQVFPEIQYFFKSGLHQNAVYALLKEAPSPKEIASMHMTHLANLLKVNSHGHFTKEQAKELRILAQKSVGANDSAISIQITQTIQQIELLDSQLEKIEAEMTDIMKFNDSVIMTIPGIGYINGGMILGEIGDIHRFSNPNKLLAFAGLDPSVYQSGNFQAKTTRMSKRGSRVLRYALVNAAWNVVRNNATFNAYYDAKRAEGRSHYNALGHCAGKLVRVIWKMLTDEVEFNLE

SEQ ID NO: 83473 - protein, 416 aa, unidentified
MNAVGIDVSSRKSTVAVLRPLGEVVCLPFDVTHDIAGLASLVEKLKALDGETRVVMEHTGRYYEAVEKALHEAGFFVCAVNPLLIKEYGANSLRRVKTDKADAIKIARYALDNWADLRDFTPMDAIRYDLKTLNRQFQLASKQRTASANNLIALLEQSFPGIRKCFDSPVRSDGTQKWVDFAHSFWHVDCVRKQPFAAFCERYRKWCKRHAYLFKLSNAEEVYALAKRAVVLTPKSKVVKVLVQEAANQLISISRSVEVYRAEMDRLAAMLPEYPVVMAMYGVGKSYGPQLMAEIGDVRRFERKQALVAFAGIDPMPNQSGDKNVRSNKSSKRGSPYLRKTLFNVIRTYLQCAPQDEPVFQFLNRKRAEGKPFYVYMLAAANKFLRRYYAKLRDYFASLDTLQSVDPIPATLKASL

SEQ ID NO: 83474 - protein, 364 aa, unidentified
MNEITTIGLDLAKTVFHLVGCNAQGHEVMKKELKRKQLLSYFANLAPCRVGMEACAGAHDWGRRLQALGHQVRLLPPQHVKAYVRGNKNDYNDARAIAEAAGRPGLRAVAVKSVAQQDVQALHRLRAARVAERTALGNQLRGLLAEYGLVVPQGLAALRRALPGILEDADNGLSEVFRPLLQRGQQQLAELDEHIAYYDGVLKRQAQADEAVLRLQTIPGFGPLVASAFYSLVGDGQGYRRGRDVAAALGLVPAQHSSGGKAVLLGISKRGDGYLRSLLGHGARAVVQRAADKDDPLSGWINRLVAKRGIHKATIALANKLARIGWAVLRHHTVYQPTQASAVGQGAVPTDAPRAEPTAIAAAG

SEQ ID NO: 83475 - protein, 343 aa, unidentified
MNIITVGLDLAKNVFHVVCFNGHFKEVKKRMLRRHQVLQFFTQLPPCRVSMEACASSHYWGRELRALGHEVKLIPPQYVKPYLRGNKNDYNDARAIAEASTRPSMPFVAIKTVAEQDMQAIHRMRTQCIRDRTALSNSLRGLLGEYGIVLPPGLATLRKSIHGLLEDADNGLSDRFRHLLVRRYEQLVELDEHIEFYTKELELLSQQDEACQRLQTVPGFGPIVSSAFRSAIGDGRAYAHGRDASASLGLVPRQHSSGGKNVLLGISKRGDRYLRSLLVHGARAVVVQAARKDDPLSRWINRIREERGWNKAVVAMANKLARIGWAILRYNTIYQPGSEPLAQ

SEQ ID NO: 83476 - protein, 283 aa, unidentified
MTSAKYIGMDVHKESISIAVRNAAGKIVMECVIETKASMILQFIDGLRGDLQVTFEEGTSAAWLYDLLKPHVTKLVVCDPRKNASLREGNQSDKIDARRLADLLRLNHLYSVYHGEHGLRSLKELVRSYLTITKDLGRVMSRVKAIYRSWAIPCSGKQVYAPRHRVEWLGKITEPGVRRRAEFYYQQLDALRAVRQQVRRELLAEGKKHPAWKRLCQIPAIGPIRAAVLLGILQTPQRFRTKRQLWAYSGFGIETQSSADHRSVNGQLQRVKKQSSLRGLNRN

SEQ ID NO: 83477 - protein, 358 aa, unidentified
MDGSKDQPLMIAGLDIGDKYSHLCLIDTDSGEVIEESRLCTTSETFRRRFASEQPPMRIAIEAGTHSPWASRVLEECGHEVLVANARKVRLIYANKQKTDEIDAENLARLARLDPKLLYPLKHRGEGSQAHMAIIRSREALVSARTQLVNHVRGAVKSFGGRLPKCPARSFHNRVPEHIPEALWEALGSILETIGSLTQRIRGYERQLEAISKECYPETELLRQVEGVGPLTALTFVLTLEDPYRFAKSRSVGAYLGLVPAQDQSGDRDPQKRISKEGDEMLRKLLVGSAHYILGPFGSDSDLRRHGEKIASRGGKNSKKRAVVAVARKLSVLLHHLWVSGEVYDPLYNAHSCGDVAA

SEQ ID NO: 83478 - protein, 342 aa, unidentified
MQTITTIGLDIAKSVFQVHGVDAAGQVVRRQLKRRYVLAFFQKLPPCLIGIEACASSHHWSRELQALGHTVRLMPPAYVKPYVKRQKNDATDAEAICEAVTRANMRFVPTKTPEQQSCLMLHRTRHLFIRQQTAVINAIRAHLAEFGIVAPVGRKGVTELLHVVADPSDGRVPEVARACLAALGTQLLGLKEQIVEFDRLIMAWHRSNETSKRLHYIPGVGPLLATALAASVADPQTFRSGRNFSAWIGLVPKQHSSGGKDRLGSISKQGDRYLRSLFVAGALSVIRYAKIHGTKHRPWLTALLARRPTKVAAIALANKLARMAWAMMARGERYRQPVALAA

SEQ ID NO: 83479 - protein, 392 aa, unidentified
MVISVGIDVSKDKHDCFIQSSEGEVLVDVFTIPNNMDGFNILLEKIQRCATSQDKIKVGLEATGHYSYNLLGFLLDNGLATYVLNPLRTNLYRKSLSLRKTKTDRVDARTIATMLLSDAGLKPYTNTAYHNEELKSLTRYRFDKVKERAKLKSSIARLVCILFPELEKLVPSLHIASVYALLEEFPGAKQIAAAHLTRLKTLLETASKGHYKRDMALEIRDAARNSIGSWMPAKSLELQHTIRLIRELDDEIVEIEEQIQAIMDELNSPITTIPGIGFRMAAMIFAEVGDFTRFDSPDKLLAYAGMSPSTYQSGQLKNCYPHMEKRGSRYLRYALYNATKYVCHWDPTFAAYLAKKRAEGKHYNVALSHATKKLVRLIFAMEKSRQPYCSAA

SEQ ID NO: 83480 - protein, 424 aa, unidentified
MYRIAGIDVHKRLLVVVIAELRADGVVILERRKFLATPEQMRKLAECLLEWEVEEVVMESTAQYWQPIWGMLEEVWQPARRQRTGAGPKAGKLYLAQAQSNKGRRGRKNDYEDAERLVKRLEANELVLSYVPEPEQRLWRAVSRRKIQLNRDRSRVQNQLECVLEQAHIKLSSVISDLLGVSAQRILRAIAEGGSDPVVLAGMVEKNVKATPEELADALSAVRRCRTEYRQLIQMMLDHVKLLDEQMEQLILQAAKLMKPYEDAVQRLAETPGLGVDSGLQIVAEVGPRAEVFPRPGNLCSWVGSIPGEQISAERNASSKSPKGNRQMRRILTEAVQAAVKQKGNIFEVKFRKFITHMDYQEAIWCVVHFMCKIVWKILHDGVRYQERGPAVDAKNAHRRNQKMARHLKAVGYNVLPPVAPMPS

SEQ ID NO: 83481 - protein, 431 aa, unidentified
MNTQQFEVIRPKCAGLDVHKKSVVAAVYTSDPVTLTASYKTKVFNTTNSDIAALRDWLLAQDCHDVCMESTGKYWIPIFNILEPHMHVILTHPKYVKAIKGKKTDKRDAKWIANLFRFDIVKASFIPPADIRVLRELSRYRLKLSYMRTAEKNRYQNSMTISRIRIDCVLTDPFGLSATRIMDYLLSGEPFNEGKCRSLIDGRVKASKDEVMDAVHGYHILKEQKFKMTHAKAHMDFINQSIDEIEAELFLRSRQYDSQIKRIATVSGITELSALFILSEIGADMSVFESDRHLCSWAGLTPANNESASKKKSTRCSKAGQYLKPLLIQCALAAAKSKKEPYFAIKYQRLAKRRGKKKAIIAIARMMLTSIYHMLLNGEDFHPDDYEATVNPPKQKPVILTFENTLQFLREQGADPEILKLIQQQCAAQAG

SEQ ID NO: 83482 - protein, 369 aa, unidentified
MAKCIFVGLDVHKDSIDVAIAEDGRDGEVRHYGRIGGDIAALDKVIRRLQSRGATLRVVYEAGPCGYEIYRHLSRRGIDCMVVAPGMIPKRSGDRVKNDRRDALGLARLHRAGELKPGYVPCEEDEAMRDLVRGREDAKNAEKKAKQQLGGFLLRHGKRYEGGKPWSRAHRRWLGDQSFAHPAQQIAFQEYAAAVEQCQERVKRLTEQIQARVPGWRLAPAVKAFQAMRGVSSIVAVTMAAEVGDLSRFDSPRQLMAYLGLVPSEHSSGGSVRRGSITKTGNGHARRVLVEGAWAHRFPARVSRTLGDRQEGLPEVVRDIAWKAQLRLCQRYRHLLAKGKTKQVTVTAIAREMAAFLWAIACEVPIPAT

SEQ ID NO: 83483 - protein, 367 aa, unidentified
MADYLIVGADVHEEYVMTKWCIDQGDVSKNSFRMTEAGQSKMIGMLHKTAKKSKVKTIVVAYEACCLGFGLHDRLTEASIECHVLAPTKIERSNKQHRDKTDEKDALRILEILRGHLLAGNSLPDIWIPDHQTRQDRAIIRQRFSLSEQCSSVKTKIRMILKRAHVRKPKKIGKNWTKAYRKWLRDICDMEAGVLQYGDMLVLESLLRQLKGLEDEVELQDHNIKSLSETPRYQEACAKLCQIKGVGLLTAMVFLTEFGDMSRFSNRRQIGAFLGLAPSSYETGENCDRKGHITKQGSALVRKVLSQAAWCISRDDAFFDRVLKKNPKKKKIAIVGVMRRTAIKMWHIALDVQKETGCFVVCTGEST

SEQ ID NO: 83484 - protein, 391 aa, unidentified
MHGGRAEWTISRMSDWMCTRRRFCVAIAEGGRGGEVRQVGGFREPARHILCKLAARLGKGGRRLSFCHEAGPCGYGLQRLLSRRGHSCIVVAPSLIPMKSGDRVKTDRRDAVMLAKLHRAGELTAVWVPDAAHEAMRDLVRARATAGRVLAQARQHLQGFLLRHERIYPGPRAWTLAYRRWLTTVRFDHPAQQIVLQDYIHAVQDAEARRDRLTRQIEELLPSWSMAPVVEALQAMRGVALVVAVTVVAEVGDFRRFANAGQLMAYLGLVPSEHSSGSTIRRGGITKAGNALARRVLIEGAWTYRMKARVSRKLHDRLEPLPAEIRDIAWKAQVRLCARYRRLAASGKPSVVAITAIAREMVGFIWAIARLVQPAVEDQRTPPAHAEAPRC

SEQ ID NO: 83485 - protein, 409 aa, unidentified
MERLFDRVAGLDVHKQTVAVCVRTPGPRGAREQQIRVFGTTTVEVLALRDWLQAHGVTHVAMESTGVCWKPIFYLLEEVVSCLLVNPVHVKRVPGRKTDVQDCIWLAELLEHGLLRGSFVPPAPIRELRDLTRFRKSLIQERTRAANRLHKVLEDAGIKLATVATDILGASGRAMLNALVQGTTNADVLADLARGRLRAKLPALRQALVGRFRPHHAFLVTQVLAHLDYLDEAIAGLSEQLGTLLTASEDTLARLDTIPGVNRRTAEVLIAELGMDMTIFPSAAHCVSWAGLCPGNNESAGKHKSGKTRHGDPWLRAALVEAALGALHTRGCALAARYRRIMRHRGHKKAVVAVAHAILVIAYHVLKHQITYRELGADYYDKRRAQRLARHAVETLERQGYRVTLERAA

SEQ ID NO: 83486 - protein, 345 aa, unidentified
MSIVGGLDIHRKQLTFDYVDTVTGQVARGQITPADREHLRAWPARFAGREDVAFAMEGCTGWRHVAGELAAAGIAAHVAEPADTAFARGRKRHAKTDKTDSRHLRQLLAEGRLPECWIPPPQVLECRALLETYHDLRREHTAWVQRIHAVFFHQGAPRLGEGALRTAQGLAALRAASAAHLSPAGQLQVATALDMLACLEARLDVLRHQLLDAARHMSGAKVLAARLYGVGPVTALALTCWLGGARRFSSSRKAVRFAGLDITVYSSDGKRSPGRLSRQGPPVLRWAVYEAGKVHARTAAPDHGYYAAVADRKNTRRAALSEARKIIRQACHILTELGDDALTAA

SEQ ID NO: 83487 - protein, 307 aa, unidentified
MSGIGIDACKHFLDVAVFRGQTRQFTNTAGGHRKLVDWLKTLSVRQVVLEATGGYELAALDALHHAALPVARVNAQRARNLANGLGLAKTDRLDAAMLACMAEKMELHRYVPLEPWQRDLGEHVRARRQLVELLKAARQQLLQVAEKALRRILQGNVNQLVRSVARLDKLIAGQLKTLLIEQPHLAALKTLKGVGPVLLAVLVYRLPELRTLSGKQISRLVGVAPLSRDSGATRGKRGIGGGRADIRQALYMAAMSSARHEPGLRDFYRSLRTRGKEGKVALVAVMRKMLVILNARVRDQRAAMHPA

SEQ ID NO: 83488 - protein, 410 aa, unidentified
MRVVGLDVSRTVIEVAYLEDGQLRSGGRVAVTREALHRFASSLQADDHVVLEATGNTAAIAAAIQPHVAKVVVANPLLVRLIAEAKVKTDRIDAAVLAQLYASGFLPEVWIADEKTQALRRQASRRAQVMRQCVRLKNEIHSVLAAHLIAKCPASDLFGRKGRAWLAGQPLPMDERLGVEQRLRELDRLTEDLAAIDRQLGASVLDDPRIKRLFTITGINTTVAIDLVAAIGDIGRFASPEKLVSYFGLNPCVYQSGDQPARHGKISKRGRSHARAMLVEAAWAAAKAPGPLRAFFLRVSQRRGLQIAAVATARKLAVLVWHMLRNDQDYACNRPALAAMKRRRLELQAGLPAHRGSVKGIAADYSLKHVRDRERAMAEQAERSYARSVARWRVQPKPKGTGAATPTRDS

SEQ ID NO: 83489 - protein, 407 aa, unidentified
MDLLKTVFGIDVSSRKSNVCIMVNGQKVDDYAISNDMVGFNQLLDDLKQVTKPQIIFEATGVYSRRLQAFLDMHELRYVMMNPLEAKRKTKDDLHQNKTDKLDALYLAKLQSEHPQRLAYVQSKEYQELMANNRIYEQASHDLITNRNRLHKAIQLTFPKIEHLMVNPRGKNYWSIVLRFPHPDIVLETKEADIIDFLKGLSGIGKKRANDIMQSLIRLAKVACPAVKKDSAHIRGLEMAINNILSAEEACQTALKEMTKLAPKRDLEILTSIPGIGENTALRIISELGDIRRFNNPSQLNAFVGVDPQVYESGNLTAHLSISKRGTAIGRKVLYLAINQIQSAKKAGNPSHIADYYEKRKRSSETASHKKAAIASIHKLLRTIFALIKNDQLYSYDVAKHNQRLLS

SEQ ID NO: 83490 - protein, 424 aa, unidentified
MKVTYQTCCGVDVHKSFLVATIIKTTAGIEPSYQKKRFSTFNNSILDFKSWLLENECHDVCMESTGKYWVPVFNLLEDDINVVIANPKWVKAVKGNKDDTKDSKWIGDLFRLGLVKSSYIPCRLIRILREYTRYRYKLVSCRSSEKNRYQNALTVCNIALDSVVSDIFGKSSSSIIDYLLEQSGTTINHEEIASKLLKSLKSKEDAVIESVEGYQMTDAQKYRMRLVRAHMDYITAEINDVDKMIENMISSNTDFENAVQFLCTIPGVKRDSAITIISEIGTDMSQFSSSRRLCCWAGLTPGSNESAGKKKSVRFTRAGVYLKPALVQCAHAAVKSDKSPYYKKKYESLVKRRGKKRAIIAIARMILTAIYQMLSTGEQWNPSDLYKIDMPVALVEKQKAKAIKQAKKLLQREGLLPPDEPLAS

SEQ ID NO: 83491 - protein, 379 aa, unidentified
MTTIGAERPETEVAVILGVDTHLHFHVVVAIDHLGRRLGESKAPTTAKGYESLLTWAEGFGPVKCAGVEGTSSYGAGFTRHLRARGIEVLEVERPKHRRRSSRRNFEKSDPSDAEAAARAVLAGEASGVPKSADGRVEMIRALRAARRSAIKARTQAANLLQGLRVTAPEELRRRLRGLSTKELVSVAARFRLADGPHDVPTVTKFALRSVARRYEALSAEIAELDAHLERLVGRAAPELVSLPGIGTENAVTLLIVAGDNPHRLGSEASFATFANLCGVAPIEASSGKVVRHRLNRGGNREANRALYMICLARMRRDLRTQEYVARRTAEGKSKREIIRCLKRYVAREVYRVLVSCGARSSPTGPKDEDHIVSGSSAA

SEQ ID NO: 83492 - protein, 354 aa, unidentified
MNTTQNSTKSKIVKVIGVDLAKDHCDVIGYDENGKICLRLDGCSYAKLREILSNLPQAVVLMEACKGSMFHARSIADLGHEVRLVKGADVKALRNVNHKNDLRDAAYIANLYFVPGIKYVYIKSQQQQSLQFLQNEYKSLQELRIQVGNQIHAGLEEFGCPVRKSSKFIKTRMVAHLEKHAELIPEDVMASFKRRREIWLNLLQQEEEAKRRLEQVAATDANAKRIMTVPCVGPQTAVGLLVHVGVDFGRFKNSRQFAASLGLVPKQNSTGGNNTLNHITKCGPKRLRSNLVQCAQLVLMYAEKWKGNFGDWVRKMRDSGKKHGVIVCAIAAKLARFIYRLMKDKVDYTPILSC

SEQ ID NO: 83493 - protein, 316 aa, unidentified
MSEQQIFVGIDVAKAQLDIALRPTGERWAVPNDDPSITALVARLHAVHPTLIVLEATGGYHRAAVAALAAAGLPVVVVNPRQTRDFAKATGQLAKTDALDARALAHFAEAVRPTPRLLPTAQEEELRALLARRRQLVAMRTAEGNRLGSALPSLHADLQAHIAWLDERLAALDDTLDTTLRASPIWRERETLYRSVPGIGPVSARTLLLDLPELGTLSRQRIAALAGVAPFNCDSGTMRGRRAIWGGRAPLRATLYMATLVAVRHNPVLKACYERLLAAGKAKKVALVACMRKLLTILNAMVKHQTPWQPREVAIA

SEQ ID NO: 83494 - protein, 339 aa, unidentified
MQVSTLGIDLAKNVFVLHGVDHTGQTVLKKKLSRAKFAEFVIRLEPCLIGMEACSSSHHFARMFIRHGHQVRLMPPQYVKPYVKTNKTDATDAEAICEAVTRPNMRFVQVKTVDQQAVLALHTERDIIIRERVACTNSLRAMLSEFGFVMATGRKALKQGVPEILEDGENELSPFVRASALRQMAHIDALDDHLELIEQQLKSWAETQAACKRMTKVPGVGLLTATYLVASVGDGKQFSCAKQFSAWMGLTPREHSSGGKQRLGRISKRGDGYFRYLLVHGARAVASVIERHREDMRWLDGLLKRKNYNVAVVAQASKTARILWSMLVHETEYRPPAEA

SEQ ID NO: 83495 - protein, 343 aa, unidentified
MQITTIGLDLAKRVFQVHCVDADGRVVIRRKLQRAEVADFFAGLPHCLVGIEACATAHHWARLIEASGHQVRLIPPSYVKPYIRRSKTDAADAEAICEAVGRPSMRFVPVKSTDQQAALLHHRARDLLVRQRTMLINALRGHLGEFGIIAPVGRHRIADLISLLQDARDADVPPLAREALRSLIAELHALETRIEAIEAVIMREHKANAVSRRLASIPGIGPITASAIAATIADPSAFKSGRELAAWIGLVPRQHSSGGKQKLGRVSKQGDRYLRRLLTVGATAVMRRLPGKTDGHTAWIRALLDRRPFRLVSLALANKMARIAWAVMARQEDYRKPQMAAAA

SEQ ID NO: 83496 - protein, 482 aa, unidentified
MQKSSIYPNRSQELAALFEKASNPSKLMCVPIDYAKKDHLVMFCNGNGEVLRKPFSVSNSVDGVKYLLNQVSRSCGHRNILRDHVFFGGEDVNSYAENFANTIRSKGWLVANVNAHDAKKQRENLQASTDRLDLMGIATMLLNRRANCCPAQSGVYRNLRTIVRHRRKLVKMKTEVRNRIHTLIDRLFPGFLNERKSGILPFSNSSLYLMEERFSAPQIRRRQRSALIRNLEKRGTKKAEQVAAKLQEYASQVLTTPDEYTATLQVSLASHVTHYRCLFDGAQQLVNEMAQLLAQTQGAFLTSIKGIGIVLAAGVAAEIGDPLVQRSTDQVASYAGIVPKVKQSGGSQGPSITSHVSKRSNHILKDFIVQSAFHIGRYGPKDLKDDYSRREAAGQHADFGIARRFIRMAMCMMRTSQVYLPPDMRSTHINPERRAEYYQAMWSYLRDKWRKAGGLNVAFAMDKPLGQWRYIVQEIYGIKLKM

SEQ ID NO: 83497 - protein, 319 aa, unidentified
MSGSAVVGIDVSKGHLDVVVIGAKLEAERFANEVEGHSALAAALQPLGVRLVVMEATGGYEAALACALQAAGLAVAVLNPKQARDFAKAMGRLAKTDRIDARTLAELGIVLVGRADLARFVRPLPDAQQQALAALVTRRRQLLTMMVSERQRPQLAIAVVRPSIEAMITAIRAQLDDVEAQMVRHVREHFADLDTLLRSANGIGRVASATLIATLPELGELNRREIAALVGVAPMANESGTSRGRRRVQGGRFEIRRVLYMAALSAAKRNPTIRDFYQRLRAAGKLPKVALVACMRKLLTILNAMARTHKPWDESLHRA

SEQ ID NO: 83498 - protein, 423 aa, unidentified
MDVIHQRVAGLDVHKETIVACVRIMVDARVSRECRTFDTTTAGLKDLQAWLTASGCSHVAMEATGVYWKPVWNILSDGTFELLVANAAHIKNVPGRKTDVNDATWIADLMACGLIRGSFVPDQAFQELRTLLRTRKQLTREQTRHVQRLQKTLEEANIKLDSVISDVMGLSGRRMVEAMIAGERNPQKLAALADRRIKASPKALYDALHGRLTDHHRFRLRLHLAQYDVLAAAIGAVDQEVDAAIDQMDEVEKGGQAFFRSLIRLLSGIPGVNTLSAQTILAEITPDMTRFATAGHLVAWAGLCPGQNESAGKRKSSRLRKGAPWLKTTLVQCAASAVKKKDSYFKAQFQRLKSRRGPQKAICAVAAAMLTTIYHMLKDGTQFQDLGAHHFDRRPPEAKARHLVAQLTKLGYTVQLQPLAEAA

SEQ ID NO: 83499 - protein, 345 aa, unidentified
MEPMYYIGLDVHKQKISYCVKDGSGKMYAEGWIPATRHDLDCWMQNLPQPWSAAMEATMFSGWVYDHLKPHAVGLKVAHPLMLRAIAAAKKKNDRIDANKICDCLRCDFLPESYMAPTAIRERRRTLRYRNLLVRQMVQMKNKLGMLLMEAGISYDKQRLHKLGYFRELLANTPEIDDGLRSLLRMCHETAVRSAKTESALVRSLVHDRLLVNRIKRLMSIPGIGPITALTWALEIGEVQRFSSIKKAISYCGLCGDQQSSADRISRTPLSKQRNKHLQTTLIEAAKMAPRYSPTLALLYDKEREKGNANRATLAVARKLVAYLMAVDRGQTHFLVLDRDTCAAA

SEQ ID NO: 83500 - protein, 330 aa, unidentified
MTVFFGIDVAKERLDCAAIILDRQRPIGQKSFPNTLDGIERAAAWVMKVSKAEISQVHAVLEPTAAYHELAARFLATKGMTVSLVNPAQIRSFAKGMAVLNKTDQIDAVLLARYGCLAQPKAWTPPAEPLIELQALLARLDDLEGDLRREQNRYEQACVRGCSGAIKRSFVTNIRALKAQCKLLQEAIAGHFAAHEALEADLKRLLTIPAVGPKTAMRMLALLRSHPFDTARQAAAFLGLVPIERQSGRSVRGRPRLSKAGNSRLRAALYMAAVVATKLNPDIKAQQQRLLERGKAKMSTLGAAMRKLVHICFGVLKSGNVYQFPAAHPT

SEQ ID NO: 83501 - protein, 344 aa, unidentified
MTIVTLGIDLGKNLNSIVGLDAEERVVLRRRVRRATLAELAGRLSPCTVAMEACCGAHHVGRLFAANGHDVRLMSPEYVRPYVRAQKNDDNDAAGIAEAAARPTMRFVELKSQDRLDLQTLHRARSRLVAARKALVNQLRAILLERGHTFRQGRKVLEREIDPFLAAPPSDLSTRILTLIKDMRVEWRSLDERIDALNDDLTQHARVDEAANRLTSIPGIGVLGATALVAAVGNGEAFRRARDVPAWLGLVPKQMTTGGKPRLLSITKRGNIYLRMLLIHGARAALPSLSKQMTPLGEWLRALLSRAHRNVVIVALAAKLARIAWATLRRGIGFNPEMGAMVTA

SEQ ID NO: 83502 - protein, 345 aa, unidentified
MEQYAGLDVSLESTSICIVDGSGRVLREAKVLSEPEALIAWFCEHGTPMARIGLEAGPLSQWLYAAMQAVDLPVELLETRHVRSAFKAMTIKTDRKDALGIAHLMRMGWFRPVHCKSLPAQEVRALLTARKLLQSKRIDVEMSLRGILRGFGLKVGPTTPRSFEGRVRDLVEGHAVLTAIANGMLSARAALVTEFKAIESRLLAQSRRNRQVRTLMSTPGVGAFTALTFAAAIDDPGRFNSSRMVGAHFGLTPKKHQSGETDITGRISKVGDHGVRVALYEAANIILTRSAKSSALKSWALAVAKRAGMKKAKVALARKLAVVLHQLLKTGQQFSLTGRPEAAAA

SEQ ID NO: 83503 - protein, 409 aa, unidentified
MLFIGDDWAEDHHDIEVEDEQGRRLARRRLPEGVAGIEALHALVADHLPDDAEANQVLVGIETDRGPWVQALIAAGYTVYAVNPLQAARYRDRHGVSGAKSDAGDAHVLAELVRLDRAHHRPVAGDSAIAEHVKVLARAHQSLVWSRQRQTNMLRSMLREFYPGALDAFAGDLDGRDALAVLAIAPRAADGRRLSRARVETALRRAGRQRYVATRAAEIVAALRADQLPARAGVEDAYGASVRALVAVISELRRQTLALAGAVEAGFGRHPDVEIYLSQPGLGPVLGARVLAEFGDDPARYADAKARRNYAGTSPITRASGKSSAVLARHVRNRRLADALDQQAFAALQASPGARAYYDARRARGATHHQALRALGNRLVGVLHGCLRRHQRYDEARAWQQHAVVPRAA

SEQ ID NO: 83504 - protein, 338 aa, unidentified
MEGTPVQSSATPLPPADARPVAFVGIDLAKESFQVAADADVPAARFNLPFTYNADGIAQLLERLKTLAVALIVMEATGGLERKLAAELSEAGYTVAVINPRQARDFAKAIGTLAKTDKVDAGVLARLARMLKPQARPLPSAEQIRLKDLSARRRQLIHMRTAELNRKQQATLNEVSKSITNHITMLNKEIAKIEKQIAQLIDSNSDWKRKSDLMDSVKGIAPDTAHAILAELPEIGTLSKRQVSSLAGLAPHVFESGKFKGQSRIWGGRGSVRSALYMATMTATRCNPAIKAFYDRMVQQGKKKIVALTACMRKLLTILNAIVRDGVVWNSKMGIVQP

SEQ ID NO: 83505 - protein, 408 aa, unidentified
MLEPIVKRCVGLDVHKMVVVATVLVEQQDGSIKEETKQFGTFRKHRLQMVRWLKSLDVELAVMESTGIYWKSVFASLEAAGITAYVVNARDVKKVPGRKTDVSDSKWLADLARVGLLNPSFIPPRDLRELRLITRHRVKLKGMLSAHSNRLHKCLDDAGIRLGGVVSDIRGVSARYIIRGLLEGKKPQELVAHVHGRLMEKIPDLLASIDEPLSERHKWLLSSIDRQITVLEQEIVDIDHYLAKEMLAYKKQIELLQTIPGVDFIAAVMLLVETGPEMKCFGNAHRLASWAGMCPGNNESAGKKKSGRTRKGNATVRKVLCEIANAAAKTNSQFKGQYQGLVIRRGHKRAIVAVGHKVLRVVYALLKSLKPYMDPAIDYSQLVVKRNAPRWLSALKKYGYLPELAKAV

SEQ ID NO: 83506 - protein, 346 aa, unidentified
MEHYAGIDVSLELSSVCVVDAQGKIVKETKVSSEPEALVSFFKGLGFPMKRIGLEAGPLSQWLHAGLAQAGFETVLLETRHVKAALSAMTVKTDRKDARGIAQLLRMGWFRAVHAKSIGSQEVRALLVARKQLLGRLIDVELSIRGILRGFGLKVGPVTRKGFEPRIRELVTGQATLERVAGAMLLARAALKMEYEKLHKAVLAIVRDDAVCRRLMTVPSVGPLVAITYKSAMDDPSRIAKSKAAGALFGLTPKKYQSGEKDVTGGITRTGDEMVRTALYEAANVLLSRIARFSKLKCWGMDVAKRRGSKRAKVALARKLAVILHRMWVDGTTYRWAAAEPIAAQA

SEQ ID NO: 83507 - protein, 351 aa, unidentified
MLIIGCDYHPSVQQIAFVDLETGETDERRLLHKDGEAERFYRELKLRGVSVRVGIEATGHARWFERLLAELGFELWIGDPAQIKAARVRKQKTDRQDAELLLKLLVEERFPRIWVPSPENRDVRQLLWHRHRLVQMRTRVMNQLQAVAMNEGVRRKKALWSKSGRAQLESFVLWPWASRRRQDLLDVLDRLNPTIDELSTAVEQEAKKRPEVLRLMTHPGVGCLTALAFVLIIGSAERFACGKQIGSYLGLIPCEDSSANRQRLGHISKQGNTLLRFLLVEAAQAAVRGDAEWRRKYVHLAMRRDPRIAKVAMARKLAVSLFWMWRKEWNYQQVVKFGSHAGQSDYVHGVK

SEQ ID NO: 83508 - protein, 390 aa, unidentified
MDVLYQSCAGIDVHQANIVVCILHGPLTSTRPKREMATFDTTTKGLRACHDFLSQFHVEAVGMESTGVYWRPVWHALCDDFKLILAQPAHMKAIPGQKTDKKDAHWIAKLTRIGLLPRSFVPDEAIQELRELTRQRKHYVESRNRETNRIHKILQSGGIKLTTYIEDIMGLSGRNLLQLLVDGTPITPRIVHQSVYTSLKKKVPQLLEALDGYFSDHHRFMLKQSLEIYDFYQKQIELLEERMNVYLSQYENHVEILDSIPGIDVITASVIISEVGVDMSQFPTAGHLASWAGLCPGNNESAGKKRSTKIRHGNSYLKKCLCQAAFAIKKQKGSPLAERYYQIQSRRGSQKATIALAHQLLKIAYILLKEQITYPEFLAQKKTTRDELVA

SEQ ID NO: 83509 - protein, 358 aa, unidentified
MSKSTFIGLDVHARSVVAGILEGESGEVRSCKAPARTAELVTWLRAQGEALSVAYEAGPTGFGLARACAEAQIPCLVAAPSKIAKAPGERVKTDRRDALRLAKLLRLGELTAVRVPSAGEEGARDLVRAREDARGDLMRARHRLSKLLLRQGLVWEAGAWTQAHERWLFAQCFEERGLQVAYEEGLAALASVRVRREAFDAAIAVEAASEPWAGVVGRLSCLRGVSTLTAFGLATEIGEWRRFDGRSIGAYLGLTPSENSSGERRRQGAITKTGNGHARRLLVEAAWHHRRRPGPSRELARRRAGQPALVRERAVAAERRLHRRWQSFDARGKRSTVAAVAVARELAGWCWSLAVMDA

SEQ ID NO: 83510 - protein, 475 aa, unidentified
MSNPKQQAEASTGKPGPKVAKSRRASQRQKIDNPVFQPNAAGIDIGAREIYVAVPADRDDDFVRKCATFTGDLHQMAEWLVRCGITTVAMESTGVYWIPVYDVVEQHGIQPCLVNPRNMKNVPGKRTDFHECQWIQHLHSLGLLHSAFRPDGEVCAVRSLMRHRNDLVEMASQHVQHMQKALTQMNVQFHHVISDITGLTGLAILDAIVAGERDPAMLAKLRDPRIKASEETIRRSLEGNWRSEHILALKQRLSLYRSYRDQISECDQEIEKLVAAFEPKADPAQKPMPEDRKQKQRRRKKKSGNPDFNMRTEAYKLFGVDLTQVPGLMMLVFMLFSEVGRDMSRWPTAAHFVSWLGLCPDNDISGGRVLWRGARRTKSRAGTLFRLAAHGLHRDPSPMGDYLRRMKAKLGPAAATTATAHKIAIIFYTMVNQQVEYDASLWAQRDVMREKRIEARLQKQAAQRGYKLVPLEAVA

SEQ ID NO: 83511 - protein, 322 aa, unidentified
MEVLHPHCAGLDVHKDTVVTCVRHMVGGAVKREVRTFKTTTKDLMALSEWLSAEGCTHVAMEATGIYWKPVWHILADGEFTLVLANAAHVKNVPGRKTDVNDATWLADLMAHGLIRGSFVPDEPTQEMRNFLRTRKQFVRERSSHVQRIQKTLEDANIKLDSVITDIMGLSGRRMIEALIAGETDPFALAVLAHRRIRASQADLEAALRGRVTDHHRFMLRLLRQHIDAIESAIAQIDQEVDDHVEPFRTAIDILSSIPGISDLSAEVIVAEIGIDMNRFPTAGHLISWAGLCPRNDESAGKRRSTRMRKSLPPRRWGAPPG

SEQ ID NO: 83512 - protein, 312 aa, unidentified
MNNKPVVGVDVSKAMLDVAVLPSGEVLQFANDANGIEQLRGKLSTADLVVMEATGGYETAVATALVGAGLRVAVVNPRQIRDFAKATGRLAKNDRIDAQVIAAFGQAIEPEIVRLPDEDARELEALLVRRRQLVAMRVQEVNRLGLMQGAMRKRIKAHIDWLEKEIGKLDVDLTAGLRNSPAWRAKDELLRSFNGVGPITSSTLIVALPELGELDRRAIAALVGLAPFNRDSGVMRGRRSIYGGRSQVRTLLYMAATTAIRSNPVIRAFYERLKSRGKPHKVAMVACMRKMLTILNAMVRQSTPWTPEINPV

SEQ ID NO: 83513 - protein, 386 aa, unidentified
MPQPKDDLSRSLVALEQHRTLIAVVELSLATWLVGGVIPGIERDPLKKLVPDEEGLLKLLHRWRDEAIKAGHGITRMVVAFEAGRDGFWLARWLRARGIEAYVIHPTSIAVSREQRRAKTDRLDIGLLKRSLLGWLRGEKKHCSMAAIPTLEEEDAKRPTREREQLIGKRTGIVNRMKAALVRLGIRGFNPKSRKAPERLVTLRTPEGCPIPLNTLAELRREMAHLHFIDEQIKQIETARLERLQQAPQQRSNAKVLQLARVNGLGIETADMLTHEAFSRDLRDRRAVARYAGLTGSPDESGRRRREKGLAKAGNARVRRGMIQFAWRFLIHQKGSALARWYQASVAAGKKRKTVVVALARKLLVVLWRFLTTGDVPQGVILRPVA

SEQ ID NO: 83514 - protein, 320 aa, unidentified
MSDNIVVGIDIAKHKFDVAVWAGENHYKMKHFPNDLKGFDAFINWLKPASNYHCCMEATGIYGDPLALYLSDKGLLISVVNPVQIHAFGKAELLRNKTDKIDAKLIARYCASQHPPAWQPAPLCERQLLALVRHRNKLNEMLLTEENRLSVADEVVCDSHAKIITLLKQELKDTELKLKKHIDDSPSLKKNKGLLESIPGIGERLSATLLAYIGDGSRFHHRGQVVAYAGLNPKLHESGQLKGRAHLSKQGSAKLRKALYMPALAAISCNKVVKKQWEQLTARHKGEKVGVCTVMRKLLRLAYGVMKSGTLFNAEIPLAV

SEQ ID NO: 83515 - protein, 410 aa, unidentified
MEVMFDRVAGLDVGKETVAVCLRTPGPKGRRRAETRTFKTTTGSLRVMRDWLVEAGVSIAAMESTSVYWKPPFYCLEEVMEVWLLNAAHMKAVPGRKSDVRDAEWIAQLLEHGLLAPSFVPPPEIRRLRMLTRYRVQLMGDRRRDIVRLELMLEDASIKLSSVASSLKTVSARAMLTAMINGETDPLRLADLAKGRMRRKIPDLAQALTGHFDANHARLARSMLRQLDLVDQALAELDAVIVDACQPWAHQIELLQTIPGVGEKVAQVIIAETGGDMSRFPTAAHLAAWAGLAPAMNESAGRQTPAGKRHGNKWLTAMLVEAAGSVGRMQGKNYLAAQHARLLKRRGMGRAQVAVAHSMLVAAYWMLKRDEPYHDLGADWHSRRSDEAHTRRLIAQLEHLGHTVIIDPAA

SEQ ID NO: 83516 - protein, 341 aa, unidentified
MEQATTIGLDIAKHVFHLHGADAAGHVLFRKRITRAKLLGFLAAQTRCVVAMEACAGAHYWAREIAKLGHHVRLIAPVYVKPFVKRQKNDAADAEAVCEAAQRPSMRFVPVKTEEQQANGIVFRARDLLVRQRTQCVNALRGHLMEYGYVFPKGITHVETLVAVVEDLQSSLPDSVRVILKMLVDTFTALEAQIAALDAEIRQRSKSDPTARRLMTIPGVGPITATAITALVPAAEGFPAGRHFAAWLGLTPLQKSTGGKQKLGAVSKRGERTIRRLLIIGASAVVRQASRRGAPKGSWLAQMLARKPKMLVTVALANKMARIIWALLVKGGTYKTPTAAA

SEQ ID NO: 83517 - protein, 407 aa, unidentified
MTATTQREESTAPGGDRLLMAIELGRRQWKVGFTTQQGQRIRRRTLPADAWDRLPEEVAAAKKRLDLPADAPVTSCDEAGRDGFWIHRYLVGAGVDNLVVDSSSVEVNRRARRAKTDAIDLTKLLSMLRRHVGGENKVWRVVHIPSAQDEERRQPHRELWALKRDRTRVTNRMTSLLATVGVSVTVDAKLVQRLDRLMQWNGKPIPGTLRARVAREWEKVALFTTQIQALERARRLELRQEADAAVAQVRQLLQLRGIGHQTAWLFVTELFAWRQFRNRREVGGITGMVGTPYRSGLLNHEQGISKAGNKPVRAMAIQIAWGWLLHQPQSALAQWYTRRFARGGPVARKIGIVAVARRLVIDLWRYLDAGVIPDGAVFKGSGARDEWRSQRIRRRSLERFDRFSPGR

SEQ ID NO: 83518 - protein, 409 aa, unidentified
MLDNHFQYFVGIDWGSERHRVCLMNREGRTLAERWIEHSGDSLAELADWLRQQTSDSASALAAAIESPRGAVVETLLEHGFAVFSINPKQLDRFRDRYWPAGAKDDRRDAFVLANALRTDMHCFRLVKLDEPVMIRLRELSRLDDELAQEQNRAVNRLREQFHRFFPQLLQLCQSAEEPWLWDLFESAPWPAKAARLTEARIARILREHRIRRITAAEVRAVLKTKPLTLAPGAAEAAIEHALLLLPRLRLLLQQRTDLARRIGALLDELATPAEGEQEHRDAAILLSLPGLGRKVAATMLSEASQAIAERDYHALRCYSGTAPITKQSGKKKIVIMRRSANERLRNALYHWARTSVVWDQVSKKAYAMLRARGHSHGRALRSMADRWLKVLTSMLSTRTLFDPQRRPA

SEQ ID NO: 83519 - protein, 347 aa, unidentified
MRFYTQQHQFYCGIDLHARTMFVCILDQSGKICLEKNLHSCPDEFLTTIEPFRSDIVVSVECLFTWYWLADLCSEQGIPFVLGHALYMKAIHGGKAKNDRIDAHKIAVLLRGGMIPQAYVYPPGMRSTRDVMRRRLYLVRKRGQLLAHIQNTNHQYNLPEITAKLAYKANRKGFVDRFDDPSVRKSMEIDLELVAHFDQIIRDLELFIVRQARQHDADMFHRLRSIPGIGKVLALTILYEIHDITRFERVQDFASYSRLVKCAKESAGKKYGTGGKKIGNVHLKWAFSEAAVLFLRNNPEGQKWLARLTQKHGKGKALSILAHKLGRAAYFLMSRERSFNMDKFLAS

SEQ ID NO: 83520 - protein, 355 aa, unidentified
METQTNLEKSFFENKELFVGMDVHKAKWVVTVRSYDLELKTFSMQPTAEMLEKFLLTTYPKAKYKIVYECCFSGFWIYDYFFEKKYSIIVTPTNRIYKDGNTIKTDKIDSRKLAFQLSRGLLREVMVPAKKIREYKYIFRIYDKQKMRKGQILRQVKAFLEQKNHPLKWEKWNKGLIEKLKLLTFEDKLFDLKFGNLLKEYEYVVSQIKDSEEIIERIKEDEVLGPRITRIEKINGIGIISSVRMSVYLFDRKDRFESSEKLNHHLGLTPSERSSGDKVNRGRSGMCGNRQLRSIIIQLAWKSVRKDGALLDKFERVYKKSGSKQKAIVAVARKLMSKLYAIIIKEEAYRVNLAA

SEQ ID NO: 83521 - protein, 344 aa, unidentified
MANLNQFCDFTKLIGIDIAKSVFQIYSCDTQTGEITNMQVKRDKVLESFANCGKCLIGMEACGSSQYWARKLQALGHTVRLMDPKLVKPFVRHNKSDKADAEGVYHALVSGVRAVAVKTETERDIQTLLTMRALLVKQRTARINHVRGLLAEYGHVMPRNVNQFDNKVDECINSLEGDAVQLVINMMRDTVKSIRDDQDRIKTLQREISRLASQTKNAKHFLTVPGVGDTIMAYMCVLLADPTQFSSGRQFAAYLGLVPMHTGSGGKTVTTKIPGRCDKALRAVLVQGAHAVARSKCRIDWVKNILAKKPKKVVMVAIANRMARQCWAVASKGQDWRRMPVTAA

SEQ ID NO: 83522 - protein, 370 aa, unidentified
MLHFHATKNEGGSQMFYGVDLHSDSITIAAMGEEGETSRVFRYHLGTEAFEKFVERLTDNDYMIVEASTNTFWFYEKVRYRVGRCIIIDPRKIQGNDGVKVKTDKRDALQLVRLLRYVILTGATLPEVYIPEKPVQEIRQLFTTYYLYKRQMVMTKNRIHSLLKQEGYTVPKKSLDLAKTWDIIARFKLSVSAKIQIQQLYEQIESIRKGKELIKQEILVRGVIFQEEIELLTSIKGISVFMAIGIMADIVDINRFPSAKKLCAYLRTAPTVSSSNKMTRIGSINKNSRKLTISLLIESVEHFRSVEKINRFYAGKKKGKGAGKARVAVVRKIIVAIYYILKKRQYYYYRSEEMHCRKLNEYENFLKKVA

SEQ ID NO: 83523 - protein, 483 aa, unidentified
MTQEKLLCVGIDVSSRSLQVAYCDGAGTPVGRLQSFANEAAGVKALCQAVMMAARAMGRGGRVIAGLESTGDFHRLAARALCEQDRLPVEVHVLNPREVKWFRKLELKDSKTDRVDAELIARFLAKIRPQPRAPMPEGFEALQDATRTRRRCIEERTSLKNRLHRLLRTHFPGYRQALGAKFSVRTLVVLAACPSPDDLLRRGAARLAQLRNSDGKRIGAAFARKVIALAKTAPVPCLPPMARLSIQDAAARILQLNRFLHGMDAAIAAELERLFPNNVLLSVPGLGPVSVASILAEVADIRRFPDKETFVGYCGLYPIAWESGDTKLRFRMTRKGNRMLKMTLLVASAAARQYNPAIRHFYARLRTRGKSKKAAGGAIARKMAEIVWAVLTSNQPWSEEIALRGIARGEEMLQIPKGACSERSRGERRLTGDAAGQAPTESGRPLKAASRSRAPQRNSTMCAGQNKPHRRPPAPLARRPLTP

SEQ ID NO: 83524 - protein, 317 aa, unidentified
MTFVGIDVSKSSLDAAAIMETGEVEQRPFTNDPTGHTQLMAWLTGFPDRLVTLEATGSYHQRLSAVLQEAREHVSVLNPAQVSYFAKSQARRNKTDRVDALMLAVYGKERRPAPSLATNTGLQSLARELNALQEDITRLKNRLEAAEHGLTHPEVAASIKRRIAALEEEKAALQKNLEREARCVYERDLTLLESIPGIGTRSACLFLAEVGDIRRFPSAPKLVAFAGLSPMEVRSGSSVNKQTRISRLGSSALRRILYMPGLVGIRHNPILKAFYERLVAKGKNKKAALLACVAKLLRIMYGVLIHQRPFDATYTAG

SEQ ID NO: 83525 - protein, 313 aa, unidentified
MSNSKVLKEEQVSNHPQAIATVIAGIKEELSMSNDSLIICAEHTGQYTYPLICACKSVGSKLWLENASQIKYCSGVTRGKNDKVDARRIAMYAMRFFDKAKPYQRPTEELMRLKQLEAERSLYLTDLAKYKAQLSDQEGFMEDKIFKRKAKRLKEMIKSLEKTLKEIAQEMADVIYSSEELSRQMRLLKSVEGVGPVVAMNMIIATEAFTRFDNPRQFNCYVGVAPFAYTSGSSQHSRNRVSQRAVKYIKCLLHMAAVAIAHKKTGDLKTYFERKVAEGKNKMTVLNAVRAKLVARMFAVIRNNRVYQPILSV

SEQ ID NO: 83526 - protein, 403 aa, unidentified
MNSVGIDISKGRSTIAVMRPFGEVVISPFEVRHTGSELSKLARQLKSLDGETRVVMEATGNYHASVAKLLHDAGLYVSVVNAKLVHGYGNNDLRRVKTDKKDSVKLANYGLDRWLTLPRYVPEEDTRLLLKNCYRQYRQYSKVQTVLKNNLISLLDTVFPNANRLFSSPIRGDGSEKWVDFVAEFWHCRCVSEKSERAFTSKYLRWCRKHGYNFREAKAHTIYAEASGHIGVMPKSETTKLLVEQAVAQLRATSTALAALKHEMQSLASQLPEYPVVMDMFGVGPTLGPQLIAEIGDVRRFYSKKALVAYAGLDAPPNDSGDVTGRHKSMSKIGASSLRRTLFLVMSVYLQTAPLDEPVCQFMDRKRAEGKAYRVYMMASANKFLRIYYATVKAYLESLEHTA

SEQ ID NO: 83527 - protein, 414 aa, unidentified
MKLFVGIDVSSEELEACLMNPEGDTLETVKVKNDLHGASHLRDRIIAVSDKLSSSEIHIGLEATSVYSWHPAMFLHEDESLRKRKTKVFTINPKLIHKFREAYADLDKTDRIDAWIIADRLRFGRLTTTIVMQEQYLALQRLTRMRFHLVHNLTREKQYFLQNLFYKCNAFRSEVDSSVFGHAIMEMLSEKYSLDEMANMEVADLADYLKEKGKNRFPDPEHVALCIQKAARASYRLSKVVENSIDIVLGTSIQSIRSIQAQLKELDKAIARILEGISDAKCLRSIPGIDLVYAAGILAEIGDIERFSDQAAVAKYAGLTWRKHQSGSFEAEDTKRIRSGNRFLRYYLVEAANSVKNRDPEFGEYYRKKYKEVTKHQHKRALVLTARKLVRLVDVLLRNDQLYTPRRKVKNTGE

SEQ ID NO: 83528 - protein, 322 aa, unidentified
MSGSSVMVGIDVASEHVDVAVIGAELPASLARVSNDADGHSALADGLVRLAPGLVLMEATGGYEAALACALQAVGLRVAVINPRMARDFARAMQRLAKTDRIDAATLAELAEVLSRRPDCERFVRPLSEPEQQDLASLVTRRRQLVAMQLSERQRLRLARPVARPSIEAMIEAIKRQLDDVEAQMASHVETHHKALAKVLQGVAGIGKVAAATLIAELPELGRLNRRQICALVGVAPYAKDSGSSRGRRRITGGRFEVRRALYMATLTAVRYNAAIRVFYERLVAAGKLKKVALIACMRKLITHLNAIARVHLKTQFDLVAT

SEQ ID NO: 83529 - protein, 341 aa, unidentified
MDHYAGIDVSLKSSSVCVLDAGGKIVREGKVGSEPEALIGWFGSLGLNLARIGLEAGPLSQWLFAAMREAGLAVELIETRHARNAFKTMPVKTDRKDAQSIAELMRLGWFRPVHCKSMAAQETRANLTARKLVQSKLHDVEMSLRGILRGFGLKVGAPSPKQFEMRIRELVAGHPSLEVIAESLLAVRAVLLREFNNFESRVRKMARSDPRARLLMSAPGVGAIVALTYASGIDDPGRFKSSKQVGAHFGLAPRKHQSGEKDVTGRISKIGDGMVRTALYEAAHVMLTRAIKGSGLKSWAARLAKRAGMKKAKVALARKLAVILHRMLTDGKPFDFAAAAA

SEQ ID NO: 83530 - protein, 407 aa, unidentified
MTIQTHLSPSIYVGLDVHKDSIDIATADAGRDGEVRHLGTVAGGLDAVTKALRRLVSAGHRLHVVYEAGPCGFVLQRHLAALGYHCEVVAPSSIPKRSGDRVKTDRRDSLMLARLARAAQLSAVRVPDTIDEAMRDLVRAREDAVREQRNARHRLKALLLRNGTPYAGKTAWTAAHLRWLSDIRLPHPTQQIALQEYLHAVSESTARIQRLEASLRDAAQTWPLAPVVLALQAMRGIQLIAAITITAEIQDFHRFANPRQLMAYLGLVPSEDSSSTRRRKGAITKAGNSAARRMLVEVAHHYRSPARVSPIIAKRQAELSKAVTDIAWGAQVRLCERYRRLAARRVPTNKIVVAIARELTGFIWDIARNVTPPPPPQHNAEDSHRRKAWHKKTRPATTTGQETLPMT

SEQ ID NO: 83531 - protein, 347 aa, unidentified
MPMLADRVDYVIGIDCHKERHVAAIADGLGSLKASLSVTTDADGYRTLVKWADKNAGGRRVWAIEGAGSYGAGLTDWLASREEWMVEVDRPKRPKRKAGIKSDEVDALRAAKDALAAKRLAEPRRRGGLEAIRVLKITRKQAVQVSAVAVVQLKALVVSAPEGLRARLRGLSAAQLVVACAAMRNQPSPSVEWTATRLAMRSLARRAQAAAADAAELDRELSAAVKAQAPQTLLGEIGVGTVVAAELLSVWSHKGRLHSEAAFAMVAGAAPVEASSGQLIRHRLSRGGDRQLNSALHTVVLTRWRQDERTQAYIARRRAEGKSDREIRRCLKRHIARHLFRLMEAAA

SEQ ID NO: 83532 - protein, 358 aa, unidentified
MREAYFIGLDIAKNVFQIFTADDKGREISNKKLSRSAMIQYFAQLPEAVVGIEACGTAHHWTRTLTALGHTVKLINPQRTKAFLGSRNKTDAADAKAICEALMHPGTTFIRAKSLEEQDIDHLLARRELLVQNRTQLINQIRAFLCERGIVIPQGRHRFMKNLPQIIAEKWDEFSEKFQVIFTDSYTDYQDLDEKIVRLDKRILTEAVNTESCKRLMQMNGVGPQTALALVAHVGNATHFKNGRQMSAYLGLTPREYSSGGKQRLLGITKRGNVRLRTLLLLGARAAILGIGRRRRGEDGQPGRLGYLDSWILGMVERIGLFKAAVALANKMCRIAWVLLARGEEFNPMRLCRLVKAA

SEQ ID NO: 83533 - protein, 321 aa, unidentified
MNLPSVGIDMSWHSFDAALWIDEKRQLKAHFSNSPAGFRRFVAWLKRHGFGKLRVGVESTNICAEALLNWLYEKGYPVFLLNAEQVSHYARTLGRRNKTDPADALVIARFVALHEQTPWLPPPPEHKTLRSLLRTRHQLMDTRLQIANQLRTADATARPYLQAIQRSILAQLKVMAQDLAAHLRAHPVLNANVRRLMTFKGVGVITAATVIAELPPITAQTDPRTICAWAGLIPCRRQSGKTELPSRISKRGNRYLRHALYMPALTAKRFNPQIKTFAARLAERGKTKSAVLGAVAHKMLRILVGMLKHQSDYDPNWVFSK

SEQ ID NO: 83534 - protein, 367 aa, unidentified
MNKSSKAFVGMDVHKESIDWAIAERDGEVRSFGRTGGDLTAVARTVRKLVASGKTLDFVYEAGPCGFGIHRWLKVQGHECWVVSPSLTPKKPGERIKTDTRDAVKLARLARAGELTAIYVPEAPDEALRDLVRTREDAVAMQRQARHRLQALLLRNDIRYVGKTAWTPAHQRWIARLKLPYAPQQIAFEEYVQAVQEATTRIDRLTAAIQAAVSTWRWQPVVAALQAMRGVQLIHAVRIVAELGDLTRFGTPRAMMGFLGLVPTEHSSGGKRAQGAITKAGNSSARRAMVEAAWAYQHPARITPIIARRQGGVPKSVLDIAWKAQLRLCARFRKLAVRGVNRNKLVVAVARELAGFVWGAMTGNTGV

SEQ ID NO: 83535 - protein, 404 aa, unidentified
MNNVAGVDVSKGKSMVSVLRLFGEVVTKPFSVGHTGSELKELANYLKSLDGETRVVMEHTGRYYEPVARFLHEEGIFVSAVNPKLIKDYGNNSLRKVKTDKADARKIARYGLDNWVELRQHTPMDTIRMQLKTLNRQQGLYSKTKTMMKNNLIALLDQTYPGVNDLFDSPVREDGSQKWVDFATAFWHVDCVRNMSLTAFTERYRKWCKRHGYNFSQSRAIDVHTKAQDLIAMLPKDALTKTMVQQAIDALNAVSASLERLKTEMRTLAAQLPEYPIVMAMRGVGDSLGPQLMAEIGDVTRFTHRNAITAFAGVDLGADQSGTHEAKSARASKSGPPELRKALFLVMDCLLQTIPQVDPVYRFMDKKRAEGKPYLVYMTAGANKFLRIYYGRVKEYLASLENSD

SEQ ID NO: 83536 - protein, 428 aa, unidentified
MKFKQSDVQNQRIERITTSHLVVGIDMAKETHVAQATNFRGIVLSNRHLAFKNTAEGFEKLKRWIGSLQQKHRLKSFIIGMEPTGHYWYNLANWLVDLGIHVVLVNPATTKRNKENRDNCQSKSDPKDALVIADVVSRGYYYEYSRQSASFQRLRVMMSDREFWVTNSVRLQNRIVRWLDIRFPEYASVFKKWTGIRSLATLKEFPSPLDLRGLSTAEIITGWRKHMQRAGGCSGIQKAAELLSKANRSVGDVTSLREAKQDLVRLIEEYERIESHLEQIEKEVAMLLEDIPIAGQMRSVKGLGTIYIAAILSGAGDLAQYVHGRQLLRKAGLNLAESMSGKRKGEVILSKRGSAVLRKYMYLATLTLIGVNPIFRQLHENNLKVKHMSKQKSILKLLGKLARILIGMVHSGESFTPEKTVHTSVQAA

SEQ ID NO: 83537 - protein, 428 aa, unidentified
MSGRGTVEQEPEFVAFVGIDWADQKHVWCLQAANSARRENGELEHKPEVVEAWVSELCQRFGHGPIAVAVEQVKGALVYMLCKYECLHLYPVPSTMSASMREALYPSGAKDDPRDADLLLDLLLQHRDKLRRLTPDNEATRRVQNLVEERRKLVEEKTAQLNRLIGYLKVYFPQMLEWFAKLDTKLVCDFLERWPSLEELQTVPPGEVKKFFRHRRGRHGELTEWRMQGIGQAMPAIRDRAVIEAKRTVVQVIAQLLRTLLEGIATLDRKIAEAAEVHPDYFIFQSLPGAGAALAPRLLAALGSQRDRYASAEEVQKYSGIAPVTERSGKKKWVHFRWACPKFLRQSFHEWAGHSIAQSVWARAYYQQQRQRGKDHHAVVRALAFKWIRIVFRCWQDRVAYDETRYLRTLATRGSHLTSAFAATAASM

SEQ ID NO: 83538 - protein, 408 aa, unidentified
MDVVYSHVCGLDVHKKNVVACIITPDHKEIRTFSTMTEDLLALIDWIKSHGCTHVAMESTGSYWKPIYNLLEMEQIETLVVNARHIKNVPGRKTDVKDAEWIAGLLRHGLLKGSYIPSRPQRELRELIRYRRSLMDERAREIQRIQKVLEGANIKWSSVASDIMGKSGRLMIEAIIAGETDAAVLSELAQRRLKAKKADLQKALHGLIGPHQRLMLKTQLRHIDELDKLIEQIDAEVKKRMDPFEEDLERLDTIPGVGRRSAEHILAEIGTDMDQFPSAAHLCSWAGLAPGNNESAGKRKSGKTTKGNQKLRTALIESARAAARCKDTYLSSLYHRIAARRGANRAAVAVAHRILTICYHLLKNKQTYIELGPHYYEERKRTHVARQAIRKLEILGYKVVVEEMDQTA

SEQ ID NO: 83539 - protein, 342 aa, unidentified
MQITSIGIDLGKTTFHLVALDQRGKVVSKQKFSRKQLLAYSANLPNSLIGMEACAGAHFLGAALRDQGHDVRLIPAQFVKPFLKSNKNDFLDAEAIAEAVARQNMRFVPIKTDDQLDLQALHRVRDRLVHRRTAVINQIRGFLLERGITFAKGPAKLRQQMPAILENADENLTPRLRSLLDHLWQEWKGLNSDIERVSDEIDAIANDDAACRRLRQIPGVGPLVATATVAAIGNGAAFRKGREFAAWLGLIPRQHSTGGKAKLLGISKRGNVYLRRLFIHGARAMLLRVKYDTGRLGQWAHQLELRAPRNKVIVAVANKLARIAWAVLSTGNEYRNTAVTAA

SEQ ID NO: 83540 - protein, 338 aa, unidentified
MAIIATGIDLAKNVFAVHGVGAGGAVQLRQAKVARAKLTALIASLPPGVIGMEACSGAHYWARQFQAHGHTVRLMAPKLVTPYRMSGKRGKNDAADAAAICEALQRPNMRFVPIKSEDQIAQLMVHRARQGYVTERTACLNRIRGLLSEFGIVLPLKAEVVRRQAREHLEDLPGYANLVIGDLLSEVAHLDERIQQYDTHVRAMGRHSNAAQQLMQLMGVGELTATAVVAMVGNASEFSCGRQFSAWIGLVPGQYSTGGKPRLGRITKAGDPYLRSLLVMGARAVLNAAKGKHDSLSRWAVALEQRRGYWKAVVAIAAKNARMIWAVLTKGESFKLPA

SEQ ID NO: 83541 - protein, 349 aa, unidentified
MSQNLNSAVTVIGIDIGKNSFHVVGLDDRGAIVLRQKWSRGQIEARLANLPPCLIGMEACVGAHHLSRKLTAFGHDARLMPAKYVRPYSKGQKNDFRDAEAIAEAVQRPTMKFVAIKTADQLDLQALHRVRERLVSQRTGIINQIRAFLLERGVAVRQGLRFLRAELPHILATPPEVLSPRMVRVIKDLAEDGRRLDERIDGLSNEIAVLARQDAGCERLMTVPGIGPIISSAMVAAIGTGNAFAKGRDFAAWLGLVPKQISTGDRTILGKISKRGNRYLRVLFVQAAWVVLIKPMSWQRHGLKHWIEAARKRLHRNVLAIALANKLARIAWGVLAGSRTFEASKLQAA

SEQ ID NO: 83542 - protein, 452 aa, unidentified
MEQETVSFEVVNPHAAGIDIGSRSHWVAIGQQEKDIREFGVFNQDLFEMANWLAEKQVKTVAMESTGTYWQQLFAVLLSKGFDVILCNGKFTKNIKGKKTDIKDCQWIQKLHSLGLLSSSFLPDGKTEQLRTYCRHRANLIQMAASTSKKMQKYLRLLNLRLDVVVKDICGLTGQAIIRAICNGETKPEKLAELRHGNCRKSEKEIAAALESNGRKDYLFALQQELETYDHLQQKIIQCDAQIALMLDEIIANDDAKKQHQIDKKPHKRINKNTPKNIDLNLMSYQMFEGTDLLAIEGMSYATVLSLMSEVGVAGIRKFPTAKQFTSWLRLAPNNKVSGGKVLSSKVPKGSNRLKIALRNAANAIGNLKDSTPLRDFFQRINFRKGRVSAVSATARKLAVIIWNMVVKSVPYENPEGYLFLDQKRKLGMVTRIRKQIDKFGLTNEELGIVTH

SEQ ID NO: 83543 - protein, 369 aa, unidentified
MKKNILYVGLDVHKNTIEVAIAEDCAEGEVRSYGKIDSSLEALNKLIRKIKAKGSKLQFVYEAGPCGYEIYRYLTSKGHACAVVAPSMIPRRSGDRIKTDRRDAVNLVRLFRAGEVNSIYIPTQEDEAMRDLLRCRDDIRRFEHKARQRLLAFLLRHGFDYSGKNWTKGHHNWLAGLKPDHPAQQIVLQEYIDAAQECTDRLKRITEQIQALVPQWSRAPYVKAYQALRGVSLIVATTVASEIGDMNRFKNPKELMAYLGLVPSEHSSGNTVRRGSITRTGNGHVRRVLVEAGWTYKMRARKTITILKRQVGLSKSIQDISWKAQTRLCARYQRLFAKGKSKQTIITAIARELSAFIWAIDREVQQTMA

SEQ ID NO: 83544 - protein, 343 aa, unidentified
MDYFAGLDVSVKETSVCIVDDAGKIVREARVASEPEALLQVLTNTIYRFKRVGLEAGPLSQWLYSVLAEAGFPVICVETRHMRAMLKAQINKTDRNDARGIAQMMRVGLYRPVHVKTLRSQKLRVLLTHRKLLQSKAIAIENDLRATLRNFGLKVGMVGTLKFEARIKELVEDLRDLAVLVEPLLLVRRVVREQLGILHRRLLAIVRDDDVCRRLMTIPGVGPVVALTYRVTVDVPARFRNSKAVGAVFGLTPAKYQSGENDRTGAISRCGDEMMRMMLYEAAQIMLVRSTKWSWLKAWAMKIARHRGMKKAIVALARRLAVIMHRIWVDGTDFRWTREVAPA

SEQ ID NO: 83545 - protein, 370 aa, unidentified
MSVRRILAKTIDTDLEYEAIGIDLAKNCVSAALLTTDGEVVCIDRLDYSELEKSAQALSPTTFAMEPCTEMNYLVQKLEAWGHRCLVIGGKNVQNYVENHYSGQKTDLNDAQALAFLAQDTQLRTIKAKDVEQQKYASLTTLREQYIKQYRQTIVSLKGICQAWGLNISKGISGKARLKDLIENHAAFPEELKESLVDMVTHAQTAQKALNKITKTLEELAKSDKVCQLIQTIPGLGSICSCRLRATVGDIKRFKSPKDFPAYYGLVPRSIATGHNERKGKITHRGDRTMRSLMVQAAGSLVNMATKGKLKSKQLTKWILKKQKEKMPWGKLVCAVAAKLLRIVRAVLISNKPYNSKIAGVAKCSLPKGS

SEQ ID NO: 83546 - protein, 334 aa, unidentified
MDKVTTAGIDLAKRVFALHGVDGAGRVGLRKTVRREQLMQTVAALPPCLIGMEACSGAHEWARRFQQLGHTVRLMAPVFVAPYRKSGKNDGNDAEAICEAVTRPNMRFVPIKSAEQQAVLALHRVRQGWIEERTATINRLRAVLTEFGVVLPNRAQYVRREAHATAEALPELARQAVEDLRAHLGVLDERIAAYDRELQAQARQSESAQRLMQIRGIGPLTAVAMVATVGCARDFRSGRQFAAWLGLTPRQHSSGGKHRLGHISRRGDAYLRCLLVQGARSVLLTAMRHSDRLSRWALSVQARRGYHKALVAIAAKNARIAWALLSKNQTLRAA

SEQ ID NO: 83547 - protein, 349 aa, unidentified
MGEVSTIGVDIAKSVFQIHGVDAEGTVVIRKRVGRARVLEFFADLPPCRVGMEACATAHQWARELRKLGHDTRLMPPTYVKAYVKRGKNDAADAAAICEAVTRPSMRFVPIKSAEQQSVLMLHRTRDLLIRQRTQLINALRAHLAELGLVAAKGREGVHQLVAVVMECGDERLPSNARFACQAIVTQLHAVQIEISGLDKRITQIHRVNADSRRLDTIPGFGVLLSTAVVATMTDPKAFKTGREFAAWIGLVPRQNSTGGKERLGSITKQGDRYLRRLLVVGATSVINSARARPHKYPWVIELLGRRPTKVVAVALANKMARIAWAVLAKGEPYRAPTRPWTAVVPAAA

SEQ ID NO: 83548 - protein, 400 aa, unidentified
MYVGWDWADSAHDVTVLDAQGRVMEHFGVGHHEAGLEHALTRLRRHGAPEELPVAIERPSGLVVERLMEAGHPVIPIHPNAFNAARSRWGASRAKSDPGDSYRLADYLRTDGHRLRRLRPMDETTRTLQALVRMRDDHVEARVAASNQLEALLNAHWPGAVCIFADLASDIALHFLDRYPTPDTTARLGETRLAAFLKRHSYSGRRSAAQLLVRLRQAPTAPGRLDSEVLAELVRHQVSLLRALLQTCNELEHAIAAVLPDHAKAHILAGLPRIGSGVNLAQVLSEVGPILDASLDVDHAAAQCGACPVTKASGQSRGVHFRWAVNTHARQALQIFADNSRHASPWAARLYAKHVAAGKRHPHAIRILMRAWLRVIWSCWHSQIPYDPARHRNELRLAGA

SEQ ID NO: 83549 - protein, 355 aa, unidentified
MTSTKYIGLDVHMESISIAVLNFAGKVVMECVIETKASSILQFIHGLRGELHLTFEEGTWASWLYDLLKPHVTELLVCNPRKIALLKDGSKSDRIDAHKLAEQLYMKKIKPVYHGEHGLRMLKELSRSYLTISKDLGRVMNRLKALYRSWAIPCAGTQVYAPHYRSEWLSKIREAGVRRRAELYYQQLDALRLVRQQARKELLAEARKHHATKLLRQIPGIGPLRAAHLVALMQTPHRFRTKRQLWTYSGLGLETRDSAQYRVVEGQLQRSKKPITLRGLNDNHNHDLKDIFKGAAMRASTAAGPLGDFYEALLAKGRKPTMARLTLARKIAAITLIVWKKEVRFDANYLKQQAA

SEQ ID NO: 83550 - protein, 383 aa, unidentified
MRKPTRYLGIDVHADSLAVAVAEAGRRAEVRSLGMVPNTSAAVRRFVGKLGGPKGLRACYEAGPCGYALYWELTRLGVVCEVVAPTLIPVKAGDRVKTDRRDAEKLARCYRSGDLTPVWVPDEEHEALRDLVRAREAAKKDQLRARHRLSKLLLRHGQRPPEKTTAWGSKYMAWVRQLRFEQRPLELTVVDYLAEVDHAAARIERLEKAIAEAVEAAPPAFREVVAALQTLRGVALLTATTATVEVGAFARFESPRQLMAYAGIVPSEHSTGGPGRARRGGITKTGNAHLRRVLVEAAWTYRHRPVLGPRVRRRQEGQPASVLEIARKAQHRLHSRYVRLAARGKPGQVAVTAVARELLGFMWAIAAPIERAAHGVVVDSRAA

SEQ ID NO: 83551 - protein, 353 aa, unidentified
MKRPKDKLIAGLDLHSNNVMIGVINQEGKRVAHRKVDCDLGEVIAFLKPFKAQLQSMAVESTFNWYWLVDGLRAQGYPIDLANPAKIEQYSGLKRVNDQDDAFHLADLQRLDILPQAHVYDPELRPVRDLLRRRTNLVHQHTALLLSFQSLYTRTTGQRLDLGDVKKMEPKQAPKLYEHPANQLIAQVQAEHIGALAKSIQRIEKAVLSCAREIPLYEKLLTLPGIGRILGMTITMEVGDISRFKTAGDFASYCRMVDAKRLSNGKCKADNNQKCGNQYLAWAFVEAANFARRYNESCRRWYDRKAAKAGKIIATKALGCKLAKAAWHVMAKQCSYDEKRMFPEQAAKAMKTS

SEQ ID NO: 83552 - protein, 345 aa, unidentified
MKIVGCDLHTRYQQVALLDQETGELMERRLEHESGEARSFYGALAGPVRVGIEATGHTRWFERMLGELGHELWIGDAAAIRATVVRKQKTDARDAAHLLDLLLTNRFPRIWRPSLEERDLRQLVWHRQKLVWMRNAVGNQLHALAMGEGVCRKQKLFTKKGRAELESLALGPWASYRRQELLRMLDELDRSLQRLDDAVEQQAEQNPEAVRLMTHPGVGPVTSLAFVLTIGPVGRFQRSKQVASYLGLNPREHSSGGKQRLGSISKQGNPMMRSLLVEAGHTAARLDAELRQDYQRLKLRRGSGVAKVAIARKLAVRMYWMLRSPANYAQLVRMQGSPRGTLVGQ

SEQ ID NO: 83553 - protein, 343 aa, unidentified
MYIGLDVHKKLSYYSMVDGEGTEMKRGRFPTTCEGLDEFASKLPEGAKVAIEASTSGIFAYERLDEGGIEVHLAHPVYVKPFAKKHVKTDKVDARVLAQLLRMAYLPESYVPGKEIRDQRVLIRHHASLVRLRTSIKNRIHALLAIEGIQTSEFSDLFGKKGMEFLRGVKLREVRRKALDNYLEVLEVLEERIEEMEDILKEKTKITDEAKWLMSIPGIGYHNALLILSELGEIERFSNPKSMVSYSGLAPKVEQSGDYTRYGHINKHSNGFLRWAFIQSARAAVRSSKPNRFQRIYNKIKARRGEKVAIVATARHMAESVYWVLTRKEYYKENKAIRASYFS

SEQ ID NO: 83554 - protein, 406 aa, unidentified
MVAVMIGIDPHKGSHTAVAISAAEQPLGRLRVRACPSQARQLVAWAAAWPERAWAVEGAAGLGHLLAQQLVAAGETVLDVPPKLAARVRLLEAGDTNKNDPNDARSVAVAALRSNAPRPVIAEDHAVVLKVWAKRHRDLARARNQAACRLHAVLCELVPGGIRKEITAGQAARFLDQVTLAGAAAQARCELAAAFLEDLRRLDAQLRETKKKLAAAVKASGTSLTGIFGAGPVIAGTVIGDVRHVSRFPSRDHFAAYNGTAPVEVSSGGRKTYRLSLRGNRRLNHAIHMAAISQIRYKHSQGRGYYEKKIGEGKTHKEALRALKRRISDAIYAALLADARQAAAASPKDPGGQLGNHSVSRAAGSHPKRRLFGQATPGPHTTLRPAVDPKNKTVTASARKNPAGNA

SEQ ID NO: 83555 - protein, 410 aa, unidentified
MEAITERCCGLDVHQATVVACLLTGRADEKPRRQVRSFSTVTKGLLELSEWLHAEGCTHVAMESTGVYWKPIYSILEDDFDLTVGNARHIRNVPGRKTDVKDSEWIADLLRHGLIAKSFVPPRPIRMLRDLVRYRRKLVQSRTSERNRLLKLLETCGIKLSTFASNVFGVSGMAMLHALVQDDATPAEMAELARGRLRDKIPDLALALDGRLEDAHRFLLGKQLQRLEQVDADITELDARIAQQLAPHQALVERVKTVPGVDRVNAASIIAEIGIDMSVFRSQQAISSWAGVCPGNHESAGKRQRGTKRLGNVHVTTALVEAAQGAIRKKGSYYGDKFHRLKARRGYKRALMAIAHKILTAIYNMLRTASDFRELGAAYLDRAQPKRVAKSLVKRLESLGFDVQISERAA

SEQ ID NO: 83556 - protein, 344 aa, unidentified
MEITTVGLDLAKNVFQVHAISCTGEVLVRRALRRAQVMPFFRKLPPCLIGMEACGTSHHWARELTALGHAVRLMPPAYVKPYVKRGKTDAADAEAICEAVTRPTMRFVPIKSVEQQSALSLHRTRDLLVRQRTQLVNMVRGLLAEFGIDIPKGLTHALAFVRRAIAGEAHEVPKLAAKVIGALAAQAIAVQDSIHRLERDLLAWYRSNDLARRIATVPGVGLLGATALAATVTDPSHFRSGRQFAAWLGLTPLNNSSGGKERLGRISKMGDQYLRRLLVTGMTSLVRRNKHHPSAADPRLNALLARKPVRLATVAMANRAARAIWAIMVRGEVYRTPALGIAAV

SEQ ID NO: 83557 - protein, 478 aa, unidentified
MKENHRRCCGIDVHKNSVTVCVLAPVGQRHIETKKRKFRTFTRDLKQLRAWLKNCQVTEIAMESTGQYWRPLWNLLEGEFSKLVLVNPQHIKGLNGYKTDPKDAQWIADLLEGGKLKGSWVPERPIRELRDLTRQRVNILEDLNRAKNRIEQLCQAGNIKVSSVATDLFGVSGRKMLEALVEGKRDAGWMADYARGSLRGKRHELELALDGTFTEEQRWLLEKELRQIEFLEGQAGTLEQEIERRVTRFAEPMRRLLTIPGIDRKTAWTIVAEIGVDLSAFADAKHLASWAGLCPGNRESAGKRMSGRTRKANRYVKRAMCQAAWAASHTKNTYLSAFYRRMAIRKGAPKAVMALAHHMIVVVHQVLSRKEEYVEFGGDYYDRRNKPKTVARLVARLAKLGYEVDLKPQQAAVAEPIVEAVRAEGPSVGEVPRLEPQSSRPRRGRPCKCIERGIICKHHTAREANSLIQELASPGRFS

SEQ ID NO: 83558 - protein, 450 aa, unidentified
MRMQPEEIPDDDHELVIERVCAIDVAKASGKVCVRTPHPNRPDRRTSRVWDVSATSRAVTELAEHLIGEGIERVTVESTSDYWRIWFYLLEAAGLDVQLVNAREVKNVPGRPKTDKLDAVWLAKLTEKGMLRPSFVPPVEVRQLRDYTRLRVDLTRERTRYWQRMEKLLEDALIKVSSVVSRLDSMSVRDMLEALIAGERDPRRLAELARGKMRPKRAALIEALTGRFDDHHAELARLLLSQIDALSSHIDTLTRRIDELLAILTDPRRGPDDGYRIGDDGAAPFVNGLQAAERLAEITGIGPVSAPVILAEIGTDMTRFPTAAHLVSWAKLSPRTIQSGATQRGGTTGKGNPYLKGVLGEAAAVAARTDTFLGERYRRIVKRRGKLKALVAVARSILVVVWNLLADPTARFHDLGADYHTRRADTDRRLRNHLAQLAALGYRVTVEPAA

SEQ ID NO: 83559 - protein, 419 aa, unidentified
MSQSTLSKKLASVKPGTLFVGVDLGLDRNAAVVMDERAKRLDRFWFNNDLDGYEYFDRRLRKVKEKHQAPAVLVGMEPTNYFWKLLAADLEERQMEYRLVNPYTVKKHREGDQLDRSKDDPRDAFVIADLLRTGKYTETRLLHGQYAELREYVTSRERLLRDLRRQKTLIDNIVGRLFPELGREFKNLTGKTALAMLSSHAAASVIQQLPLEEFITDVRSVFKGKRLMVSKLARVHALAGSSVGLKDGVQALQLALDHHIETLEHLQRQLEQVEEALIEVFLAMPEAEYMLSVHGLGTITAATILSEIGDPSHFSQAKQLIKLAGTQPVPNTSGRKSSSKTPMSHKGRPRLRTALFFAAMRLVQFDDAFARHYQQLQTRDKNPLCKMQALGALMNKLLRILWALMRKRTFYVPDFEHAI

SEQ ID NO: 83560 - protein, 316 aa, unidentified
MIEPIIKCSAGIDVHKQMVVCTVLKELPDGSLTKQTRQYATFRQNLKQLAQWLETEEVILAVMESTGVYWKAVYEEIEDVGVKVIVVNAQHIKRVPGRKTDVSDSEWLAELARCGLLKASFIPPKDLRQLRLLTRYRVKLSGYLSAEQNRLHKILDDGGIKLGSVVSNIDGLSAQKMIACLIEGNHSPEQIAELAQGRLRNKEKELILSLQGRLSDRHRDLLQRIQQHINWLNDQIADIDCQVVAAMTPYKQEWQLLQTIPGIDQITAAMLLAEIGTDMSVFGNKEKLSSWAGISPGKNESAGKKSMAEPLEAIDM

SEQ ID NO: 83561 - protein, 346 aa, unidentified
MTIVEDRPVITGGVDTHAGTHVAAALDPVGGLLGVREFPATAAGYVGLLGWLGGFGDVALVGVEGTGSYGAGLARHLAAAGVRVVEVDRADRQDRHRQGKSDPLDAVSAARAAQSGRAAGAPKGRDGAVEAIRALMVAKRSARSERTQAINQARALIVTGPDDLRARFAGHTAPALACAVAALRPRPGDVPGYATRVALRELGRRVQFLDAQLERLDELIIPLVTARAPGLLSLHGVGPDTAALLLIAAGDHPGRLRSEAAWAHLCAVAPIPASSGKTSRHRLNRGGNREANHALWRIVITRMSSHPATRTYVARRTKEGLSKKEIIRCLKRYVAREVYHHLRDGA

SEQ ID NO: 83562 - protein, 346 aa, unidentified
MMIIGCDFHPSWQQIAWLDTETGETGERKLVHADGDAERFYRQLAGPALIGMEATGNSHWLVDLLSELDHELCVGDAAQIRACYVRQQKTDKRDAAHILKLLLEGRFPRIWMPSSEVRDLRQLLLHRYKLVIIRARVKNELQHLCLNKGVQRKRKLWTKAGQQLLRELPLKPWAGRRRDDLLGLMAMLDQQIEPLDEAVKAEAQRDKMALLLQTQPGVGPITALAYVLTMGDVGRFPRGKQVASYLGLIPREHSSGGRQHLGAITKQGNRMLRMLLVEAAQTAVRLDPQFRKEYLHRCHQKPKAVAKVAAALKLAVRLYWMLRTQKPYPEVVRIESSPRVRLVGEN

SEQ ID NO: 83563 - protein, 349 aa, unidentified
MQIIGVDLHARQQSIARLDTATGELSEKTLKHEAEGVREFYSSLPKPVRVGIEATGTMPWFLELMEELGIDCQVGHPAKIRAAEPRKQKHDRADAALIRKLLAEDRFPSIWMPSSEQRDRALLLHRHQWVRLRTRTQNALQAIALSHGLRRGSSLWSHAGQQRMASLPLPPYAAERRIALQSLYQHLEEQIQELDRKVEELAWQRPQARRLMTHPGVGPITALATETILGDPARFADGKAVASYVGIIPREHSSGGRQQLGRLSKQGNPLLRFLWCEAVGHAIRKDAELRRFYQHKLVQKGLGKTRVAAARKLGIRLWILLRDQIDYLEFCRRRQLRQNCGGAHAGMPA

SEQ ID NO: 83564 - protein, 343 aa, unidentified
MEHYIGLDVSMKETAISIRQNGKRIWRGKCASDPQLLAAVIRKRAPHVRRVVFETGPLSVWFYHALTAEGLPVICIDARHAKAALDMAANKTDANDADGLAHLAEVGFYREVRVKGFDSMLIRTLITARRQLLKMRLQISNQIRGLMKTFGLVVPKGAGSVFERNVRDLLQGEEKLARIVVPMLQAWSGIRYQIAELSKQLAATAREDQHCRLLMSVPGVGTVTATAFAAAVEDPANFRNSRAVGAWVGLTPRRYQSGEVDNDGHISRRGDNQLRGLLYEAAAVILNRSTDTSSLRTWALELKDRIGFKRAAVALARKLAVIMHAMLRTGELFDPHGGTQAAV

SEQ ID NO: 83565 - protein, 455 aa, unidentified
MPKQDRKKKTRRGKRSQDWEALPPLNQNAAGIDVGSAEHYVAVPAGRDAEPVQKFGSFTADLHRMARWLKACGIQTVAMQATGVYWMALYQILEEHGLQVNVVNAHHTKTLPGRKSDVLECQWLQKLHTFGLLNNSFQPAEEIRVLRTYLRQREKLVAAASTCIQHIQKALTEMNIQLANVISDISGLTGMAILRAIVSGERNPQALARLKNERIQASREEIAQSLEGNWRPELLFVLEQSLALYDSYQMKIGECDLRIEVHLKSMEAKTAEQQPAPKAPNARGHRKQTPCFDLASQLYRIAGVDLTQIDGIQVQTAQTLISEVGVDMSRWKSEKQFASWLGLCPDHRISGGKVLKRGTRHVVNRAATALRMAAWSLFRSRSALGANFRRLRRKLGAPKAVTAMAHKLARLVYRMLKFGQGYVDKGMEHYEAKYRQDQIKWLAKSAAALNLQLTP

SEQ ID NO: 83566 - protein, 341 aa, unidentified
MFTERTSVGLDVHARSVAAAAIDGVTGELVQTKLTPSYEHIRSWLVDLPGPVAVAYEAGPTGFGLYRSLSAAGIRCEVVAPSKLQKPAGDRVKTDAKDAIHLARLLRIDEYTSVAIPTVDQEAARDLVRAREDCRGDLMAARHRLSKLLLRHGIVYYGGRAWTGKHDLWLRTEAAPQLTTRATRLAFDSGYETVLAVNARRGRLDTVIEEMATDSEFTPVVRRLGCLRGIATLTGFALAVEIGDWHRFTGNTIGSFVGLVPSEHSSGSTKSQGSITKTGNSHARRLLVEAAWHHRTRYTAGVTLRSRWDLAPAAARVRIPPMVLVMSAGRGSLRGECSRAF

SEQ ID NO: 83567 - protein, 361 aa, unidentified
MKQYNYTGKVVFVGIDVHKKTYSCVCICEGEVVKRDTMPARPQLLGTYLKNSFSGAKIKTAYEAGFSGFHLHRYLVSQGIINLVVHPGSIEVASRDRVKTDKRDALKIATQLSAGRLSGIFVPSQEREEKRSVTRLRTNILKLRHQVGQQFKALLFTQGLIELEDDTRLCSRWLSGKLKEVDKGGYSNDFCYSVHQYAEEWIQLTERMKKIELMLDKQASEERGLQIIYESVPGIGPIHARQLANELGNMVQFKNEKQLFSFTGLTPSEHSSGEHTRQGHITRQGNSVLRRIFIEAAWIAITRDPSLREIFNRLSTSRGKKRAIIGVARRLAGRIRACVLTGSLYEIKPTQEACSLQGRVA

SEQ ID NO: 83568 - protein, 355 aa, unidentified
MDSKKYIGMDVHKESISIAVMNGAGKIVMECVIETKASMILQFIDGLRGDLQVTFEEGTSAAWLYDLLKPHVTKLLVCDPRKNASMREGNQSDKIDARRLAELLRLNHLSPVYHGEHGLRSLKELVRSYLTITKDLVRVMTRVKAIYRSWAIPCTGKQVYAPRHCVEWLGKIGEPGVRRRAEFYYQQLDALRSVRQEVRRELLAEGKKHKAWKLLCQIPSIGPIRAAVLLGILQTPHRFRTKRQLWTYSGFGIETQSSADHRSVDGQLERVKKQSSIRGLNRNCNHDLKNLFKGAAIVASSKPGPFQEFYTALLTKGLRPEMARLTLARKIATIVLMVWTRGACFEAQHLKPQTA

SEQ ID NO: 83569 - protein, 348 aa, unidentified
MKNKSFVGIDISKNVIDVSIFREDTNIKMFPHEVFNNTRKGFGDMCSWLKKSRVVLSQALFGMEFTGCYSLDLEKFLTSKNYSFCMLSTRIVKHHPMGTIDKRDKNDSAKIADFLYRYDGTECAKPYKLPSKAMQQLKQLVNERKFLVEQRTNFMNRMQMFETKEDSAMYESYIKKLNHDIEKIDQEECELMSKEEDVFDTFQNLLTIPGIGFVNATNIIAITRNFTAFDTARQYARYVGVAPCSHTSGTSVKWRARPSAHCNGQVKADLSMAALRAVEYDVEMQMFYNRKLGGRKDSDTKRKALNAVKFKLICRMFAIGKQKRKWEVLNTSDDRKNLHIEKSKASEL

SEQ ID NO: 83570 - protein, 390 aa, unidentified
MSNCTRFVGLDVHKDSITVAVAEEGRGEPTLLGVIPNQPGAVKKLAAKLSRGKTIVKFCYEAGPCGYVLYRQLRDMGLDCTVCAPSLVPRKPGDRVKTDRRDAKSLAHHFRAGDLTPVWVPTPELESIRDLTRAREDMKQIDVRLKQRLVAFLLRNDKKYTGRTKWGKAFFNWLATLKFETQVQQIVFQEYVDAVVRAQARVEALDIELQNALETFELRDLVISLMALRGFGLVTAMTVVAELGDITRFESPKQLMAYVGLVPSEYSSGSSRSQGSITKTGNNHARRVLIEASWTYRFPARKTAYLQRRAKEASLEVQEISWKAQKRLCRRFRHLVVERKKSFPEACTAVARELLGFVWAIAQEVGRNRKRNKQKCFARSAKGSDQGDPR

SEQ ID NO: 83571 - protein, 345 aa, unidentified
MSFYVGLDVSVRTTSVCVVDAVGSIVSERKLPTDPQAIAKHLLELRLTIVRIGLEAGAMSQHVHAGLAEAGLPVICVETRHMKAALSAQLNKTDRHDARGIAQMMRVGLYKPVHVKTPTSQRLRTVLTARQLLRAKLLDLENEVRGFLRNVGYDLGKVTARDFERRTRELAGDTELMVVVDPLLVVRRTLREGFAQLDDLLVHLAREDAVCRRFMTVPGVGPLVALTFRATVDVPARFARSRAVGAHFGLTPRKHQSGEVDRMGRISKWGDAMMRTALYEAAQVLLTRVKRWSALKAWAAQVSRRRGHKKAIVALARRIGVILHRMWVDGTDFNWGTPPSNAAAH

SEQ ID NO: 83572 - protein, 351 aa, unidentified
MWIIGCDFHPRYQQVAAMNQETGEIVERRLSHVTKEAQAFYESLPPGARIGMEATCAAQWFERLLGRCGHELQVGDPATIRASVVRKQKTDPRDARQILELLLTNRFPRIWVPTPAERDARQLLVHRDRLVRWRTQVRNQLSALARNQGLLPRTRFWTVAGRKHLESLPLDCWAARRRQDLLHLLDQFDPQIAEFTRQAEQLAHARSDTAPLMQQYGVGPIVSLAFVLTLGTASRFPRGKQVASYLGLNPSEHSSGGVQRLGHISKQGNRMMRSLLVEAAWMAVRKDPELARLYHRLASRRGRKIAAVAVARKLAVKLYWRLREFEQKNTPQPPAPMQGSSDRGLMHSSTL

SEQ ID NO: 83573 - protein, 351 aa, unidentified
MIVIGADVHKRKHTFVAVDEVGRRLGEKTVNATTEGHIAAIVWAREQFGTHLKWGIEDCRNMSARLERDLMSADQKVVRVPTKLMAQTRKSARRRGKSDPIDAESVARAVLREPDLPVASHDEVSRELKLLTDRRDILVAQRTSAINRLRWHVHELDPERGPAPRSLKAAKHQQALHEWLQTVPGLVAEMARAELADIIRLTAEINGLEKRLSDRAEDIAPRLLDIDGCAELTAAKIVGEAAGIARFKSEDAFACHAGVAPIPAWSGASEGQMRLSRSGNRQLNAAIHRIAVTQTRMNGSQGHAYYQRLITVGKTKAAARRCLKRRIARRVYQALLADHQHRNQAPKPVAA

SEQ ID NO: 83574 - protein, 347 aa, unidentified
MEDRTTYAVDLSKEIFEVAMETDGRVTERKRLRRKQMASYFSDKPGATVVMEACGTSHHWGRVLGSLGHRVELLPAQHVSKCRIGEKTDRRDVGAILSARRRQDVVPVPVKSAEQQAVCSLHRVRAALTKTRTARLNLLRGLLREFGVVIPQGAARVLPFVREAMAEGSVVPGVVHSALVVVMEEIGRLEEGIDGIERQLAAVGRQLALVERLETIPGIGLLNATAFSAMVGDLGRFRTGRRFAGSLGLTPKERSSGNRRWLGAISKAGSPYLRTLLIAGARSVLLSAHRSKCPHRLQQWALQVEAKRGRNRAAVAVANKLARIVWAVGTRGEVFQATRTRPEDARS

SEQ ID NO: 83575 - protein, 419 aa, unidentified
MSFKILKNNCCGLDVHKTWIFACIGITDSHRRTEYKQARFSSFTKGLQELCDWLAKYNCTDVCMESTGKYWIPVFNVLEKNNIWVTLSHPKYTKPQKGNKTDRKDAKWICDLYMCGMVKPSFIPPADIRQLRDLVRYRFKLTCMITSEKNRAHNCLTISNFKLDEVFSDIFGKSSRSITEQILQHPGETFDVAQFVDGRCKTPIEEIQAAVDGAISTEQAVKLRQCLNHIDELEKHQAEIEREIFRLSDKYEEVLNLIRTVPGFDKNPMTAIQVLSEIGGDMSVFPTAKNLVSWAGCCPRNDQSNQKIKSTRISRAGSYFKPVLVQVANALIKSKKHPEFTTRYRRIKARRGHKKAIIAICRMILTAIWHILTDLKPYTTEGFLESRPVNDSKILTTSQALNLLKQRGYVIKDDIVSVP

SEQ ID NO: 83576 - protein, 344 aa, unidentified
MKITTIGIDLAKAVFQIHGVDEPGKVAVRKQLKRSEMSSYFANLEPCLIGMEACGSAHHWARKLEGYGHTVKLMAPQFVKPYVKTNKNDMADAEAICEAVSRPNMRYVPAKTVEQQAILSVHRARQGFVKARTAQGNQIRGLLSEFGVVIPQGIRSIMKQMSEILEDGENGLPGTMRNLLERLTDNLQEMDRQVNELETQIGLWHRENEASRRLAEIAGIGPITASAMVATVGNAREFKNGRQLAAWMGLVPRQNSSGGKQNLMGISKRGDTYLRTLLIHGARAVIRFAENKAEPESWLRKRMARRNKNVAAVALANKNARIVWALLAKDRMFRPDYTPAAVAA

SEQ ID NO: 83577 - protein, 422 aa, unidentified
MLQETQDREQIIARVAALDIGKAEVVCCVRVPHESRPGRRLQEVDTYSTMTRSLLGMADRLHSLGVTRVVMEATSDYWKPVFWVLEAAGFETWLVNARDVKHLPGRPKTDKLDAVWLCKVAERQMIRPSFVPPPQIRRLRDVTRYRADLVGARTAEKNRAEKLLEDAQIKISVVASDLFGVSGRAMMAALIAGERSPAALAQLARTRLRTRIPALQEAFTGHFTDHHAFLLDKMLARVDGINTDIAELDARIEEMIAPFAQAAARLDEIPGIGPVAAAIIIAEIGTDMTRFPTAGHLASWAKFSPGVKESAGKKKGSGSTGHGNKYLARILGEAVIGAARTDTFLGERYRRIARRRGAKKAIVATGRSILVIIWHLLSDPDARYTDLGSDFYNQRINPERRKRAHVHQLEALGYKVTLEPAA

SEQ ID NO: 83578 - protein, 343 aa, unidentified
MEVAIGIDTHKGSLAAAAVDALGRVLGVREFANDPAGHRSLLRWVTEQGQPRTIGIEGSLSYGSAAARALLAQGEDVREVAPSLTHLERRRRSKGKSDPVDAVAIARVVAADETLPSARRTALLGDLKLLVDYHDQLIRARTQVANRVHANMVVIRPGYEQVVPNLRAKRHVTKARSLISRDRSVQAELLRRRLGEILRLEAEIAEADRRLVDKLDEADTTLTQIPGVGPFIAAKILGEVGEISRIRSKASFAMLSGTAPIIASSGQTHRHRLNRRGNRQLNWALHYVALVQSRSTLEAKAYLARQREAGKSQKEAMRCLKRHLSNVVYRHLLIDAKRLEQAA

SEQ ID NO: 83579 - protein, 457 aa, unidentified
MSSRQLQRASLRITNPHAAGIDIHLAEHWVAVPPESAPPPPKGHPANLPAYVRKFATCTADLELLADWLTACGITTVAMESTGVYWITLFELLERRGFEVFLVNPRHTKQVPGRPKTDVLDCQWIQRLHSYGLLAASFRPADNVVVLRSYLRQRLMLIQYGGYHIQHMQKALEQMNVKLTVVVRDITGKTGLAIIKSILAGIRDPLQLAKHRDDRCKHTESEIARALYGNWRVEHLFALQQALAAWQFYQEQLHVCDERIEECLKSFADKSQGKTLPAKRRQRQANGPTFDVRGRLFRMSGVDLTAIEGIEASTALVIQSEIGTDMSKWTTEKHFTSWLGLSPQHRGSAGKIKSRHVRRGSNRAAKAFRLAGQGCHHAKNAMGAFYRRIQARCGGPKAVIATARKIAIRVYRMLKFGMEYVRQEMLVSEQAYRLHQLNALARKARQLGYLLQPATTP

SEQ ID NO: 83580 - protein, 388 aa, unidentified
MQPTRVQDVTRDEEVLAVSLELASKSWKVGLDDGKRKSPAVHGVDHARPEGRLEQAIALIEKTKKKWGLPPGVAVVVVYEAGQDGFWIQRALTPRGYQTLVVDPASIPVERRARRAKTDRLDSIRLVVTLRAWLRGERDRMKVVRVPAVEAEGQRHLVRERGTLQKEIGQHRDRLRKLLGTLGCWASIEGDLKGRLERGEVTGYGGSALPAWLQARLVRECARLELVEAQLAQLEKSLPEQLPEAVRQRMEQLMRLKAIGQVGAQRLLLELFWRQFNNRREVGACVGLVPQPYDSGQSRVDQGISKAGNRRVRALLIEMAWMWLRWQPQSELAQWFAQRTRGSGSNKRSKRMAIVAVARRLAILLWRYLKDAVLPKDVQFKSVTVKAA

SEQ ID NO: 83581 - protein, 369 aa, unidentified
MVAVLPKRHRVVPKLWPAQPQNREDGDMKDTMIGIDLAKNAFQVHVASMTGHVKCRKKLSRGQFFRFITEQPPALVIIEACGSAHYWARELAKAGHDVKLIAPQYVRPFVKRQKNDAADAEAIVIAARQPEMRFVQPKTSDQQARAALFRARERVVRQRTELVNALRSMLYEYGQVIPLGIGRIKQIKAVIEGDEIDLPELVREECHDLLAQIGEQTARIEKKTKRLTELSRHSKSARRLQTMPGVGPVTALAIEAFAPAMENFRCGRDFAAWLGLVPRQFSSGGRERLGRVSKAGQADIRRLLIIGAMACVNWASRKPPKSGSWLARILSRKPRMLGAVALANKMARTIWAMLIKNEDYRDPALAAAM

SEQ ID NO: 83582 - protein, 431 aa, unidentified
MTEHDHASPMPSFAALVGIDWADRKHDVYLLGLDAGQREHLVLAHTPEAIDAWACQLRERFGARPIAVCLEQTKGALVYALLKYDFLVLFPLNPARLKSYRRAVTSSGAKDDPTDAQFLLEYLECHRAHLVAWRPDDARTRQLGLVGEERRKAVDLRTQLGNRLRTCLKHYFPQALDLVGEDVHTRMACDFLLRWPTLAAAQRATPQALRKFYHAHNSRHEGLITRRLEALRVARPLTTDPALVQSYRLTATLLARQLRELARAIDAYDKELARLMAEHPDAALFESLPGAGGTLAPRLLVAFGSDRQRFAGPGEVQTYSGIAPVTRRSGRTASVHRRTACPRFLRQTFHEFAGHSVPRSAWAGAYYRLQRARGRGHHAAVRSLAFKWIRVIYRCWKERTPYDEATYLASLRRKGAPLLAYLPPATTPSGG

SEQ ID NO: 83583 - protein, 371 aa, unidentified
MTDNSTFIGMDVHKNSIDIAIAQTGRKGQVRHYGKIDGTLSALDKVVRKLVSKGNRLQFVYEAGPCGYQIYRHLTAQGFDCSVVAPSRIPKPSGKQIKNDRRDALMLARLHRAGELTAVYVPLAEDEAIRDLTRAREDAKGDEKKSKQRLLAFLLRSGIRYTGRASWSQAHMRWLSDIKMPHRSQQIVLQEYIGTLNQCKDRVQRLTDQIQQLLPEWQLFPVVQALQSMRGVSMIVAATTVAEVGDLKRFQNPAELMSYLGLVPSQHSSGQKTRRGSITKTGNGHVRRVLVEAAWAYRLPARVSRVLLKRQEGLPQSICEIAWKAQLRLCSRYRHLWAKGKIKPVVVTAIARELCAFMWAIANETKVPAAV

SEQ ID NO: 83584 - protein, 359 aa, unidentified
MSVEEGAGRRVVGGVDTHKDLHVAALVDERDRVLATASFATTRQGYRQMLAWMRSFGAVQRIGIESTGSYGAGLLRFMQQAGIEVLEVTMPDARDRRRRGKNDDLDAQNAAHAAFAGQRTVTPRSRDGMVESLRVLSACRKTAVAARRVALQMIQNTIVCAPDGLRDLLRSMTRMQLIRTLAAWRPDLTAYRDVEAAYRITLKSLARRYLELHDEIADLDVMIGAIVDDLAPDLVARNSIGHIGAAQLLLTAGDNPERLRSEASFAALCGTSPVPASSGKTIRHRLNRGGDRHANSALHIIAIGRLRTDPKTKTYVAKRVAEGHSKLEAIRALKRYIAREVFGIITRRQTEINQTRITA

SEQ ID NO: 83585 - protein, 348 aa, unidentified
MTQPMCLRPSEIIRLPPHLKVWGSIFVTTQKILKRVLNMYRTKVGVDLAKNIIQVCTLNGKKVTSNVEMSVDEFSAWLAKSNPLTVAFEACSTSNYWYQQAIKAGHDARLISAKLVKAVRQNQKTDKNDALAIAQTLFLPEVSFINGKSIEQQQLQSIQRLRELAIKSQNASQKQIVSLLLELNIRLPNTQDGILRGLEGVLEDGEINLSDTFRATLSVAKVQLENMISAIREYDKYLEQSIQSLPDCKKLLKLESVGPVNAVNLYIALGANQSQPFKSGKNASACIGLTPIQHSSGGKEVMGTIGKYCKNGSLRSQLITGAMSVVIKVIKYGAKTKKELWLQGLMQR

SEQ ID NO: 83586 - protein, 342 aa, unidentified
MKVTTVGLDLAKNVFQIHAVDERGKVVVRKQLKRDQVAAFFAKLEPCLVGMEACASAHHWARKLQSFGHTVRLIAPQFVKPYVKANKNDAADAEAICEAVSRPSMRFVAVKTVAQQALLAMHRVRQGFIKARTAQGNQIRGLLGEYGLIIPQGIGNIAKRVPSLIEDASNELPGTFRVLIDRLLEHLKALDHQVSELEAQITAWHRESEASRRLEQIPGIGPITATALVATIGEAKNFSNGRQVAAWLGLVPRQHSSGGKAVLLGMSKRGDAYLRTLLIHGARSMILALRRKANPAGWLHSLVKRRNANVAAVALANKNARIAWALLAHDRNYRADYVGAAA

SEQ ID NO: 83587 - protein, 408 aa, unidentified
MEKFLKLCVGADVSKDTLDVCLSGLREDLSVREVERKSFSNNADGIKKLMKWASQKTEGNPYQIVMEATGVYHEKLAFTLSKNGVEAVVVLPKLMSNYFKSHNLRVVNDEICAEHIAMFGLSRKLDVWKEPEPVYMALRALCRHRYQLAKLTTQCTNQIHAQKHSETSLQEMIDMSEDMVKLAEKQIKEIDKKLRAILKENDWLKAKVDKVCTVIGLGWITVVKIIAETSGFNLIRNSRQLVAYAGYDVLSKESGTSVHTKSKMSKKGNKYIRAAMYMPALSAIRSDEQMAAFYSRLFHRHFISKKSNVAVQKKLLVLIYTLWKNDCTYDPDYRHPTSQSQNQENNQGNEPQCDQESDQPSKIVEKTINKNREAIRRSLHRLDQVRLQDFDETKIKKNPQNEHRQRIE

SEQ ID NO: 83588 - protein, 471 aa, unidentified
MKRKSIPSSRGPKTSRQSKCKKQAWKVVHPHAAGIDIGATEHYVAVPPDAVAAGESTVRSFGCFTQDLDALVEWLKACGVDTVAMESTGVYWIVPFQKLEAAGLEVVLVNAHTLKHVPGRKTDVQDCQWIQQLHTYGLLRASFRPDELTCRLRTLVRHRANTVSSGAEYILQMQKALTQMNVQLHHVVSHLTGETGLRILRAILNGQRDPLILVELRDPQITRSTKEEMRKALVGDWRPELLFVLKQSLRGWEFCQEQMRECDGQIEQLLKEMPSAVAVKTPAARPQPDLLASTNPRPKGKQSRKRNDPEKDLGPELARICGVDLTAAHGLRLLTVLTLVSEIGVDVSKWRSAKAFVSWLGLCPNNKISGGRILSSRTRKVINRAANAMRMAAVGVGDTDTWLGSFHRRMRAKLGPAAATTATARKIGTVVYHLLKHQEPFIDRDLMAYEAKVYRHKLARIKKRLVSKIYG

SEQ ID NO: 83589 - protein, 435 aa, unidentified
MSIDKIERFVCCGMDVHKDILVATIGITDHFTLITQYVQETFNSFNSDLYRLCDWLASHHCSEVCMESTGKYWIPVYNVLEERGFTVCLAHPKYTKAIKGKKTDKKDSKWICDLYKHDLVRGSFIPPKEIRELRDIARYYYKLIGMNSSESKRYQNCLTVSNLGIGSIFTDVNGKSATRVMEAVLAADDPNDISDEDLLKLVHKSCKKKDQLLDAVRGCRIESDQRFKMREIQKHKEELDQHLTTCFAEMIKRATPFFHQFLHIVEIVGISLLSAILIISEIGVDMAVWEDARHLCSWAGLTPGNNESANKKKSTRITKAGQYLKPLLVQCALAAIKNPNGYFGIKYRRIKKRRGHKKAIIAIARMMLICIYHMILTGESFHPSDYDELMNPKPRKPRELTIESAVDFLKSSGADIDAIIASLKEAPPDQITVQS

SEQ ID NO: 83590 - protein, 321 aa, unidentified
MTYIGIDVSKDTFVVAYSPEKNSKTKTFKNTTRGIHEFIRTISKDEHHCVMEATGNYSALLVYLLSEAGITTSLENPLKVKNFARAMLSTVKTDEIDARLIALYGEKMQPVPNKLHSDAILTLKQKRTVIRQLKKQLIATRNLKGSMEVLPFFDAKCKKSIEKTITFLEKQIKDLEEDLTTLARSEYKKQMDLLTSVKGIGVTLAAALIMATGGFTYFDNAKQLTRHLGLSPTYQQSGTSVNFKGHINRNGDSSLRSQLYVAAFASLRCNTECKACYDRLRSNGKPGKVAVIAVANKLIRQAFAVVTQEKPYVDGYVSSKK

SEQ ID NO: 83591 - protein, 346 aa, unidentified
MGKSIIDLSSVTAVGLDLAKLVFQVHCVDASGRVVAARAVKRNKLLALFASLPRCLVGLEACGSAHHWARELIKLGHQVRIMPPAYVKPYVRRQKNDAADAAAICEAATRPSMRFVAVRSVENQAALMRHKAREMLVGQRTQLLNGIRGHLAEIGVIAPQGPRYARELADRIEAGDEDIPLAVCEALAELVRQLHRLDEAIDRCDRTIAKMAQKDETARRLMSIPGIGPVTASAMAATIQDVSAFKGPREFAAFLGLTPRQNSSGGKQKLGRISKMGNRYLRKLLVVGAHAVLYHRQPHADALRTWAKKLIEKKPFKLVAVALANKMARIAFAILRGKTSYNAIAA

SEQ ID NO: 83592 - protein, 329 aa, unidentified
MTQPAPARITVGVDTHAEVHVAVAKDNFGRRLDAISVPTTPAGYGELLGWARRLGQIEGWGIEGTGSFGAGLTRFLHRHGQVVVEVNRPDRQTRRRRGKSDPLDAEAAARAVQAREGVIPKAGDGQVEMIRSLRVARATAMKARTQAINALKGLLVTAPDELREQLRALSAVRLVQTAAELEPGPVTTPAAAARLGLRSLARRYQALSAELTILDTELDRLTVTAAPKLLALFGVGSDSAGALLVAAGDNPDRLRSNACFSMLCGASPIQASSGKTQRHRLNRGGDRQANAALYRIVIARLRHDQQTKEEAIRCLKRYVAREVFAVLRP

SEQ ID NO: 83593 - protein, 410 aa, unidentified
MNAVGIDVSKGKSMVAIMRPGGEVVQPPFEVVHTEKEFSVLADQLKQLPGETKVIMEYTGIYYQTIAYALYDNGLTISAVHAKLIHGFDNNSIRKIKTDKADAVKIANYGLSCWAKLPEWAPEDDLRRLLKVYSRQYNKYGKMRTMLKNNFISLMDQTFPGVNELFSSKPRADGHQKWVDFAMHFWHCECVCGLTPGTFEERYHKWCKKSGYRFNKEKAQNIYFAACGHCDVLPKNKSTKMLVRQTVAQFIAVAETMARLSAEMKRLAEQLPEYPVVLGFFGVGDVLGPQLMAEIGDVCRFRKKGSLVCFAGLEAPPFQSGKFEAKDRKVSKKGSPHLRKTLFQVMDCLLKNAPADDPVFQFIDRKRAEGKHYYNYMTAGSAKFLRIYYARVKAFLSKLDAEAEGLPCQG

SEQ ID NO: 83594 - protein, 369 aa, unidentified
MKKNSTVKQSPKRAVARREGPITIGMDLGDKTSRYCVLGADDGQLEGSVVMNKKSMAQKFAGMRRGRVAIEVGTHSPWVSRLLTHLGFEVIVANARQVQLISANTRKNDRMDARLLARLARVDPQLLRPIRHRSEEAQADLMVIRVRATLLEARTGLVNAARGFAKTWGERLPVCDADALGVEKMEALPAVVRDLLRPLLEQVESLTVQIKKLDCSLEQIARTSYPETKLLRQVSGVGNLIALTFVLTVGDRERFQKSRDVGCYLGLRPKQSESGQSQPELSITKEGDRYLRTLLVQGAHLILNRRGPDTDLKRWGLKLASHGGKNAKKRAIVAVARKLAVLLHRLWVTGEVYEPLRNSQAAQASHQAA

SEQ ID NO: 83595 - protein, 406 aa, unidentified
MNAVGIDVSKGKSTVAILRPGGEVVASPFEVSHNPRELNELVTLMKSLDGDTKIVMEYTGNYYLPVALFLQKSGLFVSVVNPILVKGYSNKSLTVRKGKTDKKDAVKLAAFALNRWNELPLFSSRSDTRTLLKAFNRQYNQYNKLKIMLKNNLISILDQTFPGANTLFSTSTRKMDGHEKWIDFVLRFPHCECISKKSFSAFSKSYLSWCRKCGYNFSDSKAREIYVFACNSAPSLADSAAAHTLVSTAILQLNTLNETLASLQKEMDLLASSLPEYDTVMSLFGVGSVLGSQLIAEIGDVSRFSNKKALVGFAGIDAPPFQSGNFNPQSRSISKRGSASLRKTLFQIMFAILQNAPANEPVFLFMDKKRTEGKHFYVYMMAGANKFLRIYYARVMEHLNSLQEAA

SEQ ID NO: 83596 - protein, 404 aa, unidentified
MSIDVWVGIDVGRHAHHAAAVDASGAVLWSRRVHNDQREIEMLIERVADVESVMWAVDMTAPESALLRGVLTSCDEQVRYVPGRVVHSMTGAFVGEGKTDARDAVVIAQTARLRGDLAQIAAPDELAIELELLTGHRRELVAERTRGINRLRVMLTGIFPGLERSFDYSTLTGLAFVTRFVTPSSITTASDEEMYDHLRDHGVRRPTIAKMIGTARTAAVAQPIALVGEATTAALIKQASGSLILLSRQISDLDKQIAGVFRRHRHARILESVPGIGTRSGAELIAITGGDLTSFGSAAKLAAYAGLAPVPHDSGNRHGTLRRPQRYHRGLRKVFYMAAFNSSQRDGPSREYYLRKRDEKRSAVHALIALARRLVDVVWALIRDNRDWTTTPASGHSIRAPEAA

SEQ ID NO: 83597 - protein, 370 aa, unidentified
MDENIKFFVGLDVHKDTIAVAVAEAGREPARLVGSIAHDVVKLRKLLTRYGEPARVLVVYEAGPTGYGLQRELARRGYQCQVIAPSLIPKRAGDRIKTDGRDGVRLAELSRAGELRAVWIPDPADEAIRDLARAREDVVNARTQARQQLKGFLLRHDVRYTGKTSWSKTYYRWLGTLNFGLSGAQTAFTEYWQAVTAADERVARLTGALANSIEGWRFEAVVNALQALRGIDVISAIGLVAEVGDIRRFAHPRQLMAYLGLVPSEHSSGERVARGSITKTGNTHARRLLVEAAWNYRFQPRIGRRAQQRAEDLPQAIRDVAWKGQLRLSGRFARLRARGVQINKVCVAVARELAGFVWAIASAQAKLTPQ

SEQ ID NO: 83598 - protein, 459 aa, unidentified
MTRKKNSQRSKSTRHLLERVQHPDAAGIDIGAEELVAAVPPERDEEPVRTFSSFTVGLHALRDWLLACGVKTVALESTGNYWIATYQILEEAGLEVFLVNARHVKAVPGKKTDVCDAQWLQQLHSAGLLAKSFRPAKEVVPLRYLLRHRSHLIESAGRELQLMQKVCNEMNLHLHHVLSDLDGVSAQRIIAAILAGERDGEKLASLCDRRCRAPRTKVMASLQGDYREEYLFVLGQCQLRWQQTQEVIAALDEKLAGLLAAFDAPCTGAAPAASWKQRRLHKNSPNLPIYDEAWRFYGVDLSSVDGISAATLAVFMTELGTGEQITTAFKSNQAFCSWLAVCPDNRISGGKVLKAKTRQVKSRVAGALRLAAQALSHSKSALGEYCRRMKGRLGKAEGITATAHKLARILYSMITTRKPYDEKVAFSLTPAKLERRLRHLHAQAAKLGFQLIPQQQLLT

SEQ ID NO: 83599 - protein, 381 aa, unidentified
MTTLATHNPQDTTTAGPLFVAFELSEKTWKLGFTTGHGQKPRERTVTARHQECVLAEIAQAKHRLGLPDTAPVVSCYEAGREGFWLHRFLQAQGITNQVVDSSAIEVNRRRRRAKSDGLDVRKLLSMLMRYHHGERQVWQVVKVPSVEAEDHRHLHRDLETLKQERASTTTRIQGLLRSQGIRLTSLHQLPEQLEALRLWDGSPIPPGLRRRVLRVYAHHTFLSEQIAAVEAERRAQLQTSTEAQIDKVRQLMQLKGMGINGAWLLVMAFFGWRAFTNRREVGGLAGFTPTPYHRGDSARAQGITKAGNRHVRWMTTELAWSWLRLQPDSALSVWFRERFGKGGKRLRRIGIVAVARKLLIALWRFLETGVLPAGAVLKEG

SEQ ID NO: 83600 - protein, 416 aa, unidentified
MEQIFMIKENYIYVGIDLHKETHTAVMIDCYNQKLGEITFPNRPADFPKLVAKVKKCNTDGKTIVFGLENAYGYGRPLAVWLIDKGYFVKDVNTAISHRQAKHRGAMYRKSDSDDAEAIALATLNMLDKLPDACPNDAYWSLGQLVHRRDNIMKQRTRLVNQLHEQLCIAYPSYKSFFNDISRPTALYFWEHYPSKKYLKGKSVEDLRAELVPVSHNKCSTKTCEKILDAVASDKVKNNAYQDARDMVTLSIVSDLQHYDSQLAEVDKMLEQMYKMLGCTLTTIPGVNVITAVKILAEIGDIKRFSNANKLAQFAGIAPLHLSSSGKGKDVATKQGNRRLQATIYFLAIQMVQLSSKGTPRNPVVRAYYEKRKAEGKTSQQALICISRRLISIIYGMLKNGTEYRMPVVENAGENR

SEQ ID NO: 83601 - protein, 384 aa, unidentified
MAQMALQSNDSGLVGVLYMALELSKSTWKVGFEYQGKRRIKNVPGGEVSALRQALDEARHKLGVPAGALVRCCYEAGRDGFWLHRLLEGWGVQNVVVDPASIEVSRQARRAKTDRVDLQSLLSKLRQYHAGEWGVWKVAKVPSEQDEEGRLLHRELERLKKERTAHVLRIKALLFAQGVRVERVGGKQWAAALMALRRYDGRALPADLMAQVRRESERLAMVQAQITAIEKEQARRVREAAQAGGAMAMVRALRQLKGIGPVAAWVFVMEFFGWRQFKNGKQVGALAGLTGTPYASGQMQREQGISKAGNQRVRALAVEIAWLWLRHQPDSAISRWYAERFAGTSKRHKRVGIVAVARKLLVALWRYLDTGERPVGARLKAARA

SEQ ID NO: 83602 - protein, 331 aa, unidentified
MSNIIGIDVSKASLDCAYLSDPDQKRTKRLRCENDVSCFTTLVAWAEARSGLPVQSLAFVIEPTHVYHEQLARFLYNTGATVYLVNPGRVRKFAEGIGILSKNDLVDAELLVRYGLLARNLIAYEPVAQEVNDLRSLLNRLDVLERNLRSELNRQEKVGKTMVFHRLEQQSIARAVKRLKAEVITFKRAIRECIKSTPSLQQSFNLLCTIPGVGAKTAWIMIVILASRPFISAPEVASFLGLNPIEKRSGNSQYRRPRLSKSGSGHYRQKLYFPAMVATRKNPDIKALYERLLAADKTKMCALGAAMRKLVHICYGVMKNQTPYQVQTTPS

SEQ ID NO: 83603 - protein, 361 aa, unidentified
MKKPAQHLIAEVPRRQAKVEMTVGIDLGDVWSHYCTLNQDGEVVDRGRFRTTPKAIEKWFTDVPPSRVAMEAGTHSIWISAQLQDLGHEVIVANVRELRAISHSDRKSDQVDAEKLARYARLDPNILRPIAHRTVQQQEALTLVRARALLVRLRTAAVNAVRGLTKSCGYRMPASATTCFAQRSLAVMPPGLAQALGPVLQQIAEMTIKIKQYDRQIQQLGQTEYPETQALLKVHGVGHLTALTFVLTLGSKERFGRSRDVGCYLGLRPRRSQSGDHDPQLGITHAGNAYLRSLLIECSNHILRPHGRDSALRQWGLHLAARGGKQAKSKAVVAVARKLAVLLHHLWRTQAPYVPFYEQAA

SEQ ID NO: 83604 - protein, 382 aa, unidentified
MQTIDPVNPTILLAIELSTSTWLVAARLPGLDKPRLSRIDGGDTAALLALISSLRARAACGLDATMGVVCCFEAGRDGFWLHRLLTAHGVVSYVLEPTSILVNRRARRAKTDRLDAEGMLRVLAAYLRGDHQACSMVRVPTPDQEDAKRTHREREHLVQERLRIENRIEALLFTQGIRKRPSLRSWERDLTVLRTGDGRKIPRHLRAELDRLRRRLVLTLELIREVEVERDQVTKTKPQDQAHHKMTALCRIRGIGENFAAVLTREVFYRSFDNRRQIASYVGITPMPYQSGGMDRDRRIGRAGNPRARTTMIQLAWLWLRYQPDSELAEWFRERVGTLAGRTRRIAIVAMARKLLIALWRYVETGVIPTGAEIRAETTVAA

SEQ ID NO: 83605 - protein, 391 aa, unidentified
MVCVGIDVAKDKHDCFITNSEGEVLFNAFTIPNNADGFHDLFQKISSLTNDFSNVKVGLEATGHYNYNLLGFLIDKGLPTFVINPLHTNLFRKSLSLRQTKTDKVDAHTIALMMMSGVNLQSYSNTSYHNEELKSLTRYRFDKVQERAKLKTSISRLVNILFPELEKLVPSLHMVSIYALLAEFPSSAQIASCHLTRLTNLLANASKGHYNKEKAIEIRNAAKHSIGSNMPAKSLELKHTIRLIQELTSEIDEIECSIKSIMDEIRSPILSIPGINYRMGAMIIAEIGDFNRFSSPDKILAYAGLSPSTYQSGQLDGCYSHMEKRGSRYLRYALFNATKFVCIWDNQFSAYLAKKRSEGKHYNVAISHAAKKLVRVIYQLEKSGQLYHRAA

SEQ ID NO: 83606 - protein, 366 aa, unidentified
MKKTSTVRVNGNMIFKGHKLTIGVDLGDRWSNYCVLDEAGEILLEQRLATTPEAMKQTFERMPRSLMAMETGTHSPWVSRLLKELGHEVLVAHAQRVELISKSTRKDDRHDARTLARLARIDPELLGPVRHRSAKAQIHLTVIRARAELVSARTGLVNAARGLVKSYGQRLPKCGTQQVSRELATELSAELREVLEPLLKEVESLNERIKEYDVRMEKIAREGYPQVELLKQVKGVGTQIALTYVLTIDDPHRFPKSREVGCFLGLRPGRRDSGQSQPQMHISKEGDPYLRTMLVQGAHYILGPFGADSDLRRWGLRLAERGGKNAKKRAVVAVARKLAVLLHRLWVSAEVYEPLRNSHKAMRAVA

SEQ ID NO: 83607 - protein, 337 aa, unidentified
MTIIRIGLDTAKHVFQVHGVDENEHTVVRRQLRRGEMRKFFNRLAPTRIGLEACGASHYWARLLRGLGHEVVLLPPQYIKPYVKRGKNDANDAEAICEAMSRPGMRFVPIKSAESQVELMPLGVRNLLIKQRTAVINTIRGYAAEFGVIATKGPVKVAELLQQAHAEEASVPALALDMLRLLAAQLDALDIKLKLIETRLMALHRENPVSQCLASQPGIGPIGAVSFALRVTDPKSFRSGRHFAAWLGLTPKDNSSGGKRRQGRISRQGNEALRKLVVLGATAVIRFAKPGHGSPWLLNLLARKPKKLAAIALANKMARTLWAMMVSGEVYRRPLPA

SEQ ID NO: 83608 - protein, 401 aa, unidentified
MDNIKMFYVGIDVSKDKSDICIKDEKGNDLIHRFEITNKKADLEMLYETVESIKRNIPGNSDVVFGMEATGIYSLPLYSALKRDGYKVKLYNPIQTNGYRKINIRKTKTDPIDSAIIAEMLRHSEAPQVSEIQDMHLFQLRELVRVRHRLIEKQALCKVQMVRNIDTIWPGYRGVIKRVFGAASLAILKKYSVPSKLRSESFEHFYELVKKKSRSKISRSKAEEIYANAGNVLTIPELDSVIAIEIKTLITQLELYDEQIQSVEGKIDQMMKLTDTKIMSIPGIADILGPTILGEIGNVERFSNVKKLVAFAGLDPVVNQSGRFENKSGKISKRGSPLLRHALFLAANSAIQNDENLKRFYTKKRSEGKHHFSALNAVAAKLLRIVYWVLKNNKEYQIQLN

SEQ ID NO: 83609 - protein, 332 aa, unidentified
MDNFYFIGVDVSKKKLDFCVLFEGKVLREEQVSNHQQAVARLIGELKNDLEMDNEQFLICAEHTGQYTFPLVCACKSVECKLWLENPSQIKYSSGMQRGKNDKVDAKRIAIYASRFGDKVKYYDRPTEEIERLKQLERERALYVTDLAKYKGQMYDQKDFMPAALYRKKTKRMKGLIQELQAAIDAITAEMEKIIGSTEVLARQMELLMSIDGVGKVVALNVIIETEAFSRFDDPRKFCCHAGVAPFSYTSGSSQHSKNKVSHRANKNIKKLLHMAAVSVTHRKEGELKAYYMRKVEEGKNKMSVINALRAKIVARMFAVIKRNEVYTPIYS

SEQ ID NO: 83610 - protein, 341 aa, unidentified
MTEVSIIGLDLAKNVFQLHGASASGAVLFRRKLRRDQVLSFFSVQPRCLVAMEACPGAHYWAREIGKLGHEVRLIAPAYVKPFVKRQKNDAADAEAICEAAQRPTMRFVAVKSEAKQASAVIFRTRDVLVGQRTQIINAIRGHLSEYGIVARQGPSHVWQLIARIEDVSSDIPEAARSCLALLVETLRGLQTRIAALDAEITARAKRDVVARRLMSIPGVGPLIATAIEALAPPVGTFRSGRDFAAWIGLTPLQRSTGGKERLGRISRMGERTLRCLLIVGASGVVRWAKRKGAPAGSWLARMLASKPPMLVIVALANKMARIAWALIAKGGIYRAPAAAA

SEQ ID NO: 83611 - protein, 365 aa, unidentified
MAEVTRDAVARVGVDLSKRVFQVHAVDRAGRKLLAKPMAPERFFAWCAELPAGCLVAMEACGGAHHAARRLRLLGLDARLIAGHFVTPYRMAGKSGKNDANDAAAICEAAGRPHMRFVPVKTAEQQGQLSVHRLREGYKAERTALINRIRGVLAEFGLVFPQSPEALRRVIAEVLEDATNELTGIARLVLQRAHLHWIDLDLQMKWCDERIEAHARSDERASKAAALQGIGPIGASALVASVGDFKQFDNARQFGAWLGLVPSQNSTGGKARLGRITKRGDDYLRTLLIQGAKSAVMTAGKRSDRISQWLVQLKERVGWQKAVVALANKNARILWAVLTRDGRFDPNHVPEAPAPHCALSQRPAL

SEQ ID NO: 83612 - protein, 389 aa, unidentified
MKTAAPARLRYNSVSMDHDGEKLRQVLTPVDRRAQPQPGGAAVSQYIGIDLHKAKSFVTRMDRRGRVLEQVNLPHATGALQRYLERIPRDTRIAVEATGNWMWLYELIEARHPDLVLAHPLKTKAIASARMKTDKIDATTLAHLLRADLVPAAYIPPRAVRDTREILRYRASLVRLRVQVKNKIAAVLSKTGITTPTKTAFGVKSRHVLATVPVRPCYRLALDGYLRQLERLTEEIRQVAQTIEAQAAADPDAQLLCTMPGIGPYAALLLLSEIGDVHRFPDSRHLCSYAGLVPSVHASGGKTRLGRLTKQGSRWLRWILVELSKHAIHGAPQFRQLYSRVAKKHGANTGRVAVARAMLKTIYAMLKHQETFRPMVTGSIGQRPRVMAG

SEQ ID NO: 83613 - protein, 458 aa, unidentified
MKKKVKRTKGKEEARPFDGLSKVNLNAAGVDIGATEIVACISGEDGIQLVRTFGNYTADLQAIGEWFREHGVKTVAMESTGVYWIPLFEELERQGFECLLISSRSLRRVAGQKGDVEDAQWIQTLHNYGLLKGSFRPQGDLVALRTLLRHRTQLLEHRAPHIQHMQKALLQMNIQLTQAVTDVMGVTGQKIIRSIVAGERNARVLSGFRDPGCKHSEEDIGKALTGTWREEHLYVLKQSLELYDFYTEKIEACDAEISRQYGMTRPDWASGELPVVPDKKRHAHSKNAPKEAQEIRQHLYRINGVDLSLVDGFGVSLAQTVTMEVGSNVGEKFPTEKHFCAWLGVAPKHDITGGKVLSNRTLKTKNRAGQAFRMAAQSVKKADCPFGLMYRRLRSRLGPAQATVATAHAIARVVYKMLKYKVEYDPLSVNEYQKKYEQQQVKYMKKKAAKLGYQLIPA

SEQ ID NO: 83614 - protein, 391 aa, unidentified
MVCVGIDVAKDKHDCCILDSDGTIRADCITIPNNMDGFKQLLQTIRDCTKKSDKIKVGLEATGHYSYNILGFLLDNGLPTYVINPLHTNLYLSLIHICKTKTDRVDARTIATMLLSDVDLKSYTDTAYHNEELKSLTRYRFDKVRERAKLKQSVSRLVTILFPELEKLVPSLHIASVYALLSEYPGAKQISEIHLTKLTNLLATASKGRYGKDKAIQIRDAARTSIGSVMPAKFLELKHTIKLIQELASEINEIEDSIQKIIDELNPPILSIPGMGVNSAAVILAEIGDFSNFSSPDKILAYAGCSPSTYQSGKLTNCYAHMEKRGSRYLRHALYNATKYVCYWNPVFAEYLAKKRAEGKHYNVALSHAMKKLVRLIYALQKSGKAYLAAA

SEQ ID NO: 83615 - protein, 356 aa, unidentified
MNKRSKLNFSGQPIYIGLDVHKKSWSVSIFSEQGEYKTFSQTPKVETLVQYLQHHFPGAQYRSVYEAGYCGFWVHDQLGEQGIQNIVANPADIPTQDKERRNKRDRVDCRKLARGLRSGDIKGIYTPPRWKLEDRSLIRTRLSMGRKQGRCKNQIKSILLFYGVEIPEQREIGHWSRRFVRWIEGIQMERTSGNIALKIHLEELCHLRQIIAKLNRAIVALARTDQYRSWISLLKTIPGISTLGAMILLAELYEITRFRSIDELCSYVGLIPDTHGSGEKEHVGGITQRHHSYLRWLLIEASWVAVRKDPVLLESFQEYCKRMRKNKAIIKIARKLLNRIRYVLKNQAEYVAGVLE

SEQ ID NO: 83616 - protein, 361 aa, unidentified
MPQVKCWVAFDVHVSGVVAAVLDRESGELWVRRLPGGSDDAVAFAAGLGESVRATYEAGPTGFVLARKLAAVGVDCLVCAPGLIPRGATDRVKTDRRDAERMVRLLAAGELHAVAVPTVEAEALRDLVRAREDLRGDLMRTRHRLAKLLLRHEVRFEGPQANWTQAHLGWLAGVRFEQAASQRAFEDYRGAVLALMIRREQLEREIADALPGSPWAQTARRLMCMRGIDTLTAAGLCAEIGDFRRFEHPAQVMSYLGVTPSEHSSGQRQRRGPITKSGSQHARRLLVEAAWHYRRPPRVAGSLARRQLGGEPEVIALAWKTQRRLHHVWTRMEQRHKRRTIIAVAAARELAGFCWAVATVD

SEQ ID NO: 83617 - protein, 424 aa, unidentified
MKVTYQTCCGVDVHKSFLVATIIKTTAGIEPSYQKKRFSTFNNSILDFKSWLLENECHDVCMESTGKYWVPVFNLLEDQINVTIANPKWVKAVKGNKDDTKDSKWIGDLFRLGLVKSSYIPCRLIRILREYTRYRYKLVSCRSSEKNRYQNALTVCNIALDSVVSDIFGKSSSSIIDYLLEQSGTTINHEEIASKLLKSLKSKEDAVIESIEGYQMTDSQKYRMRLIRAHMDYITAEINDVDKQIESLISSDPDYDKAIQLLTTIPGVKRDSAITIISEIGIDMSQFCNSKRLCCWAGLTPGNNESAGKKKSVRITRAGVYLKPALVQCAHAAVKSDKSPYYKTKYESLVKRRGKKRAVIAIARMILTAIYRMLSTGEVWNPSDLYKIDMPAPLAEKQKAKAIKQAKKLLQKEGLLPPDEPLAS

SEQ ID NO: 83618 - protein, 349 aa, unidentified
MRIIGCDLHARQQTVAMLDTTTGEVVEKTLLHEASNVREFYSTLPRPVRVGIEATGSMQWFVNLMEELGIECQVGHPAKIRAAEPRKQKHDRRDADLILKLLVENRFPAIWLPSQELLDLRSLLRHRHQWVRMRTRVQNALQAIALANGLRRGPSLWSHDGQSAIASLPLAPHTAHRRSELQALYGKFETEIEQLNQRVEEQAGGRPGAQLLMTHPGVGPVTALATDVFLGDPTRFADGKVLASYVGIIPREYSSGGRQRLGGLSKQGNPLLRFLWGEAGAHAVRRDPELKRFYRRKLIQKGLGKARMAVARKLGIRLWIMLRDQIEYNEFCRRGQKNGGACAGMPETR

SEQ ID NO: 83619 - protein, 408 aa, unidentified
MNPLFVGIDVSSKNHVVCLMKPDGTKFSTFSVQNNLGGAKILSEKIVSALDKLQLNEVKIGLEATSIYGDSLVYTLREDGKLGCYQRHIHILNPKQVRKFKDAYPDLPKNDYVDAFVIADHLRFGRIASEVYMDDYRYRSLQTLTRARFDAVQNLTREKQRFANYLFLKCSGIAQDKNIPNTTATTLALMENFETVDDLANCDLDTLTAFVSAAGRGRFTDPEATAKTVQAAARGSYRLPKTVNDSINQAMSVSIASMRALESQIKVLEKAIEQQFQIIPNTLTSIPGIGPVYSAGIIAEIGDIHRFESQASIAKYAGLVWTQHQSGDFEAQNTRMIKSGNRYLRYYLLQAANSVRRCDSEFRRYYDLKCNEVNKFQHKRALALTARKLVRVVFRLLKDNHLYILPEG

SEQ ID NO: 83620 - protein, 412 aa, unidentified
MDIVHERAAGLDISKRDAKVCLRLPGQRAGTYTSTITTWGATTGQILALRDFLEREHVTTVVMEATSDYWKPFFYLLEETLPVMLVNAKSARNIPGRKTDVSDAAWLAQLGAHGLLRASFVPPEPIRELRDLTRARAIATRDRTREIQRLEKFLEGSGIKLSSVVSDLTGVSSRAMLEALVSGERDPDVLAGLAKGTLRSRIPELVEALTGRFKSHHAFMARLHLDQIDTQSRIIDALTGRIEEAMEPFRAAREFLATIPGVSLKVADVIIAETGADMSRFETPGRLASWTGVCPGANESAGRIKSVHILPGNKYLKGALGIAALSASRSKDTYLAAKYWRVAARRGPMKATVAVEHSILTAVWHMLADGECYVDPGADHFTRLDPIKAKNNAIKKLKSLGFNVTITAANAA

SEQ ID NO: 83621 - protein, 372 aa, unidentified
MIANNTDTVSEVKLSTGPATAATVLSGEEVFLGIDTAKRRHVVSRFVPGEGAKPAEGMNTATLLARVGKWRKAGLAVHCVYEAGPTGFALARKLLELGATCLVVRPRRLDRHGRRRKTDPLDAQHLAEDLAAHRFGRKGLLCPVRLPSLEEELRRLPVRERETLSGVRHQLLNSAKGRALALGHELPKQWWRPRVLPKLIPQLPAAVAQLLQRAADAAAAILEQLEAVEAELTADAPPAPTGVGAVTAGVLDREVCDWGRFDSDKKLASFAGLCPSEDSSGERHRQGAIDKHGSARLRFWCQEAVWRLFKFQPEYRGVIWARERMRHANKGRAKQIAVALARRFLIDWWRVRTGRATCAQLGLVFKKPAATP

SEQ ID NO: 83622 - protein, 346 aa, unidentified
MKYFAGLDVSLEETAICVVDEAGAMVREARIPSEPEALVAFFQGSGLVMERIGLEACSLSAWLHESLVAAGLPAVCIETRRAKAAMGAMPNKTDRNDARGLAQIIRTGWYRAVHVKSPACRSWRALLTARRLLLNKMRDLENGLRAVLREAGLKLGTPTRKEFAARVRELTAADPGLSVLAEPLLTIIAGMTRELAQLTKRVLDIVRDEPVCRRLMGVPGVGPLTALTFRATIDQPERFRHSRDVGAHLGLTPKRYQSGETDVQGAISRCGDELARTALYEAAHSLLVRSRRWSALRAWGMQVAKRRGMARARIAVARKLATILHRMWADGTEFRWGKEGTMPAAA

SEQ ID NO: 83623 - protein, 397 aa, unidentified
MYIVGIDIAKRKHEAAVIDGEGTVIIKPFSFTNNCSGYNRLLAMLAKAKLPLDEVSFAMEATGHYWLALFTRLQKEGFRVQVINPVQTNSIRSFYIRQAKTDPRDALLIAEVIRFGHFSESTLHPENIYELRELCRGRHAIVSMQADVKRKVVALLDQVFPEYETAFTNMFSDTSMAILQTCPTPKELSEMPLEELCHLIEVSSRKRFRMAKARELQELARNSFGFAMAGDVFSTMIRLYAKHLDFLKQQVREMDRKIAEIMDTLDTPITTITGIGPTLGAYILSEIGDISRFSSAAKLAAYAGIDPTMRQSGEYNGVRNRMSKRGSPYLRHAIWLAASSAVLHDPALKFYFQKKRDEGKPYMASVGHACRKMVSIIYAVMRDNKAYTPYVPNEISA

SEQ ID NO: 83624 - protein, 373 aa, unidentified
MDQDTKFVGLDVHSASISVAVADPGRGEVRALGTVPNTSDAVVKLIKRLGPASRLSFCYEAGPCGYGLHRRLTRLGAACMVAAPSLIPRKPGERIKTDRRDALNLARLLRRGDLTPVWVPDEAHEALRDLSRARSDARIDLLRHRNQMSKFLLRQSIFPMTRLRPWGKMHRAWLQTLRLPHASHQVVLGDYLETVDHAENRLANLEAELALLAAQSPLAPLIAVLQAFRGIALTTAIILVTELGDLRRFPSPRALMGYTGLVSTEDSSGDRHHRGRITKTGNAYVRHVLVEAAWQYTRPPKVWGALQKRQLGLPPAVLAISWKAQQRLHRRFRRLTHRGKLRHVAVVAIARELAGFIWAAAQAVPMPAQEVVA

SEQ ID NO: 83625 - protein, 511 aa, unidentified
MHKRAEQPAPARGRELVNNCAAGENFVGGRPASARSQSQSPHPKRVIGRPLAEPEALAPTSNRKRPQEGRNISRMDGKAKRRKNLKQDKSSMSDPEQWWQQHRVFGAVDWASEKHSVIVVNQAGKIIEQFEIEHSALGWKKFREKLQAYGSIPFAIETSRGAAVEQLLEAGMIVYPLNPKSAQAYRERKAPSGAKDDWLDAWSFADALRVDGHGWKALRPEQALIKELRLLCRDEVSLIQQRTAFIEQLRHALAEYYPAALEAFEDWTSVSAWMFLERFPTPHELAKAGKRKWQNFLHSRRLWGSNEGTRRMEIFARAIEFAGSLPTVKAKSLLALSLVQMLFAIEKQLAIYRQRIEELFARHPDHELFGSLPGAGPKIAPRLLSEIGDDRQRFDDVQALQCLAGTAPVTKRSGKKRKYCHVHQRWACNKHLRHVLHLLADKSLSRCVWAETYYQFHRQKNQSPASALRRLANRWLKIIYKMWLDRTPYEPELHHHNQLKHGSWILQLKQP

SEQ ID NO: 83626 - protein, 318 aa, unidentified
MKETPIYTGIDVAKGRLDVALRPSGEYVEATNDERGIHSVVRRLRKENVALAVLEATGGLEQPAAAALALAGVPVAIVNPRQVRDVRGLATGKLAKTDRIDAAVLAHFAEAVRPESRPLADEHARELSAVVLRRRQILAMTTAEANRARTAPKAVGKRIEAHLRWLRKELARVDGELERVVKESLVWKERVVLLMSVPGVGPTLSATLLADLPELEHLERRRIAAPLVGVAPLNRDSGTLRGIRTVWGGRSGVRTTLYMVTLCATRHNPAIREFYGRLVASGKPKKVALTARMRNLLTILAAILRNRTPWQPRLLPAS

SEQ ID NO: 83627 - protein, 442 aa, unidentified
MNPIPNDPNPASTLVAAPALPRPEPAFAAFIAIDWADEKHAVALQAAGHTQIERTTLEQKPEALTQWIAGLRQRFAGAKIALILEQKRGALLWALQPHEHLVLYPINPQMSAKFRQAFHPSGAKDDPLDADLQLDILLHHRARLTAWQPDEATTRQLSLLVEGRRRFVADQVRATNRLRDALKSYFPQALALVGEDLSSRMACAFLKKWPRLASVQAVKPAVLRQFYYAHHSRSAELLAERLQIQAHAQPLTTDEAILAAQSLLVQSLAQALATLHPVLARYDQQIAQLFATQADFAIWESFPGAGPALGPRLAVAWGTQRDRFADRQAMSAYSGIAPVKEASGKALWIHMRWACPKFLRQTFHEMAKCSLQRCAWALCYYRMQIERGKGHHAAIRALAFKWQRIMWRCWQDHTPYDDAKYVASLKRSASDLYARLSAAPAR

SEQ ID NO: 83628 - protein, 359 aa, unidentified
MKNTIIGVDLAKDVIQVCIYTNKKVHSNYEMTHKEFRAWLFKTKPTTIVFEACGTSNYWKQKAVEAGHQAKLISAKLVATVRQNQKTDKNDALAIVQASQLPDIQFINGKSVEQQQLQSMLRLRELAIKQKTASSNQIKALLLEFNIRVSPRNGGLKGVVQSTLEDAENGLSVEFRQALDAAWKHYTGLLESIRIYDDCLESSISKHADCKRLLKLEGVGTINAINLYIALACGELGTFTKGKDASACIGLTPLQYSSGGKTTLGSIGRYVKNSILRSQLITGAMAAVSQAVKRTAITKKDAWIQGLVERRGKKCAAVALANKTVRTAYAMLTKGTEYKADLMPVVKKEIFPKLNIECA

SEQ ID NO: 83629 - protein, 423 aa, unidentified
MEVVAARCAGLDVHKATIVACALIAQEGRARPRKEYATFPTTAAGLASLAAWLKGLGVEQVGMEATGVYWRPVYAVLEAQGGFELIVANAQHIKTVPGRKTDIKDAEWLAMLVRHGQMRKSFIPDQPFRDLRDLTRYRRALVETQASERHRLIQVLESADIKLSGLVSDVFGLSGRLMLRALIAGEQDPAVLADLARGQLRKKRDALREALAARLGEHQRRMLAIQLSRVEAAEADIAVLDQEIDQRLEPYAEEMALLITIPGVDRVVAAAVVAELGTDLSSFPSAEHLAAWSGTCPGNRESAGKAKPARARKGNPHLKTALCNAAIAATRKKGSYLRAKYYKLKARIGGGKAALAIAHKLVVVIYHVLSKRVAYRDLGEDYLDQINAKRTAQRYVQKLNALGYGVSLSLLTRPAPAPQAEPL

SEQ ID NO: 83630 - protein, 311 aa, unidentified
MNPAVVYVGVDVSKDGLDVHLPGARPREYPNTAAGHRRLIGWLKRRSYRVQVVCEPSGGYQRGVVTALQGAGIAVCEVNAAKVRFFAQAEGQLAKTDPIDAQLLCRYGERMQPEPTEPLNATRRALQEMVRRRNQLRDSCTAEKNRIASWQDAGVRRSLRRMITLLQKEIRRIETRIEQIVASDPILEDLICRLSRVQGIGRRTATALVATMPELGKLTRNEAAALAGLAPYNHDSGRHQGSRRIRGGRPEVRCAIYMPALVASRYNPVLRPMYLRLLAAGKPTKLALTALMRKLIALCNRIAADPSFCPA

SEQ ID NO: 83631 - protein, 370 aa, unidentified
MAQPTPLFVGLDVHKDSIAVAHAQGQSADPPVFVGAIGPRQADLDKLIRRLEAKTPALVFAYEAGPSGYVLHRYLTGRGFLCQVVAPSLIPKKPGDKVKTDRRDAVALARLLRSGDLTRVYVPTVDDEAMRDLCRARDAARLTLKNAKLRLKAFLLRLGRHYVGRADWNEAHRRYLAKVVCPTPAQQIVFQESVRAVDEQVDRMHRLEAELLERAPAWRLYPVVHALQALRGVQFLVAITVVAELGDLTRFDSPRQLAAFVGLVPSEYSTGLSRRLGAITKTGNGRARRALIEGAWAYRHPAKVSEHIQRRIDTLPKPIQDIGWKAQVRLCKRFRRLTARGKHPNVAVTAIARELIAFMWAIAKEVPITT

SEQ ID NO: 83632 - protein, 413 aa, unidentified
MRVFIGVDPHKLSVTIEVVDDRETVLTTGRFGTDKSGYAAMRRHVAAWPERTWAVEGSNGAGRPLAQRLLADGEHVVDVPAKLAARARLFDTGHNRKTDAHDAHAVAVVAVRTEGLRVLSYDVELEALRMLADRREELTRQRVQTVNRVQRQLSELTPGRAKKDITALQAKGILASVRPRDLAGKTRRRLAVEQLTELVAVEKKIKALTKELNAMVHARGSTLMDLPGVGPVVAARILADVADVARFADRNRFASWTGTAPLDASSGEQIRHRLSRAGNRKMNHMLHIAAATQARLDTEGRVYYRRKLAEGKTRMEAMRCLKRRISDAVYRQLLADAQAAAIATENQQADQSPTEVGTGPGVHCGASQESSAVDLPPHIDTSDQPLPEPATQTLQPTPPPRKTTGKTSLKRAG

SEQ ID NO: 83633 - protein, 303 aa, unidentified
MDFVGVDVSAKRLDVALGDKLLSFPNPEGLPDLIAALPSGAVVGLEATGVYGRPLAFALHRAGFRVYVLNPFAVKSYARSLLLRSKTDRADARLIARYLADRYPDLRPYEPTPEVIYQAGLLVRFARGLVVQRVAVLNRLHAWQYAWPQGLEVVAHVPRILDDLRGNLEALVVDLLRSDPEAWRQFRALQTLPGIGPSSALTILAYSGDLRRFTSARAYAAFTGLAPVVHQSGALPEVGRISRAGPAPLRATFWLASLHAVKVEPYASLYARLLQAGKPPQVARVAVAHRLARAAWAVVVRSV

SEQ ID NO: 83634 - protein, 326 aa, unidentified
MSRIQEKKTITTAASPFIVIGIDVSKDQLDVFVSPAGNHHSFKNNAGGVAELVNFCRDHDADLVVLEATGRYHRMAHETLHDAGVKTAVANPARSRSFARSVGRLAKTDRIDAKVLAEYGERVRPPASTPPSKLQAKIAEITVARRQIVDEMTILKQQQTQALDELVIAQIEARISLCQRHRKDLEQLLAEMIEEDGGLKRRHEILTSIPGIGLTTSATLISELNELGGANAKQIASLSGVAPMNRDSGNFRGKRRIGGGRKPVRDVMYMAAVVAIRWNKDMAAFYQRLKKAGKPFKVAITAVMRKLLILANTLLSENRLWSETQP

SEQ ID NO: 83635 - protein, 343 aa, unidentified
MKRISIIGVDLAKNVFQLHGAAADGTVLFRKKLSRPQFQRYMAEHAQCLVVMEACGGAHHWARELERVGHEVRLIAPRYVKPFIKRQKNDAADAEAIVEAALRPTMRYVEPKTGDQQARSILFRTREQFVKQRTEAVNALRSHLYEFGFIAPEGIGYLPRLGAILEDRNSDLPPLAREICRELLDQIVHLTERINAMKKRIDAIAREGETSRRLQTMPGVGPISALAVETFAPPMEQFKRGRDFAAWLGLVPRQASTGGKQKLGKTSKMGQRDIRRLLITGAMAVIRWALRHGAPRNPWLARLLERKPPMLAASALANKMARGIWAMLMRGEDYRGPEIGSAA

SEQ ID NO: 83636 - protein, 351 aa, unidentified
MTVTIVETRAETRAITGGVDTHADVHVAAALDPIGGLLGVREFPATTAGYARLLDWLAGFGTVALVGIEGTGSYGAGLARHMATAGVRVVEVDRSDRQDRRRQGKSDPLDAVSAARAAQSGRARGAPKGRDGAVEAIRALMVARRSAAGERTRTINQARALVLTGPDDLRARFARHTAAALIAGLTSLRPRPGDVAGHATRVALRELGRRAVFLDGQLERLDELIIPLVSARAPGLLALYGIGPHTAALLLIAAGDHPGRLRSEAAWAHLCGAAPISASSGKVTRYRLNSGGDRQANHALWRIAFTRMGSDPATRAYAERRTAEGKSKAEIIRCLKRYVAREVYPYLRPAG

SEQ ID NO: 83637 - protein, 310 aa, unidentified
MTLSPTWIGIDVSKAWLDIASSGGEGVQRIANTMDAIAAFAATLEREGTLVVLEASGVYDKSLRAGLALAGIGHVRVNPQRARDFARASGRLAKTDALDAAMLAEMGRALRLVADPLPEAGRERLGLLSRRRDQLVAMRIQEKQRRIEMTDPFIGADLDRHLAGLNQAIAAIEVEIQNQIGSDAALAQDQALIRSVPGIGPVTASVLAALMPELGRRSGKQIATLAGLAPLNNDSGRRRGQRSIRGGRRRVRQALYMAAVASLRTQSPLNAFYHRLRQAGKPPKPALVALARKLLVTINAIMKTRTSFAT

SEQ ID NO: 83638 - protein, 404 aa, unidentified
MPTYYVGIDVSKFKHTCCIISEHGEVIKKSFDFSNSKEGFDSLIEIFKSIDQSESLFQIVMEATGHYHECLFRYLVANNYLVQIKNPVVIARFKQSEYLDKAKTDNLDALLIAQYASKHPFSPSMLKSYNIERIRRISRAKYFLYQDKERVINHLHRYLDESFPELIPFLRKRGDIKRYQGRNFFDSKTTLWLLENFPSAKKFSNARSETAEKLRRMSKGSFSLIKFNELRNVAKNSIGVSFQETEEIIIQLVQELRNIQERNDKLDELLTPLIDETSPNLLTVPGIGYRLAGLLISEIGDASQFPSADKMVKFAGLDVRVYQSGTIEKHGAIRKRGSPLLRYALFQAAEKARIHCPEIAEFYSKKKSEGKHSICVLTHTARKILRIVWALLKTGQNYSQFFSD

SEQ ID NO: 83639 - protein, 339 aa, unidentified
MKYTPVGVDIAKHLIQVHFINEHTGEVVDKQLRRKDFLTFFSNRESCLIGMESCGGSQHWARELKKMGHEVRLLQARFVKAFVMGNKNDLMDARAIWMAVQQPGKDIAVKTEEQQSVLVLHRSRRQLVKFRTAQINALHGTLLEFGETIHKGRAAMDRELPAALERMKATLPPYLITVLEDQYNRLNELDSLIDGIEEQLNSVARQSETCKRLMEIPGVGPLIATAAVATMGEAAAFKSGREFAAYVGLVPKQTGSGGKVRLLGISKRGDTYLRTLFIHGARAVSFVAKEPGPWITELKKRRPTGVAVVAMANKLARTVWAIAAHDRKYDKNHVSIRPY

SEQ ID NO: 83640 - protein, 309 aa, unidentified
MDSFYVGIDVAKDRLDVHLRPSAEAFTVGRDATGLDALLERLRPLALTAVAVEATGGFEGVVTATLAAAGLPVVVVNPAQVRAFAQAIGKRAKSDPIDAALIAHFLEATKPAIRPLPDQETIAFADLVARRRQIIQMIVAEKARQKRADRRMAKSILRLLKALQKELSEIDADIDHTVRGSPAWREKEDLLRSVPGVGPTIARTLIAELPELGTLGRRQVSALCGLAPFTRQSGQWRGKSFIGGGRASVRSVLFMGAMVASRRNPVLKAFHQRLIAAGKPKMVALIALARKLLTILNAVLRDKNPWQIA

SEQ ID NO: 83641 - protein, 341 aa, unidentified
MYSIGLDVSKASLSVHVPLNSLDFEIENTLKDLKSLFAKLKKLYKKDIDKIVFVYEPTGSYSSLLTKFCALKNIKSFTINPKQSSNFAKALGYRSKSDKIDAHMLSQAISIAKDREIKVPVINATAEDIKELMSYYMFTVKQRVAVNNHHEALNSKDGNTYALKDLKKRIKELKIKEDEILEKIRSIIQEDDDIAQGYANIITIPGIGKIAGIVLTHLFIRYPDANKKQIVSLTGLDPVIKDSGTSVKSRPRISKSGSKLYRAVLFMATMVSINYNSEMKEFYTRLKENGKHSTVAQIAVMRKLIVIAHSLYKNNTTYKPEIYKKACGVKLEKDTNKELVA

SEQ ID NO: 83642 - protein, 345 aa, unidentified
MEIRNIGIDLGKTVFHFVGVNARGEVVVRKKGSRTQLLRFTSNLPKCLIGMEACGGSHFLGRALREQGHDVRLMPAQYVKPYVKTNKNDYIDAEACAEAVTRPTMRFVPIKTDDQLDLQSLHRVRERWVVRRTAVINQIRGLLLERGITIRKGRHHIEESLPRILEDPDNKLSGALRVLLRQLQLEMQYLHGQVEESDQLIVRIAGELEPCRRLIAIPGIGPITATATIAAIGNGAAFKKGRGFAAWLGVVPGEHSTGGKQKLTGTSRRGNKYLRKLFVQGAHTVLLQKTKQSSGLSTWLVNLTSRKRPQVATVALANKMARMAWALLNKGEAYRPPSVPQVIAA

SEQ ID NO: 83643 - protein, 348 aa, unidentified
MQFYTNLHPFYCGIDLHARMLYVCILDERGEILVHKKIKDSSEELLKLLSPYIGNIVVGAECMHCWYWLSDFCEHHNVDFILGHALYMKAIHGGKTKNDKIDAYKIAKLMRGGNFPLAYVYPKEKRAIRDLLRRRTHAVRHSAELKAFIKNSLSQYNLPVPEKSDLSYTTGRDAMRGYFPNPQVQRSIDMNLRLIEVYDHEVSSIECYVEKLTKHDNGRDYYLLRSLPGVGRVLALTILYEIGSIHRFDSVQKFASYSRLVKCKAESAGKAYGTQGTKIGNAHLKWAFSEAAVLFLKGNPSAQAYLLKLQKRMSKAKALSALAHKLGRCMYFMLKNQTVFDSERFLAG

SEQ ID NO: 83644 - protein, 330 aa, unidentified
MKNLFCGIDISKDSLDYATCRGEDKTIVSSSKTKNNKKGIMGLIKLLPKESDEMHVWVCFEHTGNYGLLLASLLAKNKVAFSMVPSLDIIKSSGLTRGKTDAVDAKRIALYIATNNYKLKPTNLPSDEILKMKTLLTIRQQYVKIRTQLKNAVKSLAITDKIIFLKPEIRQYQKEIIRYNDLIKKIETKIKDIIKSNDSLDKNCNKITDILGIGLITASLFLVSTNNFTAFENPRKFNCYCGLAPFEYSSGTSVKGRTKTSHYRNKELKSALFKAANTAITHDMQMKTYYNRKIGEGKHKMTVINAVACKLVYRVFAVVKREKPFVRMAM

SEQ ID NO: 83645 - protein, 368 aa, unidentified
MRNIGGIEVRGQEGVPAPKRPPEGTAVWMAIDISRSKAVYCLRWNGSEQRRLSTPLGIEHVRAVVEHYRGSRLHVAYEACGFGYELAWWLQEHGVAVSVIAPSRVERVPGLQVKTDRVDVGKLARKLEKGDLKAIYIPSRTLHEQRQIGRTYAQSLKERKRAQVRMRSLMQEQGRLGPPPAAGWKKYSAWLAAQHLAEPLRLCVQAHQQLRAVADQQAQRMKAQLYKLACSAEYRPLTQALSAQSGVGWQSAIRLILELGDIDRFRTSDALPHYLGLTPSQYSSGELDHRGHTLKCGPGFLRALLVQCAWSAVRQGCDSELQERFATLAPRIGRKRALIAVARKLAIKVRGRWRTHLSASEPTPALAV

SEQ ID NO: 83646 - protein, 427 aa, unidentified
MSYRIAGIDVHKRMIVVVVADVDVAGDYEFERRQYGSTPAQLRLLAAWLVEQGVEEVVMESTAQYWKPVWASLERYWKPICEKWEGTSPMSGSLHLAQAQSNRGARGRKNDFADAERLVRRLVAEELTLSFVPDAEQRLWRTVMRTRYQLRCNQVQLQNRLEALLEEAHLKLSSLVSDLLGLSGRRMLQAMAEGETDPAVVAARADCRLRATQEQLCDALGACRELHPVYRRLLKAALEEWERIEAQIAQLGQEMASLIGPQQEQVQRLAEVPGLGVDSGQQILAEVGASAATFPSDRALASWVGACPGEEQTAGVNRNRRSPKGNRHLRRILNQAAHAAVKLKGSIFALLYRRYVVRLGHNQTIAVIAHRLCRLIWKILHEGVRYDERGPAVSQRAQQRRTARMIRQLRSLGYSVELLHAAAGVPA

SEQ ID NO: 83647 - protein, 345 aa, unidentified
MNLTPVVIDIAKTVFQVHYVDHDTGEVVNKPIRRAVLLEHFANWPPCLIGMEACGGAHHWARKLVQMGHQVKLMPGEFVKAFNIRNKNDAADARAIWLAVQQPGKAVAVKTEMQQAMLALHRAREQLVKFRTMQINGLRGLLAEYGEVSAKGRASLDKAIPEILARVAERLPAVLIDTLREQWAGLTKLDEQIAAIERRMREWKKDDHAVKAISEIPGVGLLTATAAVAMIGDAKVFRSGREFAAWAGLVPRQTGSGGKVNLHGISKRGDTYLRTLLIHGARSVLIHANDPGPWVEQLQKRRHPNVVIVALANKIARTIWAVLAHDRPYQKGYVSVNPAGMANIS

SEQ ID NO: 83648 - protein, 383 aa, unidentified
MKKTQETLRIKDSIKAVILYIAFELSSSKWKLAFSDGSKIRYKTITAGNLSQLQVEIDLAKGKFKMIEDVRVVSCYEAGRDGFWIHRYLEGQGIENLVVDSASLEVNRRKRRAKTDRIDVAKLMRMLLRYWGGEKKVWSVVRVPSEQDEDARHLHRGLESLKKERTKHRNRIKGLLIQQGIKVSNPSQKKFLEVLEKLRTWNGQAVLPGLKSQVVMEYERLQMVEGQIKALEKEKTERLKNPDTASLKKVAKLALLYGVGSVSSWTFVMEFFGWRQFKNRREVGALAGLTPTPYDSGKSLREQGISKAGNQHIRALAVEIAWAWLRFQPQSNLSQWYMKRYANGGKRMRRIGIVAMARKLLIDLWRYLEYDKLPEGARLKSLA

SEQ ID NO: 83649 - protein, 471 aa, unidentified
MGYRITKRQDKKSPEHGQRYTMGDLQTMPLLYPDLAGIDIGSREHYVSVAADRSVCPVRTFGCTTPDLQDMVIWLKMCGITHVVMESTGVYWVPVATILEAAGLTVALVDAREAHRLSARKTDVQDCQWIRQLYACGLLRKAFRPATKIQPLRAYWRQRQELVSLCATAIHHMHKALELMNVQLHKAVSDVAGHTGMLIIRAIVAGERNPQAFVNLIHPNCKSSPQQFVKAMTGHYDREQVLALRQALQRHDIYQEQMAELDKELECSLQQAASAHAPKSDTAAAASTGKARRRKNQSHFQLADELKRMVGVDLTRIEGIDALTAFTIITEQGTDMSAFPSEKHFASHLGLCPNNQVTGGRVRKKRTRKVQSRAARALRLAAMSLARSKTALGAFYRRMRARQGAAKAIVATAHKLAKYIYRMLKHGEQYVQRGEDAYEQQYRERLFKNLQRQARILGFQLIEQTTGVLLS

SEQ ID NO: 83650 - protein, 414 aa, unidentified
MDVVVERCAGLDVHRDSVVATVRVPGKGKSRRRRAQQTRSFGTTIRQLEQLANWLQGFGVTLVGMEATGIYWKPVFWVLERRFECWLLNAQHLHNVPGRKSDLIDSAWCCQLLEHGLVRPSFVPPPEIRRLRDLTRLRSTQMEERSRAIQRLEKVLQDAGIKLSSVASKTYSVSARAMLEALLGGVSDPAILAELAKGKLRAKIPQLQEALANRFELAHHGVLVAQPLAHIDALDETVANLDGRIIEATDPHAELITLLSTIPGVGRYIAEVLIAECGVDMTVFPNAEHLVSWAGICPGTNQSGGKRRSGKTRHGDRWLRTALSEAARAAARTKNTYLASHYWQIRGRRGEKKAIGATRHDILIAYYHITRDQVPFRELGPDWLARRHSVEHRTHRLVKQLEALGHAVTLEAAA

SEQ ID NO: 83651 - protein, 370 aa, unidentified
MLDTTTFVGLDVHARSIKAVSLDVMTGEVRCATFGYDAGAVAEWVRSVDPGARCVYESGVTGFDLQKRLSGLGVDCVVGAVSKMIKPSADRRRKNDRNDAEFLARMLSVGNVVEVWVPDDECEAARDLTRALEDARDDLSRSKQRLSKFLLRHGLVFDERTPTGRRKGNWTRAHWSWIESIRFAEGADNDALAYYVDAVRRAAEEKARLEGLVEAEARKPRWRKRVDSLRCLKGVDTASAADLVFEAGEFSRFRNARSFAAWVGLTPSEHSSGESDRRGAITKANNKHLRKTLVEAAWHYLTCSGRPKDLAKGQAPDRGARRHAAKGVRRLVERREALLARGVHGNKANVATARELACWVWAVGLMAEKA

SEQ ID NO: 83652 - protein, 304 aa, unidentified
MHLLELGMRVDNDASGWEPLIAKLKESDVDLVVVEASGGYERGLVTALHRARIDVARVNPRQAREFARSMGVLAKTDRVDARCLRDFADVLARHKDRHKYITVPADPERELLAALMTRRRQLVDMRVAEANRLEGATARTVRSIRSVIKTLDKQLHDIDGDIDQHLERHFKPQKELLDSVRGVGPVTILTLTSALPELGRLGRRQIAKLVGVAPLADDSGRRKGVRRTAGGRSEVRAVVYMATLTAIRHNPVIQVFYSRLVAAGKPKKVAIVACMRKLLTILNAIVRDQAPWRTDAGITSSRST

SEQ ID NO: 83653 - protein, 405 aa, unidentified
MICVGIDVSKDKSTVCILKPGGEVLAPPFEIIHSIESILALVRRIQSYDEDTRVVLEATGHYHLPVVSLLVEKGIYVCPVNALQIKIFRSQDLRKVKTDKFDSINIAKYGLSHWEELKPVLPPETVYQELRLLARQYYQMTALITKERINISNLLDQAMPGLNGLFSDNYNSKLTNIAARYWHFGRILEMGEKRFSADFCKWAKKQGYRQYERSAKDIFALAQNGIPVLPFTLSTKISVTEAIRLLHQLEATRNTILAQMLELAKTLPEFSVIREMPGVGDTLAVRFIAEIGDVRRFHSKRAVTAYAGIDTPPYESGCFVAVNRHITKRGNKYLRKTGFEIMQSKLKHKPINDEVYSYIKKKQSEGKSWKEANIAGLNKFLRIYYGKVNSLYEEINNELIFCSAI

SEQ ID NO: 83654 - protein, 357 aa, unidentified
MLSSNVKYIGLDVHKEAIAIAVVNGAGKLVMESILETKSSTVLDFLHGLRGELHVTLEERTWAAWLYDVLKPHVREIVVCNPRRNALLKEGSKSDKIDARKLAELLRAGLLRAVYHGENGLQTLRELARCYLTISKDLKRVKNRLKALYHGGGICCAGKQVYTARHREQWLSKIAQVGVHRRAEMFYQQLDGLLVLRNTVRGELLAESRKHQAVKILRQVPSIGPLRAALLLALMQTPHRFRSKRQLWTYSGLAVVTHDSAQHRYVDGQLQRSKKPQQIRGLNQNHNHAMKEIFKSTALNASRCAGPLQDFYARLLARGMTPDMARLTLARKIAAITLALWKKGGSFDAEHLKSQAA

SEQ ID NO: 83655 - protein, 351 aa, unidentified
MNTQQTAYPKLYIGIDIHKRSWKVHCATDLFAGKSFSMSPDPKQLHSYVSKHFKEYEVTVAYEAGCCGYHAHRCFESYGWRSLVVNPADIHRKGKEKHTKTDKIDAQLIARELKDNRLQSIIVPDRKREELRSLFRRRNDLVKDFRRVKSYIKMQLLYFGIREPEEFDNDHWSHKYRNWLDDIMFEYPTAKATLESRMRFFRFVDQELRDVSRQLRRYCKVNYKKDYLLLRSIPGIGGIVTCGILCELGDLRRFNNIKHLAGYVGLAPSMYQSGNSQRTMGMTPRANRLLRSYFVEASWQAIRADPVMQAYYRKHQGKNVKSIIVKVARKLLSRTLAVIKTEVPYTIGVIE

SEQ ID NO: 83656 - protein, 370 aa, unidentified
MKFEVTKNQLTLKSRTMSKVKELNFDGKTIYCGLDVHKTNWKVNIGMDKMELGGFSQNPDPEELSRHLKKNYPGAEVKVVYEAGFCGFGIQRSLKALGIDCIVVNAADVPSSDKERKRKNDKRDARKLRRELSEGELKHGIYVPDIEMEQARTLVRERHRLVQDQSRCKSRIWHMLMFSGIQLGLEQKRWSAKLVKELETLDCPTSLKMALNLALEEYKQIRSIIKQATLAIRKMALEPPFAALQPYLQSIDGIGLITGMVIQTEIQDIKRFRTLDSLCDYAGYVPDISSTNDKDVIKGITHRRNEFLRETIIESSWILIRKDPAMLMKYQEYAKRMNSNKAIIRIGKHLLSRIRYVWNNKTQYVKGVVG

SEQ ID NO: 83657 - protein, 368 aa, unidentified
MEFMGIDLHTDCFNHCTFNEGTKKKVGTYSIDKESLEKFYKILTPETYVIVESTTNAFKFTELIQNKVKDVFISNTYSMKLISFTNKKTDKVDAEKLARVLKMQIMSGEEQIKRVTLPPPIIQDLRALFSTYKLLGKQRTQLKNRIHSLLKQNLFPFNKVMIFNNKMRDKILNISDSRELKFQLMILFKELDNLDETIILLKKEIEIAGSPYMKEIDILTSMQGISVFTAIAIISDIIDVKRFSNSKNFASYLRSAPKVESSNEKTLIKSTNKQGRKLTIALLYQSLNHFINSNRAIEHWYDKLSEYKKVGKVRMGTCRRFITVIYQLLKKEEYYRFMDTKNHDRKMHDYEVLLRKNRINISKLKEVS

SEQ ID NO: 83658 - protein, 341 aa, unidentified
MKQYVGLDVSQKETAVCVVDETGRLIFEGRAKSDPGALAALLAKKAPDAERVGFETGAMSSWLWHELKRIGVPVVCIDARHAHAVLSVRMNKSDENDARGLAELVRIGWYREVAVKSEASQQVRSLLITRTRLVTMRRDLENQVRSMLKECGLIFPRSIAGQFQRCVTELTGDGHVLWPVLLPLLSVHGHVCRELDGLDRQIRQMARADETTKRLMTVPGIGVVTALTFHHTIDDPSRFRSATSVGAYLGLTPRRKQSGETDTVGQVSRWGDRLLRTYLFEAASVLLHRTKRWCALKAWGLRLAKRNGMKKAQVAVARKLAIILHCIWIDGTSFQWSKEPA

SEQ ID NO: 83659 - protein, 378 aa, unidentified
MKAARFTADEIERVAYLTSKGYLPVAVDVASRVFQVCYYDLGAKHIRNYQLSRVKFFEFIDDTQTPRKLIGIEACGSCNYLCRYIEEHNHKCHILPAQKVKAFLHLDKTDRIDALGILKALITPSMQHIPARSQENQYLLNLITVREQLNKQFVQTVNAAHAFLYESGVVAGTVSVKSANKVTEALKALGNTETEKDHSEDDCSYSHLNCISESLLSNIESLQTKIKEINTHLLSYASNNEICSNLQTVPGIGKLSAVALYSAMGDPERFSSSRAFAAFIGVAPVTTGTGGKTTVLGIRKSGIQSIKKMLYMCAMVYLSQAMKNGTESSWLKLKLNQNRSKKIIICAIMNRLARIAYAIAKSGQPFDENKCNMIKKLR

SEQ ID NO: 83660 - protein, 338 aa, unidentified
MTILYVGIDLAKTIFAVHAINEAGKPELVRPNVARAKLLELIVSLPPCVIGMEACSGAHHWARQFMAHGHTVRLMAPKFVGPYRLSGKRGKNDAADAAAICEAAQRPNMRFVPIKSLEQQSQLSVHRVRQGFIEQRTATINRIRGLLSEFGIVLPLKASTVRSQAMACLEDLPGWSNTVIGDLLSELTRLDERIALYDQHIAQMAREDSRARQLMRLHGVGQTTATALLAMIGNGHEFKCGRQFAAWLGLVPSQYSSGGKARLGHITKAGDPYMRSLLVLGARSVLNSAKNKTDAISRWAAALAERRGYWRAIVAIAAKNARMAWAMLARGEQFIVSA

SEQ ID NO: 83661 - protein, 425 aa, unidentified
MNYKQNEKINQVKESTLVVGIDIGSTKQYARAFDWRGIELGKVFTFSNSREGFEAFKAWMRHLQDKYRKSDVIVGIEPTGHYWFGLGAYLEDEGILLVMVNPYAVKQTKELDDNSQSKNDRKDPKVIAKLVTEGRYSAPYTPDGVYADLRIMVTNRKRLIREMTQIKNRFARWFAIYFPEYTDVFGDYEAQSSMLLLKKVCTPEAIVELGAEKINQIWRDAKLRAVGMKRATTLCETAKRSIGLKKGSSAAQYEMKLLLEDYEYKKAQLDAVMEEIEKLCRKIPESEQMLAIKGIGVITVAGFLAEVGDVRRFESPRQIQKLAGLSLRENSSGKHKGQTTISKRGRSNLRAVLFNAAIPLIATNREFKSLHEYYTTRANNPLKKKQSVIAISCKLIRVFYAILANGVTYDPQKMLSDIHRQPQAA

SEQ ID NO: 83662 - protein, 339 aa, unidentified
MGEYIGLDVSLKETAISIRRDGKRVWRGNCPSDPGLLAEVIRRRAPSVERVVFETGPLSVWFYHSLSAEGLPAICIDARHAKAALDMAANKTDANDADGLAHLAEVGFFREVRVKGYDSMLTRTLVAARNRLVRITTELSNQIRGLMKTFGLIVPPSKGGKYEAHVRRLLVGQDALAPIVLPVLQAWRSVRVDAAELGRQLIAGARQSQACRQLMSIPGVGAITASAFTTAIEDPANFRKSRSVGAWLGLTTRRYQSGEVDYDGHISRRGDAHLRGLLYEAATVILTRTHAGSGLRAWGLKLRERVGFKRAAVAVARKLAVIMHAMLKSGQDFDRAVGA

SEQ ID NO: 83663 - protein, 388 aa, unidentified
MTQVDDLSRSLIAFEQNSTMVVVLEMSQSSWLAAGVVPGIERRPLKKLDPDPTALLRLVEGWRDQAMKAGRMITRIVLAFEAGRDGFWLARWVRARSIEPFVIHSTSVAVSREHRRAKTDRLDTEMLIRVFLGWLRGEPRHCKMVAIPTLEEEDARRPNRERESLIGERTRIINRMKAALIRLGIRGFKPELLKAPQRLEAQYTAEGVPIPPNMLDELRRDMARLAWVREQINAIEQARLERLEQAPSSGPHAMVRMLASIIGVGVETADMLVQEILSRNLRDRRAVARYAGLTGSPDESGVKRREKGLAKAGNARVRRGLIQLAWRFLRFQKESALGQWYRARTEGAAGKRKTTMIVALARKLLIALWRMVTTGEIPAGVALRTAAA

SEQ ID NO: 83664 - protein, 411 aa, unidentified
MTKIIVAQDAPVLVAIDIAKARHEVLIAIPDQKRRRRLTVLNEFADFNRLATALKGYGRPVRVAFEATGNYHRALAYHLATSGFEVKLVSSVALARTREALNNSWAKNDPKDAQVILHMMEIGNEQYYHDPLVCGTNDIQELSKTHDIVSKSKTELWHRVLTHYLPLYFPEAGRFYRSSRSDWFFAFLERYPSPHLIAAMGKAAFTTDAWDVIGRKVAKERLLADIYETAKSSVGLPVAPDSDAIRMFRLVLGEGRSLIAQRNQIEDRAVALLKDLPDYQLLTSIPGIGPINALTILAEAGDLRRFGHHRQFLKFCGMDLATIQSGTFRGQTKLSKYGNARLRRTLWMAGQVAILQRTNSFRDKFERYIAKDRHNSHLRRKAYSAIAATLSGHCCAIPCRAVNGPHSSRDH

SEQ ID NO: 83665 - protein, 479 aa, unidentified
MHPGREHQGRPLPPMREKLHSSLVLLLGRPVDSRLGFEPESVCITHCPKIHAPTSNQGECSMSEEVNARPSRRYIALDIHKYYCVVAGVNRDGQVVLQPVRVEHADLEGWLKKNLQKTDAVVIESTTNAWHVYDLLEPLAERVVVANPIKVKQIATARVKTDIRDTLILARLLAANLVPDVWVPPVHVRQMRQLLSQRRQLVETHTQILNRMHSVAHRHHLKHERGKRFNEQNTGWQKDPSLSKMEQFQLSLEMENRKYLEKQIERISLEVGKICHQKPWSSGMGYIMSLPGFGMITAMTVLAAIGEIERFETPKQLASYSGLTPGLQQSGTKNRGKGITKEGRRELRWALVEAALQAVKSDPLMKRRFNELQKRMHRNQAIVSIAHHLLELIWYVLTRRQPYRGFTQERIAYKYLSWSWHVKEEARNGLTHQQFARYYLMKIGLGKELTRIALDPKHPYRLASEAEVLALCPELRQTE

SEQ ID NO: 83666 - protein, 459 aa, unidentified
MQPFYMGIDVSKGYADFMIIDRQKNSVIKAFQLDDTFDGHRCLYKTLQRFFAHHPDSTMFVGMESTGGYENNWYQSLTRFQGSLNIQTARLNPFGVMHNSKADLKKNTTDRISAQNIAEYLVAHPEKVAYQKEDQLSGLRRQWGFIQMLTKQCGQFLNQLNSLMYTACPELLHYCQTGVPDWMLKLLVQYPGSAKLKRARIKSVAKIPYVTQKRAQQLITEAKSTVASATDPAIQQLIVATARQILHMRKTITDQTKQLVDQCNLPEVELIKSFPGINNASAVGLLIEIQTVKRFANVKKLASFFGIHPVYKTSGDGIGGIKMSKQGRKAPRQILYMIALSAIQHNPLVRQVYEKHREQGTHKMAALGICMHKILRIVYGMLKHNKPFDPQIDVANQQRCGRIENEECEKATDRRFQTYDTNAPISRRQRKKRLERERPHSVDDAKFGVTAPVPLTNIS

SEQ ID NO: 83667 - protein, 367 aa, unidentified
MKKISTVATKQSRNISRQQLTIGLDLGDRNSWYCVVDEAGQIQLEQRVRTNAKALCEVFGAMPRSRIALEIGTHSPWISRLLHELGHEVIVANARKVRLIGESRKKDDRLDAQTLARLARIDPELLYPVKHRSAQAQADLMMIRARAGLVRARTGLVNTARGLAKSYGERLRGCNVRNMNPEKAEGLSPELQAALEPLLNAIESLSERIVEYNERIENLAQQSYPQVALLKQIKGVGTLIALTFVLTLEDPHRFRKSRDVGCYLGLQPGRRNSGQSEPQMHISKEGDPYLRTLLVQGAQHILGPFGIDCDLRRWGLKLAERGGRNGKKRALVATARKLAVLLHHLWVSGEVYEPLHNSRRTTVAAAA

SEQ ID NO: 83668 - protein, 364 aa, unidentified
MNIKKKGDLKMNVIKNDSNNNREYLYDNYLGLDWSQVNCVLARMGSNSLSVKIEEYTSDPSKNLKRLKKQLSEIRGNKILTIEETTTTHWLYVELKEYVDKILICDPYRNSLLSEGAKTDRIDARKLCLLLRSGMLKEVYHSLEDDYKIRKLVSVYEDIVKSGVRVLNQKSALYRAVGLRVKKDKLPQDEIYELVNRGQEKSIELYREQKKEYEKAFKRLRRSNKTINNLCSISGIAEIGAVKIYSRVIDAGRFPSKYNYWSYCGLVTHEKESGNRSYGKKQGRFSRTLKSVYKTAAWAAVGGKNDIREYYEYLLKEEGLAERKAINQIARYIAKSTLAIIKNNERYKPYSWRKTKTDKYSLRL

SEQ ID NO: 83669 - protein, 470 aa, unidentified
MVARFSKDGSVRPPRRKAPSAQPTPVRGQSLQVIQPDAAGIDVGSQVHYVAVPEHRAEESVRHFGCYTKDLEALADWLLECRVKTVAMEATGDYWIPLFQVLERRGLEVQLVDARQLAHVPGKETDVDDCRWIQRLHSYGLLRGCFRPPDEIAVLRSYWRQRATLVEEGAQAIHWMHKALEQMNVQLHKAVSDVTGVTGMAILRAMVAGERDPQVLARHRESGVKASAEELAAALRGDWREEHLFALEQALARYDFTQQQMAECDTHIQQRLQSLPSQADPAQYDLPARRARRKNQVHFDLRAELVRITGVDLCRIDGIDALTAYTVITESGVDLASSFGVEKRYASWLGLSPHNKVTGGKVRSRHTRKVRNRAATALRVAAQSLERSKTALGAFYRRMKARHGAPKAVTAAAHKLACLIFRMLAFGMEYVDQGQQAYEEKQRQRHLRSLHRQAASLGYALVNTATGVVS

SEQ ID NO: 83670 - protein, 466 aa, unidentified
MADKMAGIDVHKKVLMVVVMDARTPESKPERRRFATMPGELRRLSTWLQEQGVEEAVMESTAQYWRSVWLELEPHMCLHLAQAFSNRAPRGRKHDFKDAERLVRRLIAKELILSFVPDGEQRIWRNLTRMKLQLTRDRVRIQSQIECLLEEMRIKLSIVVSDLLGSSGLRILHALAEGETDAKNLALLGDDRLKCTEEQLVEALTGRSHPMHGQMLGLQLERLRLLDEQIAKLNSLIAQAMKPHQDAVIRLAEVPGLGIDSAQQVIAEVGVTASTFSSAAEFTSWVGTCPGKEESAEENSSSRSAKGNKYIRRVLNQAAHAAARSKGTHFQAVFRRLLPRLVISPLSGASHIAYAAWSGRFFIRESATSSKASNPNQSSSSILPDTSRNNFVNLATTSRSLLQTELQHETPGSNSRGGDFRRSCRPSGSRDCDSATAGLWIVPLRVQTVHSVGTRRSRPLTPTYRP

SEQ ID NO: 83671 - protein, 449 aa, unidentified
MPKKRAKSVNLPIMEPNAAGVDIGTTQIFVAAPPERDPDPGRCFQTFTVDLEKLADWLQQCQIQTVAMESTGVYWIPLFQILEKRKIEVRLVNAHHVKNVPGKKTDVEDCQWIQHLHACGLLRGSFRPADEICAIRSLWRHRDNLIELATIHLQHMQKALDQMNVQLHHVISDLAGATGLAIVDAILAGERDPAQLARLRDRRIRASEVTIMKSLVGDYREEHVFTLRQSLESYRHYQDQIQKVDARVKQMIQTVPSKVAEGEKPPKERNPRKTPWRNEPPQLRDDLYRTFGVDLTQIPGINTLTAQMIFTEIGPDFSRFPTAAAFCSWLRLCPDPKISGGQVLSSRTRPTKNRAALALRMSAQGLHRSQSYLGDYFRRMRARMGTPKAMTAAAHKLARIVHYMVTTQREYDATVFQDQERRTQDRKRTKLYAQGKEFGLQLVPAEAVP

SEQ ID NO: 83672 - protein, 359 aa, unidentified
MQTQSNKIDFTGQHIYAGIDVHLKSWKVTIMTERLPFKTFSQDPKPELLYQYLNRNFPNGTYHSAYEAGFCGYWIHNQLTAFGIHSIVVNPADIPTTDKEKVQKADKRDSQKIAKALRNGDLIGIYVPSSKTLEDRCLIRTRATIVQDMTRNKNRIKSFLQFHGIEMPDNFKELANHWTKRFMAWLKSLEMAEPSAKKSIDLFINEAEHLRATILEATKAIRELSEREPYAHQVCLLRGISGIGPLTAMIILTELETINRFGNFDKLCSFIGLIPSTHSSGEKETVGEITHRGNSFLRGALVESAWIAARMDPALNISYHNYCKRMEPNKAIIRIARKLLNRIRFVLKNNQPYVCAVVK

SEQ ID NO: 83673 - protein, 407 aa, unidentified
MFCGIDWASERHAVCVLDDAGHQTTAFAIAHTSDGFDQLIARLRRCGDPAGLPVAIERPDGRLVDRLLEAGHPVVAVQPNAIKAWRDAEVPSGAKHDPGDAALIADYLRLRAPRLRVLEPFSAQTRALRAVVHTRDDLVDQRVAATNQLAACLDGFWPGAKQVFADLASPIALDFLARYPTPKSAARLGEARMAAFLIKHGYSGRRPPAELLARLRTAPAGLCGTVEVEARRDAVLAMVRVLRALLAAIKDLDRAVVAHLGEHPDAEIFTSLPRSGRINAAQVLAEWGDCRPAYDSPDAVTCLAGATPVTKQSGKHTSVRFRWACNKRFRQAITTFADNSRHASPWAAEVYATALARGCDHPHAIRILARAWIRVIWRCWMDQVPYDPAKHGAARKLAEMATSARQG

SEQ ID NO: 83674 - protein, 359 aa, unidentified
MRMASCSMAQPDHGVTVGVDTHGDGHVAAAFTSDLGRPLGHLTIATTPAGYRRLLEWAHRLGSDPRFGVEGTGSYGAGLARFLVGAGCTVIEVSRPNRQTRYARGKSDPVDAEAAARAVLSGEATGLAKVDTDHIGMIRSLRVARRSAMKMRTQSFQQMKALIVTAPAELREQLRSLSRDRLVDTAACLRPGPVTSVAAAVKLTLKCLAQRHQMLTTEIAMLDRDLDRLVLTAAPALCALKGVGTDVAGAVLVAVGDNPERLRSEGAFANLCGVAPLPASSGKTTGRHRLNHGGNRHANCALWRVVIVRLATHQPTKNYMARRTQEGMSKAEIIRCLKRYVAREIYRELTPSAELVAAA

SEQ ID NO: 83675 - protein, 336 aa, unidentified
MEQCMLVGCDLHDRSMLLKMAVGREPSVKRSWSNDPAGRLAMIADLKRRAAGSGGGRIVFAYEASGLGFCLYDELTAAGIECHVLAPTLIERSVKHRHRKTDERDAERILGLLRAWLLAGNALPAVWIPGRPTRDDRELVRLRMGLADKRTRGKAQIRCLLKRNNAARAPMNPWTEEYYIWLRHQAQGVLPCGAGLALSSLLRQLEYLDREIEVVSGQVEDLSRAPRYARRVAALVGLKGVGTLTAMVFLTEIGDPRRFTNRQQVGSFLGLTPKSQETGEAADRKGHITREGPARLRKVLCQAVWSRVRADEQAQAKYRRIAEKNPKHKKKGIVAI

SEQ ID NO: 83676 - protein, 380 aa, unidentified
MTQHSHVTTSNGLDYDRTLILAVEVSGRSWVVAAQVPGLRQKSAKQQLAPRADALMAAVEGYKRRAAAAGLAVERVIVAYESGGSGFWLARWLQQRGVEVYVMQPSSVPVDRRMRRAKSDRIDADMLLRTLLAWLRGEPRVCSMVPVPDEAVEDARRPIREREELIRARVALVNRIEAVLTVLGAGDYNPLRRDCRERLGQLRTALDQPLPPHARAQIERLLDRLDLIRQQVADLEAQRDQAVEGEAAGRTEQMIQRLARLRGIGVQTATVLVHEAFVRRFRNARALGSYAGLTGTPYSSGGTQREQGISKDGNRRLRATLVELAWMWLRYQPGCALSRWFHDRLGGSRGRLRKVMIVALARKLLITWWTMLLKPPRISC

SEQ ID NO: 83677 - protein, 525 aa, unidentified
MVTKSKKQKQSSKSKPGKRYVGKPGGVIQQRVQQVGPEKFGIVAVDCAKKRSRWFLCDYYGRVIIEPTTVEHSAGSLKTMTQQIQQTCQAEGITDTIAAVEMTGVYHRPVQAALRKAGFDTRTVHPFASSHYRKPLHPDLKTDDNDLEAIFHAAINGYGLALLEVDPVYRSLQRLARHRRNLVKQKARLQVQIRALMHQSMPGYADLFDDDKLFNKSIAMPIAKHFSSAESIKRAASDGIAKYLRSQKIRFQIRTIDRVTAWASIAADPDPLAPLLTDQWKQLAQLHALMKTQVEQTERETASFFVKTPYVLLLSVTGINVVSAGELAGEAGPIEHYASATALNGRAGLYPSRYQSDEVDRNSGMAKSCNRRLRAACILVAKNLIKCHSYYRGLAALWKTRKIATADQQCRIANRSNRMVFQVVSGRQLWRGKGIDREYLLLKLREFHRAHHSTLEQTVRDMDEAFAWLPKSAYAAEARPLEELAKKKGRGAKSIGDLLLPLLIRLGVGGSSGVESNSSEARSPH

SEQ ID NO: 83678 - protein, 398 aa, unidentified
MKGQDIMIYVGIDVASQKHDCFLLKDTGEVFSKTSFTIKNDFEGYKKLHNSILQFVESTKDSNVRIGLESTGHYSKNILLYLIKQGYQTTLINPILTNMDRKASTVRKTKTDKIDAEAICKFLDKNRFDFKPYTLLSYHIDALKSLTRQRFSLVKQMTQQKLIFQRLVNVIFPELLSHFSNDYGESVLNILYSYPTPKKLAKAHKESITKLLHSRCKITSSEILELAKNSIGQSEEYLGFELKHTIDMILFYQSQIEIYNKQIEIELNETEYGKIITSIPRVGIITGAMIISEIGDINNFTTSDQLLAYAGLDPSVYESGKFESSHNKPSKRGSKYLRWAINQASSVIWQHDNTFKDYYLKKIKESKHHYVAIGHIDKKLIRVIFSLLKNKSMFIPQK

SEQ ID NO: 83679 - protein, 311 aa, unidentified
MQDTIGIDVSKGTLDLHRRADGANVQLGNDTPGFKRLLKWTGPSAAALIVFEATGAYHRSLEKFLNLHRLPYVKVNPKQARRFAQAVGKLAKTDRVDAEMLARMGSALDLQAQEQPHESLHDLKELLTARRALIKDQTAAKSRLATATVPLLRRQIKRRLAQIARDIAQLDIGMREQADKDEAIAERMDILASIPGVSRLTAITMLVDMPELGTLEAKQVAALAGLAPITQQSGKWQGTARIQGGRPWIRRALYMPALVAVRFNPDLKAKYTQFIDAGKPPKLALTAIMRKLLVMANTLLRDHRMWSEVRP

SEQ ID NO: 83680 - protein, 315 aa, unidentified
MTQSMPQTLGVDISKESLDVHLYPDGRADRFANDRKGFSALIKWLSGYAIARIVYEPTGAYHCGFERRFLEAGFPLAKVNPRHARRFAEAVGTQAKTDAVDAGLLARFGALIEPRLLTASSSAAPIMKDLLVARRALVKDRTAARNRSLQRHLALLKAQAAERLNQIERQIQAIDAALREQLENDAALKARFNILMSIPGLGEATAFILLTDMPELGAIENTCAASLAGLAPMARDSGQWRGKRFIRGGRAEVRHALFMPALVAVRFNPDLRRVFQALTKAGKPPKVAIVAVMRKLVILANALLRKSSPWMPNAA

SEQ ID NO: 83681 - protein, 343 aa, unidentified
MSIATIGIDIGKSKFHVCALDERGHVQHKRAYSRSGLIRFLANTPAARVATEACAGAHFIGRKAEAFGHEARLLPAQYVKAYVKSQKNDFADAEAIAEAATRPTMRSVPVKPADRQALQLLHRQRSGWIAERTALANRIRAMLLEFGVTIPKNLHQLRRHLPWVLEDAENGLPDRLRQLLCDLWEDLMRLDARLKAINAELDTYARTDPQTQLLLTIPGIGPIVATALISGIGDASAFRKGRDLAAWLGLVPRQYSTGGQTRLLGIGKRGNRHLRMLLIHGARAVLRVVGKRDEHDGLRRWVERVTARKHPNVVVVALANKLARVVHGVLRHKAPFEAGLIGA

SEQ ID NO: 83682 - protein, 344 aa, unidentified
METMYYIGLDVHKRTISYCVKDGSGTIHAEGTIAATRFDLDRWMKTLPQPWTAAMEATVFTGWIYDHLQPHATALKVAHPLMLRAIAAAKKKNDRIDANKICDCLRCDFLPECYMASTAIRERRRTLRYRNLLVRQMVQVKNKISGLLMEAGVNYNKQRLHKAGYFRELLATNPDIDEGLCSLLRLCRETVVRLGKTESALVRSLERDSLLMERVERLMTIPAVGPITALTWALEVGDVKRFPSIKKAISYCGLCGAEKSSANTVQRTPLSKQRNKHLQTTLIEAAKMAPRNNPELAMLYDQEKQKGNANRATLAVARKLVAYLMAVDRGQRNFQVVETNCIAA

SEQ ID NO: 83683 - protein, 387 aa, unidentified
MVMDAVDQPAAPAARRPWGVAGIDPHKRTFTVAVLDERGGLHGVASFDTSDQGLAAALAWLGAAEFDLDRVGVEGSAWLGNQVAAFLAAAGYDVREVQASRTAERRRRRRRAKTDAEDAQAIARETLAHPDLPPAGKQHTADPDWDELVALRNQRRSLIAQRRRLLNEAESVLVGLPLVVRAVLPATRQVRPQLRALAQGAADQLELTGADRVHLAWLATSTADIGRLDQRIRQLDQRIPAVLTRHCCTLTEEVGIAAVGAMELLVEVGDPTRFATEARFARWCGAAPVAVSSGEGDGEPERHRLDLGGNRRVNSVLHTMHITQARCYQPAKDYLRGKRVEHKTAREARRAHKRLLANVVIRRMWADHQRRRSRTLNVSNQTTPKAA

SEQ ID NO: 83684 - protein, 405 aa, unidentified
MKVYIGIDWSENKHDVCFMQEKGEVLLMLQIQHTMAGFRQLDQARQSLSLRRQEVVLGLETAHNLLVDYLWDQGYEQIYVLPPNVVKSAQKRYRQSGAKDDAWDARLIADLLRTDQKRYAAWKPDLPLTRQIRAEVRFSIQLGREVVQDGNRLRSILLRYYPAALDAFPHLDSVVFLAFLQTYPTLRQAQALRFEQLTVFLRAHHHTQSRSWPKIYAGLHSDHPPSNPELDAAYAPLALAQARILETLVRSRSECLARLEKLFRLHPDREIYDSLPQAGVLLAPALLAKLGDDRARYPSPAILQAVAGTCPVTKRSGKHTHIHFREACDREFRHIVQQWARLTLEASPWAATYYRMVRPHCKTDSDAIRRLANRWLEVLWRLWMDRKPYDEALHLRQHTMRTRIY

SEQ ID NO: 83685 - protein, 389 aa, unidentified
MIYVGIDVAAEKHACCILAESGKVHKQFTFSNDISGFEKLHKALLTPSETKIGLESTGVYGNNLAEFLRRNGYETHIFNPLLVKKSIQATTLRKTKTDKSDAKHIAQYTKEHSQPNLEPSYHISELKSLSRGRFSLVRERSKVKTQAKGLLVQLFPEFSQAFSDVFGAAANAVLRQLPSARMIAQCPVDVLTDLLRTASHGRLGKVKAELLIDLAEHSVGIQSMALELQMQMLLQQIDLFTIQINRYEAAIKSEMETIQSPITTIPGIGCVLGAAILSEIGDIRRFATPAKLQAYAGVDPSVGESGTSVSTPGRMVKHGSHYLRWALCQAARCVSLYDPIFAAYMKAKRDEGKHYCVACSHVAKKLTRVIYSILKNNTAYSLTYSQIGA

SEQ ID NO: 83686 - protein, 342 aa, unidentified
MQYYSGLDLSARTCQVCVIDEKISVLVQKKVSNELPQIIKILEPYKENLQAVVESTFNWYWLVDGLQEAGFDVLLAHPYGLYMITGAKVKTDRRDAFALAKLLKAGMIPEAYIYPKEHRPVRDLLRRRSRLVTMRAEEYGSLRRELYRHGILEHSRNNIKRTIEEDIELWFKDPLIQLPVRQELRRIGFYTEQIRHLEQVALKAAEDRPEYEWLMLVPGIGKILAVPILYEVGDISRFESSRHFSSYCRVVPGVAQSGTVSRRGRGSKQSNHYLKWAFSQAAVYSVIYYPKIKRCYEKHLRRHQGRAKKLLTYNIIAHKLAQAVYYILRDGREYKEELLFGT

SEQ ID NO: 83687 - protein, 336 aa, unidentified
MNFVGIDLHKKSISLCVVDPARTVLRRKTLSCADPKAIHEFFASLGEFQAVVEATSSYEWLWQLIEPLADRLVLAHPYKLRVIAESTKKSDKLDAQVLAEFLALDMIPQAYRPTPRQRAHRRLVRHRLFVLDEQKAVRCRIRAILSEFNADIPKLFTQRGLQLLQEIPLDPQARFVVDRLTAQWRSLEEEVHTIEEELQTFAEQAPTAEAEARAVLKSIPRVGPVTINVVLSELGDIRRFRSAKQVCAYAGLVPGYRESGGKRKDLGITKQGSPRLRWALIETAWRMVLHVPRWRAVFERLAEQRGKKRAITAVARRLLCVMTAMLKTGQAYRLAA

SEQ ID NO: 83688 - protein, 295 aa, unidentified
MQFYTKQHKFYCGIDLHTKKMYVCILDEKGEIREHRNMNTNPESFLKAVAPFREDIVVAVECMFTWYWLADLCQKEGIPFVLGHALYMKAIHGGKAKNDKIDSKKIAVLLRGGMIPVSYVYPEKMRATRDLMRRRNHLMRKRAELLAHIQNTNSQYNLEEAFGCIAKPYQRRGKDIVGAFDHPAVRKSMEVNLKVIATYDVLLEDLERSILRFAQHHDPISYALLQSVYGIGRIGALTILYEIENIKRFPRVQDFVSYARLVKCEKSSAGKSYGTSGNKIGNACWRPANHPHIRP

SEQ ID NO: 83689 - protein, 479 aa, unidentified
MAARSRKSRPRPAGRPATRPRPTTAPSTPADTPALPVVEPNAAGLDIGATSIYAALPPGRTPEPVRVFRTFTADLHALADWLVEHQITTVALESTGVFWIPVFQILEQRGLEVCLVNPRHVKHPRGRKSDVSDPQWLQQLHAAGLLQPSFRPPDALCAIRTLLRYRDDLVTQGATQIQHMQKALSQMNLHLQHVLSDITGVSGLRILDAILAGERDPEKLALLRDQNVKASQADVVAALTGDWRPEHLFVLRQAREHYRYFQSQLAACDAEVARLLAALDGQADPKDAPLPPKNAPRGKQRKNQIRLPETDLRVELFRILGTDATQVPGLGPATVAQLLSELGPHLKESFATVGRFTSWQGLCPDPKKSGGRTLRDQKRGVKHRVGQLFREAAQSLHASQTALGEFYRRIRSRWGGKAAVAATAHKLARIFYHLVTTKQAYDESVFAEATARHDQRRLKNLRKTLRQLGYDMVPRPCVS

SEQ ID NO: 83690 - protein, 329 aa, unidentified
MTGLMARQGSHTVRVIIGVDTHQDQHAAVAIDEQGVRLSEHRVVANSQGYAELQRWSRSLGEIRAFGIEGTGSYGAGVARFLTCRGYAIVEVNRPDRSTRRRKGKSDPTDAEMAARSVLAGVANATPKSGGGKVEMIRMLKKTKDSAVKARTQTINQMKALVVTAPAEFRETLDSLAAGALAKRCSSFRPGPLGDPTAAAKYALRSLARRYRQLGAEIQDLEAELDRLTRAVAPALVGTFGIGPDTAATLLVTAGSNPERLHSESAFAALCGVNPIPASSGKTNRHRLNRSGDRQANAALYRIVVVRLRYDPRTKEYMRRRTGEGMSKT

SEQ ID NO: 83691 - protein, 407 aa, unidentified
MFTDKCSITRYIGLDVHKHYLVAYGVDRDQNRLYGPRRVGYDELEGWLVKELTPSDAVALEMTTNTWTLVDILEPHVHSVTVVHPPEVKAIVKARVMTDKKAARVLASLHAAGLLPPVWVPPKEVRELRSLVAGRRRMVSLATRAKNTLHAVLHTHQILPPEEVKDIFHPKVRHWWEELPLTPLEMTRVLSELDTLHFATTQKERFEDALNILAAQDERVPILVQLPGIGIIGAMTILGAIGTIERFPSSQKLVGYAGLGAQVHISGNKSWSGRITKSGRRDLRKAMVDASHHAVKANGHWKTQYERLELRIGRPKALVAIARKLLVAVWHVLTKAEADRFAEVDKISASFFRMAYEVGVHNLPNGVGSRQFVRDKLDELEIGQNLTHIPWGKKRYALPPSKLAPDS

SEQ ID NO: 83692 - protein, 347 aa, unidentified
MLHAGLDLSRKKLDVCLLSDAGAHLDQLAVPPDVDSLRTLARRIGEVHREPVCAVIESMTGARIVHDTLEACGWSVEIADAQKVKGLAPLACKTDKIDSMVLAVLSHRDLVPAIWLPDPRVRQERELARFRLHLVKHKSALKCRVHSTLINFGRACPVTDLFGAEGRRLLRRLEVPEPWRSNVTASVELIDDLEQQIAQINRRLKEEHAYHPYIPLLMSVPGIGWVLAFTIAGEIGDIERFSSPEKLTGYTGLCPRVNQSGERDRRGPLTKHGPTYLRWALLEATMHASRHPAYAERYERTKRRLGKQRGAKVAQIDIARRLSHAIWHMLSSNRPFAPRGAAFRLAA

SEQ ID NO: 83693 - protein, 323 aa, unidentified
MHTNTKENINVGVDTGKSQLDIYIRPLNIFFTVSNNEKGIKEAINKIKIHNPVRIVIEATGRLEIPFILACSEVKLPFVIANPMHVRRFAGAIGQRAKNDRLDAELIAHYADAIKPKLTELKPEKIRLMSDLVTRRNQLLTLQTMEKNRIQILPKTLASTIKPILTAIKNQIAKIELKIGKLIEECEEYQSKNIILQSMPGIGKIAAVSIISNVPELGYITNKQAASLIGVAPMTKESGAYKGKRVIQGGRAQVRTVLYMAMMSAMQCNPVFKTTYQRLLGQGKPKKVAIIACVRKMVVILNAMLRDGVMWDEKTGKNKLLTP

SEQ ID NO: 83694 - protein, 406 aa, unidentified
MNLNAVGIDVSKRKSTVAVLSPGGKLLMRPFDIPHRCADFQTLANKLKELEGETRIVMECTGHYYEPVARELSQAGFFVSTVNPQIINNFQGQDNPLRKVKTDKADSVKIARFTLDSWANLKQYTIMDELRSQLKIMNRQFNFYMKHKTAMKNNLIALTDQTYPGANTYFDSPVRDDGSQKWVDFLDTYWHVDCVRKMSLHAFTDHYQKWCSRKKYNFSKSKAEEIYRTAKELIPVLPKDNFTKCIIRQAIAQVNAASQTVEQLRTLMNETASKLPEYPVVMAMKGVGPSLGPQLMAEIGDVTRFTHKGAVTAFAGVDPGVNDSGDHSQKSVHASKHGSPVLRKTLFQIMDSLLKTKPDDAVYWFMDKKRAEGKPYYVYMTAGANKFLRVYYGKVKEYLSALPESN

SEQ ID NO: 83695 - protein, 344 aa, unidentified
MQTMYYIGLDVHKRTIRYCVKDGSGAIHAEGTIPATRCDLDRWMKTLPQPWTAAMEATVFTGWIYDHLQPHAAALKVAHPLMLRAIAAAKKKNDHIDASKICDCLRCDFLPECYMASTAIRERRRTLRYRNLLVRQMVQMKNKISGLLMEAGVSYNKQRLHKAGYFRELLATNSDIDEGLVSLLRLCREAVVRLGKTESALVRSLERDSLLMDRVERLMTIPAVGPITALTWALEVGDAKRFSSIKKAISYCGLCGAEKSSANTVQRTPLSKQRNKHLQTTLIEAAKMAPRNSTELAMLYDKEKQKGNANRATLAVARKLVAYLMAVDRGHRNFQVVETNCIAA

SEQ ID NO: 83696 - protein, 423 aa, unidentified
MTKLCSTPAGAVLVAIDMSKNRQEVFIERPEGGRRRRMTVMATKEDYDGFAEQLAAIGRPIVVGFEATGNYHRTLAHRLLTAGFELRLISSVALARTREALHNGWDKNDSKDAQVILHMLRIGATQRYVDPLAAGINDLQELSKTHEVVSKMKTQTWHRILTHYLPLYFPEIARFAGNSRSDWFLALIERFPTPASITALDREAFSAEAWPLIGRKVSKARLINDVYETACSSAALPVPEDSAAITMFRMVIAQGRSLIHQRDEIERLAHARLEEHVDYQLLRNIPGIGPINALTILAEAGDLRRFNHHRQFLKFCGLDLATCQSGTFRGRTKLSKYGNARLRRTFWMAAQVAARQRDNSFRDKLGRYTAGHADDADRRRKAMTALTAKMARVAHAVIKTGTEYRPFLERLDARWKDPSLQVP

SEQ ID NO: 83697 - protein, 427 aa, unidentified
MKYNQNLKILQITEKTLIVGVDIAKETHHARAFDFRGIEYGKRIEFSNDIDGMERFFKWAAEIMNKSNKEHLMVGMEPTGHYWLCFAQFLRDKSHKVVLVNPFHVKRSKEFDDNSPTKNDRKDPKTIAMLVKDGRYVEPNIPEGIYSELRIAVDIREMLTKDLNKIKNRVARWLDIYFPEFNKVFADWEGKAALITLKEFPTPAKILGIGAEEILAAWKKEVNRAVGIKRALKLIEAASESVGKRDGIEMAEIEIKIILEQYEMLVKQLKKIESKIEELFMQVPGANEMLSIKGVGVITAAIFIAEVGDITRYEHPKQIQKLAGYNLVENSSGQHKGQTTISKRGRRRLRSALYKMIMPILANNKEFQELHKYYTTRKENSLKKKQSMIVLCCKLIRVFFAILKKGVKYNGNKMLRDIKRPEIRNAA

SEQ ID NO: 83698 - protein, 343 aa, unidentified
MQSISTIGLDIAKSVFQVHGVDATGQVVVRRQLKRRHVLGVFTKLQPCLIGIEACASSHHWARELQAVGHIVRLIPPAYVKPYVKRQKNDAADAEAICEAVTRPNMRFVPIKTIEQQGCLVLHRTRHLLIRQQTATINSIRAHLAEFGIVAPVGRRGVEQLLGVIADANDIRVPEVARACVAILGVQLKQLKAQILELDRRILAWHRSSEARRRLNHIPGVGPLLATALVASIAEPKVFRSGRDFSAWIGLVPKQNSSGGKEKLGSISKRGDRYLRSLFTAGALAVIRYAKIHGTKHRPWLVALLARRPTKVAAIALANKLARIAWALMTKGSRYRQPAALMV

SEQ ID NO: 83699 - protein, 458 aa, unidentified
MAGQRKRSQPAPDIPEGLPLLHRNAAGIDVGSREHYVAVPPGRDPRPVQRFGSFTADLHRMAHWLKACGIETVAMQATGVYWIGLFEVLQAHGFQVQVVNAQHTKTLPGRKTDVQECQWLQKLHTFGLLNNSFRPVEEIRVLRSYLRQRETLVVASSTCVQHMQKALTEMNLQLANVISDITGVTGLAILRAIVAGERNPEKLATLKHVQIRASREEIARSLEGTWRSELIFMVEQNLALYEVYLAKIQQCDEQIETHLKTMTSKVDPALQPMPPSRHGRKRRKHGPGFDLRQHLYRLTGVDLTEIDGFDVQIAQTVLSEVGTDMEPWKTEGHFASWLGLCPDNRTSGGKVLKRGTRKVINRAATALRIAAWNLIRSQSALGAKFRRLRARLGAPKAITAMAHHLARIVYRMLKFGQAYVDQGQQSYEAKYRLQQRKWLEKQAAALNLQLVPRQGFAP

SEQ ID NO: 83700 - protein, 321 aa, unidentified
MKNYIGMDFHLQHSSIAVMDKNGNITEETKLYHNKVTEIKEFFEKFPKNTDVAIEATRNWYWMIDLLESLNMHVRLVNPKKTRIIAESTIKTDKIDARILAHLTRCNFLPEAYIADKETRDVREMLRYYMHLVRVRASLKNRIHSLLAKNNLSYLNHGFTDLFGKLGREFLKTLNLSLVYRDEMDGYLEIIDTLTSKIVELKKDIKKIGSKHRYVPLLTTIPGIGDFGALVLAAEIGEIERFSNAKKLSSYAGLTSTTRQSAEKTWHGSINKDSNKYIRYILVEAVQKAIMRDRKLWEFFQRIKEKKGRGSAVMAIIVQRN

SEQ ID NO: 83701 - protein, 338 aa, unidentified
MKVYAGLDLHATNTYVAMIDAENKVLYKQRHRNDVPSILSALDPFREDIQGVVVESTFNWYWLVDALMDHGYRVDLANVSAIKQYEGLKQIDDRRSSLWLANLLRLNILPTGYIYPKEERPTRDLLRKRLQLVRHRTSHVLSVKNILARNLGIRMKTYDIKKLKASEVSTLFADTEMRLAILSSIGLIQHFQEEIDRIETVLTKKFKVKEEFKKLLTVPGIGEILGLTIMLEVGHIDRFPTVGDYSSYCRCIRSIHTSNGKVTGYGNSRNGNKYLSWAYLEAAHFARRHHERIQRYYERKRAKTNKVVAIKAVSHKLARASYYVMRDGVDYDEARLFV

SEQ ID NO: 83702 - protein, 456 aa, unidentified
MAQRNRTVGLKPSKPGKSRAALTITHPNAAGIDIGSAAHFVAVPPDRDDEPVRQFPSFTVDLNGLADWLTACRVDTVAMESTGVYWIPLFELLEARGFTVLLVNARHVKNVSGRKSDVLDCQWLQQLMTYGLLSGAFRPAEQVCVLRSLWRHRGMLLRSQGRHVQHMQKALTQMNVQLANVIADVVGETGQKILRAIVAGERDGQVLGAMKNTRIHASVEEIAKSLQGNWRAEHLFALKQALAAFDFIGTQLAECDQQIEAQLQRLQRHDGEPAKCKKRGRARNAPRFDLRTQLFKMCGVDLTRIDGIDVTTALAVISETGTDMSRFASDKHFASWLGLCPGTKITGGKVLSGKTKRCANRAAQALRLAAAALRTSQSALGAYFRRLCARMDKPKAITAAAHKLARLIYTMLTKGEEYTDQGQAYYEERYRERLLRHLSQRASKLGMQLVAVPQPA

SEQ ID NO: 83703 - protein, 365 aa, unidentified
MPHKSTVHAVTAIGIDMGKNTLHMVGLDLRGAIVLREKVSRGRVASRLANLQPCLIGIEAGMATHYVARELAALGHDVKQVPPTYAKPFRQGHKNDFRDAHAVAEAVQRPTTRFVPAKTNEQLDLQALHRVRSRLVSERTAVINQIRGFLLERGIIVRQGLRFLRQQLPDILAKRTDVLSPRMVRIVADLAGDWRQLDERIETVTNEIETLAKSDDNCRRVMTVPGIGPIISSAMVAAIGSGAAFARGRDYSAWLGLVPKQMSTGDRTILGRISKRGNGYLRTLFMQAARVILLRSANWPKHGFGAWLIRAAQRLHPNVLAAALANKLARIAWTCWHRSAAMKRASRRQQPEMNTLWFTKGDPRR

SEQ ID NO: 83704 - protein, 348 aa, unidentified
MIAIGIDVHKGKCTIAEQGEDGELKMRPSIENTREEWLELLQELPPDAEIALEVSTSGYFAMSVLEAAGWRDRAHWVHTAGIDSLRKQKTDRLDARRLARNLSVADREPLPEAWFPPAEIRELRLRARQRCWLAVMRAQVRNRTQSLLQRHGLRSGRNPFSPRGQAWLAKQAVPAATRESLEQLGRLHAFLQQEVETSEAALAESTKNISEITRLRSIPGLGRILAAVVWSEIGDLARFASADALVNYTGLVPSLYQSGEVSRPGPITHQGSVWLRWALITGVNAALRGRSPFAERYRRLKQRKPANVAKTAVARSLARCVYGVLKYECDYQEERWGRKLGSFVEQQA

SEQ ID NO: 83705 - protein, 402 aa, unidentified
MNAVGIDVSKGKSMVTIMRPFGEIVSSPFEIKHTTSDINSLVELINSVEGESRIVMEHTGRYYEVLAHQLSKANLFVSAINPKLIKDFDNDSLRKVKSDKADAVKIARYTLDKWQNLKQYNVIDELRNQLKTMNRQFGFYMKHKTAMKNNLIGIIDQTYPGVNTYFDSPARSNGSQKWVDFASTYWHVDCIRKMSKNAFIDHYKNWCKRKKYNFSKSKAEEIYEKAKELVPVLPKDNITKLIIKQAVDQLNSVSTTIESLRTLMNETASKLPEYPVVMAMKGVGTSLRPQLMAEIGDVSRFTHKGAITAFAGVDPGVNESGSYEQKSVPTSKRGSSVLRKTLFQVMDVLIKTHPQDDPVYQFIDKKRAQGKPYYVYMTAGANKFLRIYYGRVKEYLSSLPES

SEQ ID NO: 83706 - protein, 345 aa, unidentified
MTIVETRAVTGGVDTHAGVHVAAALDPVGGLLGVREFPATAAGYASLLSWLAAFGTLALAGIEGTGSYGAGLARHMAAAGIQVVEVDRSDRQDRRRNGKSDPLDAVSAARAAQSGRARGAPKGRDGAVEAIRALMVAKRSARNERTQAINQARSLIVTGPDDLRTRFARHSAAQLVTGLAALRPRPGDVPGFATRIALRELGRRAQFLDTQIGRLDELIIPLVTARAPSLLALYGVGADTAALLLIAAGDHPERLRSEAAWAHMCAVAPIPASSGKVRRHRLNPGGNREANHALWRIVITRMSAHPATRAYVDRRTKEGLSKTEIIRCLKRYVAREVYHHLRAGS

SEQ ID NO: 83707 - protein, 408 aa, unidentified
MTRYYLGVDWADEFHQVWVSDPQGKKVVEMKVVQSPEGMGEFGRWLHERKAEEIELWAAIEKPHGRIVEFLLDHGVVVYPVNPKALNRVRDRFRMSQSKSDSFDAYVLAEFVRTDHAHLRALEPDSHEAQELKMITRDHHRLVRQKARLLNQLKVTLKEYYPRPLEVFSDLESQIALDFLKQYPTPQALCELSRRNWNRFAKREHHLGEARCNELWEKLHKPQLAVPQHVVRAKAQLLGALLVQLEALLPAVESYSERVKSFFASMPAAKLVETLPGGKSGTIVPMLWAELGDAKSRWESFRHLQAEAGAVPVTKASGKSRFVQFRFSCNKHLRYAAYWLAFTSLNRSEWANAYYRDQRAKGHRHPQALRALGAKWLKIIFVMWRDNKPYDENYHLANIARQKMRQAA

SEQ ID NO: 83708 - protein, 341 aa, unidentified
MKKNLFFIGLDIAEADFAASIYKTPDQPIVTKEAIPNNPEGFNLLLLWLKEHHIDKTNSRICMEATGVYSQAIAYYLLFAGFPVSVEPPLKVKRAFDPIGHKTDPVDSKQIAEYAYRFQDELTSWQPRDEILEKIRQLLSVREQFTKQKVALKNAMQAYSKQRVQVALIKKAHQETLAQIEKQISRIDKELAKLIKQDPQILQKADYLKSIPGYGMLLATHLLVITENFTKIQNSKRLASFVGIVPYQHQSGTSVFKKAKIRHFGPGPSRKLLRLAAQSVATHDVTFRCYYLRKLAQGKAKSLVLNNIANKLLKVACAMIRNNTRYIKEHRSIHPMYLKSA

SEQ ID NO: 83709 - protein, 516 aa, unidentified
MVPKECANIIGDTWDGRVIPFGRMQRAHLRARRVPMNPRCKGEAPMSTTPTRAKRRRQVRIASKPKVPLPPQLQRVNLNAAGIDIGSEEHWVAVPPGRDREGQDVRRFGAFSGDLCALADWLQRYEIETVAMESTGVYWIALYELLVERGFEVLLVDARRVRNVPGRKTDVLDCQWLQELHTYGLLRGAFRPADQVCVLRSYLRQRSMLVAYASHHIQHMQKALEQMNLKLAHVVSDITGVTGMGIIKAILGGERDPVKLAKLRDPRCNSSEATIARALEGHYREEHLFALQQALELVEFYQRQITACDRQIEACLQQFEDRSPKTPLTDRPRRRRRSGVAFDARSYLYRITGVDLTQIDSIEANTALTVIGEIGLDMSRWPTEKHFGSWLGLAPGSKVSGGKRLSGRTKPSANRAAAALRLAAQSLNQSQSALGAYFRRLKARLGAPKALTAAAYKLARILYRMLKYGAGYVDQGETVYEERYRDRLLRNLKRRAAELGFQLTEINSSTGQPALT

SEQ ID NO: 83710 - protein, 460 aa, unidentified
MSSIQRRLDYTDFGRSKQSGFFARGKKSLSYMSTVIPVPVQDRKYVLSVGLDWADQAHAVCQRTWVDGQRQVFQIGADPASVEAWLTQLKALAGPQGRIAIGFEQNRGALFEMLPLHSDWIDLYPLNPLTVSKYREAFFTSGAKDDPLDSQLIEELLYHHLDRLRPYQAPEPELRELDLLCQQRRKAVDAAVACANELCSLLKVYYPLALDLHQELRCSLSLHFLKRWPTLEQLKKAKPQTLRSFYFQHHCRSQSLIAERLEKIARAQAVTEDPALIRPLVLSLQRLVNQLFTLQASIAAFDKAIQALFAQHPDHHLCESLPGAGPQLAPRLLAAFGSNRALLTHPSQMQKKSGTAPVLDRSGQGKTISRRWCRSKFLCQTFHEFAAHSIPYSTWAKACYQQLLARGKSHNAAVRALAFKWIPIIFRLWQDRSPYDENLYLQALRNRRSPLSQKIPYPNV

SEQ ID NO: 83711 - protein, 356 aa, unidentified
MKETNPVKIIIGVDTHKDVHAAVAINGIGARLGTLATPVSPKGYQDLETWARAFGTIHAFGIEGTGSYGAGLSRFLQAKGYTVVEVNRPNRQLRHQHGKSDPLDAESAARAVLGGQANAQPKSGAGSVEMIRHLKVARDTAVKSRTQAMVTLKTIIINAPAALRQALDRIIGKMTLIRHLAALRPGPITSVTASAKGALRAIARRWLMRDAEIKAHDADLDALTASCAPAMLEAHGISTGTAAEMLILVGDNPERIRSEAAFAKLCGACPIPASSGKTNRHRLNRGGNRQANAALYRVVIVRMRNHQPTLDYVKKRKADGKGKMEIIRCLKRFVAREIFGYLCGAQRSLSSLPKSA

SEQ ID NO: 83712 - protein, 425 aa, unidentified
MREHDTRAEAGTVNTPGRGTMFEIEDVGVFLGLDVGKSNHHGHGLTLAGKKVFDKPLPNSEPKLRAVFDKLTAKFGTVLVIVDQPASIGALPLTVARDAGCRVAYLPGLAMRRIADLYPGEAKTDAKDAAVIADAARTMPHTLRSLELTDEITAELTVLVGFDQDLAAEATRTSNRIRGLLTQFHPSLERVLGPRLDHQAITWLLERYGSPAALRKAGRRRLVELIRPKAPRMAARLIDDVFDALDEQTVVVPGTGTLDIVVPSLAASLTAVHTQRRAMEAQINTLLEAHPLSPVLTSMPGVGVRTAAVLLVTVGDGTSYPTAAHLASYAGLAPTTKQSGTSIHGEHAPRGGNRQLKRAMFLSAFACMNADPASRAYYDKQRARGKTHTQALLRLARQRVSVLFAMLRDGTFYESRTPNDVELAA

SEQ ID NO: 83713 - protein, 436 aa, unidentified
MDLVYARCAGLDVHKATVVGCVRGPASQRGERATETKTFATTLRGLRELHAWLITHGVTHVAMESTGVYWRPVYAVLEGAVEVRLVNARHVKMVPGRKTDVRDCEWLAQLLECGLLRGSFVPPAAVRDLRDLTRLRKTVIRERGHHVNRIAKVLELANVKLGTVVTDIMGKTGRAILQALSAGIDDPEQLAAYAQGSIRTKKQAALREAVEGRLTPHYAFLLQQHLALIETLDAHIATLDARIDAAMAPFAEAAARVQTMPGIATRAAEAILAETGVDMQPFPTAAHFASWARLCPGNHESAGKRRPTTTGQGGTWLRATLQEAAWAAVKTKKSYYRTLYHRLKARRGPKKAIVAVQHAMLVALWHMLKHRVPHQDLGADYFDRRNPARQRRHLLRRLQQLGCHVLLVEKVPDGAPPPSLPTPTTVEEAPDGAGVS

SEQ ID NO: 83714 - protein, 458 aa, unidentified
MNRNKSKSKIDHTMPMVHPNAAAIDIGATMHMAAVRADRTPEPVRSFGTFTTDLHRLVDWFKECGVETVVMESTSVYWIPIFELLDARGFTVFLVNARDAKHVPGRKTDVSDAQWLQRLHSFGLLRASFRPKGQIAELRAYMRQRERLLEYAASHIQHMQKALTEMNVQLHHVVADITGATGLRIIRAILAGERDPKVLTRLRDYRCHSSAETIEKALTGSYRAEHLFALEQALALYDVYHEKASACDARIESVLKELSIDRGRRSDPLPSSGRPRSDQANALAFDVRAALFALLGKDITQIDGLGPYLSLKLIAECGDDLSAWPSAKHFTSWLGLAPSNKISGGKILSSRTRRCGSRASALLRLAAVSVGRTDTALGAFFRRLSARIGKAKAVTATARKIAVLFYNAVRHGMEYVDPGASYYETRYRTRVVNNLHRRAKAFGFVLQPMEPPPGVVVS

SEQ ID NO: 83715 - protein, 430 aa, unidentified
MSYRISGIDVHKKMLAVVVSDVEVDGEFRFERRMFGSNPEQLRSLAAWLLEQEVEEVVMESTAQYWKPVWEALERYWKPIREKREGARRKSGTLHLAQAQSNRGRQGRKRDFPDAERLVKRLVARELTLSFVPDAEQRLWRTVTRKKNQLRRDRVRLHNQLESLLEEAHIKLSSLVSDLLGASARRMLKALADGETNPAALAALADQKLRATPEQLCDALGVCTDLKPVYRRLLKMALEQLQFLEQQISQLDQELATLLHPYQDAVQRLAEVPGLGVDSAQQIIAEVGPAAAVFPSAKQLSSWVGACPGDEESAGVNYSHRSPKGNRQMRRILSQTANAATKTKGSIFDIVYRRSVTCLGHNQAIGAIAHRQCRLIWLILHQGIRYEERGPAVNKQSKQRRTWKMVRQLRSLGYRIQPPNPEQPSQAQAQ

SEQ ID NO: 83716 - protein, 358 aa, unidentified
MPSITPQDAAIIEVAGGVDTHQDTHTAAVIDQVGRVLGSERFSADAAGYRALLAWMCSFGRVVKVGVEGTGAYGAGLARLLHQERVQVIEVDRPDRKTRRFQGKSDPIDAVQAAKTALAGQRAGTPKRREGRVEAMRNLRVARRSGVDQRADTQRQIKTLIVTAPDDLRERLRGLPVTELIITCANLRPDRSDAASPATAVKIALRSLARRHQQLTTEIGDLDGLLDPLVAAINPGLLAANGVGIDVAGQLLVTAGHNHDRLVSEAAFAMLCGAAPIPASSGKTNRHRLNRGGDRQANKALYRVVICRLRWDPRTRAYMERRTKDGLSKKEIIRCLKRYVARELYQLIITPNDHELAA

SEQ ID NO: 83717 - protein, 386 aa, unidentified
MMIIGVDPHKSTHTATAVDPQTNRTVASVRIDASLAEYRWLLRWARQFDSRRWAVENAEGLGRHLSSWLLARGEEVVDVPPAATARVRQLSRGGGRKNDQIDAAAAACAAALQGDGRPLQPEDITDALALLDESRMNLAQSRVRLVNQLHALLRDLLAGGAPTDLTATTAAALLRQVRPAGDAERVRKQIAICLVSQIRSVDSLLKANAKQISELVATSGSTLTSTVGIGAITAGRLIGRTGRARRFPTAAAFANYAGAAPVEVASADKARHRLSRSGDRQLNAALHTVAITQIRTRGSRGHTYYTAKLAEGKTPREARRCLKRRLANHIWRTMITDEQRQAANPGGHLGTTLKSSAAGSTPTTSSSDKSLPGLANHDSTTAQPAA

SEQ ID NO: 83718 - protein, 474 aa, unidentified
MGKGSSGMTRGDRRRNARREQLRGLLPRDGAVIGIDLADEKQALAVIDHDVRVLARKTVRVKAFRLGGALDWAVAQARAKGFTSVTVACEPTGPRWLQVQRLCAERGLPLVCVQPLVTHIARQQQDYTAHKTDEADCVMIARLAVELHCYIPEELDEVWAGLRHLGRRRAALITSETASVQRIRDFLSVAWPVVPEACAQPFESMTWLAALQAVTSRCGGQPGELAIIGLEAFTALVRDALPGWGGQRIHGPICKTVFAALTSTEGVVRGHRRGLLRRVAAELGDLQRARAQRQETEAAMIAALGDLGLARLGDIPGLSATGAAAILAETGDPKRYDTSSSVVKHAGLSPSDNASGAFDGEAHISRRGRPGLRLTVWRAVWAVLIHNPVMAAKYAAMTQAADQAAADARAGSSGHATSAAEAARRRRAKARVACAAALLRWIYSMVVHGTCWDPGVAAGRKDTLAAPSCQPEAA

SEQ ID NO: 83719 - protein, 342 aa, unidentified
MEVAVLGIDLGKNSCSVVGLDGTGQIVMRRRMQRDSVIKLAAGMAPCVVAMEACCGAHHLGRIVRDHGHQVRLMSPEYVRPYVKAQKNDDRDAEAIAEAATRPTMRFVELKSVEQLDMQSLHRVRDRLVGERTALMNQLRAVLMERGITVPQGRRKLEQHLAVILDGEELRLSPRMISLVGDMRAEWGALDRRIEAFDDEFAAQAKTDDAARRLASIPGIGVLNATALAAAVGKAASFARGRDLAAWLGLVPRQMTTGGKPRLMGISKRGNKYLRKLLVHGARAALPSLSASTTPLGKWLWNLLQRAHKNTVIVALANKLARIVWAVLRYGGTYNAGALTAA

SEQ ID NO: 83720 - protein, 343 aa, unidentified
MSNTTKLIPEQIDWHVGIDISKEWLDCRLRPGGAALHCDNSTEGFSRLHRWLTGHGAPPDSTIICMENTGIYGKRLLAALTDHGWLCAVEKTTITDKVSPEHHRKEDGYDAELIAEYAERFTDKLNPQWPAEPEVEALRRLYTERRRLVRQRASTKTKQTQAGQYPTDNGLLTDSWQQQLAFYDEQIDRLEARMHQIVAGHQGLARYYGLLTSIPGVAEVTGWLWLILFYGQASLDPKKISSRFGFAPHSNRSGTSKNGKTRSSGHGVSEMRSTMSLAVRSASTHCAKFKAYKQKKENEDRCWPVIRNNLINKLIKIMCAIWNSQTPYDPDHTSRFDRQKNAA

SEQ ID NO: 83721 - protein, 361 aa, unidentified
MSFERTSVGLDVHARSVVGCALDGVTGEVMRQRLSPDNGEILAWVGSLPGPVGVVYEAGPTGFGLARFLSTAGVVCVVAAPSKLQRPVGDRVKTDARDALHLARLLHLGEIVEVAVPSVEQEAARDLVRARDDVRGDLMSARHRLSKLLLRQGIVYFGGKAWTGVHDGWLRQQRFDQPGLQMAFETAYDTMLATVDRRDRLDVAIAQMAADSEFTPVVHRLGCLRGVSTLTAFGLAVEIGDWHRLTGRSIGPYLGLVPTESSSGGSRSQGGLTKTGNGHARRLLVEAAWHHRQPYHGSSVAIRRRWDLAGPAARARGHAGNQRLHTRWQRFNARGKKSVIANAAIARELAGWCWSLAVLDQ

SEQ ID NO: 83722 - protein, 408 aa, unidentified
MNPLFVGIDVSSKNNVAYLMKPDGSKHSSFSVQNNLGGAKLLSERIVSALGSMQLERVVIGLEATSIYGDSLVYALREDGRLGRFQRKIHVLNPKQVRKFKEAYSDLPKNDWVDAFVIADHLRFGRIAKEVYMDDYRYKALQTLTRARFEVIQNLTREKQRFANYLFLKCSGMAQDKDIPNTSATTIALMEHFETVDDLANADLNELTTFVTEAGHGRFADPAAAAKAVRAAARGSYRLPKTVNDTVNQAMAVSIASMRALKEQVKVLDKAIEQQFEIIPNTLTSIPGIGKVYSAGIIAEIGDIHRFDSQASVAKFAGLVWTQHQSGGFEAEHSQMIKSGNRYLRYYLLEAANSVRRCDSEFRRYYDLKFKEVNKYQHKRALALTARKLVRLVFRLLKDNRLYIPPEG

SEQ ID NO: 83723 - protein, 412 aa, unidentified
MKDLLEISCGLDVHKEKIVACILTGPLGKPTRSEIREFSTLIPDMIALRNWIVSKNCHHVAMESTGIYWMPIYEILEDAFSGDITLLVVNARHMKNVPGKKTDMRDSEWISTLLRAGLLNGSFIPEKRIREFRDLNRYRKSVIRDITSQKNRIEKFLQSSGFRLSSFISDIFGASGRNIILHLIEHGQIDKTALDSCLKTKTRNRIDEILMSVNGTLSEHQKTFLKILMTHYDSLKEHLTEVETSLEEDMAPFTLQVEQLNSIYGISTTASCAIIAEIGIDMEPFKTAEHICSWAGLCPGNNESAGKRKSASVTKGNPYIKSMLCEIAWVIAGKRNTYLSAWYWRIKQKKGAKKAIVALARKLLVIIYTMLKQGTLFDESCFETRRKNCEQKQLSRYIRELEKHGYHVEAQS

SEQ ID NO: 83724 - protein, 411 aa, unidentified
MLFIGDDWAEGHHDVVVQDDAAKTLARRRLPEGVDGLARFHELVGSCWGEDSEPDPALVVVVIETDRGAWVKALAAAGYRVYPANPKQAARHKETVAVSGKKDDFFDAACLADMGRTRRHQMRELADSDTAEAVKIAARAHQKLVWERTRQLLRMRSALREYFPAALEAVEDLDAPEVLELLGKAPDPARAAKLTRAQVSAALKRAHRRNIADKTTAILTALRGEHLAQPGSLTVAYVATVRSLAAVIATLNEQVKALETEVGGHFGRHPDAEIYRSQPGLGTILGARVLGEFGDGPGRYISAKARKNYGGTSPITRASGKKKVVAARFVRNDRLIDALMTWAFASLNASPGARAFYDQQRAKGFEHNDALRRLANRLVGILHGCLKTRTRYDEATAWEHRENLPQSSVAA

SEQ ID NO: 83725 - protein, 417 aa, unidentified
MSYTVAGIDIHKKVLMVVVAIAGDEVRDTAGEAIEFECRRFGTGAAERSHLVSWLREHGVTEVVMESTAQYWKPVWLDLEPHFAKLHLAQAHSNRAPKGRKNDFRDGKRLTRRLLADELILSFVPDAEQRGWRTVTRGKHQRIRDRVRLQNQLEALLEEARIKLSSVISDLLGVSGRRILQALADGETDPERLAELGDERLQCSKAELMDALTGSLEPIHRDLLKLHLEHLKLLNQQIAKLDQMAATALKRHQDAVVRVAEIPGFGADSAQQLIAEIGVDADAFKSAGNFTSWVGTCPGQDESAEQNHSSRSPKGNRFVRRILTQAAQAAVKKKGSYFQSLFRKFLPRLHYNGAIWVVANRLGRLVWKILHDGVRYIEQGQETTPAARKRRAQKMAQALRKLGYAVTLTPIPEPGRG

SEQ ID NO: 83726 - protein, 346 aa, unidentified
MKINRVGVDLAKNVFQLHGADRKGKVVWRRRLSRGKWLTVLCDSVEPGTEIGMEACAGAHHWARQLMQRGYPVKIIPPQFVKPFIKSNKNDANDAAAICEAMGRPDMYPVKVKTVEQQDLQAMHRIRDEIKSHRIAKANQIRGLITEYDLVAPQELHALRRAIPDWLEDADNGLTFLFRQLLQGLWGDLYALDQRMAELDKQIAVVAQEDPTAKRLQQLRGVGPLIATALVATIGDGKQYRKGRDMAAALGLTPRQHSSGGKDRLLGISKRGDAYLRCLLVHGARSAMRTDKDKDDRLSHWINNLQARRHANVVAVAMANKMARMAWVIMTRDVDYDPDLAAASVS

SEQ ID NO: 83727 - protein, 343 aa, unidentified
MQTVTTIGLDIAKSVFQVHSVNAEGKVVLRRQLRRRYVLAFFEKLPPCLIGIEACASAHHWSRELQALGHTVRLMPPAYVKAYVKRHKNDAIDAEAICEAVTRPNMRFVATKTREQQSCLTLHRTRHLLIRQQTSVINAIRAHLAEFGIVAPVGRNGVEQLLGVVADASDKRLPELARACVAALGAQLGTLKAQILQFDRLIMAWHRSSEASRRLDDIPGVGPALATALVATVADPRAFRSGRNFSAWIGLVPKQHSSGGKDRLGSISKRGDRYLRGLFVAGALAVIRYAKIHGTKHRPWLTALLARRHTKVAAIALANKIARMAWAIMAKGEHYKEPVALAA

SEQ ID NO: 83728 - protein, 331 aa, unidentified
MYFSQFIGVDISKNTLDAAIYPAKDKKLDFLHFDNTQKGLGEMMTWLKRRGVKPSEMIICAEHTGVYTNPLIAFADKKGLALSLNSPLDIKHSMGIARGKNDAVDAGRIAEYAHNHRDKLRLYEKPSEAIMKLQYLLTERRQYMRQRTALINLNSAMGKYETPEARTRNESAIHHCEKLVKKVEEQMMAVLCTDPDVKRNFDLVSSVKGIGLINAINTVVYTNNFKAFDTPRRYACYIGVAPFDHTSGTSVKGRTQVSKICRTQQKAELSMAARSAVIHDPGLKRYYQRKMKEKGGGKDVHGIVLNAVKFKLILRMFAVVKSGQPYKVLNY

SEQ ID NO: 83729 - protein, 411 aa, unidentified
MDKIYDKCCGIDVHKKLIVACFRYGRKQEVREFGATTRELLELADWLKEGGCEMVAMESTASYWKPLYNILESSDLSAMVVNARHMKAVPGRKTDVKDAEWIADLLQHGLLQPSFIPDKDQRELRELVRYRKSLVGERTRELNRLQKMLEGANIKLSGTVSDINGKSARSILEYLLTGESIDGAKYDEMYEKKVIAHNLKATKEQIIDDLNGVMSPLQRRMMKELLAHLDELNIHIKNLDDEIDNFMKPEEKQASQAIQDVTGIGNTSAQAIISVIGTDMERFPTDKHISSWAGLCPGDNESAKKRKSGKTRKGNSLLRTTLITCAHVAVKNKKSYFHAQFMRISAHRGTKRAYVAVAHSMLIAIYHILKDGVVFKDLGVDYYNQFNKERKINAYLKKLKALGWEAPVVAA

SEQ ID NO: 83730 - protein, 457 aa, unidentified
MSKRSKKAKSHSFKVPNLPKHLQHINLNAAGIDIGSERHMVAVPEGRDTVSVREFGTFTADLEALATWLKQCGVTTVAMESTGVYWIPLFELLERRGFEVKLVDARHVKNVSGRKSDVLDCQWLQQLHTYGLLAGAFRPPDEVCVLRSYLRQREMLIQTASMHIQHMQKALQQMNLLLHNVVSDITGVTGMKIIKAILAGERDPRVLARNRNERCQNTTATIAKSLVGNYREEHLFALRQAVDLYETYQAKIADCNQAIIKQVEKQPDISDDGPPTPEKQVQARDRIRDGVDVRDLLFKKSGVDLFAIPGLAADTLLTLASEVGFDMTPWKTEKHFASWLGLCPGTKISGGKVLNKKTKRNPNRATQAFRMAAASLYRSQTALGAFYRRIKSRAGGKQAITATAHKIARIYHAMLTQGTSYVELGQQAYEQRYKERRIDHLKVQAKSLGFQLVPCTT

SEQ ID NO: 83731 - protein, 356 aa, unidentified
MNNISRLDFTGQQIYVGMDVHKKSWSISIFTDQFEHKTFSQPPEVGVLVNYLKRNFPGAAYKAVYEAGFSGFWIHDRLQEQGVQCLVVNPADVPTKDKERAGKTDRVDCRKLGRSLRNGEIEGIYVPSRPKVEDRGVLRTRNSMVRKQTRCKNQIKSILCFYGINIPDDFINGYWSKRFINWIESVRMERASGNLSLKIHLDELKHLRKIITEMNRAIRALANSDDYRNNVRILKTVPGISTLTAMMLLTELYEINRFKTLDKLCSYVGLIPNTSSSGEKDLKTGITGRRNAHLRFVLIESAWTAVRKDPALMMAFNELCKHMTKTKAIVRITRKLVNRIRYVLKNQQEYVPAVIQ

SEQ ID NO: 83732 - protein, 349 aa, unidentified
MVTVGVDAHKRTHTIVAVDGNGAEVGQRTVAATSAGHLEGLRWASQWPERRWAIEDCRHLSRRLTTELLVAGEAVLRVPTKLMAAARRGARTRGKSDPIDALAAARAALREPDLPVAQLDGPARDLRLLVDHREDLVAERTRIENRLRWHLHELQPGEEPPTRSLNRHATLRALEATLAGQPGVVARLARELVVRCRDLTVAINALEREICERVSGMAPRVLALLGCGALSAAKIVGEVGRISRFRSRNAFAMHAGTAPIPVWSGNHERFRLNRGGNRQINCALHRIAITQMQRPGPAQDDLTRRRAAGDTKTEAIRALRRRISDEIYRRLRADEAAANTQLRDFLAAA

SEQ ID NO: 83733 - protein, 331 aa, unidentified
MLKVDTCGIDVGSKEFVLTLHREGKSEPVRRTFSNGESGRRAVCRFLPKPGHVVRVCLESTGNYGLDLAVDLDATDGVEVMVANPRAVRRFAQALMTRNKTDRIDGDVLEQFAARMPFTAWHKPSQTAMELRGISRRIKTLTCVCTAEKNRLHAAKASKTIPAIVRRDIQDSIARHQRSIARLIKEALEVITKEPELKKNFALMLTAKGIGRKSAIQILGELAVLSKDMDGRQRVAHAGLDPRCQKSGTSVDKKPRITKAGNIYLRSALFMPALSARRHSPHLKAFADHLKARGKQPMQVVVALMRKLLVGISAMLKNHQPYDGNKLFNLP

SEQ ID NO: 83734 - protein, 366 aa, unidentified
MKKISTVATNRNEIFKEPKLTIGLDLGDRSSYYCILDGAGEVILEHGLPTNPKGIHQVFSRIPRSRIALETGTHSPWVSRQLTQLGHEVIVAHARNVRLIGESSRKDDQLDARTLARLARIDPELLGPVRHRSAKAQIHLTVIRARAALVSSRTALVNAARGLTKSYGERLRKCGTGQMNREIANGLSQELRGALEPLLAEIESLNERIAEYDLRIEQIAKEVYPEVALLKQVKGVGTLIALTYVLTLDDPHRFRRSRDAGCFLGLRPGRRNSGMSEPQLHISKEGDRYLRTLMVQGAHYMLGPFGQDSDLRRWGLKLAERGGKNAKKRAVVAVARKLAVLLHKLWVSGEVYEPLRNNHKVVSAVA

SEQ ID NO: 83735 - protein, 431 aa, unidentified
MSYRIAGIDVHKKMLAVVVSDVEVDSEYQFERRKFSGNPEQLRLLAAWLLEQEAEEVVMESTAQYWRPVWEALERYWKPICEKRAGARRKSGTLHLAQALSNRGRRGRKRDFPDAERLVKRLVAQELTLSFVPDAEQRLWRTVTRKKYQLRCDRIRLQNQLESLLEEAHIKVSSLVSDLLGLSAQRMLKAIADGETSPATLAALADKRLRATPEQLCDALGACTQLNPVYRRLVKMALEELRLIDEQIGRLDQEMAGLLLQHQDAVQRLAEIPGLGVDSAQQIIAEVGPTAATFPSEKCLSSWVGACPGDDETAGVNHSHRSPKGNRHMRRLLNQAANAAARTKGSLFEIVYRRSVPRLGHNQAIGVIAHRQCRLIWLILHQGVRYEERGPAVTKRSKQLRTWKMIRQLRNLGYRIEPPNPQPSQAQAQAQ

SEQ ID NO: 83736 - protein, 392 aa, unidentified
MNRIVYIGMDVHTSNYTLCSLDPGYGVKKDNYFAEVQFTNNFVTNVVNYVSNLKKKLKDCEFVCGYEAGCLGYSTYKDLTKVGIKCVLMAPSTMAVQKGGKKVKNDRRDARVIAQCLAYQTYKEVYVLSEHDEAVRGYLRMRDSHNKALKRIKQQIISFCTGHGLFSPTKSNWTVAHLKWLKDLKFNDPVEQEILNEYLSSLTFLSDKIKAMDVRIEELASEKQYCENVKKLRCIKGIETNVALTLLAEIGDFNRFSKPTDFAAYLGLIPGEQSSGDKVRGTGITKAGNSTLRQKLTEAAKGYWRGRIGMKSATFKKFEKELPKEVTEYALKANTRLQRKFFNMTHVKGKNMNVAASACAREMACFVWGLITNHYDKAPAVPKTDEELLDLN

SEQ ID NO: 83737 - protein, 427 aa, unidentified
MRSIALDVHRDFCEVAIKDESGLRLAGRVRSSVCELELFAQSLAPDDEVALEATGGALQIARILEAHVARVLIANTRKLSAIAESKVKTDKLDAKTLCELLAAGFLPAVFSPDEFTRALRRRLQRRSKLVRSRTRAKNECHAVLTRNLKGRPPVTDVFGKRGREWLAAIELPADESETVECCLREVDFLDCEVGLIERELARQALSSPQIRRLMTVPGVSLVSAATFVAVVGDVHRFHSPKKLFSYGGLGPRVRQSGEGPARHGHISKQGSSEARHMLCEAAWVAVRTPGPLHAFYERVRARRGAQIALVATARKLSVLFWHLLTREEDYAFGRPSLTRRKLRALELKTEQGWRRGRYSGPRVHEAKKEREQEREFSDQVETAYRRLVQDWQPKPPKSGAGATRGRASSKPTSGKQRGRASVPNSAL

SEQ ID NO: 83738 - protein, 417 aa, unidentified
MNQYAACLGIDWADKKHDLCLLDTATGKKTRLVLPHAPQAINEYFSNLRARYPRQRIAVGFEQSRGPLLFALLQFDFLVIYTINPTTLAKYRQAFSPSRAKDDPTDAEYAAELLMQHSDRLKCWHPDDDETRTLRYLVEHRRRLVGDRTRSSNRMTSLLKCYFPQVLSWFPDLATVLVCDFLLRWPALERLRGVKRTTLLHFFRAHHSVRTDTLEKRLAAIKESLPLTTDRAIINSSVLMISALAAQMKTTCEAIKQFDLEIEKLCAAHPDFPLFQSLPGAGEVYASRLLAVMGTQRDRWTTAQELACLAGIAPVMERSGQSTWIRWRYFCPKFMRQSFHEYAGESVKHSFWARAYYEQQIAKGKNRQAAVRALAYKWIRIIWKCWQTRTPYNEVKYLECLRKKGSPLLAYAAKNAA

SEQ ID NO: 83739 - protein, 345 aa, unidentified
MSENKITNIVRVGIDIAKLVFQVHGVDKYGKVCIQAKISRHKLLQFTAQLRPCLIGMEACGGAHYWATEFQKQGHKVGLMAGHRVKSYVTSGNKDDKVDAAAICEAVGRPTMIFIPCKSQRQLEIQALHRHREQLSKLVNILSNQIRGLLLEHGLVIPIGVNNITKKVPGFLEDADNGLSGTMRILIQKIYNQFKETEHKLADVNKTIELFCKEDETCRRICKIPGIGPITATALYAAIGNGRQFKNGRGAAAWLGIIPRHSGSGGKTINGKLSRKGNRYIKTLAIQGGRSIVQASKRKNDKRSVGINALQNRKGNNITAVACAHRNIRIAWALMARNEEYKQAA

SEQ ID NO: 83740 - protein, 361 aa, unidentified
MNATTVAVDLAKSVFQIAVADANWMPIESHRLTRTQFERWFANREVGLVVMEACGSAHHWARWLNRLGIEVRLLPAAYIRAYVKRNKTDAADACALLEAARCSDIVPVRIKSVEQQALQGLHRIRSLWMSTRTARINAMRGFCREFGLAVPTGARTGVEAMSRALVDPESPIPLLIRSSMKLLIEEIRLLELRIAQLEKELTALAKQSPACTTLLSIPGVGLLTATAMVAATSGNVSHFKDARHFASWFGLTPKEYSSGSSRKLGRISKKGDRYLRMLLTHGARSVLRMASLAQQAGRRLDGLRAWALKVQGRTNHNKAACALANKLARICYATLRDATSYGEPVVRPNKKLERTAFAIAV

SEQ ID NO: 83741 - protein, 371 aa, unidentified
MKSILSVGMDVHKNSFSLCAYDGYTGEIVSESTFASDVKLVIKFIETLKIQHENDVEIKCGYEAGCLGYSLYKSLTARGVDCVILAPTTMQVSAKNKMVKNDRMDALNIAKNLASGSYKAVYVPDEEDVEIKEYIRMIHDFKKELKRVKQEICAFVLRHGYQYDGKSKWTIRYMNWIRELEMSEIQRETLNEYIAEMENLNDKIDRFMNRIDEMYQSDRYNEKVSKLRCFKGIETFAAMTIQVETADFERFPNAKAYASYTGLTTGEHSSGDKNNRIGITKQGNTVIRKTLVECAQSLVKGNVYAKKSQGLKSRQKGMDVNIIEYADKATERLKKKYQKLIERNVPRNKAIVAVARELACFIWGMETGNIH

SEQ ID NO: 83742 - protein, 417 aa, unidentified
MNSPPESIPIVRYIGIDIHKYYVMVGGQNRSRKWVLRPRRIQISRFRDWAEKNFHPTDAVVIEATGSVWDIHDIVEPLVGKILVANARKIRQIAEARVKTDKKDIERMINQLLSGVVPEVWVPPVHVRELRSLISFRWRLNKQLTMSKNRLHSVVQRFNLDLPDGGLLTDQNQSWWEKQEFSDLTRFEVEQELDIVVQLEEKKDAIDQKLAELSNTEPWASDMVYLMQIPGMGLILSMVVLSAIGDITRFSHPKKLVSYAGISAGVHTSGETNRSKPITKEGRKELRWAMVEAAWAAIRSDPYWKGQFKRLEKRMHKNKAAVAIARRMLVSIWHILIKREPYHHFDEETIAYKMLIWAWAMDESSRKGMTPQQFAKYGLLRLGVGQNLERIVRGGAPRRIAPIEEILALKPELRPPG

SEQ ID NO: 83743 - protein, 343 aa, unidentified
MLTITTIGLDIAKSVFQVHGVDAGGQAIIRRQLKRRYVLTFFQKLSPCLVGIEACASAHHWSRELQALGHTVRLMPPAYVKPYVKRQKNDATDAEAICEAVTRANMRFVPTKTPEQQSGLVLHRTRHLFIRQQTSVINAIRAHLAEFGIVAPVGRRGVEELLNVVADPNDRRVPEIARACLSALGAQLRRMKEQILEFDRLIRAWHRSNEMSMRLEEAPGVGPVLATALVAAVADPKSFRSGRNFSAWIGMVPKQHSSGGKNRLGNISKQGDRYLRGLFVAGALSVIRYAKIHGTKHRPWLTSLLARRPTKVAAIALANKIARMVWAMMARGERYKEPVALAR

SEQ ID NO: 83744 - protein, 377 aa, unidentified
MKAPSTRPATVLGLDVGKSSHWACLIDRDGEVLASAPVRNREAELDTLFASAPAGTLVVVDQFRNIGSLAVRRARAAGLGVAYLPGLAASRAAGLFAGEAKTDERDAAVIARTALGVPDSLSGVPGRGEALEAARALSSQRDHVVACATRDKNRLRAVLLESCPALEAAVDLSDRRWLELLAGFGGAWGIARSGAGGPRAEAAGEAAAASTAPPPALVEAENRQVRFLAARISEALDEAGALEAETAALLEGDETYACLLTVPGIGPRTAAQLAVSVDIGRFPDHDHLASYCGIAPRVRSSGTSVRSVRASRRGDARLKSLLIFSCNSLVRSSGRYGEYYRACRARGMGHGRALKAVARKRLRAIYAVMRDRVPYRE

SEQ ID NO: 83745 - protein, 349 aa, unidentified
MSQPFSNAVAVIGIDIGKNWFHVVGQDNRGAIVLRQKWSRGQVETRLANMPPCLIGLEACVGAHHLSRKLKTLGHEARLMPAKYVRPYSKGQKNDFRDAEAIAEAVQRPTMKFVATKTTDQLDLQALHRVRERLVSQRTGIINQIRAFLLERGVAVRQGLRFLRAELPRILATPPDVLSPRMAGVIEDLAHDWRRLDERIDHLSGEITALARQDVGCERLMSVPGVGPIISSAMVAAIGTGEVFSKGRDFAAWLGLVPKQTSTGGRTILGKISKRGNRYLRVLFVQAAWVVLIKPQSWERHGLRSWIEAAKKRLHRNVLAIALANKLARIAWGVLARGRSFEASRLQAA

SEQ ID NO: 83746 - protein, 344 aa, unidentified
MLYVGLDLSRKRLDWQALDLYGERVAVGAVPPDRDGLAKLGQRLGDAAVLAVIESMSGARFVHDQLERAGWDVRIADALKARGLAPLACKTDKIDCWVLAELARLNLVPEIWLPDPEVRAERERARFRLHLVKHRRALKNRVHSILFQHGVANPHSDLFGVGGRRLLERLALPEPWASTVESSLSLIDTLDEQIHACEREPRRLGADHPYIPLLVTCPGIAWTLAYTIAAELGDLSRFASPRKLVGYTGLCPKVEQSGERDRRGPLRKNGPDYLRWALIEAAHVAGRNPRYQPIVERMRARHGRTRGSKIAAIEIARRLTESIWHMLTTKQPFAPAGAPCPLAA

SEQ ID NO: 83747 - protein, 346 aa, unidentified
MTKKAVKQVVGIDVAQNELVATLGRMLDDFSIELYAYQVFKNNDKGILSLIQWTEKLTDNEISVRYVMEATGVYHQKFAYHLDKNKHDVSIVLPNKISNYIRTLELKTITDKSCSQAIAQFGLERKLDNWKKPNDVYKELQQLTRERDQIVQERSIVKNQIHAEKAEAEPNQKSMERMQTRIRFLNTQEKEIKGDITAIVNKSTDLKQVLNRVTSIPGVGELTAVIVLAETNGFELIRNKSQLASYAGLDVKEKQSGTSVKGKPRISKKGNRNLRKSMHIPALTAVKWDENFREIYARLISKHGIKMKALVAIQRKILELIYILFKNETVYDKEYIIKNSVKAQMA

SEQ ID NO: 83748 - protein, 414 aa, unidentified
MDIINTHCAGLDVHKKTVVAAIIVPDKGRGLHKETRSFGTMTGELLTLSDWLMSLGVTHVAMESTGEYWKPIYNILENNFEVLLVNAHHISKVPGRKTDVSDSEWIADLLRHGLLRGSFVPPIGQRELRELTRCRSTFVKERATLVNRVQKVLESANIKLASVASDVLGVSGRAMLEAIIQGTAAPEEMAELSKGSLRNKRKELSQALEGRVKAHHRFVLTEYLSQIDSLDEAIERFNQEIEEYCRPFEDAVVLLDTIPGVARRTAEIIVSEIGNDMRQFPTAHHLASWAGVAPGNNESAGKRRSGKTTKGNRALNVALTQAAHAAARTKNTYLSAQYGRLVGRRGKKRAIRAVAHSILIIAYHLIDRNEPYRELGGDYFDQRNPEAVAKRLLRRIQKLGFEVEMKGLFSSVPA

SEQ ID NO: 83749 - protein, 347 aa, unidentified
MIIIGCDLHTRFEQIAMLDTETGEVVEKRLEHEKGEARRFYAGLKEPALVGIEATGYTRWFAEMLAELGHELVVGEAGKIRAKETRKQKHDRRDADHLLNLLVRGDFPKIWLPSAQERDVRVLLEHRHQLVELRTRAENGLQAMAVSYGLRRRGRLWSERGQEELKKLPLREGMGRRREDLLRLVRQLGVWIKELDQRIEQEVARREDAQRLMTHPGVGPQTALATVLVLGPVERFPDDRHLTSYLGLIPREASSAGRQHFGHLTKQGNRLLRWLLVEAAQTASRYDPRLRRAYRRLAFRKGSALAKVAVARKLAIRLYIMLRDKIDYSEFCRRGSHAGMLEDVALV

SEQ ID NO: 83750 - protein, 348 aa, unidentified
MNLKRIGLDTSKAVFTLHGVGQDERAVLRRDMRRAEMEAFFAKLPPTHVALEACGGSHHWGRRLAAMGHTVQLIPPQYVKPFVRRGKNDRNDAEAISEAAARPDMPSVPVKSAEQQAEAIVLSARELLVRQRTQLVNAVRGHAAEFGVIAAKNISQLPALLETVAAAETVPATAKEMLAFLGEQVAQLDERIAELDRRMKQQHKANPVSQLLAEVPGIGPIGALSLALTIDPGRFTSGRHFAAWLGLVPKEHSTGGRQRLGGISRAGNERLRQLLVLGATAVIQYAKPGSKSASAWLLALLERKPRKLAAVALANKMARIVWAMMATGEAYRGSKKAATPAAGAAAAA

SEQ ID NO: 83751 - protein, 354 aa, unidentified
MSQTPNTAIAVIGIDIGKNSFHVVGHDARGAIVLRQKWSRGQVEARLANIPPCRIGMEACVGAHHLSRKLASLGHDARLMPAKYVRPYSKGQKNDFNDAEAIAEAVQRPTMKFVATKTAEQLDLQALHRVRERLVSQRTGIINQIRAFMLERGIAVRQGIGFLRTELPTILATRTDALSPRMLRVIEELAGDWRRLDQRIDGLSGEIEALARQDQACSRLMTVPGIGPIISSAMVAAIGTGDVFSKGRDFGAWLGLVPKQISTGDRTILGKISRRGNRYLRVLFVQAAWVVLVRIKSWERYGLKSWIEAAKKRLHHNVLAIALANKLARIAWAVLAKGRAFELTRTDDAGVRPA

SEQ ID NO: 83752 - protein, 365 aa, unidentified
MIYIGIDVHKKRCVACLQDETGQVLNELKFANKQSGFQELLAFLEGKKAKAVMESTGNLWIRLYRELEAHGVDVVLSNPAKTRVIAESVIQTDDISSRMLADLLRAAFIAVCYVPSPEVRGMRSHLRYRTKLVRDLTRIKNRIHSILDMYELPEFKGTDLFGKAGLQWLRDQLPALTFNDRLILRRELTRVEEHINHIKEVEQEIAAQAGITEDVKLLLSLTGVGYFTALLYLYEIGDIKRFSSSSKLASWIGLVPRVHQSGNACYYGNITKRGSSLLRWALIQAAHSAVRSDPHWREKFNRISAKRGKQKAYVAVARELAETMYHMLTRREPYWFSKEKTYTQKLKNLNRLVGKAQTNVGETPD

SEQ ID NO: 83753 - protein, 338 aa, unidentified
MSKITTIGLDLAKNVFHVVGCDAHGKRVRRKQLRRGHMLRYFANLPPSLVGMESCASASYWARELQALGHAVKLIPPQYVKPYVRGNKNDYNDALAIAEAVVQPQMRFAAIKTVAQQDIQALHRLRERRIAERTALCNQVRGLLGEYGIVLPRGVASLRRRLPELLEDAGNGLSELFRRLLAQCDQQFGELDAHIDGYTRELKRQSRQSAVCQRLETIPGYGPIVASVFYSVVGDGSAYRRGRDVSAAVGLVPRQHSSGGKENLLGISKRGDRYLRSLLIHGARSVVRQAAGKDDRLSRWINRVKAARGYNKAVVALANKLARIGWAVLAHNTTYQAV

SEQ ID NO: 83754 - protein, 329 aa, unidentified
MKRNCFIGIDISKKTLDVVIYDQEKKSSKTHFIVNNELKGFKEMIKKIKSEGINLNEAFVCLEYCGVYGLELGLFLEGKVDFCFCSPLHIKRSLGLTRGKNDKLDAFKIARFSFLFRDELSPSSMPSETMLKLKTLMGERNRVIKGITIEKQVLNELSAQLNKNAIKRANKRLSLLTADIKAIEQEVTELIMCEPELKKSYDLLISITGIALVNATMMILCTNNFEGITNARSFACYCGVAPFEYRSGTSIRGKTKVSHLANKKMKADLTNAARSAVVHDPEMRIYYKRKRAEGKEHGTVMNAVKFKIITRAFAVINRGTPFVKLRQAG

SEQ ID NO: 83755 - protein, 333 aa, unidentified
MKKQTPPEKMPSTTYVGIDVAKATLQVHLNGHQIEFNNNSKGHAKLTKKLAQLTRPHVICEATGGYERPVVAVFHQDKILVSVLNPAHTLAATKAQGMRAKSDCCDAEALTDYGQRYQPEPTVPVPQELREMTELALWLQQLIDQRAVAKTQAEHHDNTFVRHQHQELLAHYDEQIKTLEKEIKKRIQSQPEFQQRLDCLLQIKGVGFRTALMMLVRMPELGQMNRGAAAALAGLAPWTRDSGTMKGKRCIGGGRAQVRPVLYMSALSASRCNPVLAPFYAALKKRNKPSKLALTALMRKLVIYMNHKLKALATMPPAQGTKNATKPKKVLAN

SEQ ID NO: 83756 - protein, 413 aa, unidentified
MIVGIDVGNEKHYFRAFNWRGIELTRKSVAFSNSMEGFNSFYNTIVELMQKSELEEALVGIEPTGHYWFDLGQFMGEKDIKFVMVNPHHVHKTKELDDNSPSKNDRKDPHVIAGLVRDGRYFYSYMPIGIYAELRNASNRRFVLVEEQTRAKNRLQKWIAVYFPEYKGIYTHIDAKGGMLVLKKAPTPEEIVRLGVEGIIKIWKDAKLRGNGHKKAMLILAAAMRSIGLKAGLTEARMEIQDLIEDYELQTKRLERVNDLIKGLCQQVRYADKLLEIKGIGITTVAGFIAEVGDITRFDSTKELQKLAGLELVADSSGKHNGKTKISKRGRKRLRYLLFEAAISVVGKNEEFKEIHRYYTTREKNPLKKMQSLIVVACKLIRVFHAILTKGIRYDASKMLKDIRHPGEQLKAA

SEQ ID NO: 83757 - protein, 374 aa, unidentified
MLSARPAGACRPPPDQQKELAITTIAHPERPRVTVGVDTHLDVHVAHAKDQLGRRMETVSIPTTPAGYQDLLAWARGLGEVEAWGVEGTGCYGAALTRFLGDQGQVVLEVNRPDRQARRRRGKSDPVDAEAAARAVQAGEVTTLPKAGTATVEMIRSLRVARQTAIKARTQAINALKALLVTAPAQLREQLRGRSAAMLVRQAAALEPGPLVTPTAAAKLALRCLACRYQALHAEVATLDTELARLVAKAAPGLVARFGVGPDSAGALLVAAGDNPGRLRSDACFLMLCGSSPIQASSGKTRRHRLNRGGDRQANAALYRIVVVRLRWHQPTKDYMARRLTEGKTTKEIIRCLKRYVAREMFTVLNQTVPTPAT

SEQ ID NO: 83758 - protein, 312 aa, unidentified
MTEHCYCGIDVAKDRLDVQVLPHRQRFSVDNNATGWAELVERLHALPIAAVGIEPSGGYERGIIRTLLAAGLSVRRINPNKLRQFARARGILAKNDRLDAQLIAEYVSIMPTRVVQRATTAERLAEVVTMRRQLCDEHVTIENQAAHVEDAILRRLNKRRLARLKADIHLLDKRMAEIVAADAILAQRYELLTSMRGVGPTLAFTLIALLPELGQMSRKQIAALVGLAPYDFDSGKLKGHRCIYGGRMPVRNILYMAALSAARYNPALKIFHNRLAATNKKPKVIIVAVMRKMITTLNAMVRDNAAWQPRAA

SEQ ID NO: 83759 - protein, 341 aa, unidentified
MAIVTLGIDLAKNVFALHGVDQYGKAVLIKPKVARGQLLELVAQLPPCLIGLEACSGAHHWAREFRRHGHTVKLMAPKFVAPYRMSGKRGKNDAADAAAICEAVTRPNMRFVPVKDIDQQAILCLHRTRQGFVEERTALYNRLRGLIAEFGIVLPQKVERLRREIGAHLEALPGWANHCVGDLLAHADRLKERIEEYDRAISVAARQDLRSRRLMQLRGIGPTTASALIASLGGGHDFKNGRQLAAWAGLVPGQYSSGGKPRLGRITKVGDAYLRSLLVMGARAILAGLGEKQDRFSRWARSLVERRGYWKAAVAIAAKNLRLAWAVLHYGEDFRLNAETA

SEQ ID NO: 83760 - protein, 341 aa, unidentified
MAEISMIGLDLAKSVFQVHGVAAAGQVSIKRQLRRGEVMRFFAKLPPCLVGMEACASAHYWARELTKLGHEVRLLPPAYVKPYVKRGRKNDAVDAEAICEAMQRPRMQVVPIKTEEQQAVLSLHRVRSLLVTQRTMLGNAVRSHFAEFGIIVPAGDGGLGKLIVLALDAEDQSLPQAAREALAMLAAQWRETDAKIAALDREIVVCHRANPDSVRVATIPGIGPLTASALVAAIGDPGRFETGRHFAAWLGLVPKQNSSGGKDRLGSITKMGDRRLRSLLVVGATAVLRHRQKEKGTWLAGLLARKSARQVTVALANKMARIAWAILAHGGTYREPAARAA

SEQ ID NO: 83761 - protein, 387 aa, unidentified
MAQANDLSRCLAALDQDSTLIAVIEMSLKSWLVAGIVPGLDRRPLKKLAPDGEALLQQLHRWRDQALAAGQTITRIAAAFESGRDGFWLARWLRARGIEAYVIHSASVAVSREHRRAKSDRLDTELLQRAFLGWLRGEAKHCQMAAIPSLEEEDARRPGRVRDTLMRERTRIVNRIKSALIRLGVRDFQPLRRDAAKRLDELRLPEGPRLPPNTQAELRYELSQLALLRKQIEAIEAARLAKLKANPSAGHNPMVLLLARVLGIGIETADMLVTEILSRRLRDRRAVARYAGLTGAPDESGSKRREKGLARAGNGRVRRGMLQLAWRFVRFQKGSPLAQWFEARQTTPRKDLRKKLIVAVARKLLIALWRLVTFGELPQGVVLRPAA

SEQ ID NO: 83762 - protein, 337 aa, unidentified
MRNSTVIGIDLAKDVIQVCKIDKHGELISNKAVSPGKLKELLAKSIPSIGAMEGCGSCHYWARQAQKQGHDVRIISPKKVKAFLQGHKTDANDALAIAIASIQFGMRFSQIKTEEQQALQTLETSRKFLNKELIALNNHIRAYLYEYGITLRRGHKSLRETMTIVLDNLDTRLPICLKNTLSLLWERYKKTVEQLTEAEKYKANFVKHLEPCQRLMDLEGIGKVCASMLYANIGDGREFKNGRQASAYIGLTPKQHSSGGKTYMVGIDKKGGNKESRAALYQGALSVISKLPIEPRTVKEAWLIDRLFRILYQRKTPDLSDHRSSAPSSRPSKKMAN

SEQ ID NO: 83763 - protein, 458 aa, unidentified
MKSTLVLGVDVSKGYGDFVLLDAHKRVVEPPFRLDDNKQGHDILKKQLLEWKKNYRVSRLLLVTESTGGYEDNWLRISKDKALSFVESYRINAKIIFHEYQAQRRNSIDDGVSAITIAEHVVKNLENFTVTSSFEETPYTSSRSLIRHYVSLQEESSSHKNALVKLLYQYLPSLEALKPREWPIYWIEIFVRYGSRKSIQIAASKGFKQLKRVPPGKAKEIAEALANGIDMRETPAMVVYAIRSKARQIKRLMEEIKEVKKMIIEVAPVDAQQVSLLKSIKGMGDITPVILLSFIEEVGRFGDAKQMACFFGVQPRVKKSGDGAYRAKMSKQGAGLVRRELYLLAFRTLNKEPYLRAIYAKSRAKGMVHNAAIGVLMHKILRMIYGMLISNTPFNVGIDQLNQHQVADKPKEKRQKKDTSRRFQPPSMAAPISGRQRRKRKKDYELQADGISESTESS

SEQ ID NO: 83764 - protein, 479 aa, unidentified
MTPSKDAFPEPCPPVPTVPEPLVLRPSSSLPLYNPHAAGIDIGEAEHWVAVPPDRSPEPVRRFGTFTADLDVLADWLLDCGVTTVAMESTGVYWIPLFELLEARGVQVFLIDPRQAKRAPGRPKTDRLDCQWLQRLHAYGLLAAAFRPADQVCVLRSYLRHRQMLLTYGAHHIQHMHKALQQMHLKLSQVVSDLTGVTGMAILRAIIAGERDPLTLAQLRHPHCQHSEDEIAKALQGPWRAEHLFALQQAIELSHFYHQQLTVCDQLLQAHLGTCADQSDGQPLPPKPRRHKKANEPRFDARTPLYRLAGVDLTTIEGIEEGTALVILSEIGTDRSRWPSVKHFCSWLGLSPQHKISGGKVLSRHVRPGAHRVAVAMRLAARTVQQARTALGAFYRRMRSRLGAPKAITATAHKLARLVYSLLKHGSAYVKQGLEAYESQYRERTVKAVARQAKALGYTLVELAVPATPGNDAVAPATP

SEQ ID NO: 83765 - protein, 340 aa, unidentified
MYYIGLDVHKKTISYCTKRVDGTVQAEGKFDSTRLALDAWLAPLPQPWTGALEATIFTGWIYDYLKPHASALKVAHPAMLRAIAVAKKKNDEVDARMIADLLRCNLLPQCYMAPSEFRERRRTLRYRNLLVRQNVQMKNRTAGLLMETGVAYNKQKLHGKAYFAQLRKSPEVPECIQPLLKIGRESIERIAKLDRALMKALKSDPLLVARVERLLTIPCVGEVTALTWVLEVGEVSRFSSVKDAVSYCGLCSAERSSAGVQKRMPISKQRNKHLQTVLIEAAKLSQHFNDDLTAVHEKALAKGNKNRATIAVARKIAAYLLAVDRREKPFLEGEESADAA

SEQ ID NO: 83766 - protein, 408 aa, unidentified
MTVVGIDVSKGKSMVAAMKPGGELVAAPYEVRHSDIELSHLALDVLCMEPDTRVVMEATGRYHEPVAALLHSEGIFVSILNPLLIKQSGAGSLRKVKSDPKDALKIAKYGLDNWSTLLEYTPMEAIRQQLKLCARQCDLYNKNIVMLTNNLISLSDKTFPGVNELFSSPEKADGHLKWVDFYRSFWHCDCINRMSPDAFEERYKKWCKSKGYHFSNDAADALYAASCGPYTTLPRDNNAKLLVTVAADQLIALRENQSKLEAEMLNLCKQLPEYETVMAMYGVGKSTGPHLMAELGDVRRFPHRSSIVAFAGVDPGVVGSGKMQLSSVTTSKRGSPQLRKALFQVVSTYVKCKPENEAVYQFYAKKRDEGKPFFVCTTAAANKFLRIYYARVKECLNAVESATQVEEG

SEQ ID NO: 83767 - protein, 326 aa, unidentified
MQKVLGIDVSKEKHDIVLVIKGKKYHKEINNDAKGFGYLKRWLRSHQAPHVHACLEATGQYGEAIAEYLYEQGHLVSVVNPARIKRYGESKLHRNKTDKADADLIAEFCLKEKPAFWEPLSPEIKHLRALTRRLQALKVNLHQEKNRKKSGEKDDWVLEDLDLHIGFLKERIEAIDDETYDLIKQTPELKSQYDLLTSIPGIGHLTAITLLAEISDFSAFENAPQLAAYAGLNPQGHRSGSSVFKKTQISKQGRVELRHCLFMPALVALKCNPVVQSLDVRMTKTNHHRMEIVIAAMRKLLHLAYGVLKTQIPFDPDYGKQFNFSA

SEQ ID NO: 83768 - protein, 316 aa, unidentified
MMNGDGKVLGIDVSKEWVDAFLFPSEQSWHVDRTWDALHAWVKTLPTGISLAVMEGSGGLEQLPGAILAGAGIPVSVVNPRQVRGYVEAHGRKAKTDSIDARYIAQFGSHVRPTPQPVSSKEQNRLEELMTRRSQLVKMRTSEKNRLSSARGPRVQESIRSHLQWIEKELGVIDDELDTLIKNNPIRQTTERIITSIPGVGTLTARAIQADLPEIGTPNRKEIAALAGVAPFTHQSGKWKGRSFIIGGRSNVRSVLYMAAISAVRWNPVIRNLYERLIQKGKPFKVVITACMRKLLTIINAMVRDQKMWCPTHITS

SEQ ID NO: 83769 - protein, 345 aa, unidentified
MSIVGGLDIHRKQITFDCLDTDTGELRRGSIVPADRQHLADWLAEHSAGGAEAHLAFEGCTGWRYVAEELGRAGVYGHLAEAADTAALRGPKRHAKTDRADSQHLRQLLFDGRLPECWIPPAHIVEARALLETYHDLRVEHTAWVQRIHAVLFHQGAHRPGVGLRSVEGQAELAVICTTELSAAGRLQVATALDMLTALEDHLHRLHRELIDAARHLNGAKVLSARLYGVGPVTGLALTCWLGGAGWFSSARKAVQFAGLDVTVHSSDGKRSAGRLSRQGPAVLRWCLYEAGKTHARGSAPDHDYYAQAQQRIDGKRAALSEARKIVRQACHILAELGDDALTNV

SEQ ID NO: 83770 - protein, 363 aa, unidentified
MSMKGKTLVGLDVHAAQTHAAVLEIGSGELRVKKLLGPPGEVVSFLEGLGPGVRVVYEAGPTGFELARMARERGIALQVVAPGSIPKGSGDRVKTDRRDAVRLARLLAAGELRFAFVPSVADERFRDLTRSIEAVRGDLMRARHRLSKFLLRRGERYPGPGGAWTIRHMNWLRGLSFEDACSRASFADYLAAVELLLGRRASLLEALERAVPESNHAEVIGRLRCFRGIDTLSAAGLAAEVGDFTRFLKPSLLSGFLGIVPSERTSDLKRRQGSITKAGPPYARRLLVEAAHHCRNRPLIGETLARRQEGQDPRVIAIAWRAQQRLHQRWQHLHGKRRKPAGIVAIACARELAAFCWEAATLD

SEQ ID NO: 83771 - protein, 445 aa, unidentified
MKHKKLSKASGKKLPNHLQHINQHAAGIDIGSRSHFVAVPEGCDTQTVREFSTFTGDLERLAKWLSACGVTTVAMESTGVYWIPVFEILESHGFEVRLVNACHVKNVPGRKSDVLDCQWLQQLHTYGLLRGAFRPAEQICTLRSYVRQRGTLVRTSSSYIQRMQKALSQMNLQLHNVVADITGLTGMRIIKAILGGQRHPDILAALRDKRCKNSESTIARSLKGHYRPEHLFSLRQAVEIYEFHQEKIAECDRQILELLQCFDSQDGPNDSPPANVGEALQCMSGVDLTSIDGIDTNSALKILSEIGTDMSRWKTSRHFASWLGLSPGTKVSGGKVLSGMTKPVANKAAAAFRMAAFTLFNSKSALGAYLRRQRARLGSPKAITATAHKLARLVYAMLSQGTSYVDAGQKYYEERYRSRVVQNLKRKAHEMGFELVSVQKATVST

SEQ ID NO: 83772 - protein, 345 aa, unidentified
MDEITVIGIDLAKGVFEVCLKAADGGVVERRRLKRGAFERYMETAPRVPVGLEAGPGAHYWARWLSERGFAVKVMSPRAVRAYRTGPHKSDALDAAAIGEAATRASVRAVPVKSERAQTLQALVRVRERRVAARTRLLNQLRGLLLEFGIASARNLLVWYPRIAETPAFAALPARARRLFDELIAEARALDHAIKELDRELAGEVRADPTAGLLASVPGIGPINATQITAQIVEPGGFARARAMPAYLGIVPRLIASGKTSRLGPITKHGPGEIRKGLVLGAQTVITTALRCPDRDDPLFRFARRLMARGKPRNVVAVAVANKLARIVCAILKSGRPYNPQHGAA

SEQ ID NO: 83773 - protein, 400 aa, unidentified
MTAVWAGIDSGKRAHHCVVIDSTGRLLLSRRVVNDESALLELIAAVLAVAGGDPAVWATDLNAGGAGLLIALLSERGQQLLYIPGRIVHHAAATYRGDGKTDAKDARIIADQARMRTDLQPVRGADQISTDLRLLTARRTDLVYDRVRTINRLRATLLEFFPALEAAFDYSKKAPLILLSGYQTPEGIRRIGATRLAAWLKKRGCRGSTSVAAKALTAANAQHTVLRTEAIGAQLVAQLAQQIAVIDAAITQLDGQICERFDQHPDAPILLSMPGFGAVLAATFIANTGGDLRAFETVDRLASVAGLAPAPRDSGRISGNHHRPRRFNRRLMRTCYLAALSSLKNSPASRAFYDRKRAEGKNHKQALIALARRRITTLWAMLRDRTIYQEPPQPALAPAT

SEQ ID NO: 83774 - protein, 475 aa, unidentified
MGSTQSAAALTETRGGPAPAGQHLYVGIDIGRRTHVVAVIPQARMENDSWEKAQARRISTTVQGFKEMSQLLAATGIPPDLVRVGCEPTGGWYGLTAAAWLERQGYEVSWLQNWAIHDQRELMIGKQTKTDALDARLIARLLYERDYMGRNRGFLQRPPRSCDALRMLVRNRANLVQQRTRYRLQLTGIEDVLFPELKEFFKTSITGTAARKLLGAFPTPSDIAEADAEGLYQVLVVRGRMRKLGPRLQEFQEAAAESAGLTEGIEPILSAQDWLLCQLDRIDEQVASVEEAIAIALDSWPADERAVMESLPGITTVREAVLFSAIGNIDGYRDDRQLRKMLGWYAEAKESGSSVSKHHLGHSGNRMARREIWLWSMQLLTPSARATPFRAYYQRLRDRGMPGQVAIGHLAGKLISVLFYCLRYTQPYDPDRHARALGLVRPAPTADVVSAGAADAEATVAGTAEAASLPGGVRF

SEQ ID NO: 83775 - protein, 420 aa, unidentified
MVYLERGYNLKELPWSKTVSNSFLFKEACMILVGVDVAKDKHDCYIMTSEGEVLFKSFTIANNMEGFNQLYEKILSVIDNFDNVKIGLEATGHYSYNILGYLLDKGLTPYVINPLHSNLYRKSLSLRKTKTDKVDSRIIASMLMSDVSLKPYSNTLYHNEELKSLTRYRFTKVQERAKLKISISRLVTILFPELEKLVPTLQMNSIYALLYEFPSAHAISKAHLTRLTNLLNTTSKGHYTKDKAVLIREAAKNSIGSNMPAKSLELKHTIKLIKELTSEINEIEEEIKIIMNKINSPILTIPGIGLSTGAQILAEIGDFKNFSSPDKLLAFAGLSPSTYQSGNMYSSNAKMEKRGSKYLRFALFNAAIYVSYWEPTFSQYLKKKRVESKHYYVAISHVVKKLVRVIFHLEKTNERYSTVV

SEQ ID NO: 83776 - protein, 412 aa, unidentified
MEVIYPCCCGLDVHKKSITACVLWAEAKGKSRKEKKRFGTFTHDLLQLADWLAERGVTHLAMESTGVYWKPVWNILAEQFEALLVNAQHIKAVPGRKTDQKDSEWIADLLQHGLLRGSFVPPQPIRELRDLTRYRVSLVQEINRIANRIQKVLEDANIKLASVATDALGASGRAILEAMLAGEQDAARLAEMSKGLLRNKIPELKLALQGRMTEHHRFLLRQLYDHLRFTESKRSEIEQEIDKRMLPFEDKVTRLCTIPGVDRVTAWGMLAEIGMNMNQFPSSGHLASWACLCPGSFESAGKRLSGKMRKGNVSLRRCLSQAAWAISMMKNNYLSALYRRIAARRGAKRAVMAVAHALLEIAYHMLKRKEDYRELGADHFDRIDVNRIRRSLVRRLERLGHKVTLEPLAQTA

SEQ ID NO: 83777 - protein, 386 aa, unidentified
MATPAARRIEQDSFPRPTLYLAFALGKNTWKLGFTIGVAQQPRERMIPAGEVERLQQEIARAKQRFGLPEEACVMSCYEAGRDGFWLHRYLGAHGIQNHVIDSASIEVNRRQRRAKTDRLDVRKLLTMLLRHSAGEKKVWSVVRVPSVEEEDRRQLHRELTTAKQDRTRIVNRIKGLLAGHGVQLVLQGDVEAQLDQTHQWDGAPLPSALRSRLKRAWQQVGFLTAHIQTLEAERRALLRHRTDPVIAQVRQLFTLRGIGIKSAWLYIMEFFAWRDFQTAKQVGALAGLTTTPHQSGQSRRELGIAKAGNRHIRAMAIEIAWAWRRFQPDSALSQWYERRFGAGSARLRKLGIVALARKLLIALWRFVKTGVLPEGAVLKTATPSP

SEQ ID NO: 83778 - protein, 341 aa, unidentified
MNTTTYGLDIAKTVFQLYWVEPSSKCSNRRFSRAKLLEFLANREPGRIALEACGSAHWWARQLQALGHEPVLLHARYVRPFVQTNKTDAADAKAIWTAAQQPGMPIVAPKTESQQCVLGLHAMRQLRVKMRTMLVNQLRGTLYEFGIRIRPGLRAGLQEIVQRMDELEQNVPPMLFEFVREQLQSIERLDQEIARLDQRIDAWGRQNRACKTILAIPGIGMLTATAMVATIGDAHTFKSGRQLAAYLGLVPKQTGTGGKVWLSGISKRGDPYLRTLLIHGARVVLSHLCRKNQPGWSLMLAQRRPKNVAAVALANKTVRTIWALLAHDRAYDRDYVSVRPA

SEQ ID NO: 83779 - protein, 366 aa, unidentified
MEVTTIGIDLAKSVFALSGADRRGRVVIRRQLRRPQVLGFMRGLPRCVVGMEATGGAQYWARQFTALGHEVRLMSPALVMPYRKGNKTDRNDADAILEAVSRPSMRFVMVKSVAQQDLLALHKVRAQLVKSRTALCNQLRGLLRERGVAVRVGVAALKRSLPAALTDESSELSGEMRELLSEMSQWLRTLEQRIASCEARITRKFKHDERCVRLAEVPGVGPLTATALVAAVGNAQRFKNGRELSAYLGLVPRQHSSGGKTVLLGITKRGDRYLRTLLIHGARSALRQCKLEGDARSRWMARISAARGPNVAAVALANKNARVLWALLARGDRYRSTNVAAHAVLRSGSPPAVKRARSAKLRVRKD

SEQ ID NO: 83780 - protein, 383 aa, unidentified
MTQALGTVIDYERTLILAIELSNTSWVLAAQIPGLPGVKAKRSIDPTPEALMAAIENYRGRAEKAGRNVDRVIAVYEAGWSGFWLVRWLAKHGVEEAHVIQPSSVPVDRRARRAKSDGIDAELLLRTLLAWLRGEPRVCSMVPIPAEADEDARRRVRERAELISERVGLVNRIGAVLATLGAGEYNPLRRDRRQRLDELQTALGDSLPTNAHAKIARMLDRLELLLIQITELEQSRDAVLEDENPDRSSSMIQQLAKLRGIGVQSATVLVREGFVREFVNGKALGSYAGLTATPYSSGGIEREQGIGKAGNARLRTVMVELAWLWQRYQPGSAQVRWFRERGGTGRRVRKVMVVALARKLLIALWRFATQGVVPEGAVMKPAS

SEQ ID NO: 83781 - protein, 332 aa, unidentified
MRRIKKKELREEVDYDYLGIDVSKKELYVYDGDKVYVMDNKSYLTRLKNFINKMGYDKKKLVISYEPTGVYSNNLENFCARNKIKVFRADPYRASYFAKSTRGRNKNDAIDSINLYKMAQVYREEVRELKLKKRSNDLNNLMRYYRITIKEINRWNNRLKSYKHLKGEEKEFLLRKAKSNLNRYKKEKDMIFNKAKEYVKKDKLMYKKYKELQKISGIGEKVAMILLGFFIKYEDANRDQIVSLSGLDAVERSSGSSVRRRRRISKKGDRIVRQFLFLSALTAIRYNEQIYSFYSRLLKNNKPKMLSVVASMRKLLVIAFHNYKSVNQNVAA

SEQ ID NO: 83782 - protein, 416 aa, unidentified
MEEVSFRQVVSRGCGIDVHQKVAVATIGGEALRTQTREFGTTTSSLTEMKEWLLGNGITHVAMESTGVYWKPVYNILEPSGIKVWIVNARHIKYVPGHKTDKQDSAWILKLLLAGLLKPSYVPPKAQRELRDLTRYRNKLVQNVASEKNRIIRILEDCNIKLSSVMSSTSGVTATKLIDKLCDGKIVTREDIDEVYHGKLQCSKDDLYEACQGFITDHHIFLLQAIKRDIESTESIISELSARIKESLSEYDNAMEVLRGIPGLNRKTVEDLIAEIGLDMSVFPTEKHLASWAGMCPGNNESAGKKKSGGVTHGNKQVKAVITEAAWAATRTKNTFYSARYHRLAARRGKKRALIAVGHSILKSVYHVLSGVEEYKELGADYVNQRVEKRRRLYLKRELEKLGYDVQLTQQERQAG

SEQ ID NO: 83783 - protein, 308 aa, unidentified
MEKYVGIDVAKEKLDVHVRPDDLRAHFANDEEGRVAMARFCAELTPALIVLEASGGYEVPVVEVLALRSLKVVVINPRQVRDFAKALGKLAKTDTIDAEMIARFGETIRPEARPLKHADLQQLQAFIARRRQLVQMLIEEKNRLSTASSFTRPDIEAHIEWLSDSIDKAGKDISALIKKTPLWREKEDLLKTFKGIGPVNACTLLGRLPELGQLNRKKIAALAGLAPVNRDSGKYRGRRTIFGGRADVRTALYMATLSAIRHNPVIKAFYERLIHAGKLRKVALTACMHKILIILNAMVRTNTPWCAR

SEQ ID NO: 83784 - protein, 386 aa, unidentified
MAFKILRKNCCGLDIHKTWIFACIAITDSKGRTEYKQARFSSFSNGLRDLADWLAKYSCSDVCMESTGKYWIPVLNNLEQTCRVTLAHPKYTKPQKGNKTDRKDAKWICDLYMCGMVKPSFIPPPDIRQLRDLMRCRVKLTNMLTGEKNRAQNCLTVSNLKLDDVFSDVFGKSSRSIIQYILEHPGEQFDVTPFIHRRCKHPVEEIQAAVDGVVSREQAAKLKECLLHIDQLNAHRERFEAEILRLAEPYPYQLELIRTVPGFAAAPLTAVALISVIGVDMSVFPSAKHLASWAGCCPRNDQSNKKVKSTRISRAGCYLKPLLVQIANAVIKSDRHPECRERYRRIKARRGHKKAIIAVCRMLLTAIWNILSKLRLLYTSDAAGGL

SEQ ID NO: 83785 - protein, 351 aa, unidentified
MPCKTEVAVARTIGIDTGKNTLHMVGLDQEGAIVLREKVSRTRIAARLVNVPRCLVGIEAGMASHHVARELLALGHEVKQVPPAYAKPFRQGHKNDFRDAYAVAEAVQRPSTRCVPVKTADQLDLQALHRVRSRLIGNRTAVINQLRGFLLEHGIPVRQGLRFLRQQLPQILATRNDVLSPRMVRIIGELIGDWTYLDERIERVTDEIETLARADENCRRLMTVPGIGPIIASAMVAAIGNGAAFAKGRDFAAWLGLVPKQMSTGDRTILGRITKRGNRYLRMLFIQGARAILFRPAGWAKHSFGPWLAAAARRLHRNVLATAFANKLARIALTVLVEARSYAARIEPRAT

SEQ ID NO: 83786 - protein, 349 aa, unidentified
MVILGIDAHKRTHTVVVIDERGREVASKTTKTTTSAAHLELVRWAERFGPEREWAVEDCRHLSRRLEADLLAAGERIRRVPPKLMAKARDSARTYGKSDPIDALAVARAALREPDLPMAQLDGPARELRLLVDDREDLVKDRTGHINRLRWHLHELDPSWDPPARTITSYKTLDRIAERLQGDDRLVARIAADLVDRIRSLTVTERALQRDITERVNSMTPCLLALVGVGPLIAAKIVAEVADVRRFKHKDAFARHNGTAPLPAWSGNPNRHRLSRTGNRQLNAAIHRIAITQLSHHPDAKAFRDLRIATGDTGAEALRALKRRLSDVVFRALLLDAEPAHPANLTHAA

SEQ ID NO: 83787 - protein, 279 aa, unidentified
MNGITRIAIDTSKSVFTLHAVDASNRAVLRRNLRRRELAGFFGKLQPVEVVMEACGGSHHWARTLQSLGHRVRLIPAQYVKPFVKRSKNDRNDAEAISEAATRPGMHDVAIKSAEAQGRAMLLSVRELLVRQRTQMVNALRGHAAEMGLLAAKGDAGVVTLRSAIAADTVLPAAAAQALSLLGQELDRIEAQLAEADKPLMAQHKEDATRRRLAEMPGIGPIGALNFALRVDATQFASGRHFAAWLGLVPQEKSTGALCRWPPENARRAIGVRADKRRC

SEQ ID NO: 83788 - protein, 355 aa, unidentified
MNQEKYIGMDVHQATISVAVMDGRGKLIMECILETKAATMLEFIQGLQGTLSVTFEEGTSAAWLHDLLKPHVAHLVVCDPRKNALLKDGSKSDRIDARKLAELLRLNKLNPVYHGEHGVRTLKELGRSYLTITQDLTRVMSRIKALYRSWAIPCGGTTVYAPRHRAEWLAKIVEPGVRLRAQRLYQQLDLLQPVRQQARHDLLVESHKHAAVKLLRQVPAIGPIRAALLVALLQTPHRFRTKRQLWAYSGFALETHDSGEYRMVRGKLRRNRERLTVLGLNDNHNHDLKNLFKGAAISASTRPGPLYDFYVALLEKGMRPTMARLTLARKIATITLTMWKKGVDFDANQLNRQAA

SEQ ID NO: 83789 - protein, 411 aa, unidentified
MDYQDNLIYVGVDLHKEHHTAVMIDDRNRKLGEIQFLNKPAAFPKLLQEVKKHTKKGMKAVYGLEDIGGNGRALAVFLAESNCWVKEVNPVLSTARRKSHVTVQKSDSWDAECVARVLRDELEKLPDAKPMDLYWALSQLVTQRRSLVKNQTAQNQKLHQQLSYHYPSYKQFFSQVDGKTALSFWKKYPSPRHLAGVTEEELAQYLRKWSNYCLSDKKAAQILALIKEDGDTTRDFQEKRDFIVQSLVRNIRFNQIELARIEGEIKELMAGLGFQLETMTGIDLVTAAELVAEIGDIHRFSTPEKLARFAGIAPIFAGSGGKGRNYKSKQGNRVLHEIIKGIAIRQIAVTRGKKEPRNPYFYSYYEQKLEAGKTKQQAIVCIMRKLVNVIHYLMRTKAAYEMPTVSEKQAG

SEQ ID NO: 83790 - protein, 416 aa, unidentified
MNRVALQSKDNAVERRLCMAMELSDKHWKLVFSDGGEKRRHETTEAGHRMKLVEAIKKAKEKFDLLSEAKVVSCYEAGRDGFWLHRYLVSLGIENQVVDSSSIETNRRKRRAKTDRIDAVKLLTMLRRYWGGERGLWSVVRVPSVKDEEGRRLHRELASLQKERTRHRNLIRGLLVAQGLRLEPNGDFLKRLENLTLWDGAPLPLEIKGELEREYQRLSLVEAQRRALEKTRKSRLRQADTASLQRVVQLMGLRAIGPNCAWLLVMEFFAWRGFRNRRELGACAGLTGTPYDSGGSKRDQGISKAGNRRVRTMMIEIAWLWLRYQPNSKLSRWFRERFAGGGARMRRVGIVALARLAGRVMALRHVAGGCGGQGRRLRGERPRRGEEWQSVSVGRSGMSSAVGRSARQRPGLTKVK

SEQ ID NO: 83791 - protein, 326 aa, unidentified
MDDRYSAFESFVGIDVAKENFEVFFLATQTGCNLPYDAAGLQTLLEHLKPLPRSLIVMEATGGLERRLAAELMDAGFAVAVVNPRLPFHFARGIGGIAQTDRIDARTLARFAHDVKPRPLEKTPEKAVELEQLVVRRRQLITMRTMETNRRGTCASKTARKSIDKVLTFLNKQIDQLDNEIQRLIRYDDDWRRKDDILQSVPGIGPATSAAILAELPELGKLNRQQIAALVGVAPFNRDSGKYQGKRSIFGGRAGIRSAVYLAAFNLVHNPHIKPTRIRTFAQRLKTGGKATKVALTAATRKLVVTLNTMLKNNSPWNPKFVAVPS

SEQ ID NO: 83792 - protein, 421 aa, unidentified
MKSASTTPNTQLPETPPNDVTGGLDWARDDHAVSVVDARGRELVRHSVEHSAAGLRELIAVLRDAGCGEVVIERPDGPVVAALLSADLTVVVISPNQVKNLRGRYGSAGNKDDRFDAFVLADTLRTDRARLRPLIPDTAQTATLRRTCRARQDLIRHRVAAANQLRAHLHIAFPGAVGLFADIDSPISLTFLTRFTTQDQADWLTPTRLGKWLASAAYSGRVDPAVLHTRMTDAPRGLSGADGAANAAITKALIIVLVSLNDQLKTLSTQIETQLAAHTDAHIVTSLPRAGRVRAARLLAEIGDCRARFPTPASLTCLAGVAPSTRQSGKTRAVGFRWACDKQLRDAVCDFAGDTRRASPWADHLYRQARDRGHDHPHAVRILARAWLNVIWHCWQNGVAYDPAKHNALQHIINPPQPEAA

SEQ ID NO: 83793 - protein, 444 aa, unidentified
MSTYVGIDVGSEEHAVYGIEKGEDDDPVYKTTVTNDRDGFRESEKFLSTFGENIHLGLEATGNYWKPVFDHLAELKEKLDITLSLINPNEIHQFKKMELSKVKTDSADAKAIARYVLRFEPKSTPRTNERLRSLRKLCRYRSSRVEEKTRLIQQLNEVLVGVFPEYSENFGKLSAVSSLALLKEYPGPKEIAKLEVDELASLRYGKVNHKLGKEKAKKLTNKASNTVGEGYGPEIEITIRHLVEQLMSVKREVEELEDEIEKSFQEIFPNKLTTIGEIGEVNAATMTTEIWDVNRFATATKLNGYVGAYPELSESGNYEDPHPDMTKKGNPRLKRAVFTSTMSAVNSNPVIREHYRKQLAKGKDRMVAIGSCMRKLVHIIYGILTSGEEFDPNYEDKRKEKEDKERTRKPQTESYPENEKSSELSPKPNNGKRVPNYQLAGGET

SEQ ID NO: 83794 - protein, 333 aa, unidentified
MVEGTEGSHHKEGSKKMSKDSTVCAGIDTGKYKLDVVIDASADRLQVDNSPEGYRSLSVWLRQRGVERIGIEASGGYEQAVVSFLRGDGFVVIVFQPVQVRAYAKFVLQHAKNDNIDAALIARCTAAATDIHEPPDTRLAPLAQRLTMIEQLTQDVAQLKTRREACRDQRIREFWKQEIDRLKRLLQAELKQLVAAIGEHRDLATRLDLIASVDGVGLRTAVAILVRMPEIGRVTREQAAAIAGLAPYDDESGKRRGLRHIKGGRQRLRQSLYAATLPAVFYWNAQLKALYKRLITAGKTHKLVLVACARKLLIFVNTVVARGTPWTSAPATT

SEQ ID NO: 83795 - protein, 346 aa, unidentified
MKITTIGIDLAKAVFQIHGVNEHGKVAVRKQLKRAEMTSYFANLEPCLIGMEACGSAHYWARRLQGYGHTVKLMAPQFVKPYVKTNKNDMADAEAICEAVSRPNMRFVAMKTVEQQAILSVHRARQGFVKARTAQGNQIRGLLSEFGIVIPQGIRSIMKQVPEILEDGENGLPGTMRNLIERLTENLKEMDRQTKELEAQIQLWHRENEASRKLTEIPGLGPITASAIVATVGDAREFKNGRQMAAWMGLVPKQNSSGGKQTLLGISKRGDTYLRTLMIHGARAVIRFAENKAEPESWLRKLMARRNKNVAAVALANKNARIVWALLANDQTFRPDYTPAAVVAGM

SEQ ID NO: 83796 - protein, 460 aa, unidentified
MRAGRPTDMSCELEVVIWPPLRLARMRCERGSVIVVLPASSLNLVGLGEETMRIIGMDIHRVAAEVVALLDGKLEKLGRIPMLRESLEEFARTELTHDDHVIVEATGNAAAVVEVLSPHVDRVVIANPKQVRLIAHAKIKTDAIDAAVLAKLYATGFLPEVWVPDEATLALRRQVARRTQLIRQRVRLKNLIQSILHAHLIPPCPHGNLTGISGRKWIAAQRLPDDERAAVHRHLAQIDLIEGSLKDVEADIARATMSDPVIRRLMTLPGVDMVVASGVAAAIGDVRRFEDPTKLVGYFGLNPSTRQSGEGPAYHGRITKQGRGQARGMLVEAAWAAARSPGPLRAFFQRVAARRGKPIAAVATARKLTMIIWHMLTKGEDYIWVRPALLARKFRSIELKVGLPPKHAKRGAAYAYNIPEKRAAERVRVEKAESAYADFASRWRTKPRASSRSKKMPAPG

SEQ ID NO: 83797 - protein, 340 aa, unidentified
MSEITTIGLDLAKHVFQVHGIDAQGTTVLRKRLRRGQVLAFFSRIPRCVVGLEACATAHYWGRELGALGHEVRLMPAQYVKAYIKRNKHDAADAEAICEAVQRPTMRFVPVKTAEQQATALLHRGREQLVRQRTMLVNALRAHLAEFGIVAAQGLRNVGELIAIVRDDGDTRLPDVARQVLQVLANQIEQIQTAVAALEKQLLAWHKTNPVSQRLASIPGIGPIIATAIATTVADPKVFRSGREFAAWLGLVPRQNSTGGKTRLGGITKRGNRYLRRLLINGASANLLRSKATKADPWVIGLRRRRPPLVVAVALANKTARIAWAVMLREKEYQPRAVAA

SEQ ID NO: 83798 - protein, 408 aa, unidentified
MSVNGLPGECFDGGLIVAIDPGKAMHRVWVTDRAGMVGEPVSLPNSRIGIERLEALVGEASATFAVEATGALHRAWAAELERRRPGALRLFAPSQTHAARAQLGTRRFKTDDRDCAALVWLARQGAGRPARSSGVEAMLAAVSHRRQLVLALTPLRQRLHDQLNALAPGLSAPAGHGRALLLSTPTGHAVLACAAAFAGRPPSPRSLQARANGRLTAATAALWAGRWRQCLAPPPDAELRAARLARDLDRFQALRADIAFVDGQLEHLLADSAGQILTTLPGVATARAAALTAYTLPIERFPTPEHLYSATGLAPASYESASVRRRSAIARTGLPEHRDALMGIAWGLGQFAPAFQRRRRELNQRGKTGIQARVALARHACRLCWRMLDTQQPYDDRRYDRARRDRGR

SEQ ID NO: 83799 - protein, 340 aa, unidentified
MNISTIGLDIAKTIFHYVGLDKQGKQVAKKKLRRKQLLPYFANLTPCTIAMEGCSGAYYWQRELTKLGHKVKLLPAQYIKGHLRGNKNDYNDALAIAEASRVHGIREVTPRSIEQQSIQGLHRFRDGTIGDRTALINQVRGLLSEFGIVFGQGITQVRKGLPCVLEDAENGLPYSFREALFLKYQQLQQLDKQIEEFKRLIQAASNEHEEIELLQSIPGFGSILSSSYYSVVGDGKSFAKGRDVAASVGVVPRQHSTGGKTVLLNISKRGDKYLRKMLVNGARSVVNHAHKKEDALNVWVTRLVEKRGRNKATVALANKLARIAWAVTVSGKPYEENHAV

SEQ ID NO: 83800 - protein, 403 aa, unidentified
MIFVGDDWAEAHHDVYLMDESGRRLGSQRLPEGLTGIRQLHELIAEHAEEPDQVVIGIETERGLWVGALTGAGYRVFAINPLAVARYRDRHHVSGAKSDTSDAKLLADLVRTDRHNHRLIAGDSPEAEAVKVLARTHQSLIWTRNRHTNALRNALREYYPAALEAFEDLAHGDALGVLGRAPTPQVGAHLDLAAIQSALKRGGRKRNIAARAHEIRAALRTEQLTAPAPVAAAFGATTGATVGIIAELNRQISELEASLDKHFETHPDADIYRSLPGLGVILGARVLGEFGDDPNRYTDAKSRRNYAGTSPLTIASGKKRAVLARHVCNRRLSDAIDQWAFCSINTSPGARALYDQHRAAGDLHHQALRALGNRLVGILHGCLRHHTPYNEHTAWAHRMPAAA

SEQ ID NO: 83801 - protein, 410 aa, unidentified
MEAIVECCAGLDVHQATVVACLNSGAGNKRSRREVRTFGTTRTELEAMRTWLSASGCTLVAMESTGIYWRPVHAALEGHFDLVVGNAQHIKNVPGRKTDVKDCEWISDLARHGLIARSFVPPRPIRDLRDLTRYRRKVSQTQASERNRLIRMLESANIKLSGLISDVFGVSGQAMLRALIEGEETPAEMARHARGRMRCKQGALEVALDGRLDEHHRFLMRTQFERIKQAESQLEQIDERLRGKLAPYAEPLDRLMQIPGVEWITAATIIAEIGVDMSAFISGEHLASWAGICPGNHRSAGKQKTGKVRKGNVHLKTALVTAAMGAARTRGCYLREKHRRLRARQGEKRAHVAIAHKILLAAYHILATGSDYQELGASYLDQINRRRTANQLTRRLRDMGYHVDIKLNTA

SEQ ID NO: 83802 - protein, 402 aa, unidentified
MNAVGIDVSKGKSMVAIMRPFGEIVSAPFEIKHTASDIHSLVELINSVEGESRIVMEHTGRYYEVLAHQLSEANLFVSAINPKLIKDFDNDSLRKVKSDKADSVKIARYALDKWQNLKQYNVMDELRNQLKTMNRQFGFYIKHKTAMKNNLIGILDQTYPGVNTYFDSPARSDGSQKWVDFASTYWHVDCVRKMSLNAFIDHYQNWCKRKKYNFSQSKAEEIYGKAKELVPVLPKDDITKLIIKQAVNQLNSASTTVESLRTLMNETASKLPEYPIVMAMKGVGASLGPQLMAEIGDVSRFTHKGAITAFAGVDPGVNESGSYEQKSVPTSKRGSSDLRKTLFQVMDVLIKTHPQDDPVYQFLDKKRAQGKPYYVYMTAGANKFLRIYYGRVKEYLSSLPES

SEQ ID NO: 83803 - protein, 434 aa, unidentified
MAMLNSNAAGIDIGSTEHWVAVPKDRDAERVRRLSAFTCDLHQIARWLKKCGITTIAMESTSIYWLNLFLLLEDYGFEVFLVNARNVKNVSGRKTDMSDAEWIQKLHSCGLLSNSFQPDNYTRELHTYTRHRQNLIRQASRYLQHMQKSMEQMNIKLHKVIRNLAGKTGMSITSAILNRERDTEVLAELRDRCIRASKETIMKSLEGTWREEYLFTLQQAYDSFHFVHAQIRQCDEKIEKALKKRETIEVPDEEKNPIKKRRKTKNKNTPKFDVDSYLKTQLGVNITQIDGIDSLSGLNILGEMGSDFSQWPTRKQFLSWLNLVPNNKQSGGKLISSHLMNKKNTAGHIFRKCGSCLWKSKDPLGDYYRIQRAKNGGKAAAIATGNKLASIVYTMVTQQIEYDESILVKMKRHSQQKRLDNLQKKVAHIQKELE

SEQ ID NO: 83804 - protein, 342 aa, unidentified
MDHYAGIDVSLEYSSVCVVGAGGNIIREAKVASEPEALIAWFRSLGFDLARIGLEAGPLSQWLYAAMKQAGLAVELLETRHVSDAFKAMPVKSDRNDARNIAQLMRLGWFRPVHCKSMDAQEVRALLTARKLVQSKLLDVENSLRGILRGFGLKVGKTTRTSFASRIEELVEGHPNLQEIGQALLRARAVLLAEFNGFEKRVRATSRLHEKARLLMSTPAVGPIVSLTFACAIDDPSRFTASKQAGPLFGLTPKKYQSGETDYTGRISKRGDASVREALYEAAHIMLTKPIKGCAQLKSWAMRIARRAGMSKAKVALARKLAVIMLRMLKDNVPFNPAAKAA

SEQ ID NO: 83805 - protein, 411 aa, unidentified
MEPLLERCAGLDVHKKTAVVCRITPSDTGHWQSETRTFGTTTRDLLQLADWLQAAGVTHVAMESTGVYWKPVFNILESQCQVMLVNARHIKQVPGRKTDVKDAEWIAQLLQHGLLKASYVPAAPQRNLRDMVRYRTKLIQERSSEVNRVQKVLEDANIKLASVVSDVMGVSSREMLAQLIAGQDDAAQMAQLARGRMRDKIDELEQALTGFVHDHHRLMLRLHLEHIDYLNIQIARLEEVIEQAIVPFDADDGVERLTEIPGVSVHTAHILIAELGTDMSRFESAGHAASWAGLTPGKNESAGRNYSSQTAKGNKYLKSALVQAAHTQRRADNYLGAQYRRLARRRGSKRAAVAVAHSILVIVYHLLRDGTRYQERGADYFDQHDRAYLEQVLVKRLEHLGNKVSLEPLAA

SEQ ID NO: 83806 - protein, 409 aa, unidentified
MEVVYERCCGLDVHKQTVVACVVVPGAGQQPHKEIRTFNTMTADLLELADWLTTLGVTHVALESTGVYWKAPWNVLESSFTLLLVNAQHIKQVPGRKTDVRDCEWIADLLRHGLLKASFVPDLPQRELRELTRYRTTLIRERTAERNRIQKTLEGAGIKLGSVASDVLGTSGRLMLEALVEGTTDAASMADLAQGSLRTKLPQLERALTGRVRAHQRFLIAHQLAHLDGLHELIEQLSQEIAERLRPFHDKLERLDGITGVGLRTVEVFLAEIGTDVARFPSAAHLASWVGLCPGNNESAGKRKSGKVRKGDVWLRTALIEAAQAASRSKDTYLASQYHHLAARRGKKKAIVAVAHSILRIVWHLLEHDCTYVDLGSRYLEERDRQQIQRRLVRRLEAFGYTVKLEPAA

SEQ ID NO: 83807 - protein, 485 aa, unidentified
MASVANDRSGTDPSAAGTKSRSRKRQRKGLCLQDRPVQNPDAAGIDIGAREIFVAVPAGRDEDPVRVFGTFTEDLERMADWLLACRITTVAMESTGVYWIPLYETLEGRGIEPCLADARHMKNVPGRRTDWHDCQWIQYLHSVGLLRAAFRPEEQVCAVRALMRHRSQLVEMASQHVQHMQKALTQMNLQIHHVLSDITGQTGLAIVDAILIGERDPEVLALLRDHRVKASPETVRKSLVGHWRLEHLFTLKQSCELYRTYQGQIEACDRQIEQMLGEFAPRVDPDAQPLPPDRKHRKKPRRAKTGQVPKGALLAAFDPRTEAYKLFGVDVTQIPGLATMVLALFSEIGRDLSKWPTASHFASWLALCPDNDISGGRIWKGARKAKSRAGQLFRLAAYSLHHSSTPLGDFLRRMKAKLGPRAATTATAHKIAIIFYTMVRNQVEYDETIWATRDTHRTKRLEAKLERQAKRLGYRLVPITERPAA

SEQ ID NO: 83808 - protein, 360 aa, unidentified
MQTQISELNFKGQNIFVGLDVHLKSWTVTILTESLTHKTFTQPASAEVLYNYLGRNFPGGNYQSVYEAGFSGLWAHYSLQAKGIKNIVVNPADVPSSQKEKLQKDDPTDSRKLARSLRSGELESIYIPNPATLEDRSLVRLRTTLVNDMVRFKHRIKSFLYFYGITFPEEFRNIKSHWSNRFMKWLKEGITLQHESGAQTLQFLTHEAEHQRKLLLEVTRSIRLLSRSEKYENNMVLLRTVPGVGFITAITFLTEIENIDRFANTDHFAGFIGLVPNRHSSGDVRNVGEMTFRGQKNLRKYLIESSWMAARYDPALTMSLNNYSRRMEPNKAIVRIARKVLNRIYFVLKNKIEYVSGVVK

SEQ ID NO: 83809 - protein, 417 aa, unidentified
MARISREEKEIIMKVYIGIDWSENKHDVCFLDEVGEVLLVKQIAHTIAGFRQLEQACQSLGVGRQEVIIGLETAHNLLVDYLWDQGYEQIYVLPPSAVKSAQKRYRQSGAKDDRWDAHLIANLLRTDQRCYTPWQPDQALTGQIRAEVRFAQQLGQEVVRDGNRLRSLVLRYYPAALDAFPHLDSVVFLAFLQTYPTLSQAQALTFEQLKVFLREHHHTQVRSWPTIYAGLYADHPVSNPDLDAAYAPLAVAQARILETLIRSRQACLTRLDKLFQLHPDHAIYDSLPQAGTLLAPALLAKLGDDRARFPTPAVLQAVAGTCPLTKRSGKHSYVLFRKACDRDFRHIVQQWARLSLDASPWAATYYHTVRPHCQTDNDAVRRLANRWLEILWRLWIDRKPYDEAFHLKQHTLRNQNH

SEQ ID NO: 83810 - protein, 337 aa, unidentified
MKVVRIGLDIAKTVFQVHGVDVHGKTVLKKTLSRGEVLSFFANTPVSLIGIEACAGSHYWARELIKLGHDARLMAAQFVSPYRKSGKNDANDAEAICEAVGRPNMRFVPIKSEEAQAVLAVHRARTLTVSERTALVNQVRGLLGEFGIVVGQGIAQARRLLADIGAGGRQLPILARETIGELHDRLRALDERILAYDRKIAALAKACEPARRLMAIEGVGPVTATALVASVGNASAFKSGRQFAAWLGLTPRQNSSGGKTKLGAISKRGDVTLRTLLIHGTRSVLRLTTGKTDRKSVWAEALKERSCANIAAVALAAKNARIIWAMLSRGTEYQVAS

SEQ ID NO: 83811 - protein, 361 aa, unidentified
MKSTTVIAFDQHAATTVAAVLLPGHRAPALQTLASDSPTILKFVERLRRTAPLTCCYEAGPCGFELQRALSARDIRCDVIAPALIPRRAGDRIKTDRRDAGQLAVLYRAGALTAIHIPTEQEEAARDLLRCREDIRADLLRARHRLSKFLLRHGRRFTATKKAWSKRHAVWLRTQTWPIAALDQTHRAYLRAVDEVLARLRDVEQELRTLLDLEPLQPRVQRLRCFRGIDDLTALTIAAELGDPRRFPTAPSTMAFVGLVPSEHSSGTKRAQGGITKTGNAHLRRVLVESAWHYRHHPFVSATLRARQRGAPADVIARAWAAQQRLHRRYQRLAARGKPKQHIVTAVARELTGFVWAALTQ

SEQ ID NO: 83812 - protein, 371 aa, unidentified
MKSILSVGMDVHKNSFSLCAYDGYTGEIVSESTFASDVKLVIKFIETLKSRYENDVEIKCGYEAGCLGYSLYKSLTARGVDCVILAPTTMQVSAKNKMVKNDRMDALNIAKNLASGSYKAVYVPDEEDVEIKEYIRMIHDFKKELKRVKQEICAFVLRHGYQYDGKSKWTIRYMNWIRELEMSEIQRETLNEYIAEMENLNDKIDRFMNRIDEMYQSDRYNEKVSKLRCFKGIDTFAAMTIQVETADFERFPSAKAYASYTGLTTGEHSSGDKNNRIGITKQGNTVIRKTLVECAQSLVKGNVYAKKSQGLKSRQKGMDVNIIAYADKATERLKKKYQKLIERNVPRNKAIVAVARELACFIWGMETGNIH

SEQ ID NO: 83813 - protein, 351 aa, unidentified
MPRTTTIHAVTTIGIDMGKNTLHMVGLDLRGAIVLREKVSRGRITSRLANLPSCLIGIEAGMATHYVARELAALGHDVKQVPPAYAKPFRQGQKNDFRDAHSVAEAVQRPTTRFVPAKTDEQLDLQALHRVRSRLVGERTAIINQIRGFLLERGIIVRQGLRFLRQALPDILAQRTDVLSPRMVRIVADLASDWRQLDARIEPVTDEIETLAKSDDGCRRVMTVPGIGPIISSAMVAAIGNGAAFARGRDFSPWIGLVPKQMSTGDRTILGRITERGNGYLRTLFVQAARVILLRPASWPKHSFGLWLARAAQRLHRNVLATALANKLARIAWTVLAQERNYEARVTKATA

SEQ ID NO: 83814 - protein, 356 aa, unidentified
MISSTKYIGMDVHKESISIAVRNAAGKIVMESVIETKASVILQFFDGLRGDLHVTFEEGTWAAWLYDLLKPHVAKLVVCDPRRNALLLDGNQNDRVDARKLSDLLYMNKLNTVYHGDHGLRTLKELGRSYLTMTRDQSRVMSRIKAIYRSWAIPCSGKQVYGSRHRAEWLGKIPEPGVHRRAELYYQQLDALRTLRQEVRRDLLAESKKHKIWKRLCAIPSIGPIRAAELLGILQTPHRFRTKRQLWTYCGLAVVTSSSSDHEVEHGQLRRRKKRKETRGLNENCNHDLKNLFKGAAVVASLKPGPFAEFYAALLGKGMRPEMARLTLARKIATIVLIVWKKGVCFDAQHLKPQTA

SEQ ID NO: 83815 - protein, 345 aa, unidentified
MKYFAGLDVSLEETAICVVDETGTIMKEARAASEPQALREALRMVALPLERIGLEACSLTAWLHDGLRAAGLPAICIETRQANAAMKSMPNKTDRNDARALAQIMRTGWYRQVHVKSRQCRLWRSLLVSRRTVLNEMRTIENVVRAILREAGIKLGSPGRAAFVARVREVAGADRAVMPIVEPLLAILIRMLEEFARLTKQVLAIVRKEEVCRRLMSVPGVGPITALAFRATVDRPDRFRRSRDVGAHLGLTPARYQSGETDIQGKVSRCGDELARTALYEAAHSLLVRSKKWSSLRAWGMNIAKRRGMGRARVAVARKLAVILHRMWSDATEFRYGKDPGRTSA

SEQ ID NO: 83816 - protein, 342 aa, unidentified
MKQRYYVGLDVSRDVTAICVRCANGVVERRCETVTEPEAICAALVDLRDALERVVLETGRMANWLHGELTRRGLPAICVDARQAHAVLSQMHNKTDANDAAMLSDLARTGFYRKVEVKSRDGQERRALLAARDAAIGARRNAENTIRGLLASFGLRVPGRPRTYEARIRAVLEGQDALAPIILPLLAIRTEALRQAAALTKELVRQVKSSDACRRLMTVPGVGTVTAATFVATIDAPGRFTKSRSVGAYAGLTSRRHQSGAVDYGGRISKRGDRLLRTMLYEAANSLLCRVKPGRGQALKDWAMAVKRRTSHKKAVVALARKLAVMMHAIWVSGGVFEEREA

SEQ ID NO: 83817 - protein, 371 aa, unidentified
MKSDSTIKFIGLDVHSKTISVAIADEGRKGEVRHYGTIENTFEAIDKVIKSLTATGIELRFIYEAGPCGFALYRYLSGNGFTCFVTSPAMIPRPKNVRIKNDRRDALTLARLYRAGELTGIYVPEPEDEAIRDLGRARDDARMAERKAKQRLNSFLIRNNLIYPGKTKWNRTYFNWLGSVGMKYPAQKVALQEYIEAVNECTGRVARLREQIRLAVEEWRMAPMVKALQALRGVSLICATITVAELGDLSRFQNPKELMAYLGLVPSEHSSGESIRRGSITKTGNGHARRVLVEGAWTYKHHARITYPLIKRQRELPKSICQISRKAQLRLCARYRKMVARKKPNNVVVIAIARELAAFMWAIAQEVRAAA

SEQ ID NO: 83818 - protein, 355 aa, unidentified
MDQSYYIGMDLHQKTSTFSVRDKEGTVIEAATVPTTKESIAEFLSSYRGSSLAVEPVSQWYCYADFIESLGLAVKIANPNKVKAIAFARIKTDSIDAGVLADLLRTNLLPESYHAPQHVRDWKDEVRLRMSLVRLRVQVKNKIHALLWKQGIRSPYTLFTQKGLRWLDAQTFPQTTAVALTTYRETLALLDRQVAEAEHRMIADNKHREEVKLLVTIPGISYLSALTIMAEVGNVTRFPSAKKLMGYAGVVPSTYASGGKVRHGKIIKQGSSWLRYILVEAAHHQLHCTKRKGLRDYYNGIKDRKGSKAAAVATARKLCAVIFRVLTDKRPFIAPEAWDNRRAHQCGIAALLSAR

SEQ ID NO: 83819 - protein, 353 aa, unidentified
MVSTTKYIGMDVHKETISIAVMNGAGKLLMESVIETKASTIKQFIAGLQGDLRLTFEEGTWAAWLYDLLKPHVSKILVCNPRENALLKDGNKSDRIDARKLAELFRLNHLKPVYHGEKGIRTLKELSRTYLTISKDLVRVMNRLKALYRSWGIPCAGTSVYTPRNREDWLKKIKEPGVRRRAEHCYQQLDALQLLRREVRRDLLEESRKHGATKIRREIPAIGPIRSARLVALMQTPHRFRTKRQLWAYSGLALETHDSAQYCYRHGQLLHTRKPQQIRGRNQNHNHDLKNIFKSAAQKAIAGSGPFRGFYERLLTKGIKPSMARLTLARKIAAITLILWKKGAMPAPLRAVG

SEQ ID NO: 83820 - protein, 341 aa, unidentified
MNITRMGIDLAKNVFQLHGVDKHEKVVLRKQLKRSQILEMFANKPPMLIGIEACGGAHYWARELTKLGHTVKTMAPQHVKAYVKSQKNDKRDAEAICEAVSRPTMRFVPIKTEDQQDMQAIHRVRDRLVKSRTALVNEMRGLLAEYGIVITYTGVPATRRGLLEAVENAENGLTPKMREILFELNEELNDIESRIQRFLQKIHQHSDQDDRVKRVMEIEGLGPISASAIVTAVGNAKQFKNGRDMAAWIGLVPTQHSSGGKEKLGGISKRGDKFLRTLLIHGARSVIRFSETKTDKRNVWVNALIARRNKNVATVALANKNARIIWSILAREEHYRPVAQA

SEQ ID NO: 83821 - protein, 349 aa, unidentified
MILVGCDLHTRKQQVALLNTDTGELWEQELSHVGDDVERFYAALPSPVTVGIESTGYSLWFHALLQRLGHTLLVGEAAKIRAMVVRKTKTDRRDARHLRDLLEDDRFPLVWIPDPTTRDLRALIKHRLRLVRIRTMVKNGLHAIALNQRLALGPSLWSRQGLAQLQALVLLPHTRRRRDDSLDLLQWLNRHIDELDLQVATTAAADPDARRLMTHPGVGPVTALATVLVLGPVGRFPGSKHVVSYIGLAPTVNASADKCRLGHISKQGSALLRWVLGQAAPLATRGDAALKRIYFAVLRRRGRPKAKVALARRLLVRLYVMLRDQIDYDEFCRRGRTQRPGLEPARIPV

SEQ ID NO: 83822 - protein, 329 aa, unidentified
MIIIGCDYHPGFQQIAFVDTETGDCGEQRLEHCEGAQKFYRDLATQGKKVRVGMEASGHARWFEQLLGGLNIELWMGDAAVIRAKRGRKSKTDRQDALHILNLLLTGDFPQIWVASWENRDLRQLLWHRHRMVQARTRVMNQLQAVALNEGLRCKKKLWRKHGREQLEAFRLAPWASRRREDLLELLDRLNPTIAELTQAIEQEAEKCPQAQRLMTHPGVGALTALAFVLIIGKAERFQCGKQVGCYLGLVPLEDSSGDKRRLGHITKQGNSLLRFLLVEAAQVTSRTIPEWRSKYLHLTMRRGRKIAKVAMARKLAIRLFWRMRQGWN

SEQ ID NO: 83823 - protein, 317 aa, unidentified
MTASDIFVGIDISKNRLDVALSPGDQTFTCPNNEAGIHQLVRRLQKLNPQIILLEATGGYEFLIVAALREAQLPACFINPKLVRSFARSAGIAAKTDRLDAKVLALFASRMQPQPRPRPTAEQQELKHLMTRRRQLLDMIQMEKNRLDPCPSPRIAQSIQQTIKSLDDQLAALNRQIDDFFQQHPLWVELAKTLTSVLGIGHLTALLLIAYLPELGRLNRKEIAALAGLAPFNKDSGQWRGQRHIEGGRSRLRQALFMATLAATRHNPVIRDYYLRLLNTGKAKKVALIAAMRKLLTILNSMVRKHQPWCPNAPITP

SEQ ID NO: 83824 - protein, 350 aa, unidentified
MTIVETRAETRAITGGVDTHADVHVAAALDSVGGLLGVEEFPVSPAGYARLLGWLGGFGTVCLVGIEGTGSYGAGLARHVAAAGIRVVEVDRSDRQDRRRQGKSDPLDAVSAARAAQSGRARGAPKGRDGAVEAIRALMVAKRSAVGERTRTINQARALILTGPDDLRARFTRHTPAALVAGIASLRPRPGDVPGYAVRVALRELGRRAVFLDGQLERLDELIVPLVTARAPGLLALYGIGPNTAALLLIAAGDHPGRLRSEAAWAHLCAAAPIPASSGKVTRHRLNPGGDRQASHALWRIVFTRMGSDAATRAYVERRTKEGKSKAEIIRCLKRYVARQVYPHLRPDAG

SEQ ID NO: 83825 - protein, 352 aa, unidentified
MLYTGIDYHKRYSVVSTMDATGARVREARIDDNEPAAFAAYFQHLPEPSRVVMEACWNWGWLYDELGEIEGVDDVVLAHPFKTRLIADAQIKTDRLDARALATLLRGNLVATVHAPAPANRARKHVIRQRLFVVRLRTMIRNRVHTVIARQRHLARPVCSDAFGKKGLHWLRTVRLPAPDDALLQQDLAALDQLGVIVKELETQIAAANADDAAARRLQTLPGVGPILAAVIAAEIDGVARFPRAAKLCCYAGLVPTTHSSGGKTSHGRMLPYSNRWLKWAFVEAAWVAIGCSPYFGTLYRRHRARGKKANTTITIVARRLCAIAWQLLHDERDFTPNPPTLLLSPVAPLKD

SEQ ID NO: 83826 - protein, 418 aa, unidentified
MDKIRTKKGRVVNEKTLLVTVDIGKAMNMGYCRCPDKTEVKPFTFQNNYEGFNNFFSVIVKTKTAKKLEYVVVGFESTGAYAEPLMHFLRANGVKLVQVNPLHTKKLKDLQGNSPNKTDRKDPKVIADIIELGHALTVIIPEGVPADLRRLTHARERTLQRKTALLNQLQDAVFVSFPEFLDVMKDVKTKTAHFLLKHYPMPSDILECGLEPLAIHLKKISRGKLGHKRAQSLYEAAKRSIGIPEGRISLALEIRAFLSALEQCNGFIEQVEQEISRLLKEVSYSRFLLSMKGIGSVTVAGLIGEVGDFNAFSTISELLKCAGLNLYEISSGKRQGARHISKRGRALMRKLLFYAALCTVRTGGIMHEHYQRHLQNGMKKMKALVAISRKLLGIMFALVRDHKPYLKNHEEAKYLNAA

SEQ ID NO: 83827 - protein, 395 aa, unidentified
MKTPERYLRFCGIDMAKQKHMACIIDRDGQRLLRPKSFRNDAAGFQQILKCLKETGNSKTILIGMEATGHYWYSLHDFLIRQGYTVVVLNPIQPAQQAKQAIRKCKTDKYDAFHIASLLRSGQYRPALVPGELGMTCRQLTRLRYRLIGQSTRIKQLIRSRLHPAWPEYEKLFVNPFCATSKKLLLNAPTPQQLLALKPEDIGELIRKTSRGKYGSTQAQKIWQQAENSVGMKRGLYGIATSIRILLEQVEALKTVRQKLEDEIDNLADQLPKYLFTIPGATTLSVVSLYGEIDPIEAFTAPSQLVAFAGLDPKVFQTGQYNAPRRQISKRGSPFLRRTLWQMAHRAIYQEGDLRNFWLRKRSQQKHHFTAVTAAANKLCHIIWRIMTDRRDYIP

SEQ ID NO: 83828 - protein, 364 aa, unidentified
MSSVSHRSLTYLGMDVHKDSISVAILRPNDSMDVERLFHDEDSVRRFIARMGDPRRLTACYEAGPTGYELSRQLEHLGVRCRVVAPSLIPKAPGDRVKTDRRDCRRLARLDRAGELVAIRVPSPAEEAVRDLCRARGDMVIDLDRARRRLGAFLLRHDRIWRGGSNWSLKHEQWLLAQRFDDPALAATFSQYRSVVEERRLRLVAVESDLLAYCDQDPYAEAVNRLCCYRGVDCLGALTLVSEVCDWRRFAKASSFMSFVGLVVSERSSGEHVHRGHITKAGNEHLRTQLIESAWAYQRGPYVGARIAKAQERCGSETRERAWKAQVRLCGRFRRLAARKNVKSVVAAAIARGLAGFLWGEMTA

SEQ ID NO: 83829 - protein, 269 aa, unidentified
MTFRPHALHLKAELFVKSSRVHVRDDGFTRCNFHLKFFIMVYRGIDISKSSFVAAYPSTNGNPTKTFPNTTAGMRELIGTLAVAEHHCVMEATSNYCCCTCYIRTVLPSVLPPPQKKQIKHFSRMMMPVTKTDEKDAYMIAMYGEKMNPPIYKMPSQATIRILTTEGFTYFDNAKQLSRFIGICPTYQQSRTSVNIREHINRNDDERLRSLLYIAFWTALRYNSRECYIRLKANEKPFKVALIAVTNKLVRPVLTITTINSIYRWICPG

SEQ ID NO: 83830 - protein, 310 aa, unidentified
MAVYSTGEIRSFGNDDASIAKATTWLKQVNPAIIVMEATGGMEISLYVALQEANLPLAVINPRQIRDFAKSMGILAKTDKVDAKVLARYAATIQPEARPLPDEEARQLNTLVRRRCQLVEMIIAESNRATITRDKAMKQRINAHIDWLKQELAGIDKDISQMMKENPVWHAKDKLLQSVPGVGPVLSATFIAELSELGILNRKKIAALVGVAPFNRDSGKHRGERSIWGGRCRVRQPLYMAALSAVRFNPTIRIFYERLLANGKEKKVALTACMHKLLIMLNVMLKHNSYWSCNYAIFNNTCIPDAKTVA

SEQ ID NO: 83831 - protein, 408 aa, unidentified
MQVTFGIDVSKSTSTVCELIGESKNELTITNNRPGFIQLLHELAAFSKHPQIIFEATGVYSRRLQAFLEDYGYEYVVLNPLKAKKEMNMGLRYNKTDKTDAYHLALIQRLYHHPINQLQSQTYKQLNALSRFYDQLTSDLVIAKNRLHQALQSTFPEIENLFSSAKGKNYWQIVVRYPHCDLVRREDKKQLINWLMSLKGIAFKHALRTADKLIELAYQAYPVVSCSSIEVEQVQYYAHRLLNLSDQRENLIARMVKLAKSLPNHDLENLESIPGFAQTTAVRVLAELGDLRRFSNPNKINAFIGIDPGRYQSGEMDSNLSITKHGNAVARKLLYRAIGQIDNAAKTNPCHIADYYESKKLSSQTKGFKKIAIASIHKLIRTIYALIINDQPYDYNVATHNQKDFSRN

SEQ ID NO: 83832 - protein, 318 aa, unidentified
MSAAHGYWGIDVAKDTLELAEFEASEQGQVTNDSAGIAALLNRLTEAPPQLIVLEATGGYEQEVVWALGTAGLPVVVVNPRQVREFARATGQLAKTDRLDAKVLARFAATVRPDPRPLPDAAALELEAYLTRRRQLRDMLTMEQQRLALVRPREVRQSLRKHIAYLQRELRSTESDLSQLIKGSPLWREADDLLQSVPGIGPTTAQTLIALLPELGTLGRRAIAKLVGVAPLNQESGRLRGARRTWGGRAPVRRTLYMAALVGTRWNPVIRAFYQRLIAAGKARKVALTACMRKLLTILNVILKTKRPWQPTMASTSA

SEQ ID NO: 83833 - protein, 366 aa, unidentified
MKKIITVATAGIGKMQAQGLTVGVDLGDRSSCYCVLNEQGEIVQEEKVATTPKAMRERFAEVPRCRMALETGTHSPWVSRLLSELGHEVIVAHAQRVELIAKSRRKNDRMDARTLARLARIDPQLLSPIQHRSAEAQAHLTVIRARASLVRARTSLINTIRGVTKSTGERLRGCNPRKVGERAQELSPELRHALGPVLSEIDSLSDRIREYDERIRSIAESSYPKVELLKQVHGVGTLVALTFMLTLEDPHRFSKSRDAGCYAGLQPGKRDSGDSEPQLHISKEGNKYLRAMLVQSAQHILGPFGADSDLRRWGLRLSERGGKNAKKRAIVAVARKLAVLLHHLWVSGEVYEPLRNSLRMATAAAA

SEQ ID NO: 83834 - protein, 394 aa, unidentified
MKLVGIDIGKNSHHFCVMDKETGELNVTPSSFSNNKEGFDFLINSLKPYSKKSTLLGMEDTGHYHVALLKFLLSNGYTVALINPKTTDLTRKMEGGITKNDKLDTITICDVLDTPERKKQYRITKVDRFDLYEQRQLTRHHHNLKEELNIYSNRLQKSIDLVFPEFNTLFGSKYGIVYMNLLKTFGSAEAIASTDIRTIRKCFEIKGRGCRISLTPEKLKECAKNSIGISSEVETIQIKHLVSQITLIKEQIAEIDKKIEEFSITNNSPILSIPGISHFSGTSILAELGDIGNYSKPSQIIKFAGVAPYHYESSQYNAQHTAITKKGSKYLRKTLYQIILPVINNNPVFKKYYLLKISQGKGHRCAQGHCIRKLLRIIYHLLETGQSFDPALLR

SEQ ID NO: 83835 - protein, 429 aa, unidentified
MTRISAGVDVSKNRSTVCIMDQDGKVIMRPFLVWHSTEELDFLADTLKRLNGEVRVIMESTSVYQYPIALQLKERGLFISIVNAYEMKQFANIDFRGGKTDKKDSRTIASYGISYWDKLVEWQIPKDTYFNLDLLNRTYMNAKKHRQIILQELQHYIDCAMPGMDKELHSLNLNTKKDFMLDFVEKFWHRDEIVNMTEAEFTEVFTAWAKKKGYRPVEGKAAKIYAIAKSCIPYYPANPTVKTILQCIVDKLSGVNRTLVTIVTQMIEEAKKLPEYQIVREMPGVGDPLAARFFGSAGDIRRFKNSKALVAYAGIDSPPDESGDFSSTHRHITKKGSKVFRDTGYEIMMALRAQKRTWEKVRKNPEVYDYMLKKEAEGKPRKVAKIAALNKFLRIIYARIKELYDNMALAERAKTKTRSKTGAKTKATD

SEQ ID NO: 83836 - protein, 473 aa, unidentified
MSKGSGNGTTRGDRRRNARRERLRGLLPRDGAVIGIDLAEDKQALAVVDHDVRVLARKTVKVKAFRLGEALDWAVAQAKVKGFKQVAVACEPTGPRWMQVQRLCAERGLPLVCIQPLVSHIAREQQDYTPHKTDESDCVLIGRLAAELHCYIPEELDETWAQLRHLGRRRAQLITAATASVQRIGDFLSVTWPVVTEVCAQPFKPVTWLAALQVVTSRCGGDPARLAAMGPEEFTAVVRAAVPAWGGKKGWGTICGRVFAATADTEGVVAWSRRGLLRRVADELGDLARTRAQLRAVAADMVMVLSELGLSRLGDIPGLTAVGAAAILAETGDPRRYDSSSSLVKHAGLSPSENASGAFEGQARISRRGRPGLRLTAWRAVWPMLRLNPVMAAKYAAMTQAADAAVASDAGSQPARAAASAARARRARARVACAASLLRWIYSMVVHGTSWDAAVASGAAACQHAPRCQPEAA

SEQ ID NO: 83837 - protein, 374 aa, unidentified
MDEGKNRKVWSLADFRHHSAQYGMHKAPSDWRLHSMKYTPVGVDIAKHLIQVHFIDEHTGEVVDKQLRSKDFLTFFSNREPCLIGMEACGGSQHWARELKKLGHEVRLLQARFVKAFVMGNKNDVMDARAIWMAVQQPGKEIAVKTEEQQSVLVLHRSRRQLVKFRTAQINALHGTLLEFGETIHKGRAAMDRELPAALERMRAKLPPYLIVLLEDQHTRLSELDSLIEGIEKQLISVAKQSETCQRLMEIPGVGPLIATAAVATMGDALVFKSGREFAAYVGLVPKQTGSGGKVRLLGISKRGDTYLRTLFIHGARAAALLTKEPGPWITELKKRRPTGVAIVAMANKLARTVWAIAAHDRKYDKNHISIRPY

SEQ ID NO: 83838 - protein, 342 aa, unidentified
MSKHVVRGGDVAGLLERFAQLRKKTQTRTGKVFPFVVIQEAGLDGFWIDRVLQNEGIESHVVDPASIATSRRRRRAKTDRIDGEALVRALLAYKRGEPRVCAMVKAPTPEEEDRRRLCRERKVLIAERVRHVNRVKGLLFSQGISGYEPQRRDRRERLDTLQTGDGHLLPDHLKAQVCRELDRLELLLEQIKAVEAERDVLLAAQQVTAPATMLLDIKGIGPEFAAILWSEGLFRHFDNRRQVASYAGLAPTPWQSGSVDREQGVSRAGNPRLRTTLIQLAWLWLRHQPKSALALWFEERVRRNGGRHKKTTIVALARKLLVALWKYVTAGVVIEGAVMKAP

SEQ ID NO: 83839 - protein, 472 aa, unidentified
MKARHRRCCGIDVHKNSVTVCVLPPAGQPHLEVKRRKFRTYTRDLRQMRAWLKNCQVTDIAMESTGQYWRPLWNVLEGEFAQLILVNPQHIKGLNGYKTDPKDALWIAGLLESGKLRNSWVPPRPIRELRDLTRQRVNGLEDLNRAKNRIEQLCQTGNIKVSSVATDLFGVSGRRMLKAIVEGKRDPGWMADYARGTLRGKRRDLERALEGTFTDDQRWLLDKELRQVEWLEAQVVTLEQEIERRVAPFEEHIQRLITIPGIERKTAWMIVAEIGVDMRVFPDARHLASWAGLCPGNRESAGKRMSGRTRKANRYVKRAMCQAAWAASHTKDTFLSAFYRRMSVRKGSPKAVMALAHHLITVVYQMLSRTEVYIELGGDYYDRRNKPKVVARLLHRLSKLGYYAELRPIGPPPVPDEPASPTLAHEGSTSPIPQRKRGRPCKCAERGIICKHTTSADVKSLIQQPSATVEFS

SEQ ID NO: 83840 - protein, 355 aa, unidentified
MCGLKHQKEKRSMDYFAGLDVSVKETSVCVVDDAGKIVRETRVASEPEALLQVLTSTIYRFKRVGLEAGPLSQWLYSVLAEAGLPVICVETRHMRAVLKAQINKTDRNDGRGIAQMMRVGLYRPVHVKTLGSQKLRVLLTHRKLLQSKAIAIENDLRATLRNFGLKVGVIGTVKFETRIRELVANLPDLAALVEPLLIVRQVVREQLGILHRRVLAIVRDDDVCRRLMTIPGVGPVVALTYRVTVDVPARFRNSKAVGAVFGLTPAKYQSGENERTGAISRCGDEMMRMMLYEAAQSMLVRSTKWSWLKAWAMKIARHRGMKKAIVALARRLAVIMHRMWVDGTEFRWTREVAAA

SEQ ID NO: 83841 - protein, 394 aa, unidentified
MTYFTGIDNSSLDHKIHILDGDGKLHSHFTIDNNLNGFMKLHESLQVLPDVRIGFELPHGPLVDFLHEKEYQLYSLNPLKIKRFKETITVSGNKNDYIDVAAIGEYLRKNKSHCRPMLFNSPGIEKLKTLSIIHSRITKEHSRYKNKLHFVLRQYFNLHDTLFTNLGCIIQIKMLKKYPTFGLLREASESEITDFLIQNNYRVKKNLNRVLKAIREYDQLIPAETESAYFIEALLLCDMIFSLKENLKKVEKEMENIVKKHPLGKVFRSLPGAGKILSSKLLASFGDNKNRFRAANEIQCLFGTAPRNYQSGSYHKVIMRTACNKIGRVVLFKYAFESLRFSGWARAYYDEQKKKGKTHSVAVRALSNKWVKIIFRMWKDEIIYQENEKIDTAA

SEQ ID NO: 83842 - protein, 424 aa, unidentified
MNDRTDYAALIGLDWADQKHDVCLLVPGQAAPERLTLANTPEAIHDWLAQLRQRFGGRPVALALEKTRSGLVHTLMQYDFVVLYPLNAAAVARYRQAFAPSRAKDDPVDAELLLDLLAKHREDFRPWTPDTATTRELAALGEARRQAVNLRTNLSNRLTAALKSYYRQALELIGEDVYSPLALDFLTKWPSLPAVQRAKPETVRRFYSAHNSRRADVIEERLQLIAAATALTTDAAIVEPAMLTVQMLVEQLRALAVAIRRYETRQAALFAAHEDAPLFQSFPGAGAIFAPRLLAAFGSDRTRYDSARSIQQYSGIAPVTERSGNRCWVHWRWGCPKFLRQSFHEYANESIRHSLWARAFYENQRQLGKAHAAAIRSLAFKWQRIMWRCWQDRTPYNEVYYLTKLQQRGSKLLKLIAEPAEQTA

SEQ ID NO: 83843 - protein, 329 aa, unidentified
MTTTQAVVGVDGSKATLAVCHQMGAHLQHLEVANTPAGFRQLVRCGGAASLYVLEATGPYYLAVAYHLVAVGAQVAVRNPLVVKRFIQMHLGKGKSDRKDAQWLLRYGQQQAAPRWQPEETVLVECRQVEQVVELLIRQKTMVHNALEALQAQPVVSLAALEQLRQTLLHLEEQVQQLETKLLTTIEARYPPEMQLLCSIPGIGRKTAAYLLLFAGGFTSFPSHRQLIAKAGLCPREFRSGTSVRGKARINKMGGALIRSKLFRCSWSARRANGACRALYDRLVAKGKNGKLALIAVCNKLLKQAYAIVTSGVPYQADFTKKVVAPLAF

SEQ ID NO: 83844 - protein, 339 aa, unidentified
MGLHCAVDLHGNNGFYGITDETGKRLFKKRIPNSLPAVLAALEPYREDLDSGVIVESTYNWYWLADGLQENGYQVRLANPAAMQQYNGLKNTDDESDTFFLTEMSRLGILPEGHIYPKEDRPVRDLLRRRLLLVRHKTAHVLSFQNLIARELGDQITSNQIQKLWPEQVKPFFEDERLILMGQTNVEMIRFLTKHIRKIEKVILGEVGPKPEYEKLLTTPGIGKILGLTISLETGDISRFKKVGNYSSYSRCVKSLRTSNEKKKGENNRKNGNCYLNWAYVEAANFIRRYCPEAKAWHQRKLRRSKQVVATKALASKICKACYFIMRDQVDFDVKKIFG

SEQ ID NO: 83845 - protein, 418 aa, unidentified
MKSIKTKKVTKINDKTVIATLDIGKNIQYGYFRAPNGNDVKPFAFYNSKKSYHEFWQKLCQFKDKERLEQIVIGFESTGPYAEPLFHFLRKKPVTLVQVNPVHTKRVKELTGNSPNKTDNKDPRVIADVISLGHALTLVVPEGPAAELRRLTQARERAITDRTAIINQLQHLIFVIFPEFLKVLKIATKTARYFIKHFTTPEKICALGLESVSQIVKKVSRGKLGQDRAQQLHEAARDSIGISEGKQSIVFEIEHLVSRIEAEDQFIDSLEKQMRDYLQQIPYSQNILSIKGLAEVTVAGLIGEVADFNKFDTISEVMKLAGLDLYEISSGNHRGQRRISKRGRPLMRKLLFFAAINAVKSKGIMHQKYHQMLDRGQLKMKALVAISRKLLGLIFAIVRDNTKYVENYSDNYHYKLAA

SEQ ID NO: 83846 - protein, 376 aa, unidentified
MGTPSAQTLDDVGVRKMFQELEEVPMTMVGGLDVHRQQITFDYVDDDGLVHWGQIRPATRKTLRGWLAEHCPDGDGEFALEGCTGWRYVSEELAAAGLGVHLGDPAEIAVLRGPKKRAKTDRADAKLLRTLLLEGRFPESWIPPAHVAEIRSLGRLYYTLMDERRAWQQRIHAQLFHQGFPPIKALLSASGRDALARAPLSAAGRQYVDTALRRIDELSAEIEPLRTQLVNFARRQQGCQALQRHYGIGWLCAAIIWAEIGDTRRFTSSDQLVRFAGLDITVYSSDSKRSPGHLSRQGSPELRWAAFEAAKCAARRGSPDYAYYHRQAAKHDGHNGKNPTLAVERKILRRCYHTLRDLGDAALALPDTRPQQEVAA

SEQ ID NO: 83847 - protein, 402 aa, unidentified
MNAVGIDVSKGKSMVAIMRPFGEIVSAPFEIKHTASDIHSLVELINSVEGESRIVMEHTGRYYEVLAHQLSKANLFVSAINPKLIKDFDNDSLRKVKSDKADSVKIARYALDKWQNLKQYNVMDELRNQLKTMNRQFGFYMKHKTAMKNNLIGILDQTYPGVNTYFDSPARSDGSQKWVDFASTYWHVDCVRKMSLNAFIDHYQNWCKRKKYNFSQSKAEEIYGKAKELVPVLPKDDITKLIIKQAVNQLNSASTTVESLRTLMNETASQLPEYPVVMAMKGVGASLGPQLMAEIGDVSRFTHKGAITAFAGVDPGVNESGSYEQKSVPTSKRGSSDLRKTLFQVMDVLIKTHPQDDPVYQFIDKKRAQGKPYYVYMTAGANKFLRIYYGRVKEYLSSLPES

SEQ ID NO: 83848 - protein, 411 aa, unidentified
MSKKLKELAFVGVDTHKDEHTACMTNCFGQPLEVFTVENRPDRIEELLEEIDETAKSHSLKPIFGLEDVMGLGQHLARSLLAGGYQLKEVNPIETERKRLRRAHPDKSDPLDALAISRVLISEFDKLPTIQSLDEVYLAIHQLSNRRDSLVKEKTRIKNKLHILLHREYPYYQTMFKDTFSKAALAFWERFPIASLLKGIGVERLAQYLRANSNNTVSTKKALSILKLVDKDSLPSCLNLVHSSLIRNLVKHLRFLEEQIAIVEKELEPLVDETGMKLCTLTGVDLVTATKLIAEIGDINRFASSDKLAKCAGIAPQQRSSGKKLKFKKSNRGRRQLNTAIYHIALCQIGRDRSGRPRSPKAREYFLRKISEGKTKKGALTCLQRRLCDIIYAMMKNKTEYRFQRTTNLAT

SEQ ID NO: 83849 - protein, 475 aa, unidentified
MTPRATDFAPVDPASKKKRRRRRGKKFRLPASLKHVNLNAAGIDIGADEHYVAVPEDRDEQPVRSFGAFTIDLIAIADWLESCEIDTIAMESTGVYWIPLMEILEERGFEVILVDPRKLKNVSGRKTDVLDCQWIQQLHTYGLLTGAFRPSDEICGLRSYVRQREMLIRRAAEHVQHMQKAMAQMNVKLSQVLRRVTGKTGMRIIRAILDGERSPEKLAEFRDGRCQHDEATMAKALHGNWRPEHLFALRQAVELYDFYQEKIAACDYELEAKLGSFSDAQEGLATLGSKPKSQPSHPLAFGGHDELYRITGVDLTEVPGLATPTILTIVSEIGLDMTRWRHVKAFASWLGICPGSKISGGKVLSSRSKASANRAAAAFRLAAYGLQHSNSYLGAFCRRMKAKMGPAKAITATAHKLARIVYAMLLGRVPYKEKGLDYYEEEYRQRRVANLKRNARELGFQLLLAPESLVTGAPA

SEQ ID NO: 83850 - protein, 381 aa, unidentified
MTEMIIGLDPHKASNTIAVLGRDETLHVRRRFDNTAEGLAAMLAAVAGFTDRVWAVEGANGIGRSVAQRLVAAGETVVDVPAKLATRVRVYSTGHGNKTDRADAVAIARAALHSKHLRVVRPDDENVALKLLSDRRHELIASRTQSVCRLHRLIRELIPGGTPRALTAERAEALVSDLDVSDAAGLMRIELTLDHIADIKRFDRRIDEVTLKIHAAVTDSGTTLTRIYGVGPINAGLILGEVGDVSRFPTRNHFASYTGTAPIAVSSGDNNRHRLSRSGNRQLNHAIHIAAIAQIRYDTPGRAYYRRKLDDGKSRREALRCLKRRISDAVWRQLQLDRELDQQQDHAWPRWPSSRGGHPSYRSPETPRRNGQPMKPRTTEV

SEQ ID NO: 83851 - protein, 354 aa, unidentified
MPRQSKDTVAVLGIDIGKNTFHLVGLNKRGAIVLRQKLSRRQLEARLTNLPPCLIGMEACVGAHHLSRRLKAFGHDARLMPAKYARAFLKGNKNDFRDAEAIAEAVQRPTMRFVATKTAEQLDLQALHRVRSRLIGERTAIANEIRAFLLDRGIAIAQGLHRLRVALPEILATRTDVLAPRLLHMLEDLIGDWQHLDQRIHTVSLEIQLLAQQDPACERLMTVPGIGPIISSATVAAIGTGDLFSKGRDFGAWLGLVPKQISTGDRTILGKISKRGNKYLRTLFVQAARVVLLRPATWERHGLQPWIAAAAQRLHHNVLAIALANKLARIAWSVLHHGRNFEVSKMSETSTQPA

SEQ ID NO: 83852 - protein, 342 aa, unidentified
MDVMIGIDPHKGSHTAVVVNRDEVVIDETRLRTTANQLGELQAWASGYQDRCWAVESARGLGYLVSQQLVGAGERVIDVPPMMASRVRLLGSGKSQKNDPNDARSVAIAALRHPSLAVVSADDHTRVLGLLAKRHRDVARLKNKAACRLHALLMELTPGGLASEMTVTKANALLDSVDVTDEVTRQRVVIATELVDDIGRFDAQMRASKKRIQAAVAASGTSLCEIRGVGPIGAAIILGAVGDIARFPTPGHFASYNATAPIDASSGDKTRHRLNPRGNRKLNHALHIAAVTQLRYPNTGRDYYDKKIAEGKTSKEAIRALKRRISDVVYRHLVADTKHRIS

SEQ ID NO: 83853 - protein, 368 aa, unidentified
MEVTTIGIDLAKSVFAVCGADSSGRVVMRRQLRRPQVLSFMRGLPRCVVGMEASGGAHYWARQLTALGHEVRLMSPALVIPYRKGNKTDRNDADAILEAVTRPSMRFAMVKSVAQQDLLALHRVRAQLVKSRTALCNQLRGLLRERGVVVRTGAAALKRSLPAALADDRSELSGEMRELLCEMSQWLRTLEQRIASCEARITRKFKHDERCQRLAAVPGVGPLTATALVAAVGNAQRFRNGRELSAYLGLVPRQHSSGGKTVLLGITKRGDRYLRTLLIHGARSALRQCKDDARSGWVRRIRAERGPNVAAVALANKNARVLWALLARGDRYRSTNVATRAVLRSGSPPAVKRARSAKLRVRKDCVGS

SEQ ID NO: 83854 - protein, 336 aa, unidentified
MSDVFALDVSKGHSVGVWYRGNHCLREFECTHDQISFSPLLKLTEQAINPIIYFEATGVYSTPLERLCRDHQLQYSCLNRLELYLQSESLRRVKIDRKDAHRIAQSVAQHYYRLTTPWTRKYERLGQLNHFYGQVISYIKLNRLRLHTTLQQTFPEEEQLFSSRISRLALNVILLHPHPDFVRGISRTRLKNKLMSETDKSLSKMKCLKYAERLMKLAKNSYPAADKDSIQVRKAQYDCRQLIELVKQQDSLSKEMTTAPAAIPEDALYASAPGIGLQSVAQLIGELGDIRQFENANQLNAYVGIDLNRYHSGQYTRQDHINKRGNPHLLDCQKHD

SEQ ID NO: 83855 - protein, 346 aa, unidentified
MLYAGLDLSRQRLDVHVLDEDGRTVEVTAVRPDADALRTLVAAISRHGQAVTASIESMNGARFVHDQLEFAGWDVAIADALKVKGLAPLAAKTDKIDAWVLAELTRRELVPAIWLPDPTVRAERERARFRLHLVRHRTALKNRIHATLITFGHPVPVSDLFGGTGREHLAGLAIPEPWATTLATSLRLVDELAREIDACERDLRAMGADHPYVELLRTAPGIAWVLGYTIAAEIGDIGRFASPKKLVGYTGLCPMVRQSGQRDDRGPLAKNGPKYLRWAFIEAAVHATRHPAYRDRSERTVKRLGRRRGSKVARVDIARELATASWHMLSKHQPFTPAGPTHALVA

SEQ ID NO: 83856 - protein, 334 aa, unidentified
MNYTFFIGIDVSKNTLDFAVSEGKELLLQTTICNELSGIREFWNQLKSIKAFRLEKTIFCLEHTGVYSQHILSFLYGKKANISMEASVHIKLSGGLQRGKNDRIDAVRIAEYACKNKETLKLWHPKREVIQQLKHLSALRSRLINARKQLAVAIKEIVPFEKAAAGEMKKLCKLSLKALDADINQVAEKLDSVIQSDPELQRLFKVVTSVDGIGKVTATEMIITTNEFKDISEPSKFACYSGVAPFEHSSGTSLRGRPRVSHKANKTMKSLLHMAALTAIIYNTDLKAYYQRKVEERKSKMSVINAVRNKLIWRVFACVRNNKLYQKNCEITLA

SEQ ID NO: 83857 - protein, 339 aa, unidentified
MELYAAFDLHSNNNHLGIINSNDKRIYKKKLPNDPQTILTALEPYKDDLTGIVVESTFNWYWLVDLLMDHDYRVHLANPSAVKKYEGLKYSDDNHDAFWLSHLLRLGILPEGYIYPKIERSIRDLLRKRGHLVKLRTSLILSLQGIISRNCGLRVNANKIKAIRENNVLPLLTGDENLELSGSVSKEAIDFLTQKIRKIETAVKKKIKLKKPFILLQTICGVGDVLSLTIMLETGSISRFPKVGDYVSYCRKVPTGWTSNGKSKGKGNKKNGNRYLAWAFSEAAELSRRFDDNARAWYNRKSAKKNFMVAHSALSSKLARAAYYIMKNNVPFDPGKLFA

SEQ ID NO: 83858 - protein, 386 aa, unidentified
MQADANQTESSVAVRTDLAAIFVSLELSRSKWLITSLSPGAGEKMSKFVVPGGDVSALLERFEHLQRKASARSGRSFRIISIQEAGLDGFWIHRVLEDSGIESYVVDPASIAISRRRRRAKTDRIDGETLVRALLAHKRGEPRVCAMLHVPTPDAEDSRRLVRERKALINERIRHVNRIKGLLFSQGVSGYEPLNRDRRERLEALMTGDGRPLPKALKAQISRELARLELLIEQIGDVEEARDAVLAEAEHSTRGPALLLNLRGIGPEFAAVLWSEGLSRRFDNRRQVAAYAGLAPTPWQSGQISQDQGVSKSGNPRLRATLIQVAWLWVRHQPTSALAAWFKARVSQNGGHRKKSTIVALARKLLVALWKYVNAGVVIEGAVVRT

SEQ ID NO: 83859 - protein, 339 aa, unidentified
MTVKTIGLDLAKDVFQVHGISENGRVIFNKAIKRAKLLAFFESLPPCTIGMEACGSSHHWGRTLRKLGHDVRLMPANYVKPYVKRGKTDAVDAEAICEAVRRPTMRFVEIKTEEQQAILSIHRTRDLAVRQRTQMANMIRSLLREFGHILPIGVEAVTAFAKRHLGGDHPNMPDIANGMLGMQCYQFIGLNERIAGYSKMIEQHALLSTDARRLMRMPGIGPITASAIVATIGDAKQFRTGRDLAAWLGLTPLNKSSGGKERLGKITKKGDRYIRKLLVVGMTSRAVMAKRSPEKVDLWTAKIIADKPFRLATTAMANKAARTIWAMLTKKQEYRQPAF

SEQ ID NO: 83860 - protein, 276 aa, unidentified
MNTKTKQNVSVGVDTGKFQLDIYIRPLDVYFTVNNDEKGIKEAVKTIKKYSPDRIVIEATGRLEIPFIMACASANLPFVIANPIHVKRFAGALGQRAKTDKLDAQLIAHYGEAIQPNLSQLKPETMQAMSDLVARRNQLLVMQTMEKNRLQILPKELAMTIKPILTAFKNQIEKVESKIVKLIESCPDYQAKNDILQSMKGIGEIASASIISNLPELGYMTNKQASALVGVAPMNRESGRYKGLRKIQGGRHQVRTVLYMAMMSAIRKRPIIPPSA

SEQ ID NO: 83861 - protein, 438 aa, unidentified
MSNKVIFNLDDLFISVGIDVGADFSWMSIALPNQQFVGKPYKILHSSIDSLTTAVSKIKEAEELYSLESRIFLESTGIYHYPLFCYLRDKGFNCSVINPIITKNSTNINIRKVHNDRFDSKKAALVGLKPDLKVSLMPSDLALNCRNLCREYYDLMDNRSAYVNKLQGELRMAFPQYLGIFSKVTINTSLTLLETYTSPSAFLEADKQEIIDIIKSTARFGLTYAQNKYNAIIQAATDANQFGYIIDSNIKRIRLYISFIRKYDEEINNILESLHELVDANEDADFVKQIHLIETFKGAGFLSAVSIMGEIGDFSAFSKPKQLFAYFGLDPAVKQSGKFEGTKVQMSKRGSSIARRVIHTLSLQSISISRNGKAKNPVLREYYLKKCDSKPKLVAMGAVSHKVCNMIFAILRDNKSFEIITPQEHIKQYNASKCDMAA

SEQ ID NO: 83862 - protein, 347 aa, unidentified
MKEVTTIGLDLAKNVFQVHGVDGSGRTMIRRQLRRGQVLPFFKKLPPCLVGMEACATSHYWAREIRELGHEVRMMPARYVKPYVKRNKNDMADAEAICEAVTRPTMRFVPIKTPEQQSILVLHRTRDLFVRQRTMLINALRAHLAEFGIVAGVGRNGLEKLLEVIENGRDERVPPEARDCLLALRDQLALVKQQILGADRRILAWHRASEVSRRLDDIPGVGPLIATALVSSIPDPHAFRSGRDLAAWIGLVPRQNSTGGKERLGKISKAGNRYLRRLLVVGALSVIRRAKQLGYTRRPWLSRLLERRSTKVAAIALANKMARTAWAMMAHGTCYQEPKGEPVAQAA

SEQ ID NO: 83863 - protein, 334 aa, unidentified
MLYAAIDIHKRAFQAAVLDPESGEVVEERFAADRESLACWAERWRGRVEAVAIEATTGWRWVWRELVAIGFEVRLAEPLQARALLGRRRSAKTDRLDARWLARLLAKEMLPRSWIPPAEIQQLRDRTRLRKALAEDRRRWGQRLHAYLLHEGWPCSRSNLLRPPGLRWAAALQLPAHARLQVDSLLSVMAALEVQLDSVDAELRRFARTDQRCQALQSIYGVGPILACHLLAEIGEARRFRRSQQITRLAGLDPVVDESGESRRRGKLAKAGSPHLRWALVEAAVHAHRPTHPDRALYRATRERRHPAVARLTIARKIGKRAFHALRELELAAT

SEQ ID NO: 83864 - protein, 429 aa, unidentified
MNDVNDRLTLFRSLKASVRGSERYLLVGVDIAKNTHHAFFGTPNGRTLRKNLVIDNTVTGFESLRALVRDLQKQHGLAEVVYGVEPTASYHKPLAEYLIRNQEHVVYVSNIAVARNRAMLDGRWDKNDKKDAANVADLVGQGRCLYYDIPEESLRELRSLIAFRSRLKKEEHALRMRLRNNVFAQYFPELDKLTIHPGQPNDIVLSIAQHCLDPQDIAAMEFEEFVKLVTARKVTVAQEKRLRGLWEISSRSAGCQVHDAARWEAQTLVRRFKSVIEDIRDTEKRMAATAETYPAYQCLLTIPGFGPIVSAMVLAAIGNASRFVNRKQLLRLAGLDLSASRSGQTSDTAKAVISKQGKAALRYALVQAAMIASSKNSAIRGYFSKLIQGRELECGIRLKMKVKLAAKLLVVAWTLMKTGEKFEASCFSG

SEQ ID NO: 83865 - protein, 319 aa, unidentified
MQTLLHNCCGLDVHKDSVVACILKTSNFSEDSNGTEEVEKEIRTFETFPDTLNELKIWLESENCHHVAMESTGVYWHPVYDALESAFEGDIEILVVNARHMRNVPGKKTDVKDSEWIAKLLRAGLLAGSFIPPQEIRELRDFTRYRKNIVFDISRQKNRIEKTLQSAGFKLSTFLTDIFGVSGRNLINVLIKCGKLTHEDVETETRNISREKKTEIKRAVNGRLNKHQREFLKLQLKLLDELLAHLKSVEQSIEEESAQFQEEIERIDTVPGIATTAATAIIAEIGTDMSKFPTAEHFCSWTGVTPGDNVSAGKKKTPE

SEQ ID NO: 83866 - protein, 360 aa, unidentified
MVLGVDTHLDFHVAVAVDRLGRRLGELAVPTTVGGYGELIRWAEGFGLVACAGVEGTGSYGAGLARHLRAAGIAVVEVERPKRRHLRRRNGNKSDSRDAESAARAVLAGEAAGVPKSGDGRVEMTRTLRSARRSAVKARVQAANLLQAMLVTAPDELRRRLRGIPAKELVAVATRFRPGGEPDDVEAVTKFALRSVARRHEALSEEIAELDAQLDRLVAKAAPELLALPAVGTHHAATLLVLAGDNPDRLKSEASFASLCGVSPVEASSGKVVRHRLNRGGNRDANRALHMICVVRMGSDRRTRSYVARRIAEGKSKWEIMRCLKRYIAREVYRVLLSSAAPAPPPIGTASGAVVGAGIA

SEQ ID NO: 83867 - protein, 419 aa, unidentified
MDHPKMAYTYVGIDSHKDTHTAVFLDCFFEKLGTVSFPNRPSAFGRFLTGALKLRAEGTTLLFGLEDVSVYGRSLTAFLGRNGQEVKHVNAYLVSAERKSQSITQKNDAIDAECAARVLLSRFSLLPCAGEEEKYRALRTLVIRHDFIIKNNGSLKNNLHDLLTQHYPNYRSFFSHIDGRASLAFFMRYPSPMTLKNTTPEELAAVLKVPSRGKIGEARAKEILNSLEDTASPLQEIHDAMVKSTIRQIGYNFRELDEIKLTLAQTLDTLGTTLTTMRCLDTVSAAQILSCIGDIRRFPTPAKLARYAGVAPVTYASGSKDAQYANKKGNRELNSLFYNLALRLSMTVGSTNKVLNPFFHEYYHKKLSEGKTKRQALKCLQRRLVNVIWGMLTYNREYTNPPMYDKPKTRKVHKNMIQA

SEQ ID NO: 83868 - protein, 389 aa, unidentified
MKIYVGIDIAKLNHFAAAISSDGEIILEPFKFTNDADGFQLLVSKLESFDKNSIIIGLESTAHYGDNLVRYLVAEFYQVCVLNPIKTCQMRKNNVRKTKTDKVDTFVIAKTLMMQDDLRFITFFDLDMMDLKALGRFRQKTIKQRTRLKIQLTTYVDQVFPEIQYFFKSGLHQNAVYALLKEAPSPKEIASMHMTHLANLLKVNSHGHFTKEQAKELRVLAQKSVGANDSAISIQITQTIQQIELLDSQLEKIEAEMTDIMKFNHSVIMTIPGIGYINGGMIVGEIGDIHRFSNPNKLLAFADLDPSVYQSGNFQAKTTRMSKRGSRVLRYALVNAAWNVVRNNATFNAYYDAKRAEGRSHYNALGHCAGKLVRVIWKMLTDEVEFNLE

SEQ ID NO: 83869 - protein, 316 aa, unidentified
MSDLSMICAGIDVGKSHLDIAIHPGGAALRVGNDARGLKALDGFLDKHDVGRIGFEASGGYEWRLMAHLRAGKRPAARLQPAQIRFFARSRLQRAKNDRLDASLIAAFTASLDDMPVLPDARLDRLAAELTYLEQVEQQIALVKTFAETAFCEAVKQRHLDEISRLEHQRKIQLASLETLVRDDGELSQRLDLLCSIKGIGLRSALCFVIRLPELGHVGRAEIAALAGVAPYDDDSGKRRGRRRIQGGRDRLRKSLFMCAFTAARHNPALSTFYRRLRANGKQHLCAVIAVARKLIIVANTVVARKTIWTQTFQQT

SEQ ID NO: 83870 - protein, 408 aa, unidentified
MLFIGVDLSDRFFDYCISNSSGEVLSRNRFDFNDDGFYSFVACIQKHEPDIQNCVVGMENPHSRLVDFLVQRGYTVIPTHPESIARYRESRIPSRAKSDPVDAGLIADYIREHHKNLRPINMPDEIIRELSILLEDRDKLVEQKVRFSNQLTSTLKDYFPQALEAFGSITNKSALEFLARFDTHKDVKALPVQELEKVLTECGFFRKDSKERFHNAMDTKPSVISNAVIKAKTRLKNVLVGHLLLLISQIEDYEKQIQKIVDDTPNGCIFRSLPGADYILGARLLVLYSSREFSSASEAQAFWGTCPCTSRSGSSMAVRFRKGCNQFGRNTFHQLAFCSLSSSQWAKKQHAKKRKEGKGSNHALRCIANTWVKVTFAMWSNKTPYDESKHLASVANHIINQPSFILGG

SEQ ID NO: 83871 - protein, 422 aa, unidentified
MLEETTDAEEIIARVAALDIGKAELVCCVRVPGPQRPGRRLQEVTTYQTMTRSLLVLADRLRALGVTRVVMEATSDYWRAPFYLLEAHGFEVWLVNARDVKHLPGRPKTDRLDAVWLCKVAERQMLRPSFVPPPPIRRLRDLTRYRADLVAVRTAEKNRVEKLLEDAQIKLSVVATDIFGVSGRAMLAALVAGERDPKALAQLARTRLRAKLGALQEAFTGHFTDHHAFLLAKMLGRVDAVSADIAAVEAKIDQEIVPFQAAADRLDEITGVGRTAAQVIIAEIGVDMGRFPTPGHLVSWARFAPGVKQSAGKRKGKNSTGHGNPYLARVLGDAAVATGRTNTFLGERYRRIARRRGAKRAIVAVGRSILIIIWHLLSDPKAHFHDLGADHYQTRVDTERRKRNHIRQLEALGYTVTLQPAA

SEQ ID NO: 83872 - protein, 414 aa, unidentified
MDVLYPRCAGLDVHKDTVVAAVRSAANGPANTEVRTFDTTTPGLLGLSGWLAECGCTHVAMEATGVYWKPVWHILSDGDVTLILANAAHVKNVPGRKTDVADAAWLADLLAHGLVRASFVPEAPTQAMRALLRTRKQLVREQASHAQRIQKTLEDANLKLASVLTQVMGKSGRAIIGALIAGERDPDALLRLVQRGVKAPPERLRAALTGRVTERHRFLLRLHLRQIDALEAAIAEIDQEVDRDLDPFRQAVRLLRTIPGLSDLTAQVIVSEIGLDMSRFPTAGHLISWAGLCPRNDESAGKRRSTRLRKGAPWLKTTLVQCAWAGTRKKGSYLQAQFQRLRHRRGPKKAVCAVAASILTAAYHMLRDGTFYQDLGPDHLRRATPEAQACRLARQITKLAFTCTIAPADTRVSV

SEQ ID NO: 83873 - protein, 462 aa, unidentified
MQKNHEGEAGGERRRALAGLPSIRPLVAGIDLGSERHCVCAPMADGMAREVADFGATTPELIRLAQWLKERHVESVAMESTGVYWIAPHEVLEAQDFEILLVDTRQLARVPGRDNKSDPSDCEWIQRLHSCGLLRGSFRPPEAVCVLRTLVRDKANLVAESGDWVRRMQKSLDQMNVRVHRAVSDIDGVTGMAILRAIAGGERDARELAKLRDPRCRKSEEEIAEQLSGHWREDHLFSLQQALKMYDAIQQRIADYDRELLRKLAAMPRENIQNQPPPAVKNPQKAKAIKKRGEEPMRQALYRMSGVDMTSIDAIGVETVQVVLSEYGPDLSRFPTEKEFVSPVTLAPRRPMSGGKPVRKKRRNTASTRVAGALRMAALSLRNSATALGAYYRKIARRIGGDVAVFATARKLATLIYRLLRWGQQYVDEGAEVFEKRYEAIRIAALKAKAKDLGFALVHSVC

SEQ ID NO: 83874 - protein, 349 aa, unidentified
MLAEQVDYVVGVDTHRDRHALAVVEARTGAVIAQTMTAANARGYEDAVRFADRHAPGDRLWAIEGSGHYGAGLTRYLDRRGEQVHEVDQTSRGERRLHGKDDRLDAVRAARSPLARERRAAPRTGEHREALRLLLLARRTAVETRKVALVQLRSVVVTAPDGLRDELRRLPLGELLNRCSRFRRSSSRTPSELATILVLRTLAQRIKAATAEAETLEREILSHVRTVVPELLDEPGVGPIVAAQLIVTWSHRDRIDSEACFARLAGVAPLPASSGLTTRHRLSRGGDRQLNRALHTIILHRRQHDPATRDYIARRISEGKTTRDATRSLKRYLARHLYRVMQNAEPAIP

SEQ ID NO: 83875 - protein, 402 aa, unidentified
MNAVGIDVSKGKSMVAIMRPFGEIVSAPFEIKHTAGDIHSLVELINSVEGESRIVMEHTGRYYEVLAHQLSKANLFVSAINPKLIKDFDNDSLRKVKSDKADAVKIARYALDKWQNLKQYNVMDELRNQLKTMNRQFGFYMKHKTAMKNNLIGILDQTYPGVNTYFDSPARSDGSQKWVDFASTYWHVDCVRKMSLNAFIDHYQNWCKRKKYNFSQSKAEEIYGKAKELVPVLPKDAITKLIIKQAVYQLNSASTTVESLRTLMNETASKLPEYPVIMAMKGVGTSLGPQLMAEIGDVSRFTHKSAITAFAGVDPGVNESGSYEQKSVPTSKRGSSDLRKTLFQVMDVLIKTHPQDDPVYQFLDKKRAQGKPYYVYMTAGANKFLRIYYGRVKEYLSSLPES

SEQ ID NO: 83876 - protein, 412 aa, unidentified
MQDILTCVMGLDVHRDIIVACLVKGAVDAEPEAETRTFSTLIPEMQKLRDWVIEAECRNIAMESTGIYWQPIYEMLESCFDGEVSILVVNARHMKNVPGRKTDMKDAQWIATLLRAGLLKGSFIPDKTFRELRHLTRYRKSVVHDITAQKNRIDKFLQSSGFRFTAFLSDTFGASGRNIIRHLIERGSIDREALDKCLKTKTRNRIDEILVALNGSLSVHQRRFLNIVFLHLEDLEAHKHTIEDEITEEVLKHTDALNLLCSIPGIDVTAAAAIVAEIGTDMSAFPDSQHICSWAGLSPGNNESAGKRKSVHINKGNPYLKSMLCETAWIMASHRKLYLSGWYWKVKQRKGAKRATIALARKVLSIIYTMLKTGTPYSEECFEQRRQRCERKRANRMVNELQKLGYTVVAPD

SEQ ID NO: 83877 - protein, 440 aa, unidentified
MRKMVKRAAGLDVHKDQVTACVRIAGKGGEEGREEIHEFGTTTRELLALRDWLAAHRVELVVMEATGVYWKPVYYVLEEAFETWVVNARHFRNVPGRKTDVSDAQWLAELAQHGLVRPSFVPPKAIRELRDLTRYRKAQIQERTRETHRLDKILQDAGIKLSSVASRVLGVSGRAMLDALVKGTTDPEALADLAKGQLRKKIPALKEALEGRFSRRHAVVVGQILAHIDYLDEAISNLSAEIEEVVDPFAEKVELLRTIPGVDEKTAVSLLAEIGPDMTRFPTHRHLASWAGMCPGNDESAGKRRSGRTRKGSKWLRDALVQAAHAADRTKGTYLGAQYARLRGRRGAKRAAVAVGHSILISSYHVLSRGVPYQELGEDWLLTRDREAQTRRLILRLDFAILLARGCFLRVLSDESGRHAGWRERLDLGSTESSRIRGHL

SEQ ID NO: 83878 - protein, 455 aa, unidentified
MAKVRRKIGITNDREFKVVNFNAAGVDVSPKELQVCVPSDRDEKCNRTFGVYTKDLHAISSWLRKCGIDTVVMESTGVYWLPLFRVLKADGFEVMLVNPKDAKNYAGKKTDEADAHWLMVLHTYGLLKPCFQPENITRQIRTLSRHRDNLIRSSSREVLHLQKEMEQMNLKIDNAFSDILGKSGQAIIKAILEGERNPEKLAALADRRCKKSKEEIMHSLEATWDEDHLFVMRQCQDLYEYYKKQIAEVEAEIDRLVSQYTAQVDTEKAGKMDRSKKQKQLHNEVSFDIEQHAFGLWGVNVMRMPAMSKNSLLRLVAELGADFTEKFPDARHFQSWANLVPDNKISGGQLLSSRVPKRKNPVGQVFRQCANALCRSKEPLGDRFRQIKSRSGHKQAMVAVGKTLAGIFYTMVKEKKEYDATIYSKHRKQVLDRSIERLQAKILRLQNESAVCTFH

SEQ ID NO: 83879 - protein, 331 aa, unidentified
MDQHNYVGIDVSARSLEAALVGPSHRSTTASFANSPAGHRQLIKWATKRGHLAQVCLEATGVYSLEIALALHHHPKTKVMVINSKAIHNYAGATMQRAKTDQVDARLILDYGQRMPFACWQPPSKEVLQLQAITRRVSQLKVELNREANRLHAEGHRTSTTDLIARDIQVNLRHLERRMAHLEEKAVALVLSVQHLSALFQRLLSIPGIGETSALRLLAELAVLPEGMKPPQWVAHAGLDPRPHESGQSVHRPRAITKAGNKYLRAALYMPALVAIRHQPNVKAFYDQLIAAGKKPLQAITAVMRKLLHAIWGVWKHDQDFDGQKFYKMAA

SEQ ID NO: 83880 - protein, 417 aa, unidentified
MPRFIGVDIHRDFAQIAIVEDGLVVDAGRVDCRPEALRKWAAQLTIDDQVALEATGNSDAIATLLSQHAGRVVVSNPLKTRAIAEAKIKTDKVDARILAQLLAADFLPSVWLPDDRTAMLRRMTTARAHLVRQRTRIKNRVQAVLHRNLMPRPPVTDLFGKTGRSWLELLPLPEDERASVTSLLRQLDFLGAELTDADRAIAQQALGDQAVRRLMTIPGVDVIVAVSIVAAVGDFSRFESPDKLVAYLGLHPKVRQSGNSPAIHSHITKTGRASTRGMLVEAAWIAAKAPGPLRAFYHRIKQRRGFQIAVVATARKMLVLAWHLVTKDEDYAFARPSLVAFKRRKLELTAGAPKAHARRGTGYDYNDKQLRRFERDLVEKSEQAYERLVASWQPSRPAGADRIDFHPTDKEQMPTKA

SEQ ID NO: 83881 - protein, 474 aa, unidentified
MAGSSWAPRQARSASELSIRGDASKIAGEEAAEWLQPREQKVIPMSKSKPYSAVPVNHVVLKHLTQGRADRAVVVGFDIGKFEILAVPRWGDKDFGRPWRIVNPQEIPDVVRLLVQLSQQSRGLRLALEPSGTYGDALRQACHDAGLAMWRVSPKAAHDYAEIFDGTPSQHDGKDAAVVAELAALGKATVWPYQVKEVWEQELAYWVDWQEAQRQLLVVWAGRLEGLLARHWPEATGVLKVTKATLLQTLIHYGGPAGLAADSQAAKQLSQWGGVWLDAAKVQRLLQTARESVGIRQSEIDKRRMREYAGQAYEARQQMRQSQRELAKLVGGQAVLKAQAGVVGSATASVLWASVGDPRGYECGEAYRKAMGLNLREYSSGTKQGELHISKRGNAATRRWLYLAALRMVKQAGVQQWYEAKKERDGQEAKGAVVAVMRKLVLALYQVGAKGATFEVGRLFPGQGAERAEQESSK

SEQ ID NO: 83882 - protein, 385 aa, unidentified
MSSKAFVPRDYDVFAGLDVDKKSISVTFTNHQGFIRSLRVPYSAEHLVNHVRKHFPDQKVAFAYEAGPTGYGLYDGLEAKDYRCLIASPSMIPKAPGQRVKTNRLDSVGLSENLRGGQLKSIHVPSPLYRELRHLTQLRDILVSDMVAMKQRVKSLLLFEGLEFPPAPAGSQWSFVVRAKLRKLPCSSTVRFKLDELLDSLEFNEKRVVKTTQQIRRFCQNDPELSQCIEYMMSVSGIGQIVASQLLARIGDWRELRNVRQLGAFLGLVPTEHSTGDRTDRGSITHSGDPRLRSKLIQAAWSAIRKDGELREFFRSVCQTHARPLASRVAIVAVARKLTVLVSVVLMEQRPYVVRKKVHSAPLTQEETVPQGTPRRQAEPGAKNS

SEQ ID NO: 83883 - protein, 335 aa, unidentified
MDIKILGIDLAKRVFQLHGVNEHGKAILTKKVARKDLLKVIVKLKPCTIAMEACGSCHYWAREFRKLGHEVKLIPAQHVKAFLKTNKNDANDAEAIVEASIRPSMRFVPVKELQHQDIQALHRCRERLVAEKVALINQLRGTFLEYGVLTPDSRKRMISGLSTLIEDNAEKLTPISIELLKAGQVELRELAEKIDKIELRLKLILKENPVCQLLETIPGVGLMTATAVFGAVVDSSQFKNGRDFSAWLGLVPAQHSTGGRSRLLGISKRGNPYLRKLIVHGARSRVSMPVLQSQWMIEVEKRRGRNKAVVAQANKNARIIWAVMNSKKEYKARAA

SEQ ID NO: 83884 - protein, 408 aa, unidentified
MSQNIIFGIDVSSRSSTVCVVIDRVKQGNPFTITNDSFGYQDLLDHLNQYLITPLVVFEATGVYSLSLQAFLEDHHIKYLRLNPLQAKKLMDNNLRHNKTDKLDAYHLALIQFSAPQKLQAPQSREYHELQAASRYYEELTRALIVNKNQLHRNLQSTFPQIEHILSNPSGKIYWTIVSLFPHAQYVLDMNEDQVKQRLLSISGIGRQRAQYLTARLYAFARQAYPYDRKDGITVRAIQRTISNLLSLSNERDQVINYMEKLTKVVNARALTIYLSIPGIARTTALRLIAELGDLRRFNTSAQIDAFVGIDPGRSQSGDKDSRLGITKHGNHIARKILYRVITQMETVKATQPCHITDYYDKKKQSSHSPGYKKIAIASVHKLIRTLFALIKHNQLYDYNIATKNQRL

SEQ ID NO: 83885 - protein, 374 aa, unidentified
MHKYIWVGLDVHKVTIAVAVAKGEEVPHSLGTIPNDPDAIAKLMRKLGPSARLRVCYEAGPCGYVLYRQLTAMGIDCAVVAPTLVPVRAGDRVKTDRRDALKLARLLRSGELTAVAVPDEAHEALRDLVRAREAAHKDLRRARHRLQKFLLRQGHRCPLRTKAWGVRYLAWVSGLRFAHAAQSVVHREYLAEVERLAERRTRLDRELEVALAQAPAAIQTVVRALQVLRGVAFVTAVTAVAEVGQFRRFTRARQLMAYSGLVPRESSSGDTVWRGAITKTGNAHLRRVLIEAAWQYRHQPRAGITIRQRRKGQAAALCAIAEKADHRLHLRYRRLLARGKSKGKVVTAIGRELLGFLWAVAVHAENGSTMPAAA

SEQ ID NO: 83886 - protein, 427 aa, unidentified
MGTERTSIERFRQLKKEIRGSEEYLIVGIDVAKDKHHAFFGTATGKTLLRRLVFENNKVGFEKLLTHVEAIRVQHALSKVVIGFEPTGNYHKPLGAYLIKCGLMVVLVSGVAVKRNRELLDGRWDKHDTKCAANIADLISQGKCLYYESPSAAISNLRDLLSLRKRLKKEEHSLKMRIRNGLIAKYFPELDRYYDRCESENLAIVRWCLDPRTIANMEVKRFSQIVTSKERGTAQAKRLAAIWNVAGDSIGCLTGEASEFEAKVLVEKLKQVRQLILETEKLIAAVSRRFAEYNYLLTIPGFGPYVSSRVIATVSNPYRFEKENQVIKMAGYDLSADRSGKNSDKAIPVISKKGNADLRYALYQAALVASTRNRKFIVYYTNTLRGREREKGIKTKMRVKLAAKLLAIAWTLMKKKEPFNPDYLNLK

SEQ ID NO: 83887 - protein, 313 aa, unidentified
MSKRYVGVDVSLQSFDVAVRPDGLHSVVPYTPEGVRDFVKQMQKLRPQMVVMEACRNLERPLARGLERGSISVAVVNPRQIRDFAKSTGQLAKTDKLDAAVLARFAETMRPEPRLLPSEDEEKLRDLLARRCQLVGMITAEKNRLHRASAAVRTGIEAHLGWLNEELNKLQREIRQRRNSNTAWKEKAQLLESAPGVGAVVSTTLIGFLPELGTLNRRKISSLVGVAPFNCDSGVRKGRRAVWGGRAQVRAALYMSVMVGIRCNDRIRAFYRRLRKQGKPTKVALVACMRKLLTILNAMLRDHVPWQPQPDNT

SEQ ID NO: 83888 - protein, 398 aa, unidentified
MGVFLGMDVGKSAHHGHGLTPAGKKIFDKPMPNSEPKLRAAFDKLKAKFGTVLVIVDQPASIGALPLTVARDAGCEVAYLPGLAMRRIADLYPGEAKTDAKDAAVIADAARTMPHILRSLELTDEITAELTVLTGFDQDLAAEATRTSNRIRGLLTQFHPSLERVLGPRLDHPAVTWLLERHGSPAALRKAGRRRLVELIRPKAPRMAQRLIDDVFDALDEQTVIVPGTGTLDIVIPSLAASLAAVHDQRKALEAQISTLLEAHPLHQVLTSMPGVGVRTAAVLLVTVGDGTGFPSAAHLASYAGLAPTTKSSGTSIHGEHAPRGGNRQLKRAMFLSAFACMNADPASRAYYDRQRARGKTHTQALLRLARQRISVLFAMLRDGTFYESRTPTITLAA

SEQ ID NO: 83889 - protein, 364 aa, unidentified
MYDSTTTVSVGLDVHARSIRLAAVRADELLEERTLPYDEEAVGRALRRWPAVRCCYEAGPTGFGLYRHLVEHGIDCAVVAPGLVPQRPGDRVKTDPRDARKLARLLAGGLLEPIHVPTRQLEAARDLVRAREDARLDRMRDRHRLSKFCLRHGRLLPTSAWTVTRRKWLGEQQFEHAAEQITFDSYLHAVDLVDARIGKLEQAIRETAEQGPWRELVARLRCLRGIDTLSALGLVAEIGDFGRFQSAEEFMAFVGLVPSEHSSGEHRRQGSITKVGNSHVRRLLVESAWHARRRPTVGYELSRRQRGQEAVVIERAWRCQQRLYQRWQRMAGRGKPHQKIVVACARELAGFVWAIATEQPLRPA

SEQ ID NO: 83890 - protein, 338 aa, unidentified
MNIQTVGIDLAKDVFQVHAVDQHGHTVLKKRLNRKQLRPFFATLPSCIIGIEACSSASYWARQLESLGHEVRQMSPQYVKPYVKTNKNDYNDAEAICEAVTRPNMRFVSTKSVEQQDIQTIHRIRERLIRVRTALINQTRGLLREYGVSLPLSRAAFNARISDALENADNDLSMLTRELIADQIEQLRDLDRRICQYDQRIDRVFQNNPLCKRLAGVNGVGPMTATAIVSAVGDASTFRNGRQLAAWIGLVPRQHSSGGQTRLLGISKRGNTYLRTLLIHGARAVLRYSRDRDDPRSRWLRKLIARRGFNRACVALANKNARILWALMARGTTYQPAA

SEQ ID NO: 83891 - protein, 421 aa, unidentified
MSPADKRAFARTFPVHVGVDTGKSFHVLVAQGPDGRRTKGYKVLVGRPGFEQADAQLQTWFPGVGRDRMLVGLEFAGHHGFTFARYLADRGYPVVNVLPAHTHRAKEIEDNSPLKSDAKDAEVVCSLLGHGVFVRFPFLKRPYVALRLLTTHRHRLSVEATRFKNRIQGLLDLAWPEFLDHFCDLHKATPLAVLERWPLPQDLLAASPRTVRREIHTVSRGHIKPERITQLLASARQTVGLPDAAEERRLELQLVLRRWALVREQMAEVERRIDALVEICPEAKVLLTVPEVSAVCAATLVAELGTPADFEHPRQVLKLAGMNLVSSSSGQRDIRRVPKWQSKRGRPALRRQLFLLAGRWCHQRGLYRAEYEALRARGSSGTKAVCTLARKLVPMLLVLMQSKTPFDEARWRANRRQSEAA

SEQ ID NO: 83892 - protein, 342 aa, unidentified
MLYVGIDIAKNKHDVTALNVPGKTVLKPLTFSNNKAGFELLDLSLRQLNQDCLIALENTGHYAFNLLNFLHEQGYKVYTYNPLLIKEFAKSLSLRKTKTDKKDAHGIALKLLSDPNREQFQHDNRQVELKILARHIHRLKRKQSDWKVQYTRCLDIIFPELDKIVGKHSEYTYQLLTCYPNPQKRLEAGFNKLIEIKRLTASKIQDILSVAPRSIGTTSSAREFEIIENIKHYKRLIDKAETCVNDLMAEFNSVITTVTGIGGRLGAVILAEIRNIHAFDNPAQLQVFAGLDSSIYQSGQIDLAGRMVKQGSPHLRWALIQAAKACARFSPAFKAYLKTKLE

SEQ ID NO: 83893 - protein, 344 aa, unidentified
MNHYAGIDVSLKSSAVCIVDGAGKIIREVAVESEPAALIGWFKRLGVELERIGLEAGPLSQWLYAAMQEAGLRVELLETRHVRDAFRAMSVKSDRNDARGIAQLMRLGWFRPVHCKSIEAQEMRAVLTARKLLQSKLHDIENCLRGVLRGFGLKARKTTERTFATRIEALAAGHSGLTLVVQALLEAHTVLLREFKKLDKQVQQLAKAHPQAKLLMTTPAVGPIVALTYVFAIDDPKRFRSSKATGAHFGLTPRRYQSGETDHSGRITKIGDASVREALYQAAHIMLTKPVKNCSQLKSWAMRIARRAGPRKAKVALARKLAVILHRMLADNMPFNPAAKAAAT

SEQ ID NO: 83894 - protein, 328 aa, unidentified
MTNAATRESAPLDFVGVDIAQEALEWALHGVRGTDMPAKHETGFPALLAARTDGRIGLLVLEATGGLERALAGFLLRHGLPVAVVNPRAAREFARSMGHLAKTDAIDAVALAHLAQTLAAKADQAGVAFVAPSVEVEALQAMVARRVQLLNMRTAEKNRLGGAMRVLHKSIEAVIKTLDKEIAKLERDIDAHLERHFKAQAQCFEAIKSLGPITCATLLAFMPELGTISNARAAKLAGVAPLNRDSGKERGKRHIWGGRRVVRCALHMAVLSAVRFNPVIKAFYERLIAAGKPKKVALTACSHKLLRILNAMARTGQPWNEKFHAVTP

SEQ ID NO: 83895 - protein, 355 aa, unidentified
MNQEKYIGMDVHDATISAAVKNAQGKLLMECVLETKAATILEFIQGLRGTLALTFEEGTLAAWLHDLLKPHVSRLVVCDPRKNALMRNGNQNDRADARNLAELLRTNQVHAVYHGKQGIRALRELGRSYSTLTKDSTRVMNRIKSVYRSWAIPCAGTSVYSRRHRSEWLVKLVEPGVRIRAEHLYQQLDSLEPVRQAARRELLRESRKHAAVKLLRQIPAIGPIRSALLVAILQTPHRFRTKRQLWAYSGFAVQTYDSGEYRVVRGKLQRNRERITVRGLNRNHNHDLKNLLKGTAISAIERPGPLQDFYAALVEKGMRPSMARLTLARKIAAITLTMWKKGVSFDPKQLQRQAA

SEQ ID NO: 83896 - protein, 371 aa, unidentified
MPDVISNQPADVRLWVSLDVHKLSIVAATLPPTGGKPEVQRIETTEKAIRRFIEKLGGPKGLAVGYEAGPGGFELYRLLARFGVRCDVVAPSLIPVRAGDRVKTDRRDAKKLVRLYRGGLFLFVEPPTPETEGLRDLLRCRDDLRCARTAARHRVTKQLLRHGRIYRDGKHQWTGKHRDWLSRQQLDDPLAHAALEQMLVHLDGIERQLAMLDARLEQIARSERWASQVQILTRFRGIATLSALGLIAEIGDFARFSHPRELASWLGITPSEYSSGDQQHRGHITKAGNRHARRLLTEAAWHYRHPPRRPKTGPEPDQRAWQAQLRLYHRHRHLTAQGKRSTVVNIAIARELAAFLWAAMTDQPHRQEAAA

SEQ ID NO: 83897 - protein, 391 aa, unidentified
MIYVGIDVAKDKHDCFITNSDSEVLFKAFTIFNNLDGFNDLYQKIESVMDDVTKVKVGLEATGHYSYNLLGYLIDKGLPTYVINPLHTNLYRKSLSLRQTKTDKVDARTIASMLMSDVNLKSYSDTSYHNEELKSLTRYRFDKVKERAKLKTSVSRLVCILFPELEKLVPTLHMASVYALLSEFPSAKHVATAHLTRLTNLLSKSSKGRYGKDTAITFRDAARASIGSNMPAKSLELKHTIKLIQELDSEIDEIENEIKIIMDEINSPILSIPGINYRMGAMIIAEIGDFNRFDSPDKILAYAGFSPSTYQSGQLDGAYAHMEKRGSRYLRYALYNATKYVCHWDPTFAAYLAKKRAEGKHYNVAISHAVKKLVRVIYHLEKTKQQYIKAA

SEQ ID NO: 83898 - protein, 401 aa, unidentified
MVDPEIRVGIDVGCRFHRVGIAGPDGTILEEFNIPHTQEGFQDFFNRVEKHRYALQLPVAVAMEGFNGYARPLDKLIQDQGYTLYNVNNLKLARFKQIFPGAAKTDRLDARKILELFHLKDQLPMAKNVLQKVLSTPLENEKLKRLTRRRRELVSEKIRVLSRMQADLQAVCPELLAITNNASNLWFLRFITCQGNLVELARLSQESILKIPGVGSKYSGIIREWQRNAKFSSEVEYVGEMIISDATRVLELMRQIASLDKIIKALSNESEIARLLGTIPGFGKTSVAELAGEIGTFERFESEGSLALYLGMCPLTNQSGEFHGTKSPRQVNRRAKAAMMTAVARHIRCVPESKAYYDKKRAEGKRHNQAVRSLGRHLVRVIWSMMSHGRDYEIRGVEECP

SEQ ID NO: 83899 - protein, 419 aa, unidentified
MSFKILKNNCCGLDVHKTWIFACIGITDSNKRTVYKQARFSSFTKGLQELCHWLAKYDCTDVCMESTGKYWIPVFNILEKNNIWVTLSHPKYTKPQKGNKTDRKDAKWICDLYMCGMVKPSFIPPADIRELRDLVRYRFKLTCMITGEKNRAHNCLTVSNLKLDDVFSDIFGRSSRSITEQILQHPGETFDVAPFVHGRCKTPIEEIQAAVDGAVSKEQAVKLRQCLNHIDELEMHKSEIEREIFRLSDKYEDILTLIRTVPGFDKNPMTAIQVLSEIGGDMSVFPTAKNLVSWAGCCPHNDQSNHKIKSTRISRAGSYFKPVLVQVANALIKSKKHPEFSTRYRRIKARRGHKKAIIAICHMILTAIWHILTDLKPYTAKGFLEPRPVSKEKVLTASQALNLLKQRGYVIKDEPIFIS

SEQ ID NO: 83900 - protein, 411 aa, unidentified
MENVFPCCAGLDIHKKSVEACVRRLEPTGQLHHQTRHWGTMTRDLLAMADWMAAQGVTHVAMESTGVYWKPIYNILESRFTVLLVNARHLKQVPGRKSDVRDCQWIAQLLQHGLLKGSFIPPRTQRELRDLTRHRTQLVEEKTRTVNRLHKVLEDGNIKLASVATDILGVSGRAMLEALMEGQEDPVQLADLAQRQMRGKIPELEKALEGHLTEHHRFLLRLLWKELAQQEELIAELDRKIEEHTRPFANEIERLDAVPGVDRRVAEVVLAEVGSDVKPFPTHFHVASWAGMSPGNEESAGKRRRGRITPGNRWLKRTLVQAAWAASHTKNTYLASQYRRLAGRRGKKRALVAVGHSILVIFYHMLKERTTYKNLGGDFFDRLEPERLTRYYVKRLKDLGHKVTLEPGVAA

SEQ ID NO: 83901 - protein, 465 aa, unidentified
MNTDKKLWRNRKAKKELARRLQSENPGLEVVHPHAAGIDVGNGAHYVAVRPDRDPQPVRRFECFTADLYRLANWLQSCGVQTVALQSTGVYWIPLYDILEQRGFEVYLVNARHTKNLPGRKSDVQESQWLLKLHTYGLLNNSFQPPCKIRILRTYWRQRLQHVTGAATCVQRMQKALTQMNIQLANVISDLSGVTGQLIVRAIVAGERDPQKLAELSHPRIQASRAEIAKSLEGNWRRELIFVLQQELEMYDTYQRRVAECDQELQKHLRAFSDSIPAPVKEALPTKKKKKQNKNNPRFHLADELQRITGVDLTRIDGVDVMVAQTVISEVGLDMSPWRTEAHFASWLGVCPDNRISGDKVLARGTRHVLNRAATALRLGASTLLRSQTYLGAQYRRLRSKLGAPKAITAMAHRLARLVYRMLKYGQQYVDKGAEYYERKNRQQQIEFLRKKAAHLGLQLAPAHP

SEQ ID NO: 83902 - protein, 353 aa, unidentified
MKYYTSTTQFNCGIDLHARQMYVCVMDRDGKKLVHTNIRNNDFEFFLKLVAPYRQDLTVCAECMFGWYWLADACQAAGLHFVLAHALYLKAIHGGKNKNDRIDSEKLAHLLRTNLIPPAYVYPAAKRPLRALLRQRILYVWRRSELLSRIQSHQLAYNRPTSRQNLYNRDAWTEQLLASEPDPVRQLALQNDLALIGHYDAQLASLERALLKLTKQTASRDFNLLQTTPGIGDYLGLTILHEIGDIARFPTVKDFLSYCRLVKGTVASAGKLKGLRGAKLGNPYLRWAFGEAAVIAKRDGVLGPLAQRLEARLGNKFKANTVLAIKLARAVYFMLKHKTAFDPDRLVATLSKN

SEQ ID NO: 83903 - protein, 343 aa, unidentified
MYYIGLDVHKKTISFCVKDAAGRVCQEGKIGSTRYELDAWITTLPQPRMIAMEATIFSGWIYDHLRPHAEEVKVAHPLMLRAIAAAKRKNDTIDARKIADCLRCDLLPECHMASTEIRDRRRTLRYRNLVLRQAVQMKNRVSGLLMETGVSYNKLRLHRMGYFAELMATNEEVSQSIRPLLRLCREHIDRSIKMNTVLLTSLERDPLLAERLRRLRTVPGVGPITALTWALEVGDTSRFHNIKQAISYCGLCSAEKSSADKVMRGPISKQRNKHIQQVLVEAARLAPRYSDELALLYERERQRGNGNRATLAVARKMVTWMLAVEKRNKDFVPACDFKRTAAA

SEQ ID NO: 83904 - protein, 427 aa, unidentified
MGFTNPIEHSNPTQKEGDNMNPLYVGIDVSSKSNVVYLMLPDGSMHSNFSVPNSHDGSVQLVKRILSAITALSLDTVIFGLEATSVYGDNLVYFLREDATLVPYEKKIHVLNPRQVNNFKKAYNDLPKNDYVDSYVIADCLRFGRINKEVYQSDYRYNALQNLTRARFYAVQNLTKEKQRFINVLFKKYSTMTQDKVFTDTFSTTALAVYEEFESAEALASMDLQELAGFIMEKGKNRFPDPDAVAKAIQKAARSSYRLPKTVNDSVNQVLSISITSIKALDAQIKEFDKAIKAQMELLPNVLASIPGIGPVYSAGIIAEIGDINRFPSQAQLGKYAGLAWTQNQSGSFEAENTKLIRSGNRFLKYYLCEGTLSLVRCDTEYSSFYHSKYKEVNRHQHKRALALTARKFVRLVFRLLKDNRLYRAAE

SEQ ID NO: 83905 - protein, 394 aa, unidentified
MEHYIGIDNSSLDHKVRVIDENGKESSSFTVANTFNGFENLNKKLKGLENIKIGFELPHGPLVDYLHKHEYNLYSLNPLKIKRYKESLKVSGNKNDDIDALAIAEYLRNNKSYTRELVYNSPEIERLKNLSIVHTRLTQNRARHINKLHFAVRQYFPLQDTLFGDFGCTVQLKMLIKYPTFKSLTSASDKEINEFLKTHKYRRQIYIDRVIEKIRNYTQLISPDVEYAYQIEAGCLCELLLVLSKELKHIETEMNTITDAHKMGKYFKSLPGAGNILACKLLALFGDNKDRFDTYNGIQCLFGTAPKNYQSGMYHKVIMRKACNKSARAVLYKFAFSTLQFSKWAREYYDKQRAKGKTHSVAVRALSNKWVKIIFKIWKDEIFYNENKKIPTAA

SEQ ID NO: 83906 - protein, 428 aa, unidentified
MKNNAARKLKQIQSDYLLIGVDPHKKTHVAAAMTYDLVFHTRFRFANSHEGFQNLVQRAQDLVSKTGSAGILFSIEAAGHYWRNLGYFLDDQGIQFRLVNPFTLKRIRDGRDNNRRKNDYHDAEMAAELLRNGDFVETRLPKGVYAELRALNSTHHRLVEERARMKNLLKGLLDGIFPEFTQVFKNICGMTALQVLASCPIPRTINSIKLEDFVDIVKKGFKGRAPKVRKLHDIYLLAQNSIGIDVASDSVSLEINFLVKRLQLLSDQISETEDAIITTLKSIPDASYLMSIHGISYLSVAGILAELGPLEMYHDAGQLIKMAGTNPTEWESAGKHGSRTPISKKGRPGLRWCLWTAARSLLRHNPDFRRWAKERIERPAHLHPLKVREVFGAVVNRLLRVVYALVKKQTYYQIPILQEAAKFELITV

SEQ ID NO: 83907 - protein, 482 aa, unidentified
MKPSQQNKPQKASCRPEQGSWQQMNRKQRREMTRKMHAEDLSLEVVHPHAAGIDIGNEAHYVAVPPDRDNKSVRRFGCTTAELKEMAAWLKQCGIRTVAMQSTGVYWIAVYDILEAAGLEVYLVNARETKNLPGHKSDVQESQWLMKLHTYGLLRNSFRPPQEVRTMRTYWRQRNDLIRSAARHIQRMQKALTQMNIQLANVLSEVSGVTGQAIIHAILAGERDPRKLAAFRDKRVKAREEEIARSLEGNWQEDLLFMLKQEQEGYEFCQKQMSECDERLQQYLRQREDRSKGAKLPEENRKERLRKNKTNKPRFDLRTELFRMTGTDLTQIDGIDVRTAATVISEAGWDMSKWRTEDHFVSWLRLCPDNRVSGDKVIGKRRLPINNRLSVAFKIAASTLRQSNTYLGAQFRRLKTRLGPPIAIKAMAAKLARLVYRMMRHGMRFVDRGAEFYEAQHRRRQINSLKRKAANFGLKIIDAPAA

SEQ ID NO: 83908 - protein, 369 aa, unidentified
MQEGTTYVGLDAHQESTNGAIILASGEVVEDRFATTPDGIRRWARRLKRRCEGRILCCYEAGPLGYALQRTLVSLGLECIVIAPSLIPSKPGDRIKTDRRDALKLAELLAAGLLTEVHVPTPEQEAVRDLCRARESVKGDQKRIQHRLSKFLLRRGIRWVQGRKMWTRAHREWLHGRRLEHVADQDILDDHLLALEQNEGRLTALDEKLAHGSTEEPYTEPVAWLRCFRGIDTLTALSVVVKIHDWRRFPSPRALMAYLGMVPSESSSGGKTQRGGLTKAGNRRVRRLLIESAWHYRHRPSVGYRLAKRRAGQPAEIIAIADRAQQRLHSRYVRMSARGKSHNRVIVAVARELVGFLWAAMQRTEVKAT

SEQ ID NO: 83909 - protein, 443 aa, unidentified
MSNLAVLDPRAAFVDVGSEKMHVSIAGGPPAVFGTVTSQLHALRDYLAEHQVRSVAMEATGVYWLPLYGVLEAAGMEVVMVDGRQTRNLPGRKTDMKDCQWGATLHAHGLLRAGFVPPAHIRRLQDYLRLRGEHIAAAAGHVQHMQKALERMNVKLHEVISSLTGASGLAVIRAILAGERDPQVLLGLCDVRIRNVKAERIVESLRGDWAEEHLFALAQAVQSWDHYQGLIAACDRQIAVVLRQMPDAKAPPSAASTKTGKPRTRPGVNAPDIAGLREILAQICGAKDLTTLPAHSEYSVLQLIGEVGTDLTKWRTEKHFTSWLGLAPGTAQSGKRKTSIKRRRNRAGQMFCVMARALARSKYVALGGFYRRMAARRGGLVANKALARKLATLFWRVMVKGLDFVETGVAQYEAKVLETKHRILQRLARQLGQQIVPNPAAVV

SEQ ID NO: 83910 - protein, 405 aa, unidentified
MFFAGIDVAKYRHELCLVDDNGSVVLQLHIDNSRTGLDKLIQNLERLNISANDVQFCLEATGHYWLSLYCHLTDLGYSVNVINPIQSDALRNLYIRKSKTDRKDALILADLIRFGHVSETKLASETVLKLQTLSRLRFEFVRQVGGLKNRVLGILDRIFPEYPQCFSNVFIITSRELLKTFTDPEELATADLSELSAFLREHSRGRLGMDRAEQIQALAKGTFGINLALDAFTLQLRLLVEQIEFIQEQINVIEAAIDQVMEEMRPDENTPYRHVLETIPGIGPVLAASIIGEVGDIHRFRNAKALVAFAGLDATVKASGQFEGTRNRLSKRGSPVLRHSIWMAAISARRFNPELKEFFENKRSQGKHTQVATGAVARRLVHLIYSLWKENRPFDPNYQWSPNAN

SEQ ID NO: 83911 - protein, 296 aa, unidentified
MLLGGIEDLLGGHHDTEVDDLVVVALEHTGHYGALLSWLLEEQLFTYYLINPLDLQRSLGLQRGKSDVVDAYRIADYIITSHHKLSPFKLPCESLRKLKALMTARERYVKMSVQIQNSLKAEMILSEKVALKQLIKLEQKQLKSIKNTIQDLEKQMMEIVKSSQDLNTTYTKISSVIGVGAITSIKCIIETDNFTRFTDARKFNCHCGLAPFPYQSGSSIKGRTKTHFLRDKTLKSILFKAAGSAIQHDPQLKKYYEQKLEKGKHKLTALNAVANKIVLRIFAVAKRNEPFVKLID

SEQ ID NO: 83912 - protein, 421 aa, unidentified
MRGFGLDVHRDFCEVAIAEQGQVRSAGRIQSRVEALELFAQSLVASDVVALEATTGADKIVSVLQRHGIRVVVANTRKLKSISEAKAKTDRLDAQTLARLLMSGLLDEVWTPDERTRALRRLTNRRERIVRARTRAKNEAHGVLARNLCERPPVTDCFGKAGRRWLAELELPIDERLTLDGCLRQVDFLDAEVAALDREIAKQALAWPEVLRLMSVPGVNVQTAATFMASVGDIGRFSSPRKLVSYLGLDPRVRQSGNGPARHGRISKAGASETRHMLGEVAWKVMQTPGPLRIFFERVRARRGPQIAATATARKLAVLFWHLLTREQDYAFARPAMTRNKIRRLELLTGAPSQKGRKGIAGGKSKKVFEAERELSRQAEAAYARLVNDWQAAGPPRVGAGATPGRASQRPSKGKAARQAH

SEQ ID NO: 83913 - protein, 405 aa, unidentified
MVFVGIDWSEEPHEVEVMAESGQRLRSLRVAHGVEGLTKLQATIAEVASDPRQVVVGVESDHGLLVNALVASGYAVYPINPLTAARYRDRQSLAGNKSDRRDAVMLANVVRTDRHQLRPLRGDSEPALEIRARARAHLRAVQLQTQLRNQLRSRLLEFYPAVLPLVAADELRDALAVLTVAPSPAMSRRLSLSKLEATLRRHGRQRQVANRAAEIQTLLRAPQLDLQPPHLISAYADEVSSLTRLLLQVRRELAGLEAQLRQAFSAHPDVKIFLSFTGLADILGARVLGESGDDPTRYADASARRTYSGTPPVTRASGKKKEVTRRVARNRRLANATFGWAESAARHSPGARQLYQRLRRRGQTHNMATRVIANRLVGMLHACLRDHTLYDEQRAWTANLTQYAA

SEQ ID NO: 83914 - protein, 520 aa, unidentified
MITIPAVRERCAGIDVGKRGLAVAVMTGPADKEASIQTRWLGTTVPELEALREWLIREGVTSVAMESTGSYWIPIKNILENGLEVVLVCSKKHHPKKGEKTDFRDAIQLAHLHRHGMLTGSYLPERGIVELRDLTRRRKKMLGNLASEKNRIQKTLEVANVKIGNVISDVFGGSGQEILEALLSGREIQAEEIAGMAKCTLRKKLPQLIETLQGHQMNDHHRWLIQQSIDHIVLLDRQLEQLEDRIMMKVEPYRQQFDLLCTIPGIKDLNAAAILAEIGPDMSVFPDSDHLCSWAGRCPGNNRSAGKSKSGRIKKANKFLGGALRQAALGAVRTKDCIMRRKFYRWVKKMGGKKANVAVSRSLLKVAWCVLKSGNPYCEPDATALHEMERQKLVHHHARRLRALGAEPDAIEEIVQLLLCPIRITEELQIEDVVDEGDVPEEGQITPLPDKPLKKPCRVRKERGESCCGKLGFRARQKRRPLPLSKSCLETEVRQRNLQTAAQNDRSGEREFPTIRHEHT

SEQ ID NO: 83915 - protein, 314 aa, unidentified
MSAEPFFVGIDVSKDALEVAVRPGGKRWSARNDSSGLDSLVAALQEVQPQAIVMEATGGYEVPVAAILGAAKLPVAVVNPRQVRDFARATGTLAKTDGIDAQVLAHFAEAVRPVCRPLPDAQQQELEALLARRRQLVAMVTMEKNRLRSVLAKVRPRLEAHIDWLEKELAEGDGELREFLQRSPLGREKDKLLQSTPGVGPVLSLTLLANLPELGTLDRHQVAALVGVAPFARDSGLLRGRRAIWGGRAPVRAALYMATLSAVRHNPVLRAFYQRLLAAGKAKKVALVACMHKLLTILNAMLKHRTPWLAPSRS

SEQ ID NO: 83916 - protein, 426 aa, unidentified
MFKIFRKNCCGLDVHKTWIYACIGITDANGRTDYVQARFSSFSKGLRELADWLAKHKCVEVCMESAGKYWIPVFNILEKTCLVTLSHPKYTKPQKGNKTDRKDAKWICDLFMCDMIKPSFIPPPDIRHLRDLMRYRAKLTNCLTGEKNRAQNCLTVSNLKLDDVFSDVFGKSAMSITNFILDHPGEPFDVTPFVDKRCKHPLEEIQAAVDGAISREQAAKLRECLKHIDEIEAHRLNIESEIIRLVAPYNQLLELIRTVPGFSANPMTAIALLAEIGGDMSVFQTAKHLCSWAGCCPRNDQSGGKRKSSRISRAGSYIKPLLVQVANALIKSAKTPEFKDRYRRIKARRGHKKAIIAICRMLLTAIWNILDKLQPYSSDGFLFVCKTDSSQVITVAQGLNILRSRGYLVKDVPALMPASSALAISF

SEQ ID NO: 83917 - protein, 350 aa, unidentified
MNHKCKIIIGIDTHKATHVAVALDTQGTRLAALSIPTNPKGYLELDRWSQSLGEVHAFGIEGTGSFGAGLSRSLLAQGHNVVEVTRPNRQLRYSQGKTDTLDAEGAARSVLSGQATARPKTQTGLSEMIRHLKVARDTAVKSRSQAMVTLKTLIINAPADLRDVLDKIRGKVALIRHIAAFRPGEINNTMASAKAAMRALARRWLWLHEEIITHDKELERLVIERAPDLMTSHGIATLTVAEMLIVVGDDPTRVRSEAAFAKLCGVCPIPASSGKTHRFRLNRGGNRQANAALYRVAIVRMRGHEPTLAYVRKRTKDGKSKSEIIRCLKRYIVREIYSQLCLPKSAQIAA

SEQ ID NO: 83918 - protein, 338 aa, unidentified
MIVIGLDVHKQSVTAVAVDEAGRPLAEKVIPVGSDELLEWAAALDSERLWAVEDCRQLTRWLERQLLSVGEDLVRVPPKLTVPERRAGRTRGKSDPIDALAIARAALREPDLSRPQPGEQASREIKLLVDHRDDLVDQRRRTQQRLRWHLFQLDPTYVVPLRMLGRPSHLERVSRWLGRQEQELQVRLARELVTTCRALNRAIVELDQQLEQRVKETAPRLLELPGCAAVTAAKLLAEIGPIDRFKTDAQLARHGGVAPLEASSGRTQRHRLDRGGNRQLNAALYRIAITQARYHPDARAYLERKQTEGKSRREAVRCLKRLLARTVFNTLKASPALT

SEQ ID NO: 83919 - protein, 369 aa, unidentified
MQKIIKNIGLDVHKNSISIAIADEGRDGEVRYYGKIDNDMNQLDKVIRKLISKGAVLRFVYEAGPCGYGIYRYLTNNDMDCAVVAPSKIPQPSGNRLKNDRRDSLSLARLHRSGELTPVYVPTEEDEALRDLVRAREDATRAFRTAKQQIGGFLLRHDVVYSGRSKWTKAHFNWLADIAMPHPAQQIVFQEYIDTVVDCGNRVQRLTEQIRQQSQQSRLHELIKALQSMLGISLIIAATIAAELGDLTRFENPGKLMAFLGLIPSEHSSGEQVKKGAITKTGNGHVRRALVEAAHAYRFAARKSRAILKRQEDLPKEVLNISWKAQCRLCTRYQYLMAKGKKTNVAKTAVAREIAGFSWAIAQALPKAA

SEQ ID NO: 83920 - protein, 338 aa, unidentified
MRDFFVGVDVSKAELVCRILDEKGQERGKGSFANGSTGFRKLKKFLLGLDIDGRFYIGMEATGVYHRNLALFLYRSGGRLVPGVFNPASVKAFGQSRMSRTKTDGQDALILARYTLELFRDGSFRPWEPERPEVAQLQQLVSRREQLVSMKVSEQNRLHALEQDEESLPFLVESVRDEILHLEDRIREIEKVIGRHMEKHPNLKADKDLLVSIPGIGQITAAAWMGYLGDLSKFESPSQIVAHIGIAPRERQSGSSVRGKPQICRTGLKELRCALYLPVMAAATRLNPVLKSFYERLLAAGKVKKAALIACMNKLVHIIWAIMKSRRPFDPNYALARN

SEQ ID NO: 83921 - protein, 390 aa, unidentified
MIYVGIDVAKDKHDCCILGSDGEILFSPFTIQNSLQGFDELCEKIWFLTSDMSEIKVGLEATGHYHINLLRSLLDNGLPSFVINPLHTNLYRKGQSLRKTKTDKVDAASIAMMLLTDRTLKPYSDTSYHNEELKSLTRYRFDKVQERARLKTSVARLVSILFPELEKLVPTLHMASVYALLSEFPGASFIAAAHLTRLKHLLNEASKGRYGRDMALMIRDAAASSIATALPAKSLELKHTIRLIEVLSAEIDEIESAINAIMDTLNSAITTIPGIKNRMGAMILAEIGDFSRFDNPDQILAYAGLSPTTYQSGQMTSSYAHMEKRGSRYLRYALFNATQYVCIWDPTFKSYLTKKRAEGKHYYVAISHACKKLVRVIYRMQLTGEAYRTA

SEQ ID NO: 83922 - protein, 410 aa, unidentified
MEVLHPRCCGLDVHKDTVVACVRLVIDGKTVKEVRTFSTTTADLMALSQWLAENKCTHIAMESTGVYWKPVWHILADGEFELVLANAAHIKGVPGRKSDVKDADWVSDLLAHGLIRASFVPDSPTQEMRTFIRTRKQLSREQARHILRIQKTLEDANIKLDSVISDLMGVSGRKIIEALIAGQRDPAKLARLADPRVKASQETLRQALRGRVTRQHRFLLRLHLDQIDGLDAAIAKIDREVEAAIAPFRTAVEQVSSVPGVKNLAALQIISEIGTDMSRFPSDANLVSWACICPRSDESAGKRRSTRIRKGSPWLKTTLVQSAHSAVRMKGTYFQALFHRIRSRRGVKKAIVAVAASILTAIYHMLKDGTMFQDLGADHFDRRTKEQQKNRLVKRLAELGYAVEVAPLPT

SEQ ID NO: 83923 - protein, 359 aa, unidentified
MDNNEDGTRHVVGGVDTHKDLHVAAVVDGQDRVLGTACFATTRQGYRQMLVWMRSFGDLRRIGIESTGSYGAGLLRFMQQAGIDVLEVTAPDKHDRRRRGKNDDLDAQNAAHAALAGRRIVTPRSRDGMVESLRVLTVCRKTAVAARRVAIQIIQTTIVSAPDGLRDTLRSMTRMQLVRTLAAWRPDLTAYREVEAAYRISLKSLARRYLELHDEIADLDAMISAIVDDLAPELIARNSIGYTSAAQLLLTAGDNPERLRSEASFAALCGVSPVPASSGKTIRHRLNRGGDRAANSALHIIAIGRIRTDSATKAYVARRTSGGHSKLDAIRALKRYIAREVFHIITRRHREINQARIAA

SEQ ID NO: 83924 - protein, 353 aa, unidentified
MPVYVAVDFHAREQTISWCDTAAGEVHRTKLRHQHDDVRKFYEQFKGEVIVAFEASGYSAWFEQMLAELGHTVWLGNAAEIRRKAPRKQKNDRRDADLMLDLMLKSDFPRVHTFSTASRTVLRQLRYRHKLVKVRTIAKNSVHAIGINAGLPLRGRLLTQTGLEQLQALPLSPVLSQQRDEWLALIRLMNKQIGAVEESLAQYAKDDAAVELLRTHPGIGLLTALALRYTLEPIARFTSTLSVVGYAGLDCVEEQSSERRRMGSISKQGSRLLRFLLNEAGQTAARKDPQLKQFYRRLLRRRNKPKAKVAVARKLLVRSFIMLRDQIDYAEFVRRGVAARVARETHSPKVTDL

SEQ ID NO: 83925 - protein, 356 aa, unidentified
MLYSGVDLHRRLIVICTVNESGSVVARKSMKTQPDLVTAYFRQWPDQHRAVVECTTGWYWFSDLLRSLGVEVVLAHAKYLKAISYAKVKTDAVDALTLAQLLRMGYIPEAHQLPPEYRAMRDLLRQRMVMEHKRTNIIQRVTSILAQFNITDLPLSPYQSGFADFLNQCPIPEEYRMTLMMYHFQCVQATEHRKQLEKYFKAQLRPTPAVQLLMSLPGIGDITGSIIAMETGDIHRFADSKHYCSYCRLVPGAKNSGGKRSHRSGSKDGNQYLKYAFTESAIKAMRFYPAIKHFASRLERRATKAIARTVVAKELAKISYYVLSRQQEFKTFKGIEINKLRNWPRARKPVRLTGGL

SEQ ID NO: 83926 - protein, 451 aa, unidentified
MSASKKPRRKRDISPTHPNAAAIDIGATMHVAAVGPDQDPDPVRSFGTFTGDLHRLADWFEQCGVRTVAMESTGVYWIPVFEILDQRGFEVILVNARDAKHVPGRKTDISDAQWLQRLHEYGLLRASFRLKGEVATMRAYLRQRERLLDYAASHIQHMQKALMQMNLQLHHVVTDITGATGMAIIRAIVAGERDPAVLAAHRDPRCHASAETISQSLVGNDREEHIFALTQALELYDIYQAKVALCDVRIEAVLKRLRKASSVPVGKPPPVRTTKKQANDLDFDVRAALHGLLGCDVTQIHGLGPYLALKLVGECGTDLSAWPNAKHFTSWLCLAPSNKISGGKVLSSRTRRSGSRAAALLRLAAVAVGRTETALGAFYRRLSARVGKAKAVTATARKIAVLFYNTLRHGMEYSDPGASHYEERYRRRVITSLERRAKSLGYVLQAAPAPG

SEQ ID NO: 83927 - protein, 410 aa, unidentified
MDRVYARCAGIDVHKDSLVVCVRLDGRESPVQTFGTTSREILRLGDWLGGLGVTIAAMESTGVYWQPVWNLLEDRLQLMLVNPQHIRRVPGRKTDVTDSQWIAQLLEHGLLSPSFVPPKAQRQLRDLTRQRTQLLGDRGRVINRVQKVLETANVKIASLISDLAGVSGRKVLTALAQGKLTPQGMADLVDRRMELKKPALREALAVAPLGEHPRFMLRQLLAQLDHIDKQVEAFDLRVEEVMSPLERQTVQRLDEIPGFDLRTGQNVIAEIGTDMSRFPSAAHLASWAGLCPGNNQSGGKRKNGKTRRANRWLKAALTQSAWGASRTRDSYFAVQHRRLSKRRGVKRASIAVAHSLLRVAYELTKHPDLAYTDLGANHFDKKSSVQRQVQQMLRRLKRLGCDVEIKRPAA

SEQ ID NO: 83928 - protein, 420 aa, unidentified
MKAKKKAKLDLVDDNTLVVGIDIGKRNHYCRFINVRGYEIGKGFSFSNNRDGMEKAISKIEEAKIQNNLVKAVIGMEPSGHYWKPAAHYLFGSGYKLALVNPYHIKRIKEIEDNSQTKTDPKDSLLIAKLVRDGDFFDPNLADGIYAELRRMYRLRLKVKKSFIREKTKLKALLDEYFPEYEGLFCDILGVTSEYILKNYFLPEIVAREDIISLTGKIKMISKGKIGASKVLKLIERARASIGINTGIDAAVLEKTYILESISNLKLKLAFLNKKLKYYLDKIECSKYLLSIPGVGVVTAAGFLGEVGDISKYRSAKEIIKLAGLNLVEISSGAKKGKKKISKRGNNRLRCLLYQCAIVAISKNSQLKRYYCYQAETKNKMKMVVAVQCKLARIMFALLKYKKYYDPEEVLKSMVAQEVA

SEQ ID NO: 83929 - protein, 318 aa, unidentified
MGEKGCCIGIDVAKNWLDWAAEGSGRVQRLGNDAAGLAELVRQLQALRPALVVMEATGGYELAGVRALQEAGLPVTVVNPRHVRDFARAGGRLAKTDAIDARVLAAFGAAFRPAPLAQTEASAADFAGLVARRRQLIEMMIGEKNRLEHAQGRVRSWIAESLAALKSQLAQVDETIALAVKADAERRRRFEILTSVGGIGPVTAAVLIAELPELGQIDRKKLAALVGVAPINRDSGMRSGERHIGGGRASVRCALYMTTLTAIRFNPSLKAFHHRLRQNGKRPKVAIVAAMRKLLALLNALIRDDQLWTPRPLLQDGC

SEQ ID NO: 83930 - protein, 399 aa, unidentified
MISIGIDVSKEKSTVCILKPYGELVRSPYEIAHTETELSEFVSMIQDFDDEIKVVMEATGNYHLALLSFLKENEIFVAVINPLVMKKYANITLRKGKTDKQDAIRIANYGLDNWFRLTDYEVREDVYTQLRILGRQYAHYIKLRIDSKLSLTNMLDYTMPRIKTMLQNQSKNPEKDKLNDFIEEYWHYDNITKKSEKQFINSYNNWAKKKGYRKSESKAIKIYALAKEGIPTLSSNVPSTKMLVLEAVRVLREIDKTLAMILSQMQELARSLKEYAVIHEMGGVGDILAPRLIAEIGDIRRFRSGKSLIAYAGIDAPAYQSGKFTGSRRRISKRGSALLRKTGFEVMNCLKIHKPKDDTVYLFMLKKESEGKASKVAKIAGLNKFLRIYYAKVKEVYQQ

SEQ ID NO: 83931 - protein, 346 aa, unidentified
MELYIGIDVSLELSSVCVMDRSGAILREMKVASEPDALLAFCNSLDAPPTLVGLEAGPLSQWLYAGLKDAGVAAVLMETRHVKGALAAMPVKTDRRDAEGMAHLLRMGWFRPVHCKSASSQEARALLASRKLLVSKAVDIELGIRGVLRGFGMKIGKVSKGRFADRVRELAAGNPVLEQASEAMLQALSALRDQIAGLHRRVLATVRADEVCALLMSAPGVGPITALTYKSAIDDPTRFSSSKQVGPHFGLTPKKHQSGEKDVDGSITRAGDASVRAVLYEAASVLLTRTQSFSTLKSWGLRVAQRRGLKRATVAVARKLAVVLHRMWVEGEPFRFTEKQGAAAPA

SEQ ID NO: 83932 - protein, 387 aa, unidentified
MPQPNDLSRSLVALDQDSTIIVVVEMSQSSWLVAGMLPGIERQPRKKLEPSPERLLALLHRWRDEAIGAGKEITRIALAFEAGRDGFWLARWLRARGVEAHVIHPSSVAVSREHRRAKTDRLDTELLKRGFLGWLRGERGHCTMARIPTIAEEDAKRPNRERECLVRERTRIVNRMKGTLARLGIRNFKPTLRKAAERLATLHTPEGSVLPPNVSAELQRNMARLGFVVSQIKEIEGARQKRLEQEPETEPHAMVRHLARVVGIGVETADMLVNEVLSRPMRDRKAVARYAGLTGSPDESGAKRREQGLAKAGNARVRRGMIQLAWRFLRFQKESALALWYRARTADSRVGTRKTMIVALARKLLIALWRFVTTGETLEGVVLRPAG

SEQ ID NO: 83933 - protein, 441 aa, unidentified
MRSRYAGVDWAAEKHDVVVQDQAGEELLMATFAHDEAGLRSLCRTLVRMNVSLVAIERPDGLLVERLLDAGLRLLPLHPNQVAAARPRFRAAGGKSDRFDAFVLCELARTDHHRFRVLEPDSDQTKALRALTRAREDLVATRTALCNQLRAELARFWPGPLGLFTDLYSRISLAFLERYPSPADARGLGEARLAGFLARERYSGRQKPAELLAKLRRAAAARVGELELSTRRQLVLGLVAMIKSLNAQIKELERQLTRTLGEHPDGEIFRSLFRDPRSVICAAELLAEIGDCRGRYPSRDSLAADAGQAAVAIESGKRKAACFRWGCNKRLRAAFATLADSTRHWHPWAQDVYAAALARGHDHPRALRTLGRAWCRVVWQCWQKRTPYDPARHRALQQHITVTIPTASGPVVDQLATESMAAGLFATNAPTSRQQQVTAAQ

SEQ ID NO: 83934 - protein, 344 aa, unidentified
MKVTRLGFDIAKRVFQVHGVDEDGKVRARKALAREKVLEYFTQLPACLIGIEACGGAHYWGRELSKLGHTVKLMAAQFVIPYRKRGKNDANDAEAICEAVGRPNMHFVAIKSEEQQSVLMVHRARTLVVANRTAQVNQLRGLLGEFGLVVPKGVARLRRELPGILEDAENGLPALAREVLAGLLDQFHDFDTRVAAYDRQIRALAEASEPARRLMQVEAIGPQTATALVASMGDPHVFKSGRSYAASLGITPRQHSSGGIDRLGQITRQGDSYVRTLLVHGARAYLRVVDKKTDGKSAWARRLKERRHINVVAVALAAKHARIAWAMLAKGTEYRPVGTEEAAA

SEQ ID NO: 83935 - protein, 322 aa, unidentified
MTHSDLYVGIDVAKFKLDLARSDRSDIEQFNNDQQGIDRIVAMLVEAKPMLIVIESTGGLERALVAALLEADLPASLVNPGRVRHMAKALGIHAKSDKIDARMLVAFGQKAQPRINQKSLKIKDELSDLVTCRRQLCTTRVQQKNRRSTTVSSSAKASIDAVLTTLDEQIKLLDEQIQKLIDADDDFRDLEKILLSVPGVGKTLASVLMADVPELGQIQRQPICALVGVAPFNNESGTIKGPRRIRGGRTHVRNVLYMGALTAMQHNPVIKVFAQRLAAKGKKPKVVITAAMRKLLSLINVMVREGLCWEELNIVKKLSTNP

SEQ ID NO: 83936 - protein, 338 aa, unidentified
MIVIGSDPHKRMYCFAAVDGVSGELLGSETITASSAGHEQLLGWARGLGGELVWAIEDCRNLSGKLERFLLARAERVVRVSPGLMATRRRSLRERGKSDPIDALAVARAAIQEGVDSLPIAELQGPAREIKLLLDHRDDLVAERTRIQNRLRWLLHDRWHELELPTGCLDRMLWLDRLATRLARAPQDTDVRVMRSQLRRLRELVRETKQLEHDLLQLVRAQQPKLLELPGIGALTAAKLIAEIAGIHRFATPAKLARLAGIAPIPASSGNQTRHRLDRGGNRQLNSAIHRMAITQIRHHPPATTYYQRRLTEGKTKREAIRALKRHLVRTIYNTIAP

SEQ ID NO: 83937 - protein, 319 aa, unidentified
MQDKPFIGVDVAQDWVDIANASEPRRVQRIANTAEALQAWAAGLDPDRVGLVAFEPTGGLERALRQALVKAGLAFARVHPNEVAAFRASRGIKAKTDRIDAAVLARFARDELSQRGLAPAVEGDAVLRGLIARRRQLIEACHAERCRRARAASQAVCASIDAVLAVLVQQLDSLDKAITAHVAQTAALAALAANLCSFKGCGPIVAATLMGEVPELGRLTGKEIAALIGLAPINRDSGKRQTRAVTGHGRPGVRQVLFQAARCAIRWNPVIRAFFRRLTEVNKRPGKVALTAVMRKILVILNAIARDGQPWAQAQAAQA

SEQ ID NO: 83938 - protein, 367 aa, unidentified
MHGTLSQLPLPRYSSILAFDLGKFNSVLCRFDPATAGHSFVSLTTTRESITRELEPVPIADRAATLVVFETCEISGWVYDLISSMGFMIAVANPATEAWRWTKVKRKTDRDDALKLARLASMNQLPTVHMPPPQQRQKRRLVHHRRSLVQRRTASKNLVRSIFNQQGIALPRGTKCWTKAGIEQLRLDAKKITECDVDNLWRGRLDVELLVVAMIDQQIRQIDKALEGLADEKTKLLMTVGGVGIGLAQTVVVHLDDPTRFKSAAQVGSYAGLVPRQNQSGEMDRNGHITRRGPSLLRGMLIEVAWMVYRHNQWAKDFVNRVSRGIKARKKIAIVALARKLLVRLWAMLRDNKPWRDPVPKAPAVAV

SEQ ID NO: 83939 - protein, 333 aa, unidentified
MGFEPGPSKEGNWMMAQNDLIVVGIDVAKDKVDACIRSLSLKGTWPSTVQDRRKLIAWLGKHKVGKAVMEASGGYERDWAKALREADIEVRIVDPKRVRSFARSAGRLAKNDAIDAEMIAWFAETFGEAPGQAYDAAREKLSQIVNARQGLLDLQTNLQNRGEHAGPEPVQKMRARLLKQLALEIDKLEAAIAAMIRATPYFAERAEIIESVPGVGGITSAGLIAAMPELGQVSNKVAAALLGAAPYDDDSGRRRGERQIKGGRRKVRNLFYMACLGAATRHNPALKAFYRRLIAKGKKAKVALVACMRKLIVILNIMIARGEKWDANRYAVG

SEQ ID NO: 83940 - protein, 387 aa, unidentified
MPQPNDLSRSLVTLEQDSTLIAVIEMGQSSWLVAGIVPGIERQPLKKLTADQDGLLQLLNRWRKEAAQAGHTIKRIAVAYEAGRDGFWLARWLRAREIEVYVIHPSSVPVSREHRRAKTDRLDTELLKRAFLGWLRGEPKHCSMAAIPTVEDEDAKRPSRERESLVGECTRIVNRVKANLARLGIRGFRPRLAHAPKRLDTLRTPEGTTLPANTLAEMQRDMAHLRFVKQQIKEIETTRTKRLQQASEGGRDAMVRLLARVVGIGIETADLLVQEAFSRKLRDRKAVARYAGLTGAPDESGQKRRERGLAKAGNARVRHAMIELAWGHLLHQPDSALAEWYRRRTVHARSGTRKTMIVALARKLLIALWRLVTTGEAPAGLLLRSAV

SEQ ID NO: 83941 - protein, 392 aa, unidentified
MVCVGIDVAKDKHDCFIIRSEGEVLADVFTIANNRNGFETLLRRIRDCTSPMDEIKVGLEATGHYSYNILGFLLEKGLHTFLLNPLHTNLYRKSLSLRKTKTDRIDARTIASMLMSDVELKSYTNTAYHNEELKSLTRYRFDRIQMRAELKRSVSRLVTILFPELESLVPTLHMASVYALLSEFPGANQIASSNLTHLKTVLLSASRNHYDREKAVELREAARRSIGSVMPAKSLELQHTLRLIRELDKEIDEIEAEIKAIIDNLAPPILTIPGIGYSMGAMILAEIGDFSRFDSPDKLLAYAGFSPSTYQSGRFNATGTHAHMEKRGSRYLRYALFNAAQCVCKWEPSFNAYLNKKRAEGKHYFVAISHAVKKLVRLIFALQTSGRAFQPV

SEQ ID NO: 83942 - protein, 284 aa, unidentified
MQIRSVGIDLGKTTFHLVALGDNSKVLLKKKFTQKQLITFTANLQTSLIGLAACSGAHFLGRALRAQGHDVKLIPAQFVKPFVKSNKNDFIDAEAIAEAVDRHNMRFVPIKTDDQLDLQALHRVRDRLMIRRTSVINQIRAFLLERGMVFAKSPIRLKEAIPGVLENANENLTPRMRNLVAMLWSEWKNLEFQIVEMNDEVERIASSDDACIRLRRIPGIGPLVATAIVASIGNGAAFHKGREFAAWMGLVPKQHSTGGKAKLYGISKRGNRYLRVLMSARRST

SEQ ID NO: 83943 - protein, 366 aa, unidentified
MLQKAELSCEADSENDLGGSSETMYSIGLDVHKRTISYCVKDAAGRVHMEGKIGSTRRELDSWIKTLPQPRTIAMEATIFTGWIYDHLLPHAEQVKVAHPLMLRAIAAAKRKNDKIDASKIADCLRCDFLPECYMTSTEIRDRRRTLRYRGLLVKQMVQMKNRISGLLMEKGVTHTKRRLHKVGYFAELMGGNEEIDQSIRPLLKLSREHIVRAQKLDYALVSSLERDPLLVERLKRLRTVPGVGPITALTWALEIGDVARFRSIKQAISYCGLCGAEKSSADKMLRTPISKQRNKHIQHVLVEAAKLAPRQCHELALIYEKEMQRGNRNRATLAVARKIVAYLLAVERREKDFVPTEEFGGTAAA

SEQ ID NO: 83944 - protein, 351 aa, unidentified
MERYLGGDVHAASVTFSVLNESGKQLRRDVVETNGQALVGYLKQQPGNLHLCIEEGEWSQWLYEILSPHVSELVVYRSKWEPGVKSDAIDAHGLAEKLRTGALGRPVYKDAKRFTALREHARAYAMVTRDVARVKSRIKAFYRSRGVPCAGEAVYRPAERAKRAQALPPATQRAVELLGRELDGLMVLKAEAERAMLRESHRHRIARVLETAPGFGPVRVGLLLPIVITPWRFRTKRQFWAYCGFGIVTRSSADWIRVDGRWVKARMIQTRGLNFNHNHTLKALFKGAATTVIAHSGPNPLREGYDRLLANGTKPNLAKLTVARQIAAIVLAMWKTEAKYDPGRIQASMNR

SEQ ID NO: 83945 - protein, 404 aa, unidentified
MLFVGDDWAEDHHDVYLMNEAGDKLVSRRLAEGLAGIARLHELIAEHAQDPAQVVIGIETDRGLWVDALTAAGYQIFAINPLAAARYRDRHHVSGAKSDPSDAKLLADLVRTDRHNHRPVAGDSERAEAIKVLARAHQNLIWARTRHTNALRSTLREYYPAALEAFEDLADRDALAILGRAPTPCDAQRLSLSKIRSALKAAGRQRSLDTRALEIQAMLRSEHLAAPAAVTAAFGATTRAGVGIVAELNKQISDLEAELATHFETHPDADIYRSLPGLGVILGARVLGEFGDAPNRYTDAKCRKNYAGTSPLTIASGRKRAVLARHIRNRRLYDAIDAWAFCAITRSPGARLYYDQHRAAGNLHHQALRALGNRLVGILHGCLRHHTTYDEDTAWTHRQPAAAA

SEQ ID NO: 83946 - protein, 342 aa, unidentified
MRLFVGLDVSLAKTAICVISEHGEIIKEAEAASEPEVLARWLGGLDGGIAAIGLEAGPMSQWLHRGLAELGLDAVLMETRQVKGALKAMPIKTDRRDAEGIARLLHLGWFRPVHCKSVSAQETRAVLGARKAIQQNMIALEMSLRGPLRNFGLKVGAISRGKFESRIRDLAAGNTMLETATSPMLRARAALRLEPANLEKQVRQLAQDDPTCVRLMTMPGIGAVVALTFRAAVDDPARFRSSKRIGPWVGLTPSRNQSGERDVSGGITKAGDVNLRRALCQAATMMMTRGRSTWLRTWGVQLARRRGRIIAMVALARRIAVILHRIWVDGTVFQPDVAPNMI

SEQ ID NO: 83947 - protein, 343 aa, unidentified
MQAVTTVGFDIAKSVFQVHGVDAHGNVVIRRQLKRRYVVAFFKKLSPCLVGIEACATSHHWSRELQALGHTVRLMPPAYVKPYLKRQKNDAADAEAICEAVLRPSMRFVETKTAEQQGCLMLHRTRHLFIRQQTAVINAIRAHLAEFGIVAPVGRNGVEELLDVVADPDDARVPEVARECLGALGAQLRMLKAQVLEFDRRILAWHRSNATSKRLDEIPGVGPALATALVASIANPKAFRSGRDFSAWVGLVPKQNSSGGKEKLGSITKRGDRYLRSLFTAGALAVIRYAKIHGTKHRPWLTALLARRPTKVAAIALANKIARMAWAMMARGERYKEPIALAV

SEQ ID NO: 83948 - protein, 344 aa, unidentified
MDHFGGLDVSVKETSICIVDDTGKIVKEVKVASEPAALLKVLGNPSYRFKRIGLEAGPLSQWLFSALAEAELPVICVETRHMQAVLKAQINKTDRNDARGIAQMIRVGLYRPVHVKTLRSQKLRMLLTHRKLLQSKAIAIENDLRGTLRNFGLKVGMVGKVRFEARIQQLVENFPDLSVLVEPLLIVRRVLREQIVILHRRLLAIVRDDEVCRRLMTTPGVGPVVALTYRATVDVPARFRKSKSVGAVFGLTCSRYQSGEIDWSGKISRCGDEMMRTMLYEAAQSMMHSKKWSWLKAWAMQIARRRGMKKAIVALARRLAVIMHRIWVDGTEFRWTREQAAAAA

SEQ ID NO: 83949 - protein, 389 aa, unidentified
MFYIGIDIGKFNHCACVVSSEGEVLIEPFFFPNNLEGFQSFIKTVKKYKSPKHIVGLEATGHYGDNLVSFLVSHDYEVALINPLTTDAKRKSKIRKTKNDKKDTFLICSVLFDRDYTKVTQRRLDMKQARELTRYHASITEDINQKKNRLQKCIDIVIPEFNTWFKTKYSKTYMAVLKEFGSSYNLASANLAHLKKVLKPKSSGSRVDIDASTLRDNAKKSIGENNEVITLEIKMLIENIELLTSQLKTVDKKIEELAAKLDSPIFSIPGIGIYSGMSILSEIGDIHNFSSAVKVMGFAGVDPGTYQSGEYSAPQTALSKRGSRYLRKSLYQCILTVCKYNLTFNKYYRLKRSQGKSHRCAQGHSVRKLIRVIYKLLSENIPFDERQLI

SEQ ID NO: 83950 - protein, 370 aa, unidentified
MDKLIRIGIDTSKSVFQLHGVNESEQPVLRKKLRRKDVVTFFGKLAPTKIGIEACGAAHYWARELTTLGHDVVLIPPQYVRPYVDRGKNDAADAEAICEAMSRPKIQKRLVPVKSAEQQAAQMLMGTRDGLIRRRTQLTNAIRGHAAEFGLIAAKGLDKIEPLLLRIAEDMTMPALAKALFASQGQELMRLGKQVREIDAQVMAWHRGNELSRRLVAVPTIGPIGACLLVMKTPQPATFRSGRDFAAWIGLTPRDHSTAGKSRMGAITRAGDEALRRTLVVGATSLIRQVRCGRSQPSPWLAAILARKPPKLAAVALANKTARIAWKLMVGGGRYNRAHQPAPAAPREGRCASLRGGYAARPSQQGADAA

SEQ ID NO: 83951 - protein, 366 aa, unidentified
MQAIIERCCGLDVHQETVVACLLIGAAGARARKEVRTFRTVMRELEALRDWLKAAGVTHVGMESTGVYWRPVYAVLEGHVELIVGNARHIRNVPGRKTDVKDAEWIADLVRHGLIARSFVPPPPLRELRELVRYRRKLIEAQAAERNRLLRLLETASIKLASVMSDVFGVSGRAMLKALIAGGAAPEEMAALARGQLRRKRAELIEALTGGVEEHHRFLLAMQLGRIEAIEADIAALDARIAERLLPYSAEMALLMTIPGVNWLVGAVIIAEIGTDMSVFLSVHHLAAWAGVCPGSYESAGKQKSGRARKGNVHLRTILVGAAISAARTKGSYPRDRFPRLKARRGALRAALAIAYKIVGPPPRHG

SEQ ID NO: 83952 - protein, 337 aa, unidentified
MSKTAPPDVIIGVDTHKDVHAAVAINAFGVHLATTTIPASSKGYQALEAWATSMGAIRAIGIEGTGSYGAGLSRFLRERGHAVLEVNRPNRQLRHQRGKSDTVDAESAARAVLAGQATGQPKSGTSTVEMIRHLKVARDTAVKGRSQAMQTLKAIIVSSPAALREQFDHVTGKMTLLRRLAALRPGPITSTLASAKTSLRAIARRWLALDAEIKEHDTQLETLTATRAPELIKAHGMATGTAAEMLLLVGDNPERIRSEAAFAKMCGACPIPASSGKTNRHRLNRGGNRQANAALYRVVVVRTRGHQPTLDYVRRRAPSTCGPAGLPGRIRADRRVG

SEQ ID NO: 83953 - protein, 336 aa, unidentified
MVAWTLLESALLQGGVMESVGLYQSAMGIDVCGERLDWQRVPQQGSGSYPNTPDGVKSLVADLKQSAVDIVVIEATGGLQRQAATALASAGMAVAVVNPRQVRDFARASGQLAKTDRIDARVLARFGLRMQPQPRSLPDEAALELADKLARRSQLIEMRVAEKNRRYRASTVMKRSIDRHLAFLDQAIKSLDKDLDDTLRGSPMWAEKVELLEAVTGVGPQTLRRLLIDLPELGKLDRHAIAKLVGVAPLNRDSGTFKGKRMIWGGRVNVRNTMYMAALSASRFNVPLKAFFQRLKAAGKPHKVALVAVARKLLTILNAMLRDHSTWNPHRAATSA

SEQ ID NO: 83954 - protein, 317 aa, unidentified
MPQSERIVGIDVSKRRVEACLRARRERLSQPSTPEGRQAMIAWLRQHDVAVAVMEASGGYERDWAAALRGAGIAVRIVDPKRVRYFARSAGRLAKNDPIDAEMIAWFAETFAPAAAPAHDPEREAVDRLMTVRAMLVRLESQIGQLGEHRQPPLVERAGRAIAGVIVRQRKRLETAIAARIARQADWAERHRIIQSVPGFGPRCAAGIIAWLPELGQIGGKPATALVGLAPYDDDSGGHRGERHIKGGRREIRDLLYMAALAATRCNPVIKAHYQQLRARGKKFKVALVACMRKLVVILNTMLMRGQMWNPPAAAVA

SEQ ID NO: 83955 - protein, 313 aa, unidentified
MTQDTFVGIDVSKDTLDVHLLPTHRRHQCSNSPADIQTLAAQLLALTPSLIVLEATGGYQAQLAAILYDRGLPVTVVNPRQVRDFARASGQLAKTDRIDAELLAKFAQRMQPPLRELGDENDRTIKAWVNRRRQLLDMHTAESNRLGQARDKVVLASIRSILQLIEAQLKDTDHTIDQFIRQSPLWLEKATLLDSVPGVGPATIRSLLAHLPELGRLNRRQISALVGVAPMNDDSGKRGGYRAIRGGRTDVRNALYMAALVATRYNPRIRSHYQRLVASGKKKLVALIACMHKLLIILNAMIKTNQPWRCQMP

SEQ ID NO: 83956 - protein, 351 aa, unidentified
MTIIGCDLHTRYQVVAWVDEGTGEIRTRRLEHEKGETQAFYSSLARGARIGIEATFPALWFERLLAECGHELWVGDAAQIRAQVVRQQKTDTRDAEHLLELLRTNRFPRLWVPALGERDLRQLLVHRMKLVRMRTLVKNQLHALAMSQGVCRKRKLWSEKGRAELQSLVLLPWTSRRRQELLAWLDQLDRSIAPLDQAVAQQAQARAEAVRLMTHPGVGPVVSLAFVLTVGPVERFANSRKLVSYLGLNPREHSSGVRQRLGAISKQGNSMMRWLLVEGAQTAARFDPELRRAYQRLKFRRTSGVAKVAMARRLAVRLYWMLRGRVDYAQLVRVSGSPRSAVVPAQAGSRP

SEQ ID NO: 83957 - protein, 478 aa, unidentified
MDDRRLVGIDLGISSAHTVRVLGGDGSLVCRARAIPTVESLEQVERIALAQTPAGTLLEVVLEPTGPAWLPIAVFFSARGHTVYRVSSAKAHDLRRVLSRHAKSNGIDADTLARLPLVDPAGLHPLELPSAERAALDRRVRACDRLTRQAASHKRRIKDLVHQLLPASPLVGELGQADLAVLERWADPHALVAVGRARLQRVLATASAGQQGAQRAEQWLAAARAALELYGDHPAIAWQELAAEVTSEVRLLRATQAELAAHTRQREACYRRVDPAGLARSLPGLATVGGPALVATMGTASRFATAGKFRCFTGLAPKASETGQTDRKGQPISKAGNRLLRTTLVRAADHARRQDPQLARIYWTQMVQRGKDHLGAVCVVAAHLAERAWVVMDRGTPYVVCDTDGTPVTAQQAKAIIAERWTVPEQVRLRRRSRKGKAPQQVLTGHVHGARGATRRPSPSPASLGRRTVPVKPTQPQP

SEQ ID NO: 83958 - protein, 379 aa, unidentified
MTTTDAAAEARETVYVAIELSKKTWVLGIAHPDRARPSIHRVCGGNIAELVSRLRVAARNNRRILVCYEAGYDGFWLARALAKMGIECRVLDPASIQVNRRARRVKTDRIDVLALLRALIATDRGERHVCAIVRVPSVEEEDARRSHRERQRLVRERTGHINRIKGLLFAQGIRDIKPKLRRSRIDFAALETAEGHPLPDRLRRELEREYARLSLIAAQLREVEKERDTADAQDPVVEQKRQLLVALHGVGATSAAILAREVFARSFASRRQLGSYLGLTPSAYDSGSTTRCQGISKAGNSWARRILIEVAWLWQKYQPASPLSHWYIQRTAGQSSRIRRIMLIALARKLAISLWRYVETGLVPEGVAIAKAKLRCAPA

SEQ ID NO: 83959 - protein, 371 aa, unidentified
MSMQQVPSHRRVVVGVDTHKHVHVAVAIDELGAVLDRRSFAADSGGYGQLIDWGESFGGKLTFGIEGTGSYGAGLAGAVRRRGIGTLEVMRTDRRDRRLRGKSDTIDAENAARAVLAGLATAIPKSADGTVEMIRQIKVAKDVAVKARTSAMISLKQVIVNAPDDLRQELQPLSKMALIHRCAALRPGQVTTIIASTKHTLRSIARRWEVLDAEISGHEKLLAELTAQIAPDLAKAFAVGPDTAAEMLIVAGDNPERIRSEAAFARLCGVAPIPASSGMTTRHRLNRGGHRQANAALYRVVIVRMQHHEPTKAYVARRITGRKDEVRDHPVSETSSRPRTLGRDAPHPRSPTTPPNRGLTDIGASSLSPGS

SEQ ID NO: 83960 - protein, 312 aa, unidentified
MEKLSYGGIDVSKDRLDVVVLPEGWFFSVSNDTAGWAELVVRLRPLTVSAIGLEPSGGYERGIIRALLAAGLSVRRINPNKLRQFARARGVLAKNDRLDARLIAEYVAIMPTRVVQRDAAVERLAEIVTMRRQLCDEHVAAENQAAHLEDAMLRRLSKRRQMRLEADIRLLDKRLAEMVAANVALAQRYELLTSMPGVGPVLAFTLIALLPELGKMTRKQIAALVGLAPYDFDSGKLKGHRSIYGGRMPVRNVLYMAALSASRYSPALKAFHNRLADADKKSKVIIVAVMRKMITTLNAMLRDNAAWQPQSA

SEQ ID NO: 83961 - protein, 472 aa, unidentified
MGSYFLGGDASKGYCNFALLDHKKRIVEEDFQLDDCHEGHQSLYHFLHQFFSSHKNGDINAGFESTGGYENNWYQLLWKLQDCFDVKVARLNPYGVKYHKKASLDRIETDKISARKIAEYLITHPEKVEYNKEDSFAELRRHWKYIRMLKKQKAQLQTHLKAQMYVSQPQLLVYCKDGISDWILLLLKKYPTAMDLAKTSVNKLASIPYISKERAKELIREAKTSVASMKSPIMGNMIKSAAGEILRMKKTIKEQVKLMINTYDINMPEIEILKSFPGIDDYSALGLLIEIGAIERYSSVKKLVSFFGIHPIYRQSGDGKWGNHMSKKGRKEPRWILFNVATNAICNDEMIQELYNDHLKKGHCRMSAIGIIMHKILRIIYGMLKHKQRYDPNVDRTNRKKTVKTSTSKGPKKTDNSRRYQSYDKSAPVSKKQTKKRKLMDMEVTEVEVASQDEVASHPKDKKIRQERSEMN

SEQ ID NO: 83962 - protein, 475 aa, unidentified
MKPKKSKSSASKTIQPAAKMPVIHPHAAGIDVGSVEHFVCVPPDSVPEGEPSVRSFGGFSGELDKLVEWLQSCGVKTAAMESTGVYWIPLAQKLETAGIEVVLVNARHLRQVPGRKTDVKDCQWLQQLHSYGLLQGSFRPAQDICCVRSLMRHRQNLTQSCGQQVQHMQKALQQMNVHLHHVVSDLDGETGLRILDAILAGERDAGKLVLLRDALCRKSTPEEMVAALQGDWRSEHLLVLRQALETYRHLLAQMSVCDGEVQAALAQIILPVVEEPAEPAPPNPPASPEPRKKKRFHQRKAGTGLRRDVSAELARICGVDLTQVTGLNALGVMILLSEIGLDMSRWRDSKAFSSWLGLCPGNKISGGKVLSSRTPHVVNRVAILLRTVAPSVGRSETWLGSFHRRMRARLGPAAANTATAHKLATLIYHLLKYKEEYIDVDRLLYEEKLRGKRLARLRKQADELGFEMVQKTQAA

SEQ ID NO: 83963 - protein, 345 aa, unidentified
MELHTIGIDLGKTVFHLVGLNRRGEVVVRKKCSRKQLLHFTANLQVELIGMEACGGAHFLGRALQEQGHAVRLMPAQYVKPYVKTNKSDYIDAEAIAEAVTRPRMRFVPIKSDDQLDLQSLHRVRERWVMRRTAVVNQIRGLLLERGITIRKGRCHVDAALPGILEDASAQLSGALRVLLAQLRLELDHLQTRIDEADAVIQQTAGENEACRRLVAIPGVGPVTATAIIAAIGNGAAFRKGREFSAWLGMVPGEYTTGGKQKLLGISKRGNTYLRRLFVQGARAVLQQSAKQSSGLSAWLTQLTARTHPNVAAVALANKLARMAWAVLAKNEPYRPPVLADATTD

SEQ ID NO: 83964 - protein, 373 aa, unidentified
MAYQHYWVGLDAGHLETAVCLIDAEGGILFEAICETKSGPIRDILRRFGVEAAQCLTIEAGNGTQMVRELRSYGFPVQVVDVRKSSKFLAIRRQKTDVHDARGLAELGRLGRSIGSPVFVKPMEHQNIRTLINVRRTMLKNRARTDALIQSIFRLHGGNVKLLNGRGALAAEVNDQVRKMRQHGLEIGVNLQPLVDISEALREQISALDRQMRDIASNNLTCRNFQTIPGVGAVIALSFYSAIGDPHRFERSRDVGAYLGLTPTLYQSGATSRRGRISRHGNKLTRMHLITAATVLLCRIEIESRLRTWGLELAQRVGFLKARVAVARKLAVIMLGMWKTGSPFRPDGAPSLFLQQEEAGLDPVLISGTQISL

SEQ ID NO: 83965 - protein, 331 aa, unidentified
MAQNELVVVGIDVTKDKVDACIRSLSQRQTFPSTAEGRRALIRWLRKHKVGKAAMEASGGYERDWAKLLREARIEVRIVDPKRVRSFAQSAGRLAKNDAIDAEMIAWFAETFTDAPGQAYDAEREKLVQIVNARQALLDVQTSLQNRSEHSAPDVVQKTQARLLKRIAREVAKLEAAITAMIKAAPHFAELAEIIESVPGLGKVTSAALIAAMPELGQVSNNIATALLGVAPYDDDSGQRRGDRHIKGGRRKVRNLFYMACLGAATRHNPVLKAFYDRLIAKGKEPKVALTACMRKLICILNTMIARREKWDTTRYKMSDPARLPPSACTA

SEQ ID NO: 83966 - protein, 360 aa, unidentified
MTSMEQDRRRRRVVIGVDTHKYIHVAVALDAIGGVIESRSFAADSGGYAQLIEWAISLGSAALTFAIEGTGSYGAGLTSAVRRAGIGAVEVMRTDRRDRRLRGKSDTLDAENAARAALSGNATAIPKSNDGAVEMIRQIKVAKDVAVKGRTSAIISLKSIIVNADPELREQLQGLPRMALIERCAGLRPGQVTTVLAATKHTLRAIARRWQQLNAEVSEHEKILTRLTKQLTPDLVAAHGIGPDTAAEMLIVAGDNADRVRSEPAWAKLLGVAPIPASSGMTTRHRLNRGGHRQANAALYRSVIVRMQFHEPTKAYVARRTAEGKTKREIIRCLKRLLAREIWTLMRPFREASTAPRNAT

SEQ ID NO: 83967 - protein, 430 aa, unidentified
MKSNTQNAKIEAITEKTLVLGIDVGSETHYARAFDYRGIEYSKKPFKFSNTEAGFVTFKEWILDIKERHEKDKVVPGMEPTGHYWFNLGKFLQDNEMKPVLVNPHHVKKSKELDDNNPTKNDRKDPKVIAGLVREGRYMIPYLPDGVYADLRTASNIRFQLQAELTRIQNRISRWFNIYFPEYKTVYGKPDAKSGILILKAAPLPEDILTLGIDGVNQIWRDAKLRAVGKARAKTLIEAAEHSVGSKEGAVAARMEIRMLLEDYESRSIRLQEVMTLIEGLVKQIPMAEKLLEIKGVGIRTVSGFLAEVGDISRFNNPKELQKLAGLALVENSSGKHKGETTISRRGRKRLRYLLFEVAMSLVAKNPEFRELHNYYTTRRLNPLKKMQSLMAIAAKLIRVFFAMLTKGVDYDPKKMVSDIKRPAVYLQAA

SEQ ID NO: 83968 - protein, 322 aa, unidentified
MNKYKETFGVDISKDVFDVHGSNKGHDQYKNDEIGFKKFLKELPKGSLVVMEATGYYHYRLAQFLHKNEVIVSVVNPLSVKRFIQMKLAKVKTDKSDAKAICEYALINEVPIYNALTDTQSECLQLFRLLDTYLKQRTATKNKIHGEAVLGIPSKFVYRSLIRNKKQLNKEVAAIESKILSLVKEDQQEQLTLLTSIPGIGQKTALFLIVVTDGFSKFETAAQLCSYVGITPTIRESGSSVRGRARISKVGNRKLRNLLFLCSFNACKHNKACKEVYERIVNKGKSKKLALIAVANKLLKQSFAIAKYGRPYDETYVSVLPR

SEQ ID NO: 83969 - protein, 335 aa, unidentified
MTKVMDAVSVGIDVSACTLVVALERDHQSGRQRREFPNTAAGHKVLVQWLSKSATAVQVCLEATGLYSLDLALALDRAEGIEVMVANPRAIADFAKALLQRSKTDQLDAEVMLEFVRRMPFVPWQPPKPHRLDLRALMRRITGLKLASQQEKNRLHSVSQAAEITPLVRKDIQSHLVQLERHIEKLEQQAEAIVQADPELAQQFRHLVSVRGIARVSALHILAELVVLAPDMTARQWVAHAGLDPRHHDSGTSIHKPARISRAGNRYLRAALFMPALVATQHDPNIRAFYQKLVDRGKTKMQAIVAVMRKLLHALHGMLRTDSDFVGEKFYVIPS

SEQ ID NO: 83970 - protein, 387 aa, unidentified
MMAVVIGVDPAKRSNTIEVMDSRETVLVTARFDNTNTDYRKMRTLVKGWPDRVWAVEGATGVGLHLAQRLISDGERVVDVPSKLSTRVRAIDSGHGRKNDPTDAHAVAVVGLRTKGLREVVADDQMVALRLLSERRRDLVRSRTQAVNRLHQVLMELIPAGAQRHLTATKAKELVVTVRPRDVAGKARRQLAVDLIDDVSVFDRKIKTVDTRIQEAVAASGTHLTDIVGVGPVTAATILGEVGDVARFSTADQFASYTGTAPIEASSGEVVRHRLSRAGNRRLNSALHVVALSNKRYDPRGKTYYERKLTAGKGSKGSMRCLKRRLSDVVFRVLVQDRALMNPGGQMGATLTASAVDQIPKANTSDKPQPGSSTEATPTKHLAEAAS

SEQ ID NO: 83971 - protein, 363 aa, unidentified
MFTERTSVGLDVHARSVAAAAIDSVTGELVQAKLTPSYEHIRSWLGDLPGPVAVVYEAGPTGFGLYRHLGVAGIRCVVAAPSKLQKPSGERVKTDAKDAIHLARLLRLDEVAAVAIPTVDQEAARDLVRAREDCRGDLMRGRHRLSKLLLRHGIVYYGGQAWTGKHDAWLRHEALPELSTRATRLAFDSDYENVLMVKARRDRLDTAIGEMATDSEFTDMVHRLGCLRGVSTLTGFALAVEIGDWHRFTGNTIGSFVGLVPSEYSSGSSRVQGSITKTGNTHVRRLLVEAAWHHRARYTVGKTMRDRWDLAPAAARARGDAGNRRLHQRWVKFIDRKKKPTIANVAIARELAGWCWSLAVLEE

SEQ ID NO: 83972 - protein, 319 aa, unidentified
MAGVDVSKDTLDIYYNDSDGKEYYLKVANDTKGHDVILRKLGIHRTYVMESSGPYYLRLAFAIKTLDGDVRVENPTRVKRFIQMHLERNKSDKKDARWLYFYAKHRETSEWKLPPREQLYCMQIMGSIDLYSRQLVMITNQIHSLEQIPVQMKEVIKSLQAIKHNVEKEIKKLEKNLQSQLASWQGEQLKNITSIPGLGKRAVALLIVYTDGFKKISNYRQLIALAGLAPREHTSGTSVRGRKGICKMGTGHLRNVLYMCSLSAIKHNGACKELYERLKAKGKRSKVALIAVCNKLLKQAFAIATKGTFYQPDYKSSLT

SEQ ID NO: 83973 - protein, 420 aa, unidentified
MGYIGGGLHRAFVERIRGVEPERLLAVPIDVGKHTAAALVSDFWGEVVAAPFTFDLNERGFETFARIVAGAGAGREARWTRVGLEQAGHYHQVILARLLDHGLDVALLNPAQVKENRAQDLLRSLKSDARDLGAMAELLIRGKGRPAGTIDEAMAAQAALAAHRSRRVKARTALKNQVHKSLDLVFPGLSGCFHKILDTKLGRLLVTEGMDPVRIRRLGTERLRGFCLRRGVRASRSKAAQVVQAARAALGLPHGIARVHATVLASDVALLGRLDSEIAEIERGLAEVLPRTPAAILTTMPRVGVVRASLYGAALGDPTRFRTSAQVYRLSGLVPKLYESAGRRRAGTRISREGKAELREAIIELGRALRQGHPDFARYARELEARGKGPGVVACALGHRANRVAFALVRDQVAFDPARW

SEQ ID NO: 83974 - protein, 496 aa, unidentified
MKAKACKAKAKHSHSSKRGVKIAARRGAEGMEIVNPHAGGIDCGAQEHYVAVPPQSVEPGEPVVRCFSAFTEGLDALVEWLKACGVTTVAIESTGVYWIALCQKLEAAGIEVYLVNARHVRHVPGRKTDVKDCQWLQRLHSFGLLSASFRPEDMICRLRSLQRHRLNLVWTAGAEIQHMQKALQQMNLHLHHVVSDITGVSGLRIIEAILAGQRDAVQLAKLRDHRVYKSTLAQMQAALVGDYRPEHLFVLGQSLQAYRFYQARTQECDLEIERQLQQLAQRFESPSALGAELSQPEALDEADAPSQNPQPAKRKVKRKPQANEPKIDLADYLRRICGVDLTQVIGLNVLSVLLIVSEIGVDMSKWRSAKAFSAWLGLCPRNKISGRKVLDTRTCKVISRVATTLRLAAQSVGRTDTALGIFYRRKKGHLGPAKATTATARKLACLVYHLLKYKEQYREPDPNTYQLKVQKSILAKIQKQAATLGYKLLPTALVPA

SEQ ID NO: 83975 - protein, 328 aa, unidentified
MENTLYVGIDIARHKFDAAFFTSTGKAKHDTFHNNAGGFAAFLQWCGAHSARLHLAMEATNVYHEELAQYLYEQGHTVSIVNPRCIHAYAKSQNLRSKTDKIDATLIARYAAKEVPPAWQPPREPLRVLLLTLRQLERLKTVEQQQRDLLGTVKEPGCVESIKRLHAFLQGEIKRMGKEVKAIIAADERMQHNAKLLHTIPGIGERTVPWLLAYLHDGKRFANGKAAATCAGLTPMLHQSGTSDGKAHISKIGPSEIRKVLYMPAVVYSFGICRDGPYKSFADSMLANGKAKKSVITALMRKLLTIAQAVLQYRCPFDLQRYEKATKK

SEQ ID NO: 83976 - protein, 424 aa, unidentified
MEQDFSLFVGIDWATEEHQVCGVDRQGTKVFESKVRHEGEDIARFVEELLERVGGRAEQVAVAIETPRGSIVEALMDRGVAAFSINPKQLDRFRDRYTVGGAKSDKLDAFVMSDTLRTDFKLYRRIEFGDPVVVQMRELSRVHDALSQDARALGSRLREQLVRYFPQVLALGSVYDEAWLWDLLELAPTPTDAARLPQSKVAAILRQRRVRRVKADIVIQKPREKALVVAPGVVEAASAHVRLLLPLLRLANQQLGDCDHQIAGLLEKLRSAVVSTSAEGEPEAPRKQHRDADILLSLPGLGVLTSATMLSEGATALRDRDYRALRVQAGVAPVSSQTGKQRRPTVTMRRACNLRLRNATYHWARVSMQHDAASREHYKRLRGAGHAHGRALRGVADRLLAMLVAMLRSGSLYDPNRRSALKAA

SEQ ID NO: 83977 - protein, 351 aa, unidentified
MIIIGVDYHPSDQYIAFVDTETGEYGERQLNHSDGEAERFYRELAARGVGVRVGMEATGYSRWFERLLAELGIEVWIGDAAEIKSKRVRKQKTDREDARLLLRLMQEKNFPRIWVPSPENRDLRQLLWHLHRLVQMRTRIMNQLQALAMNEGQRRKKKLWSDQGRAQLEKLALAPWASRRRQDLLELLDRMNPTIEELTAAIEREARKWPEVLRLMTHPGVGPITALAFVLIIGTPKRFPRGKQIGSYVGLIPCEDSSAGHQRLGHITKQGSSLLRFLLGEAALAAARWDADWRRRYVHLAMRRQRNIAKVAMARRLAVRMYWMWRNSWEYSEWVKFGSHAGQLGIRHGVN

SEQ ID NO: 83978 - protein, 337 aa, unidentified
MKVTLIGIDLAKNIFQVCGVNQAGKSIFNRQVRRNRMMELLLQHPNAIIAMEACSGSNYWGRTLQNKGFKVMLIPPQHVKPFVKGNKNDRNDAFAITEAAKRPGLQCVEPRTLEQTDMMQLHRALERLTQQRTALMNQIRGFLSEYGVVVRPGKEALLSALPDIVEDANNGLSMVSRALFNRQRDEWLVLNGAIRQFDNDIKQRAKNDEAAVRLTKIRGVAERIATATIGHIGNGSAYKNGRHFSANLGLVPKEHSSGGKQKLGSITKRGNEYLRRILIQGAWSVIRYADRSDDRLSLWARKIIERRGKHKAVVAVANKLARIMWSMLYHKTEYRTA

SEQ ID NO: 83979 - protein, 425 aa, unidentified
MSEKIVVGIDVSKAFSDICILSPNNDIIKRLKISNDITGMKSLIYVLEKVEDEYKDRAVIIMEATAHYHQILANFFRKHNYEVIVINPIQSGALKNINIRKIKSDKTDAYNIALLYRIKNYNETITHSDTVNSIKKLCRQHKELTDEIVEHINRLIAFLDISFPDFKKVFTDLQGKTPLSLLEKYPTIQEVLSPENKQDIIQLIKENSHKSSSYAEAKYEKLFKAAEKSIEVCIVSLSSAVLIQTTVRVIFSLQEALKAIDDEIKRLSLLDEKFHKEIVLLQSIPGVGEYTACVVLSELGDISNFSKPKELVAFFGLDPGVSQSGTYNRKNNKISKRGSPHVRSILHMLAKSNVYPNRNREYLNPIMRAYFEKKIAEKPYKVVMCAIMRKMVQIIFAILRNQKSFELRKPEEHQKLIREKSKLVA

SEQ ID NO: 83980 - protein, 360 aa, unidentified
MRNDRTFVGLDVHAWSVTGHALDADTGQVWQRKLTPDPAEVLAWVSTLPDPVKVGYEAGPTGYSLYRFLNDHGVTCVVGAPSKQHRPHGDRVKTDTRDAELLARLLKLDEFAEVTVPSVEQEAARDLVRAREDVRGDLMRARHRLSKLLLRQGILYTGGKPWTGVHDVWLRSQRFEQPARQTAYDAAYEAVVLTSDRRSRLDAEIEVMAADSSYTEVVHRLGCLRGISTLTGFGLAVEIGDWHRFTGATIGAFVGLVPTEHSSGRSRAQGSITKTGNGHARRLLVEAAWHHAKPYRAPGKVIRDRWDQAPAAARVRGHEGNRRLHQRWLAFNARKKKPTIANVAVARELAGWAWSLAVME

SEQ ID NO: 83981 - protein, 343 aa, unidentified
MEHYVGLDVSLKQTSICVVNQVGSVVREGVVDSEPEAIAAFVRSKAPGAVRIGLETGPTATWLWTELKQLGLPVICIDARHAKAVLKMQINKSDRNDAGGIARIMQTGWFKEVRVKGPDSHSVRALLASRALLVKIKRDVENQNRGLLKNVGLVIGRAKFNVFAVRAEELIADRPELIAVVGPLLKARQAIEQQTDDLDRKVLKLARYDAQVRRFMTVPGVGSITALCFKATIDDPTRFKRSRSVGAYVGLTTRRHASGEIDWTGRISKCGDAMLRSYLFEAASVLLTRVPKWSALKAWGMRLAKRNGLRKATVAVARKLAVILHRMWISQTEFNWSKKEVAA

SEQ ID NO: 83982 - protein, 365 aa, unidentified
MTIVDAVRPVTGGVDARLDLNVAPGPVTGGVDTHLDLNVAAALDPVGGLLGVAEFPTTAAGHRELLGWLSGFGPVARVGVEGTGSYGAGLARFLRASGVEIVEVDRPNRQARRRSGKSDPLDAVEAARAALSGRASGAAKSRDGNVEAIRALVVAKRSARSAKIQALNQIRHLSFTAPEQLRQRLAGVSRHHLAARAAGLRPATGAGADPVIAATKTALRILGRRVLALDEEKARIDALLTGLVTQTAPQLLAVFGVGVDTAAALLVTAGDNPGRLRSEAAWAHLCGTAPIPASSGKVTRYRLNRGGDRQANCALWGIVITRLGNDPRTRAYMTRRLAEGRSKPEVIRVLKRYVAREVYHRLPRT

SEQ ID NO: 83983 - protein, 355 aa, unidentified
MPSITPDTGFEVTGGVDTHQDTHTAAVIDMIGRVLGTRQFPATAAGYTALLAWMRRFGRLGRIGVEGTGSYGAGLTRRLRDEHLEVIEVDRPNRKTRRSQGKSDPIDAIAAAKTALAGERTGTPKQRDGRVEALRNLRVARRSAIEQRADTQRQIKTLIITAPDQLRARLRALNGKKLITTCANTRPDRTDAADPATAVTIALRSLARRHQQLSQEITDLDDLLKPLVTAINPGLLTAHGVGTDTAGQLLVTAGDNHQRITSETKFAMLCGVAPLPASSGKTTRHRLNRGGDRQANAALYRVVLVRLRWDPRTRDYMQRRTKDGLSKKEIIRCLKRYVARELYQLITQNNLQHTA

SEQ ID NO: 83984 - protein, 357 aa, unidentified
MRIIGCDLHTRQETMAMLDTETGEVVEKTLQHEGEKVREFYSALPRPVQVGIEATGSMLWFLNLMEELGIDSQVGHPAKIRAAEPRKQKHDRRDEDLLLKLLMENRFPSIWMPSKELRDLRTLLCHRHQWVRTRTRVQNALQAMALTNGLRRGKSLWSQEGQHAIASLPLGPHAAHRRTALQALYRELDADIKALDKRVLEQALERPEARRLMTHPGVGPVTALATDVFLGDPVRFEDAKALASYVGMIPSEYSSAGRQRLGGLSKQGNPLLRFLWCEAAIHAVRRDPLLQRFYRRKLVQKGMGKARVAVARKLGIRLYIMLRDQIDYEEFCRRGQMRQKNGAARAGIPEVGYGPSQ

SEQ ID NO: 83985 - protein, 415 aa, unidentified
MSDQRRWYAGVDWGSQSHCVFLTDSDGRKIGEKIFKHGGEGLAEMAAWLMTASGAGEPGQIHVAIEVPHGPVVETLIERGFKVHAINPKQMDRFRDRFTMAGAKDDSRDAEVMASCLRTDPRCFRLLAAADPIIVELREWSRIAEDLGVERNRLANRLREQLWRYFPALLALEDDLGAEWLLELWEAAPTPQKASRVREATVAKLLKRHRIRRLDAASIVEALRKPPVQVAAGTVEAASAHIASLVPRIRLVNRQLKDAHSRIDVLTARLMPAEETKPGQKKQHDAEILASLPGVGRTVLATLLAEAWDALQRRDYAALRSLTGVAPVTKRSGKSCFVIRRQACNDRLANAVYHWARVAVQHDPRSRSKYAELRRRGHSHGRALRSVADRLLNVACAMLKSGAAFNPSSAAQKPA

SEQ ID NO: 83986 - protein, 379 aa, unidentified
MEGFNSFYNTIVELMQKSELEEALVGTEPTGHYWFDLGQFMGEKDIKFVMVNPHHVHKTKESDDSSPSKNDRKDPRVIAELVRDERYFYSYMPIGIYAELRNASNRRFVLAKEQTRAKNRLQKWIAVYFPEYKEIYTHIDAKGGLLVLKQAPTPEEIVRLGVDGIIKIWKDAKLRGNGHKKAMLILNAAMKSIGLKAGLTEARMEIQDLIEDYELQTKRLERVNDLIKELCQQISYADKLLEIKGIGITTVADFIAEVGDITRFDSTKGLQKLAGLELVADSSGKHNGKTKISKRGRKRLRYLLFEAAISVVGKNEGFKEIHRYYTTREKNPLKKMQSLIAVACKLIRVFHAILTKGIRYDASKMLKDIRHPGEQLKAA

SEQ ID NO: 83987 - protein, 312 aa, unidentified
MAQMVITAVIDVSKGWLNVALWPKSAELRVEQTAAGYAELCAWLAGHAVTRVGLEASGGYEIAVVDALEASGFEVVRFNPRRIRLFAQAKGRLAKNDRADARTIAQAAAVLLDQPPPSRRHELDPLVEHLTYRRQVCAWITDCAHQLEHLRDAALRRKIAQRRVALQKELATLEQTLARLVAADDRWHDLDQRLRGVPGVGPVLAQTLIAWLPELGRLSRRAIACLVGVAPFDDDSGRHAGERHIKGGRAAVREVLYMAALSARRYNPMIARFAQRLAAKKPKVIIVACMRKLLVVLNAMVRDGTDWRQRAA

SEQ ID NO: 83988 - protein, 330 aa, unidentified
MSVYVGIDVHRKRSQVAVIDPGGQVLANRNVPNGAEPILKVIGGLPPGTPAAFEACYGTSWLVELLEDYGFDPHLVHPSRCKAIASARLKNDKVDAAILAQLLRADLLPEAWIAPPAIRQLRALLRHRVALVRLRTRLRNRIHAIVADYGHDRSGGGYWTGPGRAWLASLSLPAVSRELVEDDLGLIDALQGRIDRLDWEIRQRARSDPRVKVLTELPGVGPFTALVILAEVGDISRFASARKLASWAAHYGHISKEGSVWLRWVLCEAAQTAKRSPQFTATFQRIAKRRGKKIATTAVARKLLTRAWHLLTEADQAAAPQPAAPPTAAR

SEQ ID NO: 83989 - protein, 479 aa, unidentified
MKKIGFLAADVSKGYADFVLWDQQGNALESAFKLMDNKEGHQQAKRLAKEFISRYELSELYVGMESTGGYENNWFILFKSMQAEGVSRVMRINPKAVKAMGTARMARTITDAVSADNIAQYLLSFADHSNPGYSQDNNFKTVRHVGAWIRNINKQITQTANHLEKLVYQSFPELLVYCRHGFPDWLLNLLQKYPLPSDIIKAGKSRLSKLNFITEEKAAAIIVKAKNSVAGQGWDELLSATIKSMVKLLYCNRQQIELQKRALINQFKEAHEVQLLDSIPGIAAESAILLMMDIESIDNYSRAKQLCAHFGLHPTFKQSGDGTWASRLSKEGRSSVRGLLYMPALTAVRNNEYFKNLYAMQRAKGKKHKQAICVVMHKMLCIAFGILKSKKPFDIETHQNNQEKGEQKQKEALEKQKLNNKEKKVQRERYIGENQLESPISRKQFKRIKKEPLVPIGNNQDKRDPEALNKDKPISYLSS

SEQ ID NO: 83990 - protein, 343 aa, unidentified
MKYFTGIDVSLRSVSICVVDEAGSVQYEAKVPAEVDLIVASLRRVSLDIKQVGLEAGTLTQYLTYGLQKAGFEVICLEARQTAATLAAMRNKTDRNDARGLAQILRSGWYRTVHVKSLESHQVRALLASRKAILTKCVDLENEMRGLLKVFGVRLPGHLPHGSFDPVVRERLSTLPQLARTLLPLLDACTMLYATYLKLDNAVKTIVRHDRLCQRFMTVPGVGPVTALTFKAAVDDPTRFRSSRLVAAHFGLTPRRYQSGETDNPGRISKAGDRDVRQALYTAAHAMVTRSYAWSTLKAWGVRLAKTRGLRRAVTAVARKLAVILHRMWVQATPFRLTQEAAA

SEQ ID NO: 83991 - protein, 355 aa, unidentified
MKYYTSTTEFNCGIDLHARQMYVCVMDRDGKKLVHTNIKNNDFEFFLKLVAPYRHDLTVCAECMFGWYWLADACQAAGLSFVLAHALYLRAIHGGKNKNDRVDSEKITHLLRSNLIPPAYVYPADKRPLRALLRQRLFYVWRRAELLARIASHQLAHNRAPIKQTRRVRDDWEKQLLAAEEHPLRQLTLQNDLALIGHFDTQLTQIEAQLQRQAKALAARDYTLLQTVPGIGQHLGLTILCEIGDITRFPTVKDFLSYSRLVKGTVASAGKIKGLRGAKLGNPYLRWAFGEAAVIAKRDPAVIGPLAQRLEARMGGNKFKANTVLAIKLARAVYYMLKSKTVFDPARLVAALARN

SEQ ID NO: 83992 - protein, 401 aa, unidentified
MEGPIVSIDVSNGNSHYMCFIKNNKRFGKVKKIDHNIEGFKRLLEDIQKLEAETNEKVCAVFEATGVYTKPLERFLSKNSIKTYMINPLESARKRKEEIHNKKTDKLDPISISKVYYDKEKMMELKKKDETYNWLRKKNRLYEDQLNHLRKYKVTFQNQLSICFPGYLDLFKDGYSDIPMTILKKYPHPDLLKNKKAETVARYLEKNTCHNHKVSLEYALKIIEFAKKTYPGCEKDDVEVEIFKILLDKVIETQRECEKTLNEMITVASTLEEYRYILSIDGIGTNLAARIIAEIGDIEEFKSREALVAYAGLDPHIYQSGDQDGKHLKISKKGNKYLRCLLFLAVGCSIRGAKDNPVNQFYQKKKQQSNPLNSKAAKTACTAKLLKIIYGICKNKTTYER

SEQ ID NO: 83993 - protein, 427 aa, unidentified
MPYRIAGIDVHKKMLAIVVADVEVDGDFRFERQTTGTTPLDLHRLADWLVECEVEEVVMESTAQYWRPVWEALEQHWRPRRRTRNGAPRLAGTLHLAQAQSNRGPGGRKKDFPDAERLVKRLVAQELTLSFVPDAEQRLWRTVMRRKYQVTRNRVQLQNRLEALLEEAHIKVSSVVSDLLGVSARRMLQALADGETDSAALATLAAPRLRATPGQLCDAFHASATLHPVYRRLLTLTLEELRMIEDHLGQLDQQMADLLTAHHDAVQRLAEVPGLGVDSAQQIIAEVGATAATFPSSKHLASWMGACPGNEESAGVNYNHRCPKGNRQMRRILNQAANAAVKAKGTIFAVVYRRIVPRLGHAQAIGAISHRLCRLIWKILHERVRYEERGPAVSDEAKRVRARKMIRELRSLGYHVERLPAPSSSPA

SEQ ID NO: 83994 - protein, 395 aa, unidentified
MKDLLEISCGLDVHKDKIVACILSGPIGKTTVSEIREFTTLIPDMAALRDWIVSCNCHHVAMESTGIYWQPIYEILEDAYSGDITLLVVNARHMKNVPGKKTDMRDSEWIATLLRAGLLNGSFIPDKQIREFRYLNRYRKSIIRDITSQKNRVEKFLQSSGFRLSTFISDIFGASGRNIICHLIQHGCIDRESLDSCLKTKTRNHINEILVAVNGTLSQIQQDFLEMLMDHYDSLKSHLAEIETALEEAMAPFSLHIEQLTSIYGINTTASCAIIAEIGTDMSYFKTAEHICSWAGLCPGNNESAGKRKSTSITKGNPYIKSMLCEIAWVIAGKRNTYLSAWYWRIKQKKGAKKAIVALARKLLVIIYTMLKQGTLFDENCFETRRKNCEQKHHW

SEQ ID NO: 83995 - protein, 368 aa, unidentified
MLAFELGEVSWLLGFSAGFGEPVLRRKIASRDTVGLLREIEKTKEKLDLPADASVKSCYEAGRDGFWLHRFLKSQGIENFVTDSASIEVNRRSKRAKTDRLDVNGLVDLLARHLAGSRKPVFSVLTIPSEQAEDLRQLGRELKLVKRDRTRVSNRIKGLLANQGLLIDRSKDMARQLASLRLWNGNKLPHHLRARLERYASDYGYYTARIKELEQERKAVLHANEGEATEKVWRLLWLRGVGIETAWCYGMEFFGWREFQNRKQVGSLAGLTPTPHGSGTQEREKGIGKDGSRWVRGVAIEQAWAWLRFQPESELSQWYQERFGKGSKRLRKIGIVALARKLLIALWRYVETGLLPEGAVIASSVRLP

SEQ ID NO: 83996 - protein, 322 aa, unidentified
MPSCIGVDVSKRKFDAALLTEQGKYRCKVFDNDAKGFQAFVGWIKANAAEQAHVCMEATGGYHEALANFVFDHHIAVFVVNPLRVKRFVESEGLRNKTDRGDAKALARFARKNELEAWIAPSKGVRELQALVVRLESLHTMRQAELNRLDIAHPTVRGSIEAVVAALDREIATVHALIKQTIDDDPDLKQRKDLLETIPGLGDATTTSLLAFIGRPERFKTVKALIAYAGLTPAVRQSGTSLDKRQGLHPVGHRDLRKALFYPAMTAGRFNPIVAAFWQRLKAQNKPGKVIVVACMHKLLAIAYGVLKSRRPFDASLAPKGA

SEQ ID NO: 83997 - protein, 272 aa, unidentified
MIIIGCDLHTRTQQVAMLDTETGEVVERRLEHENGEAKRFYEGLKEQALVGMESPGFTRWFQEMLSELGPERVVGEAAKIRAMEPRKQKHDRRDAQHLLNLLVRGDFPRLWLPSAEERDVRVRIEQEVGRRPEAQRLMTHPGVGPLTALGTVLVLGPVERFPDARHVTSYVGLIPQEESSGGRQRFGPLTKQGNPLLRFLLVEAGQTASRFAPGLKRVYRRLAFRKGRASAKVAVARKLIIPLYIMLRDGIDYAEFVRRGSHAGMLGDVALV

SEQ ID NO: 83998 - protein, 349 aa, unidentified
MAIVGGFDIHRRQITFDYLDTVTGQVRRGRIEPACRAVLAGWLEQRFAGRDDVTFAVEGCTGWLFVVQELQRAGITALLAEPAQTADLRGRKQHAKTDKTDSRHLRSLVADGKVPASWIPAEQACELRALLQLYRDLAEEHTAWSQRIHATLFHQGVPSMAHRLSSAQARAVLASGQDIGLSPAGALAVQVALRQMQALEAELRPVHAQIAAFTRRQAGCKTLQQQLYGVGPMVAAVIWAFLGDARRFSSSAQAVRHTGLDITVYSSDGKRTPGHLSHQGPPILRWALFEAGHQASRASSPDHRYYADVAARIDANRAALSVARKLARRSHHILRALGDQACAPVPAGR

SEQ ID NO: 83999 - protein, 321 aa, unidentified
MTYVGIDVSKATFVVAYSSAKSSKTKTFKNTTKGVHEFIQTLSADDYHCVLEATGNYSSLLVYLLSQAGITVSLENPLKIKNFARVMLSVTKTDETDARLIALYGEKMHPAPYKLRSDAILILKQKRTVIRQLKKQLIATRNLKGSMEALPFFDSKCKKTIEKTIAFLERQVKDLEEELANLAQGEYRKQMGLLTSVKGIGVTLAAALIMATGGFAYFDNAKQLTRYLGLSPTYQQSGTSVNVKGHINRNGDSSLRSLLYVAAMASLRCNAECKECFNRLRSNGKPGKVAVVAVANKLVRQAFAVVTQEKPYVDGFKSEKP

SEQ ID NO: 84000 - protein, 453 aa, unidentified
MKTSSLPCIKPNAAGIDIGSRSHFVAVPSDRDIENVKEFGFFTEDLYKLCQWLKKCSIETVAMEATGSYWIPLYDILISSGFEVYVVNARHIKNVSGRKTDVQDCQWIQQLHSYGLLRASFIPDALTSQLRHLMRYRDNLLRQASRQLQLIQKFLVEMNIQLMNAVSDIAGDTAMKIIRAICAGKRDAKKLAGYRDPRCKNSQEVIEKSLLGNYKPEVLFSLNLALESYDHYQRQICSCNKEIEHKTTEFTNRSNGQEIKKKKREAKRNNLGFDTQTSLLKMVGVNLLEIPGMNSKTALTVVSEIGPEVDKWKNSKHFASWLGLSPNNKVSGGKKLSSKTTSSSNKVKFALRMALLALERSPTSLGAFFRRMKARLGAPKAITAAAHKLAVIIYQMIKTKKPYEENGPLYFEKAYKIRAEHRLKQLAKLLGYEISPVEELKTEDLESAEVCIL

SEQ ID NO: 84001 - protein, 401 aa, unidentified
MDPHLCIGIDVGCKAHRVGIASPDGSILEEFDISHTDAGFQEFFRRVEERRHQLALPVAVAMEGYNGYARPLDRLDQEKGYRLFNVNNLKLARFKEVFPGAAKTDSIDARKILELFRLKDQLPMAKDAIQEVVSVPLVNEKLKRLSRRRRRLVIEKMRVLNRMQADLQAVCPELLAATNDADNLWFLRLLTFREDLRQLARLRCATIRQIPGIGEKFSGIIQDWQRKARFSNEVEYVGPMIIQDARRILELRQQVNTLDEDMETLADQSEIARRLSTIPGFGKTSIAELAGEIGTMQRFAAETSLALYFGMCPLTHQSGQICRVRIPRQVNTRCKAAMMTAVAHHYRCVPQSQAYYDRKRAEGKSHNQAVRALGRHMVRVIWAMLRDQRDYEPREDVHPMT

SEQ ID NO: 84002 - protein, 323 aa, unidentified
MNKDIKYFGLDISYLVFDVTDSDGNYYQFKNNPSGFKKFVKLLGIDSHCVMEATGYYHYQLAYFLLESGINVSVENPLAVKRFIQMKLSKIKTDKSDSKLICDYAGQVELKLWKGNSKHQTECLQMTRLLSVYTKRMTMLKNKLHGEAVLGNPSKAVVSSLKRSLKHLLKEIKNLEDKLLILVKQEHQDLLTRLKTIPGIGKKTAIMLVVLTGGFERFSSASELCSYAGLTPVIRQSGSSVKGRPRISKIGNQKLRNLLFMCSFTACKYNKACRDLYERIVAKGKSKKLALIAVCNKLLKQAFAIAKSGLIFDDTYRSTLVKN

SEQ ID NO: 84003 - protein, 351 aa, unidentified
METQITAQPKLFIGIDIHKRSWKIHCSTDLFSGKSFTMPPVAEKLYDYVQKHYPDYEVSTAYEAGCCGYSAHRSFEGYGWKSLVVNPADIHRKGKEKYTKTDRIDAQLISRELKDGRLESIVVPDREREELRSLFRRRNELVKDLRRIKSKIKMQLLYFGIEVPEEFDNDHWSHAFRCWVDDQLFKYSTGDSTMSSRMRSFRFIDKELRDVSNHLRAYCRKHYKVDYYLLRSVPGIGGIVAVGLLSELGDLRRFGSLKDLAGYVGLAPGLYESGGHSKSLGMNPRCHRLMRSYFVEASWQAIRTDPVMQEYYRKHLGKDSKKIIVKVAHKLLSRTLAVIKTGIPYEIGVVS

SEQ ID NO: 84004 - protein, 452 aa, unidentified
MSRRKRSKESRKTAVLPFLRPNAAGVDIGAREIFVAVPPDRDPEPVRSYATFTEDLHRLADWLKSCGIETVAMESTGVYWIPLFQILEARDFEVCLVNARYYQNVPGRKTDVSDCQWLQYLHSVGLLRASFRPEQQVCALRSLLRHRESLIETASEQVLRMQKSLDQMNLQIHHVISDVTGLTGLSILDAILSGERDPAVLAKLKDPRVKASDETIVKSLVGDYRPEHVFTLRQSLAAYRYFQKLIAECDRAIEKQLGEFEANVDVNARPLPPPKVRRRKLYSNEPNFDLRLHLYRIFGVDLTAVPGINVLTAHSLLAEVGPDLSKFRSASAFASWLGLCPDNDISGGKVLSVRTRKVSSRAALAFRMAANALFKSKSWLGYFFRRMRARLGAPKAITATAHKLARIVYHLLTTRQSYDEGIFAKHEQNSRARTEARLRAQAKELGLRLVPA

SEQ ID NO: 84005 - protein, 394 aa, unidentified
MKLVGIDVGKNSHHFCVMDKETGEFNVTPSSFPNNKEGFDFLINSLKPYSKKSILIGMEDTGHYHVALLKFLLSNGYTVALINPKTTDLTRKMEGGITKNDKLDTITICDVLDTPERKKQYRITKVDRFDLYEQRQLTRHHHNLKEELNVYCNRLQKSIDLVFPEFNTLFSSKYGIVYMNLLKTFGSAEAIASTDIRTIRKCFEIKGRGNRISLTPEKLKECAKNSIGISSEVETIQIKHLVSQITLIKEQIAEIDKKIEEFSITNNSPILSIPGISHFSGTSILAELGDIGNYSKPSQIIKFAGVAPYHYESSQYNAQHTGITKKGSKYLRKTLYQIILPVINNNPVFKKYYLLKISQGKGHRCAQGHCIRKLLRIIYHLLETGQSFDPALLR

SEQ ID NO: 84006 - protein, 409 aa, unidentified
MSLVVIGMDPHKRSATIEVMAGDEAVAGGGRYGTDAAGYAAMRVAVKAWPERIWAIEGCQGIGRHVANRLLADGEQVVDVPPKLSARIRVFATGQGRKTDATDAHSIALAATRMSRLRPVAGDAQLAVLRILADRRRALGEDHTRMVCQLHHLLLELIPGGAKKDLSAAQAKALLATVHPRDAAGKARRRVAAELISDLQRIYQRKKAANKELNALLAATGSTLTSLHGIGPSGAARLLVEVIGITRFPSKAHFASWNGTAPIDASSGDQVRHRLSRAGNRQVNRALHIMAVVQLRHRDSEGRAYYDRKVAAGKTPMEAMRALKRRLSDIVYRQMILDHRAAQTGPGGHVGAATGSSAAGFNPSTGASEKSLPGPANHRPYPGKPIRSSGRSRRLSPAPARSRGQAPFA

SEQ ID NO: 84007 - protein, 325 aa, unidentified
MPQPNDLSRSLVALDQNSTIIAVVELSHSSWLVGGVVPGIERQPRKKLEPSPERLLALLHRWRDEAVRAGSTITRIALAFEAGRDGFWLARWLAARGVEAHVIHASGLEVSREHRRAKTDRLDTELLKRGFLGWLRGERGHCSMARVPTIAEEDAKRPNRERDCLVRERTRIVNRIKSTLARLGIRSFKPTLRKAAERLATVHTPEGMPLPPNTLTELQRDTARLGLVVSQIRQIEEARRKRLEEAPETGPHAMVRLLARIVGVGVETADVLVHEVLSRPMRDRRAVARYAGLTGSPDESGARRREQGLARAGNARVRRGMIQLA

SEQ ID NO: 84008 - protein, 377 aa, unidentified
MSSSAPTIIYLGLDVHKDSVTIAVLPAGAAAPTRIDKYPNDFTKLRRAFERHAKDGELRACYEASGAGYVLQRAMHGWGYHCDVIAPSLIPTKPGVQRKHDKYDAGQLARLYRAGELTVIRIPSEAEERVRDLVRCRETLQREVVKSRHYILKFLARRGFIYRGGVNWRPAHYTWLRQLIGVTSPLASEDRIVFGEYFTLLEYKLSRREALDQHIEEIALRPAYAPAVAALQCFRGLQVHGAMVLATELVDWRRFASPRQLMAYLGFVPRENSSGPRERRGSITKAGNAHCRHVLVQAAWAYRLHPKIGPALTVRQRGQSPSVILHAWKAQQRLYTMYHRISLRRGPQIAVVAVARELVGYLWAVMRDVDPSTAAAV

SEQ ID NO: 84009 - protein, 357 aa, unidentified
MKPNLDRLTVGVDLGDQWSNYCILDLEGETLAEGKLRTTQQDFAELFQCLSSARVVIEVGTHSPWVEEVIGHCGHEVVVANPRLMEGSKRRKRKNDRIDANKLARLGRVDPQSLHPMEHRSREVRQDLVLLRARDALVAARTELINTTRGTVKSIGRRLPKCSSRSFASQAEKELPVEIREALLPLVQLADKLSDCIKEYDRRIEEMASEKYGHTKLLRQVRGVGPITSLAYVLTLENPERFTQSRDVGPYLGLVPKQEDSGESQPQLGISKAGDRMVRRLLVGSAQYILGPFGPDTDLRRYGLRLCERGGKNAKKRAAVAVARKLAVLLHRLWVTGEVYEPLRNSLSLPSVATTAA

SEQ ID NO: 84010 - protein, 333 aa, unidentified
MTSMRANGDRIKRFRILKATLRTRRDRLLVGIDVAKVEDVAQIRLAHTRILEKTVMIPNTTAGFTAFWQRVHRHQRATGVTEIVVALEPTGTDHQALAQFLDAQGADVVLVDNHVAALHRRLLDRTWDKSDPKDAHNLCDLLEQGRVLFCALPDEPVATLRRLVRLLRRARVELGACKARWQNTLRPALGPAGEPLSATVITALPAPLRAFLPAAERNAARGRPRALPPGLAVEVTDLATCCTAVRGRIATLEAALVVATAPLPATAWLRSIPGLGPTLTAIVLADLGDIAWFTKFSQLRKLAGLDIIRVQSGQWAGTARISRCGRPLLRWAL

SEQ ID NO: 84011 - protein, 409 aa, unidentified
MYDKTKFIYVGLDLHKEQHTAVIMDCFNEKLGEVTFQNKPSEFSKLLVKAKRFCTDGKGIVFALENSYGYGRALAAWLIERNYIVKDVNPALSYAYRKSVPQYKKNDSYDAQCVARVAINELNKLPDAMPEDMYWTLSQLVNRRANLKTHHIRLKNQLHEQVCVAYPSYKQFFQDIGRPTALYFWEHYPSPRLLSGKSVEELAEELIPVSHNQFSTRKCQIILDAVKADGDTTRDYQPERDEITRGLVKDVRHYVTQIEEVDRAIADFLPRFECTLNTIPGVSDTTVAKLLSEIGDIRRFPNADKLANFAGIAPVNFSSAGKGDDKPSKQGNRRLQGTIYFLAIQMIQLSSKGLPRNPAFYAYYQRQLARGKTKPQALILISRRLISIIYGMLKNKTEYVMPKVQDNWD

SEQ ID NO: 84012 - protein, 491 aa, unidentified
MTVPLEILERVAAAGVAKAPGMVCTRVPHPSRPGRRLTRVWEAGATAGAVVELAEQLAGEGTEMVTLEATSDYWRIWFYLLESAGLRVQLVHARDVKNVPGRSKSGKPDSVWLAKLTERGMLRPGFVPPSEIRELRDYTRLRTDLTRHRARYWSRLEKLLEDSLIKVSSVAGSLDTRPVRDMLEALIAGERDPAVLAGLARGKMKARRAALIEALTGRLDDHHAELARMLLDQIDALTAQVERLTSRIEELIAAIPAARGVDAGGATGPGAGEAPDAVVRSAAARLDEVPGISRHTARVILAEVGPDMSRFPAAGHLVSWARLSPRTIQSGPESSSGRTGKGNPYLKGALGEAAAAAARTSTFLGERYRRVVRRRGRLRALVAVARSILVIVWHLLAGPAAASASSAPAITPAGPTPTARPAVMSASSRRSASPSPWPRPPPEKGPTTQTVPAITGRGPLPPAWPRWVIFRSEVRGSNTRISTGQTCNSKT

SEQ ID NO: 84013 - protein, 480 aa, unidentified
MNIKAKKAKVQPLSKKSVINVLSQDEIKKKVQVIEQELKASTWRELETKGKFEKNDKLSFISEEMLIVGCDIGSETHYIRAIDTRGKELSKGAFEFSNSSEGFASAKAWVLKLAAKNDKKQIVLGLEPTGHYWFAIAAWMVSNGISVVQVNPYAVKQSKEIEDNSQLKDDRKDPKIIANLVKDGNYGMPYLPEDIYADMRRLSMFRDQLTEDRIRNINRLHREMKIYFPEYMDAFGKIDGAFKLEILKVAPIPSDIVELDEEGLKSLWHEAKLRGRGYSRARVIVDYAKKSVGLTGGTDAGRESIKWFVEQIIQLDEQLAEIENVLHQKCMEIPHAENILEINGVGENILAGILAEMGDISRFDDVKEIQKLSGMGLVACSSGKHKGQTKISHRGRKRLRYWLFQAAKSAVAHAVEFKQLHAYYTTRSMNPLKKLQSLVVIACKILRVIYTILNTGMKYDPERMLRDIRYPQGNTVQAAA

SEQ ID NO: 84014 - protein, 468 aa, unidentified
MEEHLVKGKASKTNRRRHSPSLLERVNPNAAGIDCGLAEHYVAVPRDRDPEAVRSFKTFTADLHRLADWLVGCGIKTVAMEATGVYWIPIYEILEARGLEVLLVNARHVKNVPGRKSDVSDCEWLQELHSVGLLRGSFRPAGEIVALRSYLRHRETLVQSAATLINRMQKALVQMNLQLQVVISDIAGATGLRIIRDIVGGQTNPQQLAKHRDPRCGASEMEIAAALTGHYRPEQLFVLKQNLELYDALQRQIEVCDTQVEAHLADLARKAVPPPTPLPPTRSRRKPRANEPHFDVRTPLHRLTHADLSQIDGIGSHNALRLVSEIGTDMSLWPSERHFTSWLTLAPNNRVSGGRLLSSKTQPSANRAAAIFRMAAMSVGRTQTALGAFYRRLAYRIGKAKAITATARKIAILVYRCLKGELVYQDPGAVAYDLRHRQSVIRGLRKRAAALGFSLINGQTGEILEGVS

SEQ ID NO: 84015 - protein, 313 aa, unidentified
MYHMKEELVYVGVDIAKRYLDGAMGNEKRRFSNDALGHRELIKWVKQLSAPPVQVICESSGGYERALVQALARARVKISLVQANRVRQFARAAGILAKTDRIDAKLLCSFGEAMQPGTISASQLEQEHLREVESQRRHLTHLLVMEQNRAAHLSAASVQRLNCRLINQIKKQIEQLDLLVQEQIKASPELSMKAQKLTAISGVGMRTAALLLAQMPELGQLNRHEAAALVGVAPFNRDSGRMRGKRAIYGGRRSVRHGLYMAALVAARHNPILRGFYLRLRAGGKPAKVALTATMRKLLIVLNSALKPDLNHA

SEQ ID NO: 84016 - protein, 402 aa, unidentified
MNCVGIDVSKGKSMIAVMRPFGEVVVSPFEVLHTDSELSKLAGLLKSLDGETRVVMESTGNYHAPVAWLLHDAGLYVSVINAMLVHDYGNNSLRRAKTDKKDAVKLANYGLDHWLTLPRYVPDEDTRLMLKTCYRQYQQYSKVQTMLKNNLISLLDIAFPDANRLFTSPPRADGSEKWVDFVAAFWHCECVCGLSEKAFTAKYHKWCRKHGYNFSEDKALDIYASACGHFGVMPKTDTAKLLVEQAIFQLRATSATLAALKQEMQSLAASLPEYPVVMGMFGVGPVLGPQLMAEIGDVRRFHSKKALVAFAGIDAPPYQSGQMAIRSRSISKRESASLRRTLFLVMSVILQRAPMNEPVYQFMNKKRSEGKPYRVYMMASANKFLRIYYASVKAYLASLDHD

SEQ ID NO: 84017 - protein, 370 aa, unidentified
MKKDNKNSKSPTRSTTNKIRKTDRVTIGMDLGDKTSRYCVLNAAGEAMQEGGCATTKKGIAQLFGATAHCRIAIEVGTHSPWVSRELKKYGHEVIVANARQVKLISQSSRKNDRLDAQILARLARMDPALLRPIRHRSEEAQKDLMTIRIRAALVEARTGLVNAARGLTKAMGERLPSCDADQMDVEKLEALSADLRETLKPLLAEVESLTEKIKECDRKIEQIARDRYPETKLLRQVSGVGPLIALTFILTIEDKERFQKSRDVGCYVGLRPKQSESGARQPELRITKEGDVYLRKLLVQGAHCIMAKRAPDTDVKRWGTKLAGRGGKNARKRAIVAAARKLAILLHHLWVTGEVYEPLRNSKAMAKAA

SEQ ID NO: 84018 - protein, 367 aa, unidentified
MKKGSTIAAKRSTKISQQKLTVGLDLGDRSSWYCVLEEAGSIVLEQKLSTTPKTMREVFGGMPRSRIALETGMHSPWVSRLLTELGHEVIVAHARHVRLIGESRKKDDRRDAQTLARLARIDPQLLCPVRHRSAKAQADLTVIRARASLVRARTALVNTARGLAKSYGERLRGCNVRNMNPEKAEGLSPELQTALGLLLACIASVSEQIREYNERIETLAQQSYPQVALLKQVKGVGTLIALTFLLTLEDPHRFRKSREVGCYLGLQPGRRNSGQSEPQMHISKEGDPYLRTLLVQGAHHILGPFGMDSDLRRWGLKLAERGGKSGKKRAIIATARKLAVLLHRLWVSGEAYEPLHNSSRVPLPMAA

SEQ ID NO: 84019 - protein, 339 aa, unidentified
MDAPSLIAIDLAKTMFHLHGVTATGAVLFRRKLRRRQVLGFVSSQPTCRIVMEACATSHWWARQFEDMGHSVQLIAPAYVKPFVKRQKNDMADAEAIAEAAMRPTMRFVEVKTARQQERTMIFRTRDLLVRQRTQTINALRAHLAEHGIVAPSGTANLRRLAEVLGDNAADMPETLRELGHMYLTQIDEQTLRIRELEKRLREAAAGNEQLARLQTMPGVGPITAIAIESFAPDLKVFQRGRDFSAWLGLVPRQHSTGGKQRLGRISKMGQRDIRRLLISGAMSVVQWAARRRDEEGSWLGRMLARKPKLLVAIALANRMARAIWAMVSKQENFRPALA

SEQ ID NO: 84020 - protein, 452 aa, unidentified
MAKVAKKSKSCKRTELKIVNPNAAGIDISTREMQVCVPGDRSEEPNRVFGTFTKDLRAIAAWLKECRIDTVAMESTGIYWLPLFGVLKDAGFEVLLVDPCQAKNYSGRKTDESDAEWLMLLHSYGLLRSCHQPENMVRKLRNLTRHRDNLIKSASREVLHMQKEMEQMNLKLNNVFSDILGKSGQAIIESILAGERNAEKLASLADKSCKASHEDIVASLQATWDDDHLFIMKQSHELYIYYREMTKKCEKEIETLMQKFTAEVDDDKLKKLRSRKQKAYRGDVSFDIERYAIGMWGVNVMRIPGINRNAVLRLASELGGDFVAKFETVDRFLSWANLVPNNKISGGKILSSKVPKRKNPVGIIFRQCANALWKASNTMGDYFRHTKARSGHLQAMVATGKKLATIFFTIIQRQQEYDEEVYTKNRKAQLERKIEYTKRKLARLELQVDACI

SEQ ID NO: 84021 - protein, 345 aa, unidentified
MTIVETRPRVVGGVDTHLDVHVAAALDSLGGLLGTESFPTTPAGEVALFTWLSSFGRPEVVGVEGTGAYGAGLLRFLAAAGVEVREVIRPNRQARRRDGKSDVLDAVEAARAVLAGRTGVPKRRDGQVEAIRALLVARRSAAQARQKALVQMRHLTYTAPEHLRNALKGLTVAALVERAASLRPRVGEDVVSAATRSALVALARRARALERELAATDALLGPLVAETAPGLVALVGVGTVTGAMLLVAAGDNPERLHSEAAFAHLCGVAPLEASSGRSGRHRLDRGGDRQANSALWRIVIVRTTCDPRTRAYLERRVKEGQSKREAIRSLKRYVAREVYKQLPRD

SEQ ID NO: 84022 - protein, 462 aa, unidentified
MALTLGIDVAVRAAHQATLVRDGTTVWRGCKFSTRPTDLERLWSALDLADPGDLTVVVEPTRNAWIVLAEWFRRRGTQVVMVPTTQSADLRKYYSKHTKNDRIDSELLAGLPLLHPEGLREYSGQGPADPLRRLVKQRSTMVKRRVAVYARLDALVELLGPAWYAVLGSNYGIAALEFLARYADPNVVVRLGQGRLSRFLSARSRGAWREDHAAGLIVAAKETLALWGSEGMNFAELAEDIAHEAEQALYLTRQIKQIDERVANLYADADPDGIVASAPGVGPVISAVIAGRIGDPHRFTSLAAIRAYTGLIPKISQSGLSKIESSITKAGDPLLREMLCTAADQARKVDPQIAAKYQRLMTGDRHHDSAICHLATMLVTRIATCMRAGQPYQLRDVDGTAITESEGRAIVKQRYQLDPRQRDHVRHKLMRERRKRPARSHRSRQALQHPIPLNASLRRAPN

SEQ ID NO: 84023 - protein, 363 aa, unidentified
MNGGEQRMAVYVGIDVHKKYCQAAVMNDNGNVVRELRFDNTSEGATSLVNLARSVDPHVKAVVEPSANFWIRIYDRLEDEGVEVKLSNPLRTKAIAEARIKTDRIDAKTLATLLRGDLVAESYLPTRKNRERRALIRHRASLIQMRVDIKNRIHALLDKHEHTNNYSDLFGKQALEWLRNLQLPTPDHEILQSNLQIIETLNQQIRIMDIQIAKDAVTEDQAKLLMTMPGVDYYAAMVLLSEIGDVKRFSSDEKLVSWIGLAPQVHQSGETSWTGHITRKGSKRARWILGQCAQSARQHDPRMREFYERIEHKHGPSKAIVAVARKMLAIMYVMLIRNEPYHGENRKLTEQKHKRLNNIANTA

SEQ ID NO: 84024 - protein, 323 aa, unidentified
MSSSSKARTSCFVGIDISGERLDLHVLPTEQHQSFNYDNSGVSKLVGFLQPLQPSLIVVEATGKLEIGLVAALVAAQLPVVVANPRQTRDFARGLGRLAKTDRIDAFVLARFAESVHPEPRVLPSEQQQAMQELVTRQRQLVEMRVAESNRLTRTRTTRVRRNLQIHLDWLDQQIRDLDQQIRELITQSPLWREKDQLLQSVPGVGPKMSSMLVAHLPELGRLNRHQIASLVGLAPFNRDSGKWKGKRFIGGGRSHVRCTLYMSSLVASRYNPAIQALRQRLQSRGKPFKVVLTACMRKLLTILNAMVKNGTPWDRALCRTFA

SEQ ID NO: 84025 - protein, 425 aa, unidentified
MNLLILKGVPMALKIVYKICCGIDVHKTFVVACIASTNDKGVTSYESHRFSTYTSGLKTLLQWLLKRNCKDVCMESTGKYWIPVYNILENDCSIVLAHPKYVKAIRGKKTDKKDAKWIADLFKHDLVAGSFMPPADIRQLRDLMRYRFKLTCFQSSEKNRLQNCLTVSNIQLGNVVSDTFGKSAQAILDKLLENPADTSFDLEPLVYKSLKKKLPELRDAIDGYITPEQAGKLKVIKAHYESLESRKAELEELILALAAPYQQELAILQTAPGIRSDFTAIGIISEIGTNMEAFPSAKHLCSWAGLTPTNNESAGKKKSVRVSKAGCYIKPLLVQCANAVVTSKKHPEIRNRYLRLKKRRGHKKAIIAIARMLLTALYHMLKNGETYNAELYRQSDLPPVDREITVEQAIIIARNQGYKIKSATA

SEQ ID NO: 84026 - protein, 352 aa, unidentified
MASGFTLGLDLGDRSHHVCVLNATGQIVREGALTNTRPALAQLMSDFPRATVAMEAGTHSPWISRYLTGLGAHVLVANPRKLHAISRNERKCDQRDAQMLARLARVDPALLHPIQHGTAQAQHDLLGLKLRDALVRTRVNLINAIRLTLKSLGHSVRNPSSESFHKTVLADIPPDCLPVIQPLLTVLLHVTEQIKEMERDLVQRGKKEYPVTQRLQQITGVGPLTALCFVLKIGDPQRFGRSRDVGAYLGLCPRRDQSGGTDKQLRISKCGDGLMRRLLVSAAHYVLGPFGPACALREHGQRLTGTGSAREKKRAVIAVARKLAVLLLALWKHGTDYEPRATAAPVLVLTPA

SEQ ID NO: 84027 - protein, 292 aa, unidentified
MDTETGELDERRLVHREEAEQFYGKLREQSVKVRVGMEASGHGRWFERLLRDWQFELWVGHAAEIRTKRVRKQKTDRQDAQMLLRLMMEDRFPRIWVPDAGNRDLRQLLWHRHRLVQMRTRVMNQLHVVALNEGLRRKKALWRPAGRKELESIVLAPWASRRRQDLLDLLDQLTPKIQELTRALEEEVEKRPVTRRLMTHPGVGPLTALAFELVIGTPQRFHCGKQIASYVGLVPEEKSSGDRRRLGHISKQGNVLPRFLLWKLRRSRCAVRPSGVVDSSTSRCGGDGRSPR

SEQ ID NO: 84028 - protein, 351 aa, unidentified
MKYIGLDCHKQYDHATMIDTETGEIKAKRLAHIKEDFSDFIGDRAGTRMVIESCRDWSRTYELSEDLVEEVILAHPLKVKAIASAKIKTDAIDSRTLAQLLMADLIPQAHLRKAENRIKQRVIRHRAFMVVMRTRVKSRIHDSVDSQLLPPDVLKAKPINLFSKKGMKWLTSLVWARDEDKKLVESHLRVMEAINQEISITNDMVKEIYEKDRDAQLLTTIPGIGVTLATLISTEIDGIERFRSPSKLCSYAGLVPSTHSSGGKTYHGKITSEGNRWLRWALVEAALPASYGDAEIKERLETLRAKKRANVAKTAMARWLLKVVYHVLKGKRPYITAYNNQKKARAAFYFA

SEQ ID NO: 84029 - protein, 343 aa, unidentified
MKLHVLGIDLGKTIFHLVGLDSTGRVVIRKRCSRTQLLAFTANLQVQLIGMEACSGAHFLGRALREQGHEVRLMPAQYVKPYVQTNKSDYLDAEAIAEAVQRPRMRFVPIKTEEQLDLQALHRVRERWVMRRTAVVNQIRSLLLERGLTLPKGRNHLDEQLPGILEDAELNLSGSFRVLLAQLKLELEQLAARIEEMDRVIQKTAKQNEACQRLTEIPGVGPVTATALIAAVGNGSAFQKGRNLAAWMGIVPREYSTGGKQKLLGISKRGNKYLRRLFIQGARSVLQQRHKQVPGLSSWLAQLLGRTHQNVVVVALANKLVRMAWAVLCKNERYRPPAFAVTT

SEQ ID NO: 84030 - protein, 376 aa, unidentified
MLIGIDVAKAELVVAARPSGERWTVANDERGIETLINRLKGERPELIVLEATGGYELLCVAALVAAALPVVVANPRQVRDFAKATGQLAKTDRIDADILALFADRVRPTVRVLPDADAQELEALLARRRQLLDMLGAEKNRLGQVFGRGRRPVKKSLKAHIVFLERELRIADTDLGALVRESPAWRERDELLQSVPGVGRVVSLTLLADLPELGRLSRRQIAKLVGVAPLSRDSGTFRGRRFVQGGRASVRAVLYMGALVATKRNTVIRAFYQRLLMAGKPKKLALVACMRKLLTILNTMVRTQQRWCADRAAEVPVPASLSRQLLPLQLSSGLHRLATTTTLPRAQRETRTRPKLTRQLQPGIKLRKGIHTSDYN

SEQ ID NO: 84031 - protein, 385 aa, unidentified
MGRSRAPYLWRRAVKEYSELFVGLDVSKLKISVAVAEGGRSGEVRFYGDISSSPAAVEALIRKLAKAEVKLHVCYEAGPTGYELYRQILALGHECAVVAPSLIPRRPGDRVKTNRRDAISLAKLHRAGELTAVWAPERGHEAIRNLVRAREAAVDARKRARQQLQSFLLSHGRLYSGPKPWTKAHRSWLCAQKFDHPAHHIVMAEYRQAIEEAEVRLDRLTGLVAEVVASWSMAPVVRAYQTMRGIDLITAATFVVEIGDVRRFDSPRQLMAYLGLVPSEASTGERVRRGGITKAGNSRARRALVEAAWSYRFPARMSRLVEGRQAGAPKAVRDIAWKAQVRLCSRYRKFVEAGKLKTVATTAIAREMAAFLWAIGHEVAPALDV

SEQ ID NO: 84032 - protein, 338 aa, unidentified
MAIVMGLDQHRAQIAAEWIDTDSGEIGRARISPALRGDVRRFFKRFAGQRLEVALEATTGWRFVAEELRAVGAEVHLAEPAETAARRGNKKRAKTDRADARHLRELLMIGRLPESWIPPDHLLDLRAQVRLRHMLIDQRGEWQQRIQAVLYHHGFPQRNGLLTTENRAWLEALELPPSAHELITVVLEMIDALDAQSAPITRALRLYARRQTGCKALMKHYGIGELTAIAILAELGDARRFSSSRHAVRYAGLDITVHHSDQRRAPGHLSRQGPPALRWALFEAAQAARRPGSPDRGYYEQAAERLGGNRACLALARKLLKKSFHTLRELGDDALLPV

SEQ ID NO: 84033 - protein, 386 aa, unidentified
MAKIDDLSRSLTALNQEETLICVVELSRSSWLIAGMVPGVERQPLKKLEPDAAGLMGVIERWRGEAIKADRAINRIVLAYEAGRDGFWLGRWLRTRGVEVHVIHSTSVAVSREHRRAKTDRLDTAMLMRVFVGWLRGERGHCSMVAVPTIDEEDAKRPGRERASLVGERTRIINRMKATLARLGLRGFKPELRSAPARLEFLRTPEDIVLPPNTLAEIRRDMSRLTIIREQIKAIEQARLERIEHAPDEPAHAMVRLLSRVIGVGIESADMLVREVLLRSFRDRRAVARYAGLTGAPDESGAKRREKGLAKSGNSRVRRGLIQLAWRFLFFQRDSGLARWYFERTSAKGARKTTMIVALARKLLIALWRLATTGLVPEGILLRSTV

SEQ ID NO: 84034 - protein, 341 aa, unidentified
MAEVSTIGLDLAKHVFQAHGAGASGAVLFRKRLRREQVLSFFARQPRCRVAMEACASGHYWARAISALGHEVRLIPPAYVKPFVKRQKNDMADAEAICEAAQRPTMRFVAVKSEAKQAATVIFRARDLLVGQRTQIINALRGHLAEYGLIAPQGPSHIARLIAQIEDPASGIPEVARSCLGRLVEMLRRLQDEITALDREITVRAKSDDVARRLMTIPGIGPLIATAIEALAPPSETFRSGRDFAAWIGLTPVQRSTGGKERLGRTSRMGERTLRRLLIFAASAVVRWAKRKGVPPGSWLARMLARKPPMLVIVALANKNARVAWALITKGGIYRAPAAAA

SEQ ID NO: 84035 - protein, 335 aa, unidentified
MSPHHARKGPEWKENMGRQSNYAGIDVSQATLDMAEHATGQQWSFGNDDAGIAETVAVLANLKPALVVLEATGGIEVPVVTELVAANLPVVVVNPRQVRDFAKATGRLAKTDALDAQVIAHFAAAVRPELRPLPDTQAQEFSAIMARRRQLQDMLTMEKNRLRAARRLVRGRIKAHIGWLENELTHTNADLERSIRESPVWREKDDLLRSVPGIGPVTSCTLIAGLPELGMLGRKQIATLVGVAPLNRDSGTLRGKRTIWGGRAQVRAVLYMAALASTRHNPVIKSLYRRLCAAGKVKKVALVACMHKLLLILNSMVKHNIRWHYTTAELIGPCS

SEQ ID NO: 84036 - protein, 384 aa, unidentified
MTKNSIVFVGLDTHKEFIEVASLEDGFQGKATQHGRISTTKVSIKKLIRQFESKFPHATLHFVYEAGPCGYWIYRLITSLGHPCYVVAPSLIPKKPSDKVKTDKRDALKLAYAVKNCDVSPIYVPEPEDEAVRDLSRIREIAMRDLNDARRQLKALLLRNNINYPGTANWSAKHLRWLAELVLPHPAQHIVLQESLNTINERVARLERLDNQLAHHIMQWRYFPVVKAVQAMRGVALLVAAGMVAELGDLTRFEHPRQLMSFLGLVPSEHSSGGKRKLGSITKTGNIRARRLLIEGAQSYRHPANVSKEHQLRQEGLPKIVIDTAWKAQLRLCQRYQRLMQQGKHHNVIKVAIAREMAAYMWAIAKQIVLPAVDIRKRLARVPA

SEQ ID NO: 84037 - protein, 338 aa, unidentified
MKVKRQNVGIDVSKDSLASCLVFLTEDFDIKIKSSKKFQNNADGFSELFSWANSKKDSNLEITFTMEPTGVYYEGVAYYLFEKKQAVHVVLPNRAKKYADSLQDKAKTDKLDAKALGRLGVERRLNKWYVDSPVYRNLKILTRERNALIKERTVFQNQLHALNHSAYPFKKSVTRLKQMIRFINKQIKTIEKDCENIVNKDETVKAKVDKVTTIPGIGFITAIVVIAETNGFALITSIKQLVSYAGLDIRIRESGKWKGKSKITKKGNVQIRKALYFPSYTSVKYSETNAKFYERLFERKGKSMVAATAVQRKLLGLIYTLWKNDTTYVENYQQNKAA

SEQ ID NO: 84038 - protein, 351 aa, unidentified
MKCDKYIGCDLHQATTVVAVLDGEGKVVLETIIATEAAAVIRFLKGLSGPLHITFEETTQARWMYDVVRGYVSEAIVCDPRRNKLLGEGSKADKPDARKLAELLRAGLLRPVYHGHEATRQLKELVRGYETLSVDTQRMMVRIKSIYRAHGIRTFGSAVYQQKQREQWLQLLSEPGTRQRVSWLYEELDHLRPLRKQAKMAMVAEGRKHQAFRLLRTIPQLGPIRCAMLVATVDTPYRFRTKRQLWAYSGLAIVTYMSSEYEIKAGRVVRNRKPVATRGLNRNCNRRLKDLFIAVAGSRSEPYRSYLEGLQQKGIRAEMARLTLARKIAAVALRVWKKGETFDPKKLNSTT

SEQ ID NO: 84039 - protein, 397 aa, unidentified
MIAVGIDISKAKSTVAVIDSDGTVLASPFTMAHTQPEMEAFVTYLKGLGEPTTILMEYTGHYHYPVLKKLQDEGFPVCIVNPYQMKKYGDVEIHKAKTDKKDALRIAAYALEKSYKLVPYSSMEQKYEDLKFLSRQYNQRISYVAKLKVQLIALLDQTMPGITRILPLNSRNPEKCALLLFVKRFKSFDEIHRIGKARFLASYDVLAKKASERSASSKGLSIYELAVDSITTRGEDPYIWLSQNQCVDLLSTTQNAADEIISQMRNIAETIPEYKVLRAMHGVGDRLGPIILAEIGDVHRFHSGKALNSYAGNDAPPYQSGQFESRNRHISKRGSSTLRKACYEVMQALKLTKPQDDPVYLFMLKKEQEGKPFNVAKMAGVNKFLRIYYARAMELYK

SEQ ID NO: 84040 - protein, 325 aa, unidentified
MIDGVLGIDVSKNTVDVSMSGGCNKVRARSFANSADGWRHLLAWLITQKIRRVHACMESTGRYSLGIACALYEAGHVVSIVNPAQIRDFARTKLGRNKTDGVDASHIREYCELFKPQPWAPASEAHRRLGELQTIRAGIIAGLTEWKNRKNSGIIDAVAQSLADVTISHFTSQLGAVDEAITQTIDNDPVLRRKRDLLLSISGVGETLAGVVLAELPGPDVLHSSAEVVAYVGLNPRQHRSGTSIDRVTRISKIGNAVLRAALYMPAMSAMRYNPAIVALVARLKSQGRLKPKQIVVAAMRKLLVLCFGVLKTGKPFDPAIAMGC

SEQ ID NO: 84041 - protein, 411 aa, unidentified
MKNNIKTTKMQLAKKHAVKPQINDAQTKKVSIEREQVSERLKHSLRNRGRRARAVKQVSCYVGMDLGDKNSNYCFIDAKGNIFAEGTLATAQAELNELFSSIPKCRIAIEVGTHSPWICALLKSHGHEVIVANPRKVEAIHKNKRKKDKIDARTLARLVRVDPELLYPIQHRGDQARQDLVLLRAREGLISARTKLINCVRGQVKSLGGRLPNCSAESFHYTVVEKIPDSVKESLLPLVHQIGEMSQTIRTFDAQVIRMSEQKYPETERLRQVRGVGPITSLTYVLTLEKPERFEKSRDVGCYLGLVPRQDESGEISKQLRITKTGDSMLRQLLVSCGQYILGPFGEDCDLQRFGLKLAERGGKNAKKRAVVAVARKLAVLLHRLWLSGEKYEPLYNSQLQTKTLAIAANG

SEQ ID NO: 84042 - protein, 352 aa, unidentified
MRRYYGCDAHKAYSIFTWVDDQGGSGPFFRVKNDRNEFKEYIGTLPPASPIALETVGNWYWMADEIEKAGHIPILANAARARAMMGQVNKTDKLDAKGLATLLRNGTLPSVWIPSGKLRDECELTRMRMALIRTRTMIKNRIHATLSKYAIKIDEVSDIFGPKGRKIIEDRSRELPPYTQKCLCKELELLNEVEDKISQIEVQIKAVMIETEEIKLLRTIPGIGLILAVVISTEIGDINRFSGPEKLASYSGTVPRVKASGGKVFYGPIRPDVNRYLKWAFIEAANTVVIFHKKWSNRHVAKLYGRLRAKKGHSKSVVAVARHLAEATYWVLKKREPYKEKDVKNPVSSTRK

SEQ ID NO: 84043 - protein, 340 aa, unidentified
MNIKRIGLDLAKNIFQIHAVDHHEHVVLRKTLRRDRMIAFFTQLTPCLIGIEACGSSHYWARELTRLGHTVRIIPPQRVKPYLKGQKNDANDADAICEAISRPGMRFVAVKTERQQTLQAEHRVRARLIRARTALSNEIRGLLAEFGLILPTGIRQLRKALPEILSQQEQWDDRFMRLLCELSEELKILDERIARHDGRLQQAARDDIRIKRLLAIEGMGPVVASALVAAVGDGRQFKNGREMAAYLGLVPRQHSSGGKERLGHISKRGDSYLRTLLIHGARAVLNACKNKTDRRSQWLQALSERRNRNIATVALANKNARIAWAILSREEDYHGLQAAG

SEQ ID NO: 84044 - protein, 343 aa, unidentified
MQTITTIGFDIAKSVFQVHGVDAGGQVLIRRQLKRRQVLAFFEKLPPCLIGIEACASAHHWSRELQALGHTVRLMPPAYVKPYVKRQKNDMADAEAICEAVARANMRFVPTKTPEQQSCLMLHRTRHLFIRQQTALINSIRAHLAEFGIVAPVGRKGVTELLRGVADPNDKRVSEVARVCLAALGSQLLALKQQILEFDRMILAWHRSNQTSKRLHYIPGVGPMLATALVASVADPSTFRSARNFSAWIGLVPKQYSSGGKERLGSISKQGDRYLRSLFVAGALAVIRYAKIHGTGHRPWLTALLARKPTKVAAVALANKIARMAWVMMARGERYKEPIALAR

SEQ ID NO: 84045 - protein, 442 aa, unidentified
MKFKGYLPYNELEKDKDRRILRKEVAMYRKTQIRDLVNTKVLPVGVDASKFFHIGVAKLPSGGFTKRSRFYNDGHGFMSFLEQINRWKNETGCEHVVVGIESTGHYWEALAYWLERRGIKVVLVNPLHTNRAKELIDNSPNKTDDKDAMVIADLVAQGKWLTCILPKGDYATLRELVVARSRLIVEQTAHINLLHSLIDRCFPEFQRVFKDIGGKTSLSLLNIAPCAQDVIALGPEGLLRALASISGIWRSRIQALFEVAKGSIALEEGLDGYRLAIRQTIRTLTLISEQVMEVEARIEETLKKIDEARYPLSIKGIGHIIVAGVLGETGGLGLYNRAEDVVKLAGLNLYEISSGEHKGKRRITKRGRPLLRHILYLAAIQQSRPGSPLYGFYRGLVSRGVNRTKALMAVGIKLMRIMFALVRDKRFFVEDEQQGSAQLRAA

SEQ ID NO: 84046 - protein, 421 aa, unidentified
MKNNAARKLKQVPAGYLLVGVDPHKKRHVALAMTQDLMVQSKFKFANLRRGFEEALERAKAEMGRTGCRGVMFAIETASHYWRNFAYFLDERGVPFRLINQFTLKRRREGKDLNRRKNDFRDAEVAAQLLCSGEFTETKLPQGIYAELRAGYNAYRRLVKERTRITNLVKGLLDGLFPEFTQVFKDPCGRTALSVLSTCPTPRIIVGMTEEEFVNTVRAGHQGRLMRRKLLALHYAARTSIGIEAGAQSVFFEVSFLIEKLHLIDWQVRRIEEVLVRLVDETEEGKYLLSIRGLNYISVAGLLAELGSFRSYRNAKQLIKMAGSNPTESESAGKRGSRTPMSKKGRPGLRYCAWTAVIPILRHNPDFRAWAKTLRERPVHAHPLNGKEVAGAAVNRLLRLAFALVKKQTFYQVPQLAEVVR

SEQ ID NO: 84047 - protein, 693 aa, unidentified
MKYTPVGVDIAKHLIQVHFIDENTGDVVDKQLRRRDFLEYFSNRESCLIGMEACGGSQHWARELTKLGHKVRLLQARFVKAFVMGNKNDVMDARAIWMAVQQPGKEIAVKTEEQQSVLVLHRSRRQLVKFRTMQINSLHGTLLEFGETIHKGRAAMEREFPEALERMKERLPPYLITVLENQYNRLNELDSLIEDIEKQLTSVAKQNETCKRLLDIPGVGPLIATAAVATMGEASAFKSGREFAAYVGLVPRQTGSGGKIRLLGISKRGDTYLRTLFIHGARAAALLTKEPGLWIPSARKVNGKALSADITLTPKDIGTLNSTTMSFSGGAGWFKLATVTMPQASSVVSITLIGGAGFNVGSPQQAGISELVLRAGNGNPKGITGALWQRTLTGFTNFAWVNTSGDTYDIYVAIGNYATGVNIQWDYTSNASVTIHTSPAYSANKPEGLTDGTVYSLYTPSEQFYPPGAPIPWPSDTVPSGYALMQGQAFDKSAYPKLAAAYPSGVIPDMRGWTIKGKPASGRAVLSQEQDGIKSHTHSASASSTDLGTKTTSSFDYGTKSTNNTGAHTHSLSGSTNAAGNHSHRDGRRFNPSVFKDTYQYGYTSSGQNTWGVQGSVGMSTGWLANTSIDGNHSHSLSGTAASAGAHAHTVGIGAHTHSVAIGSHGHTITVNAAGNAENTVKNIAFNYIVRLA

SEQ ID NO: 84048 - protein, 345 aa, unidentified
MKHFIGLDVAVKETAVCIVDESGRICREVKVVSHSDDLLAVLKDPALHIERVGLEAGPLSQWLFEGLACAGLPVICIETRHVKAFLKAQPNKTDRNDARGIAQMMRVNLYRPVHVKTLTCQKRRALLTARNLLQGKAMAIENDIRGLLRNFGLKVGVVGTMKFEERICELVEGLPDLEEIMEPLLAARRKLRAEFARLHKKVLTIARNDATCRRLMTVPGVGPVVALAYAATIDIPQRFRSSKAVGPILGLTPKLNESGESKRVGCISLCGDGMMRTLLYEAAQTLITRVTKWSWLKAWAMNVAKRRGIRKAIVALARRLAVVMHRMWLDGTEFRWTRETMASAI

SEQ ID NO: 84049 - protein, 406 aa, unidentified
MNMNAVGIDVSKRKSTVAILRPGGTVVVKPFDVPHLSADFQSLKKLIRELDGQTRIVMECTGRYYEPVARELSQAGFFVSTVNPQIIHNFRGQDNPLRKVKTDKADSVKIARYTLDSWANLKQYSLMDELRSQLKTMNRQFDFYMKHKTAMKNNLIGLIDQTYPGANTYFDSPARKDGSQKWVDFIDTYWHVDCVRRMSLEVFTNHYQKWCSRRKYSFSKSNAEEIYGKGKELIPVLPKDNFTKRILKQAIDQLNTASQTVEQLRTLMNETASKLPEYPVVMAMKGVGPSLGPQLMAEIGDVTRFTHKGAITAFAGVDPGVNDSGDYSQKSVRASKRGSPVLRKTLFQIMDVLIKTKPDDAVYRFLDKKRSEGKPYYVYMTAGANKFLRIYYGRVKEYLSSLPESE

SEQ ID NO: 84050 - protein, 349 aa, unidentified
METPIKQTAGIDCGIQELVVSFGLLVSNGNFICKLTKAFTNTTKGFKQLLQWIAEVSSKETAVLYVMEATGVYHQKLAYYLVANDCRASIVLPNKVNAFAKTCTSKKQDDQQASKVLAEFGCVKQLDEWQPPHSLFVNLKQLTREKYQLQQELTSIKNQLHAEQTKAITASASIKRMKARSRLIEKQIAEVENEITDLANQDAVIKEKIDKICTIPGVGLQTAVTVIAETNGFNLIRNSRQLVSYAGLDIIQKQSGTSVRGRVHISKQGNPHLRHCLYFPSFSAVRYNKPMQNLYNRIVEKQSIKMKGYVAVQRKMLVLIYTLWKKDEAYNSSIKFLEQPVEAALTELD

SEQ ID NO: 84051 - protein, 365 aa, unidentified
MNECTHIGLDVHKDTIAVAVLRAGTGEIDERVVPNTPEAVRKLLSRHDPALTRVCYEAGPTGYDTHRLVDSLGFACDVIAPSLIPRRSGSRVKTDRIDARNLARLHRAGELTAVRVPTAAEEAARDLIRVREEVKRDRRVARQRIRSFLTRYGKRYPGPRDAWSHRFEVWARALRFDEPLAQEAFSHLLSAYFVRDAQLAEMGRRIEELATEEPFAGPVARLSALRGIGVLSAMTILAETCDFTRFGDARSYMGFTGLTPSEHSSGASRHQGSITKTGNAHIRRVLVGSAWAYRHAPAVRGKLRERLEGQSPEVAAYSWACQCRCHGTFRRVSARKGAHTAVVATARELSGFVWGLMVGNLGPAR

SEQ ID NO: 84052 - protein, 478 aa, unidentified
MAVNYHLVLFPKGSFGHARLVAYFFHPTPNERDIFLPSAESFRMSSLQKINPNCAGIDIGSESIFIGIENCDVASFGTFTDDYLKAIAYLKQHNITAVAMEATGVYWITLFDMIEAAGITVTLVNGKQVKYLPGRKSDVADCQWLQQLHSFGLLRHCFIPDDITRQLRTYTRLRADHLSMASSHIQHMHKALTLMNIKVQNVISQIHGVSGLRIITAIVLGERNPERLADLCEKSILKTKRDRVIASLNGNFKAEHIFALKQALRAYDFYQNQITECDKQIESLLDDHTDDMPTPTHLTTPKKIRHNPPQIDDLHTKLMKMTGGNDPSQITGLTDKTLLELIAETGTNLQEHWITEKHFSSWAALAPGMHQSGKTNKKRKIKKNSRAGQIFREAALSISVSKHSAFSAFYKRMKAKKGFLFALKATARKLAVIYYRIMSKGLAFVERGIELYQQKFKEQQLRLLQKKAKSLGFQLVAS

SEQ ID NO: 84053 - protein, 341 aa, unidentified
MEQYIGLDMSLEETAISVRQGGKRIWRGKCASDPKVLAAIIRDRAPEAKRVVFETGPLSVWFYHALMAEGIPAICIDARHAKAALDMAPNKTDTNDADGLAQLAEVGFYREVRVKQYDSMLSRTRVGARNKVIKITIELSNQIRGVLKTFGLIVGKGSGRVFEGNVRALLAGNAELARIVLPLLEAWRDLRARATELDRQLVAAARESAACRLLMSIPGVGSVVAASFAAAIERPENFRTSRSVGAWLGLTPRRYQSGEVDFDGHISRRGDNHLRGLLYQAATVILTRSLADSTLRSWGLKLREKVGFKRAAVAVARKLAIVMHTMLKTGERFDRTIGASA

SEQ ID NO: 84054 - protein, 312 aa, unidentified
MNEPWIVGIDVSKHHLDIAILPAGEAFRVPNDSEGHQRLINRLRFAASVERVVLEATGGYERAAAIALANGNLPVVVVNPRQTRAFAHATGKLAKTDRLDALTLARFAQALKPDVRPLPTTAQRELAELVARRRHLVTMIGSEQQRLQAARSAAVKSSISATLRYLRSQRAEVDRALLAAVELDPAWRARGELLQSVPGIGPVTALTLLAELPELGSVTAKQIAALVGVAPLNRDSGNKRGKRRVHGGRKSIRKVLYMATLTAVHHNPTLQAFHQRQLASGKPFKVALTASMRKLLVILNAMTKHQEAWNPT

SEQ ID NO: 84055 - protein, 394 aa, unidentified
MHKDTHCAVVIDCWMNKLGEVSFENRPSKFPAFVEDVRRICGTKEFVFGLEDTRGFGRNLAAYLVGRRFEVKHVNPAYTSAVRLANPIIYKDDSYDAYCVARVLRDMVDSLQDARHEDIFWTIRQIVKRRDLIVKSNVMNKNQLHSQLSYSYPSYRKFFALIDAKSAMCFWENYPSPEHVKATTPEKVYETIKPVHQALKLQRIHEIIAMIEKDGDTRKDYQPERDFIVRNIVKEIRHNKELIAEIDDELRKLIPLTGYKLQTMPGIDLVTEAQIISEIGDVNRFPDSDKLARFMGLAPVQFSSAGKGKDQRCRNGNRALNAIFHFMAIQMVAISESGKPRHPVFREYFEQKVKEGKNKPQALVCVARRLVRIIYGMMKTKTEYRQFEKVDGKN

SEQ ID NO: 84056 - protein, 346 aa, unidentified
MDHVGIDVHKKESHICIVAEGGEVIERRVRSEVGRLAEMFEKRPHARILIEASTDSEWVARCLEGLGHEVVVADPNFAPMYATRRRTVKTDRRDARALADACVLGAYRPAHRLSDAQRHVRGRLGVREALVRTRTRYISLIRARLRQDGWQVPTGSAEGFGRRVLALRLPGRLLSEVAPLLAVMRHGDRQLAYADERIAAFTATDPRVRRLRSVPSVGPVTAAAFVAALDDAQRFRRAHEVEAYLGLVPQEWSSGESQRRGRITKAGSRRVRWLLIQAAVSMRRLRDPRTAGLREWAERIAARRGRKIAVVALARRLAGILFALLRDGTVYESRLGQARRQPAVPA

SEQ ID NO: 84057 - protein, 344 aa, unidentified
MTTDVNISAGLDIHNKFVLATILWSNDRIIQERFERTKDGLLSLKLWIITHKCEVVACESTSDFWVPIYDFINDKIPVIVGNARDIKALSHKKTDKVDSEMIARLALHGMIQPSRIFHGEHREFRKILRLRHRLVEKRTSFKYQVKGILNAEMIRLSSVLSDIFGKSGMMLLTGIINGMNLNDIIPVLPKRAQEKKEKIIEVLGNSISQPAIFQIKVLLDVIRCLDEQELQLKKSALYFAYNNYPREMEILMSVPGIGEIGAATLIAEIGDVHDFTSGDKLAGWLGMVPNVYQSEGKLRTGSITNRKLTYLIKLIIHYNNFKSVSIPIFCKISYNYSFVNGNHF

SEQ ID NO: 84058 - protein, 354 aa, unidentified
MTASYEYHIGVDYHKSYSHLVVQDSSGKTLRSGRVKNDRQSLGGFLERYRENSHAVVEATRNWMVMYDWLDDICDDVVLAHPLKVKAIADAKIKTDKIDATVLAHLLRADLVPEAWAPTDKARELRVALRERMSYVRLRTMTKNRIITVFDRYPEQTAQLKKLGDLFGKAGRVQLAQVEVSEIDRIQIDRGLDFIGDIDMRIKQSEATIRAMTKANANVKLLKTIPGVGEFFARLIDAEVDDISRFRNAKKLAAYAGLVPSTYSSGGKTYHGKIIKQGNKWLRWAFVEAVTPAIASDPQLRAQYEHLKFRGTNKARVAIARKLLTIAFQILRDQRAYEPRDTSTREGATISRLS

SEQ ID NO: 84059 - protein, 344 aa, unidentified
MKLYVGLDVSMKETSICVVDKVGKVFREVKVATEPTAILAVLKDETLAIERIGLEAGAFSQWLYGALAEAGLPVVCVETRHMKAALSAQRNKTDRNDARGIAQMMRVGLYRPVHVKTLTSQKQRMLLTARQLLKAKAIDIEGDLRGTLRNFGLKVGVVGAAKFEARIRELIKDDADLAEIVEPVLIARRTLREQLGVLHRQLLELVRHDPVCRRLMTAPGVGPVVALTFRATVDVPSRFKNSKTVGAAFGLTPRRYQSGETDRMGAVSKCGDRMMRVMLFEAALALMVCSRKWSWLKAWGMKIARHRGMKRAIVAVARRLAVILHRMWVDGTEFRWTREQTAAA

SEQ ID NO: 84060 - protein, 346 aa, unidentified
MNSMNYIGLDIHKKSISGCVRQADGTIIQESTIAATRRALDEWMLQLPQPWIAGMEATLFTGWIYDHLVSGGGMVKVAHPAMLQAIAAGKKKNDRVDARKIADLLRCDYFPECHMASREVRDRRRVLRYRNLLVRQAVQMKNKVSGLLMEAGIPYNQQKVHQKKYFAELLQKQKKEMPPSMPELLRLSRSTVEALTGMQRQLIQALESDALLAARVERLASIPGVGRVVALTWALEMGDISRFASVKKAVSYCGLCGAERSSGGKTERTPISKQRNKHLQTILVEAAKLAPRWNPDLALVYEREKQKGNRNRATLAVARKLVAYLMAVDREQRPFDTQLRVADNAA

SEQ ID NO: 84061 - protein, 363 aa, unidentified
MKPAMSVLGIDIAKRVFHVVGMDERGKIVLRKRLSRHDLMPCIAKLPPVLIGIEACGGAHYWARRFRAYGHEVKLMAPQFVKPYVKSNKNDSRDAEAIAEAVTRPTMRFVPIKDVAQQDIQALHRVRERLIGERTALVNEVHGLMQEYGIVMPKGVAKFRQAVVGTLEAEKDKRTPLSQEMLWKLVEEFATLEAQLAYYQEKLDTLAQTHPACQRLMTIPGIGPFTATALVAAVSDASACKNGRQCAAWLGLVPRQHTTGGKERVLGISKRGDTSLRKLLVHGVRATIRWVGRKTDRRSQWMRHVLERRGTNRTAVAVANKNARMVWALLTSHQDSQPATSSGEQTRVSAAAKGLLVSILAVL

SEQ ID NO: 84062 - protein, 422 aa, unidentified
MNTIAKFEARAMEVIYRCCAGLDVHKQTVECAVRRMQPDGRAQVEIRQFGTMTDDLLEMVEWLKGQGVTHVAMESTGVFWKPIYNILEGHFTVLLVNARSVKQVPGRKTDARDCQWLAQLLQYGLLKGSFIPARWQRDLRDLTRERTQLAEEQTRVANRIHKVLEDANIKLGSVATDILGVSGRDILERLIAGEQDTEKLAERARGRLRRKIPQLRRALRGHLSEHHRFALRLQLDHLQRLEQLIERLDQRIAELCKPYDEQIEQLDQVPGVDRTGAQSIVAEVGVDMQVFPSDGHLCSWAGICSGNNESAGKRRSGRIPKGNRWLRRTLVLAAQAAGHAKDTYLASRFRRLAARRGNKRACVAVAHSILKIVYHLLKYGCPYRDLGVSYFDRLDPVRLTRYLVRRLERLGHKVTLEPVPTA

SEQ ID NO: 84063 - protein, 344 aa, unidentified
MVTIGHDAHLKTSTLTVLDSNGKKIMRKKLNNDPDKLLAFVRQFPGEKQLAIETCYNWPVFHELLKNEVNEFHLLHAKKLRSVIDSQAKTDGNDSEEIAHLVHSGRRLVRSYIADLDTRCFRRLLRTRVNFSLDITRIKNQIHAIINAHTFYSQRPTNFKDIFCRRGLEYLASIKLPEQERFIVDRLLVKKYELERQRDEFDEYIKHIDFHPNDLRWLQTIPGMRGKLFKYILLSEIDNVSRFRHARALVAYAGLIPKENSSGEKNRKGHLRSECNQFLRWALLQAVLPAILADKGLRTYYKSVKERKNSSTARIATARILLESVYCVLKEQRPYRMMQAVNRG

SEQ ID NO: 84064 - protein, 427 aa, unidentified
MSEQIPLEIRVSVDVGCHSHNVAIGLSSGEVLEEFQIPHRPEGFQHFFSRIEKHQKKRGYPVAVAMEGYNGYARPLDGMVRARGYRLYNINNLKLARFKEIFPGAAKSDPIDARKGLELFQLRDHLPLAKEVLQEVGAMPAENEVLKRLTRRRRRLVNERGRVINNLQVDLQAVCPGLLEITQEAGNQWFLGFLVSADTLCQLARLRRSTLLKIPAVGVKYAGLIQSWQKRAHFSEDVEWVGEMIQEDAHRVIELDHKIKALEVKIAEVAKGSKIARVLLSIPGFGPTCTSELAGEIGTVERFRKEGSLALYLGMATLDNSSGKHKGSKSPKQVNTRAKAAMMTAIDRHRKYVPESQRYYEKKRLQGKAHNQAIRALGRHLCRIIYKMLKEERDYQIRSIKGDTQAKVESRSSLIGQMRRSKIKAKS

SEQ ID NO: 84065 - protein, 348 aa, unidentified
MALTIVEDTRAVTGGVDTHADMHVAAALDPVGGLLGVGEFPATAAGYARLLGWLGGFGTVGLAGIEGTGSYGAGLARHVTAAGIRVVEVDRSDRQDRRRQGKSDPLDAVSAARAAQSGRARGEPKGRDGAVEAIRALMVAKRSARSERTQTINQARALIVTGPDDLRARFARHTAAGLVSELAALRPRPGATVGYATRIALRELGRRAEFLDGQLGRLDELIVPLVTARAPALLALHGVGPDTAALLLIAAGDHPHRLRSEAAWAHLCAVAPIPASSGKRTRHRLNPGGNREASHALWRIVITRMSSHAPTRAYVERRTKEGLSKKEIIRCLKRYAARQVYRHLRPAG

SEQ ID NO: 84066 - protein, 398 aa, unidentified
MEAIVQRSAGLDVHKKVIVVTILVEQSDRAVKEETREYGTTYKACEGLATWLLSNRIQLSVMESTGIYWKNIYAALEKAGLRVSVVNARHVKQVPGRKTDVKDSQWLARLARYGLVKNSFIPPKDLRELRIIARYRTKLVGTLAGEKNRLHKTLDDAGVRLGNVVSDISGVTATEIIAGLIKGQPISDLLACTRGVLKKKKDQLQAELEGELSARHVFLLQKLQAHIAYLHNELKELDEYLFAAMQPYQKQWEILQTIPGIDAVGAALLIIEIGVDMQQFGSREQFCSWAGMCPGNNESAGKKKSGKTPKGSKQLRYILCEAANAASKTDCQFQHKYKSLMIRRGHKRAIVAVGHKMLRVIFSRLKEGEVYHDPKVNYEELVVKKNASRWIRMLKKYQ

SEQ ID NO: 84067 - protein, 474 aa, unidentified
MFVLGCDVSRGYVDITVVNERGELALPPFQADASAQGESRIFRQISALRKNYPQETVIAVMENTGGYEANIAQCFRQHGVPVSVLNPKNIHSFRQLELHHAITDPSSARDIALFALQHLDAIKTEVEGTSERALKRLAHILDALSRDMTRLKNRLDNLLFTVRPELLSLTRGDKPRWLLQLLLQYPIPQKLARGRMSRVTRIPSITPDKARNLISLAKSSRGADNHPDFAPLIVYLATRLLQAMDQEKTLRKELEQRFNRIHPSCPLPTIKGVSSYGAAIILAHIGNVHRFHSAKALVAFFGLDPLVRESGDLQHRRHISKRGPGMVRRVLYMQCLSMCSDPDHPIGRFYARLTKQGKPHYYAITACMRKLTVILYAMLRSGNAFDPNYEDSSKALKQSERDRGRKKLRVAKHARTSLALDVPISTREAKRRKRIIALQNKKREGPHVSCDTSAGSCPKNLNEVTFPWYNVALS

SEQ ID NO: 84068 - protein, 404 aa, unidentified
MATPEQVSVWIGLDVGKEAHFADVLDNDGDRLFSRGTANDQGDIEALIDRAARHGVPGLAIDQPGSIAQLILAVAAKRGVPVAYIPGLVMRRAADLYPGEAKTDRRDAYIIADTARTRRKQVHWLDASSDELLEELRVLNGFDTDLAADQTRLANRLRDQLTSISPALERALGKHLDHGGVLDLVAAFPTLTALRGAGPDAIRAAAARRSPRMARKVTEAVEKALASQDVTVPAEKASGRVIAELARELDRLLQRRAALEKEIEAAFLSHPFGEILASLPGIGPRTGARILAEIGDGCDFASGAKLAAYAGLAPVTRQSGTSLNAETRSRRGNHRLKNAMFLAAFCSLRDPESRAFYDRKRAEGKKHNAALICLARRRCDVILAMLRNRERYQPGRRAGKATAA

SEQ ID NO: 84069 - protein, 352 aa, unidentified
MKRYKEADPKCKQIFVGIDLHRVQWHVTIRTEDVELSSSSIPGNWEALEKTLNRYRGPKLQVVYEAGYFGFWLHDHVVDYGAECIVTPPSLVPQEYGNHVKTDRRDSRKLAHLLAKGLLKRVWVPSAEERCQRQVIRRRRQLIGDRVRTQNRIKAELRFYGIEIAEPRGPWTKAYVENLHRLRFGNRWMQESFQRLLEEFQFLNQQIKRQTDLLRELAKSPEYLERVQILQSVPGIGLIAAMELLLELQDVERFRRADQLAAYVGLTPSQYSSANKVRMGRITCIGKNTLRATMVEVAWRLIAKDPAMREKYEQIKVRAGGKRAIIAIARMTLLRTRRMLLDRRPYVIGLAA

SEQ ID NO: 84070 - protein, 423 aa, unidentified
MPITTLFVGIDVSLKTNQVCSINFNQDVFFNQSFDNSPSGTEKIVCKLLDVLNVHPELTKIHICMEATNVYHIHVSSVLSTDARLLAHGVKVFAVNAKLIEKYKETFVDRSKTDPEDAFLCADYVRIGKCKDLPPVMGYQKIALQRLTRQRKHIAEQLGIEKQYLSSNLYLKFSALKVNPDERPFSNIYGKTSSVMLTDFLTNEEIVQADLADLVAKIAEASKKRFDDPESTARLLQKVSRDSFRLDKVASDSVSMAMASSFRLIQCYQDELKHLDKEIIRLVGSMDNHYYTILTSCKGIGPVFAAGMIAEISNINCFSSDDNLASYCGLRWKRKQSGPKDSDHRKQPNGCNSFLRYYIVEATASVIRHNDTLADFYNRKRSEVKVNAHKRALVLTSRKFVRIVFGLLRNNKLFDDRCLAASS

SEQ ID NO: 84071 - protein, 315 aa, unidentified
MRIISNFVCGLDVHKKSITACVLLPNQKHIETFGTMTDDLILLIDWIRSHNCTHVAMESTGVYWKPIYNLLELEPDIEAYVVNAQHIKQVPGRKTDVKDAEWIAELLKHGLLKPSYIPSREQRELRELVRYRRSLIDEKAREANRIQKVLEGANIKLGSVASNVLGVSGRAIINEIIKGNIEPTKLAELSKGKLRKKKELLEQSLNGLIGPHQRLMLKKQIEHIEFLEEQISELDEEIKKRTSSFEEDIRYMDSIPGIGRQTAEQLLAEVGPDMTRFPTANHLTSWAGMAPGQNESAGKKDLPKQGMGINIFGVL

SEQ ID NO: 84072 - protein, 420 aa, unidentified
MKSFVPVAGVDVSKRFSDLCVLSPDNNVLLRQKIYHDMVSMKLAEKKLHEIELEYGTRPVVVMESTSHYHLILFQFFTDAGFEVVVVNPIQSGALKNINVRKVKNDRVDAYRIAMLYRLKVLRPSQIPTNSLRGLRLLTRQRSELKSDVARFKNRMTAYLDQIFPGYGEVFSDVGGSASRAVLHMCPTPEKLLNADGSLLAKVICEAGNKGPKFGAEKAAKLREAAGSAQVIGVRSASNASLIKNVLDIIEGLLAAIQRIEREIKELVTQDTRLDEDVKLLCSIPGIGFSSAVVIAAEMGNISLFRKPKQLAAYFGLDPGERQSGTFKGRKNKLSKRGSPQVRAALHMAAVSSVSRKRDGTYRNPVLAEYYERKCAEKPCKVARVAVMRKLSNIIYAVLRDRRPFELRTPQEHMALLAAA

SEQ ID NO: 84073 - protein, 344 aa, unidentified
MITIGIDPHKNSLTAVAVEPSSRSHPPLRVVVDKTTSASLLAWAKQWPDRQWAVEGATGLGRGIAQQLVTAGEDVIDVPAKLAAWARLLGSSNARKTDVTDAISVAVVAQHNRRLNRVQLEDHTTIMRLLTERRDDLVAEHTRGINRLHVLLRDLHPGGAEVRLDSTEASALLAKIRPATPADRQRKQIARDVVRDLKRHEASIKELEKELRAAVSASGTTLTQIQGIGFLTAAKILALTGDIRRFPNQEHYASYAGTAPIDVSSGDQETHRLSRRGNRQLNAAIHVAAVTQARDPGPGRDHYRRKIAEHKTPKEARRSLKRRLSNTIYRRILADHQRSEMAAA

SEQ ID NO: 84074 - protein, 344 aa, unidentified
MLHAGLDLSRRRLDICLLDERGEPAGELAVPPDVEGLHGLVRRLHGHRVRAVIESMNGARFVHDTLEEHGWEVLVADAQKVKGLAPLACKTDRIDARVLAELSWRDLVPAIWLPDPSVRRERELARFRLHLVRHRTTLKNRIHATLMTFGHPCPVSDPFGLAGRDLLDKLAIPDPWRSNVEVSLRVIDDLELEIAQLTVQLKQLGADHRYIPLLVTAPGFGWINAFTVASEIGDIERFSSPAKLCGYTGLCPRVIQSGNTDRRGPISKHGPRYLRWGLFEAALNACKHPLYAERYLATKRRLGRQRGPKVAQIDLSRKLTEAIWHMLTRNEPFAPAGARFRLAA

SEQ ID NO: 84075 - protein, 330 aa, unidentified
MKSYTHFFGVDVSKKTVDITYICNDQSSHRQFGNDPEGMDTMMQWLRELNVSFKDTLFCMEATGLYCFVLTEFLATNNIDTWIEHAAQIKRSSSLDRGKNDKVDSKRIAVYATKNLDRLRLWKPMTATLEKIKHLASLRSRLVETKKTLLTPIQEFESVGNGMMYKFLTKTIQSSLTAIDKDLKNVENKIREILNGDDNLRELFRLITSVIGIGFVTAVNLLIYTNGFTILRDLRKLACYCGVAPFEYSSGSSIRGKTKVHFMSNKKLKSNLHMAALTAVKLDIDLKAYYERKVAEGKNKMSVLNAVKNKLLARVLAVVNRKQEYVKKVA

SEQ ID NO: 84076 - protein, 442 aa, unidentified
MLFVAERKQEQMIAAVIERCAGIDIGKKFLAVCVMTGPADGEARSEIRQFETTVPELLKLREWITAEGCTDVIMESTGSYWKPVFNILEGHTRVALANPTEVKARKGHKTDNKDAWWLAHLLRHGMVTRSFIPTRPIRELRDLTRRRRKLIQSATAEKNRVGKVLEDANVKLGSVLSDLFGVSGQLMLEALLKGRAEAQEIASFAQKGAKKKIPEIIAALEGHTMTDHHRIMIGFSLEHMRFLEEQMERLDDAIVKKIEESGYTKQWELLRTLPAVDANAAAILAEMGPDPGQFPSHRKLGSWSGLCPGNNVSAGRSKGRHTGKGNRWLRGALTESAWAVSKMKQGHLREKFWRIASRGDAQANRPKAVIAIAHDLVKLAHEVLKRGTPYEEKRGQPMSEQQKQRLIRHHIRRLGKLGIPLRPCPAPGPKPNSRRKALSTSC

SEQ ID NO: 84077 - protein, 378 aa, unidentified
MWLLCDTGAVVRHGMYAGRRRGSDRFPLGRDGPWRSKVALVFSHDLNGYLGPVITVGPYDKTRWKRHMDNTIGIDVSKDTLDVHRLADGQYKQFRNGKSGHAQLIKWLGMQPDPLVIFEATGAYHRQVERALGTHFVPFVKVNPKQARRFAQASGKLAKTDRVDCEMLAKMGAALQLVPKPLTAENLYDLRELLSARRALIKDRTAAKARKATVVNALVKQLLAKRLRQIEGDIEKIDALMLDVAHQDHRMSERLDILFSIPGIGMVTALMILVDMPEIGALNNKQVASLAGLAPMSQSSGKWQGKARIQGGRPNLRNAIFMPALVAIRYNVDLKAKYEQLVAAGKEKKVAITAVMRKLLVLANALLRDNRKWAEKAA

SEQ ID NO: 84078 - protein, 394 aa, unidentified
MQRERNQGKGRIIGMDIHPECFSASGLENTNAKTAQELFMHHQVLMENLERWISKNKQPGDLYVMEAGSNSFDTSERLKKHGCNVVVLESFRAGQIGKSYLKDDKVDARKIARIYLSGLAHEVWQPDEITRERREVLASYNKAKTDSTRCRNRIWGWCTGHGVKRPKGLKLTSAKGLEWLLTSREWSHRQKMIIESMHDDLLHACVKRKELQKLMAIEIAEDPEMLKLQQLCGLRLVVIYALFAIIGDISRFRNPKKLVAYIGLQPSVNTSGISVKGGPLKHTGRKDLRSLLVQSAHAIIRMGSAKNPMATWGRALKYRKGGNIAVIAVARKLVTYVWYLLRGFFTPLHEISNSFNRKLQILATNIGTEDRRAMGYESVKVFIEEKRKILLAES

SEQ ID NO: 84079 - protein, 345 aa, unidentified
METMYYIGLDVHKKTISYCVKDGSGRIYGEGSIPATRLTLDMWMKTLPQPWTVAMEATIFTAWIYDHLKPHAAAVKVAHPLMLRAIAVAKKKNDRIDAKKIADCLRCDFLPECYMASTEIRERRRTLRYRNLLVRQAVQMKNKIAVLLMEAGVSYNKQKLHKVGYFRELLATNQDIDEGLKPLLRLCREMVVRLGKTESALVRSLERDSLLVERVERLMTIPAVGPITALTWALEVGDVQRFSSIKKAISYCGLCGAEKSSANITMRTPLSKQRNKHLQTVLIEAAKMAPRNSPELAMVYEQEKQKGNANRATLAVARKLVAYLVAVDRRQKEFLTVERENRTAA

SEQ ID NO: 84080 - protein, 363 aa, unidentified
MNYVGVDVHKKYSVLCALDERGRKLREARVEGNTGCGFAQFFRSLEGPSKAVVEACWNWGLIHDELEELDQVEEVVLAHPAKTRLIADAQIKTDRLDAHALGTLLRGNLVARAHVPRRQTRSRKNLLRQRLYWARLRTMLRNRIHALLDRQRGLELPQCSDIFGQRGLFFLRQLQLPEPDGMLLREQLALHDLIAQQMKAQEKRIAAEFKSEVIHRQLLSMPGIGTTLAAVIGCEIDQIERFPTSEKLCAYAGVVPTTHASGGKVAHGRLLPFCNKWLRWALLEASWVAIGCSPYFGALYRQHRARGKKANTAITIVARRMCRILWQLLSEKRDFEKRPFSHRIRTFPGCSAVRLTARSVERP

SEQ ID NO: 84081 - protein, 377 aa, unidentified
MKSTRFVGLDVHAATIAAAVAEANGEVRVLGVIPNQPEAVRRLVKRLGPADQLRACYEAGPCGYTLYWQLAELGVACQVVAPTLVPVKAGDRVKTDRRDAARLARSLRSGDLTPVWVPDAAHEALRDLVRAREAAKKDQLRARHRLQKFLLRHGHRPPAGTKAWTERYRRWLAGLRFELPAQEATRLDYLTEVDHARDRIARLERALDEAIETVPAPMRAVIQALQALRGIAKVAAVTVVAEVGQLSRFARARQLMGYSGAVGSEHSSGPRIRHGGITKTGNAHLRRIVVEAAWSYRHRPAVGAALRQRQARQSEAVKAIAWKAQHRLHHRYRRLLGRGKSKQQVVTAIARELLGFIWAIGVAVEREHCGAVTDQVA

SEQ ID NO: 84082 - protein, 474 aa, unidentified
MFVSLKFSLRASEFALLYYLTNKAITMDKKQMELLQLKVLRPCCAAIDVGSIMMMVAYSDRNGNQHLMEVDAFTEDLRGLADKLKAAGVVQVAMESTGMYWVVVYEILEEQGFKVTLVNARHFKNVDGQKTDVKDCQWLHQLHAHGLLRASHIAKENFRELRSYLHERNTLQVQKSDTLNRIHKILTQMNVKVQHLISDIEGVAGMKLLRGIASGIHDPKKLLLLINVDRLKADKEELLKSLDGIYKRQFIVILQNYLKAYDFFKNQMQSYELLIEEVLKKLLVESASANVPVIKPKRTAARKNQYGINIQEYLKHIIGVDVTKMDGLDEISVLEIISVTGLDMHKWPTAEHFTSWLNLSPRPKKSGGKTIGYEKRFTHNKATQSFRVAAQTMWQNRGALGHLYRRLSARKAAKKATKAVARKLAIIFYNMIKNQTEYDKDRLRVNTERLQARKLAYLKKEARKYGYVLQNETT

SEQ ID NO: 84083 - protein, 341 aa, unidentified
MSLIKVVGIDLAKLVFSIHGVDEHDKCKLRKTVKRNNLLAEMVKLTPCIIAMEACSGAHYWAREFTKLGHDVRIMASKFVIPYRQNEKNDANDAQAICEAATRPKTRFVSIKSEEQQAVLCLHRIRQGAIKDRTARINRLRGLLSEFGIIMPKGRYPAQKAISGILEDAENSLPFLARELLSDLWQSIKALNEEILKYDRKLYALANKMKDAKRLMSIPGIGEITATAVVATVNDAKHFDTSRSFAAWIGLVPRQYTTGGVARLGRISKRGEKHIRTSLIHGARAVIANCKNKTDRTSLWVKDLVERRGFKRATVALAAKNARLIWALLHSEKEYQVNYVK

SEQ ID NO: 84084 - protein, 343 aa, unidentified
MDLAKRVIQVHAVDAAGRAVTSRALARDKFIEWCVKLPAGCMVAMEASSSAHHWARKLIGLGLDARIISAQLVSPYRSEGATGKNDANDAAAICEAASRPTMRFIPVKSIEQQSMLCVHRLREGIKEDRTACINRIRGLLAEFGLVFPQGANELQGMLSDVLEDAGNELGALARLTLQRAQSQWRELDEHMAWCDERIAAHAKGNDAVKAAATLQGIGPVTASAVVATVGDFKQFKNGAQFGAWIGLTPRQHSSGGKNNLGGITKRGDTYLRTLLIQGAKSAVMTAHRRQDKISQWAVALQERSGWQKAVVALANKNARILWAVMTRGEAFDANHLSVNPAGA

SEQ ID NO: 84085 - protein, 330 aa, unidentified
MAMVEDIHSSCFVSIELSRSKWVLGVLLPSAERVRLRQIDGGDTEALLRHFDDLRSQSAKAAGQDVTIFACFEAGYDGFWLARLLNARGVITLVLDPTSFLVMRRGRRAKTDRIDAEVMAYTLRAYVGGDRAVCREVRIPSPEEEDAKRLHRERIQLKTERTRHVNRIRGLLNLHGIRDVKGLWGGAWRQWLSDLQTGDGRQLGAHVRQELTREFERLDLVIRHIHSLDGELEAGLVDDTAPLPQAEKVRQLATLKGIGSLGATVLVSEVFHREFASRRHLASYLGLAPSPYASGDMNRDQGISKAGNGYARTRSSNWRGAGSGINRTAS

SEQ ID NO: 84086 - protein, 342 aa, unidentified
MQITTIGLDIAKNVFQVHGIDAAEKVVVRKQLRRSQVLAFFKALPPCLIGMEACATAHYWARELTKLGHQVRLMPPKDVKAYVKRNKNDAADAEAICEAVRRPTMRFVQIKSVEQQGRLMLHRARDLLMRQRTQVINALRAHLAELGIVAAQGREGIKELLKIIASEEDAGLPVDAHASLVVLAAELQAMQTMIGSIDKRIMAQHRSNEASQRLESIPGIGVTGATAIAATVPDPKVFRSGRDFAAWIGLVPRQDSTGGKQKLGPISKRGDRYLRRILVVGACAVLRYARQQPQKYPWLTQLLARKPFKVVAVALANKMARIAWALLAKGGTYRAPMLVAAA

SEQ ID NO: 84087 - protein, 412 aa, unidentified
MDRLVERCAGLDVHKDSVAATVRVPRKDGQRLQETRTFPTTTRGLLTLADWLASYGVTLVGMESTGCYWKPVYYLLEERFECWLLNAQHLRNVPGRKTDVADSAWICQLLEHGLVRPSFVPPKPIRELRDLTRYRKAQIEERVREVQRLDKVLQDAGIKVSSVAAETLGVSVRRMLDALVAGTHDPEVLAELARGRLRQKLPALQDALTGRFRSEHHGLLVSQILAHIDYLDETIATLSARIEHVIAPFSRERELLQTIPGVARLGAEVLIAEIGVDMSVFPSDAHLASWAGQCPGNHESAGKRHSGKPRKGSKWLHKTLTESAKAAARSKGTYLSAQYGRLRGRRGPGKATGALRHSILIAAYHLLEQKVPYQELGADYFDRRRSTEQRTRRLVRQLEQLGHTVTLQPLAA

SEQ ID NO: 84088 - protein, 406 aa, unidentified
MQGPVITVDVSKGSCHYQPYVSNGHPMRKPKVLHDTVEGFQSLSDLIDTMKDRYECETIPVIFEATGVYHHCLQKYLDDHQIPYYIISPLMSASYRKTTPNSNKTDDLDCSHIAKAYYGECNLFPYDKPSKSFHNLRELNRYYECELNHLRMRKNTFRKYLDIVYSRLDKCFKGHSSLYDEIPMEVIKQYPHPSLLLKHKEETIVKKIEKKTSHNALFIQNIVHEMYECSMHCYSGADVTDVESMILPELVDDLQSQKERCDEILKQLVSEAQKTPYFTSIVSIVGIGDNLAARIIAELGDMSRFSCRRAITAYAGLNPKIRQSGDMDGIHLAISKKGNKHLRCLMYLAVSCNYRLKKGDVLYEFNQKKRQQSFSPLKPKAATIATAHKLLLIICALCTNGTVYRS

SEQ ID NO: 84089 - protein, 344 aa, unidentified
MQIARIGLDLAKYVFEIHGVDAHGKTVVRKTLRRHAVSTFFANLPPCLVGMEASNGAHFWAKALSDLGHDVRLISPQFVTPYVKSNKNDRNDAEAICEAVGRPNMRFVPVKSAEQLAVQAVHRIRSRLVADRVRLVNQVRGLLGEHGIVVAKDIGNLRQALARIVGDDEDRVLNPLVRALMAELREELTELDARIAGYDRKIRELYRNSEICQRLGKVEGIGPVTATALVAAVGDRSSFKNGRQFAAWLGLVPKQRSSGGRARLFSISKRGDRYLRTLLIHGARSALGRVRDKQDPRSLWLGRMRQRRHPNIVAVALANKNARIAWSLLANDSAYDASLSVGAA

SEQ ID NO: 84090 - protein, 459 aa, unidentified
MQVIYQRCCGIDVHKKMLVACLLSCTAQGVQKEIQTFSTMLQDLYRLREWLKAKQCQAVAMESTGVYWKPIWNVLEGEVELLLCNAQHIKAVPGRKTDVKDAEWIADLLQHGLLRASFVPPRPQRELRDLTRYRSSLAADRARLVNRIQKTLEDTNIKLASVASDITGQSGRAILKAMLEGEQDPQKLAGLARGRMKEKREQLAQARPRTLGAHHRFLLQSQLRQLDFFDHQIWELDQEIAHRLGVSSGPDDPENPDPSGDLAATEEGSEAPVPSEASESVPPIPVQPEAPKHLSSAEAIRILDEVTGINVRIGEIVVAELGLQMERFPDEAHLCSWVGLCPEASISANKRLSTKTGKGNRWLRQALIEAANAAARSKGTFLGAYYQRLRKRMGHKKAIVALAHRILVIIYHLLKEQQPYRELGPDHAEEKAAEMARRRALRTLEHLGYDVTLQSAEGA

SEQ ID NO: 84091 - protein, 341 aa, unidentified
MPNSTDFQTIVGIDIAKSVFQVYSCDTKTGIVSNEKIKRDRLLEHFTNVPACKIGMEACGSSQYWARKLTALGHTVKLMDPKLVKPFVSHNKSDRADAEGIYHALQQGTRCVPAKNDTERDIDTLLTLRARLVKLQTGDINHVRGLLAEYGQIMPRSTVRFLDEVGNCINSLEGDAAQAVIEELRLVVDGIRKRAERIKTISSNIAALAKKTKHAANLLTVPGVGIITMAYMCVLLSEPQVYSSGRQFAAFLGLVPMHTGSGGKTITTHIPMRCNQQLRALMIECAQAVARAKYKTPWVTAILAKKPKKVALVAIANRIARQCWAVASKGEAWKDLSVTTA

SEQ ID NO: 84092 - protein, 420 aa, unidentified
MTLKDYQVAAGLDIHKKFIIATLLWANGTKIQQRFERTVQDSLALKAWILEHTCDVVACESTSDYWMHIYDILIDHVPVLIGNAHDIKVLSHKKTDKIDSEMIAHLALKGMISPSRVMPRYHRDFRKMVRLRHFLVEKRTDIKNRIHSILDGELFPLATILTDIFGVSGQRILHGILRGASADESLTSIPPRIRLKKENEIRALIDQNMSRGALLQLRHCLRVIKHLDEEINPITEEVQAYTLQNYPREYTILRTVPGVGDITAITLIAEIGNFRDFISGEKPASWIGIVPKVHQSANHIVKRSITKRGSRHARGIITQAAHAAAKSRKNLLREWYETKKSVIGTGKATIALARKMIVIIWYLIVNDEEYVDRYSDSSQTETKKVHTIRIPVSPHYTLEEVLSMVAEAVHLLNKRDPDPA

SEQ ID NO: 84093 - protein, 340 aa, unidentified
MIATTKFFIGIDVSKPYFDASLMVVTDHVRQATETANFENTVAGMKLFEKWLRLHKVTMDEHSLVVIENTGIYHRLIWSFCSKQHLPIHIGNAAHIKWSFGIARGKNDTIDSIRLCKYAFKESDTLKATAALDPQLLHLKDFIAARTKLLKQFTGIKVSVNELGGINDKSHQKLVEQSLKSAINGIAKSIKSIEDQIKKIVAENGAFKRNYDLLISIPGIGHVTAVYLIGCTANFAGNPSGKQLACYAGVAPFEHSSGISIKGKTRVHRMANKDLKKLLHLCALSAIQNTMEFKVYYNRKKDEGKHSMSVLNAVRNKLALRVAAVIKSQAPYKSNYNIAA

SEQ ID NO: 84094 - protein, 345 aa, unidentified
MPIVGGLDIHRKQLTFDYLDTETGEVKRGQVVPADRAHLRAWLARFAGRDDVAFALEGCTGWRYVAEELAGAGVAAHVAEPADTAFARGRKRHAKTDKTDSRHLRELLAQGRLPECWIPPAHILECRALLELYHDLRAEHTAWVQRIHAVFFHQGAPALGDGTLRTGQGVAAVRAAAAAHLSPAGQLQVATALEVIEALEARMHAVRHQLLTAARHLAGAKVLAERLYGVGPMTALAMTCWLGGAGRFSSSRKAVRFAGLDITVYSSDGKRSPGRLSRQGPPVLRWAVYEAGKTHARSSAPDHRYYAQVKDRQDGKRAALSEARKLLRQACHILAELGDDALSAA

SEQ ID NO: 84095 - protein, 410 aa, unidentified
MEVLHPHGAGLDVHKETVVACVRHMVDGKVTTGVKTFKTTTQELMALSDWLSAEGVTHIAMEATGVYWKPVWHILSDGEFTLVLANAAHVKNVPGRKTDVNDATWLADLMAHGLIRASFVPDEPTQQMRDLLRTRKQFVRERSRHTQRIQKTLEDANIKLDSVISNILGASGRRMIDALIAGEIAPEALAKLADERLHATRAELEASLRGRVTAHHRFMLQLHLEQVDALDAAMARINQEVGANVEPFRVAIEMLSTIPGLSSVSAEVIVSEIGIDMSRFPTEAQLISWAGLCPKNDESAGKRRSNRIKKGAPWLKTTLVQCAWAASRKKGSYLQAQFLRLRSRRGSQKAIVAVAASILTAAYHMLKDGTLYQDLGANHFDQRAKGKHVLRLVNRLQNLGFAVQITPMAA

SEQ ID NO: 84096 - protein, 344 aa, unidentified
MKNTTIAIDLAKSVFEVGVSDRPGHVVANHRLSREQIVGFMANQPTTIVVMEACSSAHYWGRTFQSFGHSVKLLPPLYVRPYVQRSKTDRADVKGMLEAWRNADIRPVPVKSESQQQLTALHRIRAGWIATRTMRINSARGLLREFGIVFPLGAAALAGRVQELIEDADSALSMPLRQLLHELVLEIGELESRVKLIHKQLEAIAVQTPVVERLLTIPGVGLLTATALVGFIGDVSRFPSGRHFAAYLGLTPSEHSSGLRRRLGRISKHGDVYLRTLLIHGARAVLVAAQRRPNPKGLHLWGLQLQRRIGNNKAAVAIANKMARIVWAVWKSGKPFQPHLQDVS

SEQ ID NO: 84097 - protein, 331 aa, unidentified
MFPVGIDVSKNTLDLCILYDGIKGRIKTRNIQNNRHSVENILRWLRLQHCGPEDVHVVMEATGVYHERLATELHDAGFRVSLANPHRSREFARGMGIMTKTDKVDAYMLACYAFLKKPHYWEPPAPEIRYLGALLRRRDVLLGDALREENRLEKYLSTDTPADIISSCRRMAQLLREEVSNIERQIKAHIKASPALRRDYTLLNSIKSVGPQLGMHMLVVLRSHNFVSAEQAAAFLGVVPIEKRSGTSVRSRPRMSKIGPPQLRAKLYMSALCGKIYNKRMRNIYDEMCLRGKPKMVAIGALMRKLVHWCYGVLKTGTVFNDEGLKQVLST

SEQ ID NO: 84098 - protein, 424 aa, unidentified
MNYKQNEKINQVKESTLVVGTDIGSTTQYARAFDWRGIELGKVFTFSNSREGFEAFKAWMQHLQDKYRKSDVIVGIEPTGHYWFDLGAYLEDEGILLVMVNPYAVKQTKELDDNSQSKNDRKDPKVIAKLVTEGYSAPYTPDGVYADLRIMVTNRKRLIREMTQIKNRFARWFAIYFPEYTDVFGDYEAQSSMLLLKKVCTPEAIVELGAEKINQIWRDAKLRAVGMKRATTLCETAKRSIGLKKGSSAAWYEMKLLLEDYEYKKAQLDAVMEEIEKLCRKIPESEQMLAIKGIGVITVAGFLAEVGDVRRFESPRQIQKLAGLSLRENSSGKHKGQTTISKRGRSKLRAVLFNAAIPLIAKNPEFKSLHEYYTTRANNPLKKKQSVIAISCKLIRVFYAILANGVTYDPQKMLSDIHRQPQAA

SEQ ID NO: 84099 - protein, 326 aa, unidentified
MTELFTNLQYVGIDVSKNFLDIGLLPENTHWQIPNTKKDVRQLIKKLSPKAKVLLESTGGYERNCAEQLDTMGLSVCVINPRLVFHFRKSHNQSAKTDAIDAMILAQYAKERPALRYGLSSKKQQTLIDYEHCLSHLKQVKQATSDRAIKAPILALKRVHLRVIKQVEKELETLEAQMIELIEGDQEMKVLYRRLQTVPGVALTLVASLPELGHISHKAIARLVGVAPIANDSGLKTGKRFIQGGRENVRRAIYMAALVGIRHNPLLKTFYEKKVQEGKVKKVALIACMNKLTHILNSMVANGTDFMGPEQTGEPALQQSDLEEKC

SEQ ID NO: 84100 - protein, 470 aa, unidentified
MSKLSRRHRAASSQGEARPFAGMRKITAQAAGVDIGAHEIVACVPDGEDQQIVRTFGTYTADLQTLADWFVDRGIQTVAMESTGVYWIPLFEELEARGLHCCLISAASIKRVPGRKSDVLDCQWIQTLHSYGLLTASFRPEADLVALRTLLRHRAQLLEHRAPHVLHMQQALLQMNIQLSQALSDITGLTGQRIIRAIVAGERDPQQLAALRNYRCKKEADEIAMALTGTWREEHLFVLTQALALFDFYTTQLSACDAQIERVFSVIKPRFETAGEAAEPAPLSTPPRRKPHSHSKNAPEVNTRAHLLRITGVDLVAVHGMSDSIAQTIVSEIGTDMSKWPDAKHFCSWLGLAPKNDISGGKVLKSRTMKNRNRAAQAFRMAAQSVTRSHCAFGAFYRRLKGRLGPAQALVATAHKIARTVYHMLKQRVPYHDIGAAEYTQRFRERELQYLQKKAAKLGYTLSCASSITQ

SEQ ID NO: 84101 - protein, 347 aa, unidentified
MNATRKAVVGVDTAKSVFQVYTVEQETGEVINKPLKRAQFLQWFANRSPCLVGMEACGGSQHWARQLQKLGHEVKLMSGKMVKGFVCGNKNDAADARAIYMAATQREVRSVAVKSESQQAILAMHRIRQQLVKVRTAQINELRGLLGEYGEVFGLGRKAFDTGIKGALGRLAERLPGPLIDTLRDQWNELARLDERIARIEASLRAWMRQERGAMAISAIPGVGLLTATAAVAAMGDAKTFRSGREFAAWIGLVPGQTGSGGKVRLLGMSKRGDTYLRTLLIHGARAVLQHAKTPSAWLQQLGQRRPPNVVIVALANKIARTIWAVLAHDQAYDKDHVSMRPFAAAT

SEQ ID NO: 84102 - protein, 339 aa, unidentified
MTIMRIGLDLAKNVFDVHGVDEQEKPALRKTIKRCDLLPFFVHLPPCIVAMESCGSAHYWARELIKLGHKVKLIAPQFVAPYRKGNKNDQNDAQAICEAASRPDMRFVAIKNEEQQAILAMHRIRALLVSERTALVNQIRGLLMEFGEVLPLGREKLRMLLPELLEDAENGLPHLLRTLIHRQYRRLCDLDREIAQYERDITIQVQQDEDARRLMEIEGVGPLTASALLASVGDIGQFKNARQFTAWLGLVPRQWSSGGKNRLGRITKRGDVYLRTLLVHGARAVMRFVEKKSDRKSLWVKAVKERRGFNKAAVALAAKHARIIWSILSNGTAYRVMPA

SEQ ID NO: 84103 - protein, 447 aa, unidentified
MKKVFIGIDVGKFKNSISIIDTEGNPIIKKGLSIENDYYGFARLEEQIDLIINNYGFTYNDCIAGVESTGHYWFNLRDYLKDIGIETVMIKTDSVKHRRALEEGQKGKNDTLDARVIASCLRNGNYVYIRENERELRALQKLTRMRNDISDELVALKNKIHRCIDICNPVFFKIFENLNSKTGVALIKLYPSPEDIINVDLDNIKKELGEIVDKPNMRMVSLYKEECEIWSRLIKEPSYAEKVEMIAYIDKFLLQNESKEHLDKQIKEIAKNIIPLYSEFEKIRGIPLIQLISVLSEIGDIRNFKNTRAILAFLGLSLKGNASGKYVGERRINKAGSRIVRKHLFNIMDSLVKHNEYFRIAYCYYKSYNHKNPTKKRSMQIAVMCKFVRVMYGMLKHNTNFDYKEMLKGYYFGDCNMKVFKEEFEGEKRTKKIEKYKLGYSIFINYS

SEQ ID NO: 84104 - protein, 343 aa, unidentified
MDHFAGLDVSVKDTSVCIVDDAGRIIREVKVASEPDALLAVLTNRIYHFKRIGLEAGPLSQWLFSALAEAELPVICVETRHMRAVLKAQINKTDRNDARGIAQMMRVGLYRPVHVKTLRSQKLRMLLTHRKLLQSKAIAVDNDLRGTLRNFGLKVGMVGTAKFEARIRELVENLPDLAVLVEPLLVVRRVLREQIGILHRRLLAIVRGDEVCRRLMTVPGVGPVVALTYRTTVDVPARFRKSKSVGAVFGLTCSRDQSGERDRPGAISRCGDEMMRAMLYEAAQSMLGRSSRWSWLKAWAMQIAKRRGMKRAIVALARRLAVIMHRIWVDGTEFCWTRDAAAA

SEQ ID NO: 84105 - protein, 421 aa, unidentified
MKRVSQEDFAAFVGLDWADATHDICVQAAGTERREFLVLEHSPEAIEAWVRTLRARFNGQPIAVCLELNQGPIVAALRKYDFLVLFPVNPLTLARYREAFTPSRAKDDPTDAELQVEFLLKHRDKLTPLTPQSPTMRALAQLVEHRRRLVGDKVRLTNRLTSALTNYFPHVLQWFDEKDTAIFGDFLSHWPTLKAVQLARRTTLERFFRVHHVRSADVIQTRIKAIKSAVALTTDAGVITPNALLLQALVAQLRVTLQAIADFDTAIAQRAQDHPDFPLFDALPGAGAVFAPRLLVAFGEQRERYASAEELQKYAGIAPVTERSGKKAWVHWRLQCPKFLRQTFVEWAAESIRHSFWAQVSYQQQRDKGKAHQAAVRALAFKWIRILYRCWQERTPYDEAVYLQALQRRSAPLLHNLAQGV

SEQ ID NO: 84106 - protein, 403 aa, unidentified
MEVLYPRCSGLDVHKDSVVACVRCVSPPGHQEVRSFQTTTTGLLALADWLTSHGCTHVAMEATGVYWKPVWHVLEGDFELVLANAQHIRNVPGRKTDVNDATWIADLLAHGLIRSSFVPPARIQELRDLTRTRKQLVREISQHSLRIQKVLEDANIKVASVLSDILGRSGRAMLAAIIAGENSPERLADLAQGTARKKTAELVEALRGRVTDHHREMLTLHLGLIEALESALQKVDAAVGKALAPIQARAQLLTTMPGVSDIVAQVVVAEIGVDMSRFPSARHAVSWAGLCPRNDESAGKRRSTRVRKSGTWLKTTLVTAAWAAVRVKDSYLRVQFLRIKSRRGPKKAILAVAASMLTAAYYMLRDGVEYRDLGPSHFDRHDRAKTIHRLVKRLKDLGYGVEL

SEQ ID NO: 84107 - protein, 417 aa, unidentified
MSRAVSKRLARIVPGTLFVGVDLSLDRNVAVVLDGSARRLDRLGFPNDADGYDYFHRRLTTVQEREEAPAVLVAMEPTNYFWKLLAADLERRQVPYRMVNPYTVKKHREGDQLSRAKNDYRDAFTIAEMLRSGKFTETQLLHDGYADLRQYVVLRDRLQGDIRRQKSLIRNIAGQLFPELAHEFADFTCLTGMAMLRRHAVPATIRNLSRPAFIAAVRADFRGERLPVSKLRRAYALAERSVGVQHGTEALQDALPCHIETLEMLQLQIERVEVSLKSTFFALPEAPYLLSAGIGIVTAAIILAEIGDPSRYSNANQLIKLAGTQPVPNTSGRKTRSKTPMSKKGRPRLRTALYFAVMRLIQNDDNFARIYRRFRTREENPLTRMQALGALMNKLLRILWALMKHQRFYDPAYEMSS

SEQ ID NO: 84108 - protein, 456 aa, unidentified
MPKQSKSTIPAVHAKPTQRKHAAGIDIGATSIYVAVPVDRDPQPVRSFQTFTEDLHRLADWLQRCRIKTVAMESTGVFWVPLFQILEQRGFEVCLVNAHHVKNVPGRKTDVADCQWLQYLHSVGLLQASFRPAQQVCALRSLLRHRDSLVQTASTYAQRIQKALDQMNLQLHHVISDITGVSGITILDAILDGERDPFKLASLRDYRIKATEETVAKSLVGDYRPEHLFTLRQSLDAWRYHRKLVAECDDEVQRHLVQFASKVDPKQKPLPRPKKVSSSKVYSSHPDYDLRTEHYRILGVDLTEVPGINTLLVHTLLAEVGPDLSKFRSAAAFASWLGLCPDNRISGGKILSVRTRHVQNRAALALRIAAHTLHHNQSVLGHFYRRMRAKLGAPKAITPTAHKLARILYHLITTGQPYQESIFEERETQHQQRTLLSLHARARALGYQLIPATPPT

SEQ ID NO: 84109 - protein, 355 aa, unidentified
MDDSKYIGMDVHQASIVAVVLDASGKVVMESILETRAETVLQFILGLRGTLWVTFEEGISAAWLHDLLKPHVARVVVCDPRKNALLKSGNKNDQIDAHKLAELLRAGLLSPVYHGESQERLLKELARSYQALTQDTTRVMNRLKAIYRGRAIRCAGRKVYRARHRGDWLKQLHETGARRRAERLYEQLDRLQPLRRQARQELVREGRKHPAAADLRTIPFLGPLRTAVLIGIVGTPYRFRTKRQFWAYSGLGIQTRISGEYQLSGGRVQRTKKVLGVRGLNRNHNPELKRVFKSMATEASSRRGPWCDWFRARVKEGVDPALARLTLARKLAAITLAVWKKGRKYDDEALKMQAA

SEQ ID NO: 84110 - protein, 362 aa, unidentified
MTIYRNFIGLDVHARTIVGCAIDVHTGEVVHRRFGYELAEVFAWVRSLPGPVSSTYEAGPTGFGLYRLLMGSGVECVVAAPSKLQRPAGDRVKTDARDAFHLARLLKLDEIVAVAVPTVEEETARDLVRTREDTRQVLMSSRHRLSKLMLRHGYVYTDGAAWTRQHDRWLRSHRDGDLAFQMAFDANYEAVVQTSARRDRLDHAIELMATDSQFTPMVDRLGCLRGIAPLTGLALAVEITDWHRFTGNTIGSFLGLVPSEYSSGQSRQLGGITKTGNSHVRRLLVEAAWQHRRDYRPSAESVMTSRWEKAPAEVKLRGQAGNERLHRQWVRFDLRKKRPVIANVAVARELAGWCWSLAIMDG

SEQ ID NO: 84111 - protein, 349 aa, unidentified
MNATTVAVDLAKNVFELAVADTEWRIIERHRLSRARFARFFIHRPPCQVVMEACGSAHHWARRILAQGHTVRLLPAHYVKPYVARSKTDRADAAALIEAARSPRIREVPIKTLEQQQLQSLHRLRSQWMSTRQRYLSTLRGILREFGIMIALGPSVAKAQIGAALAAADSGIPDGLRSALAEMLQEIAPLEQKILSVERQLTALTREDERVQQLREIPGVGLLTSTALLSSVGDIQRFPSGRHFACWLGLTPSERSSAQRRRLGKISKQGDVYCRTLLVHGARSALLAARRAQRAGKPLDRLRCWALNCERERGHNKATVALANRLARIVWASWKYQRSFDGNRGNQAP

SEQ ID NO: 84112 - protein, 397 aa, unidentified
MLAVGIDISKSKSVAAILNQDGSMHTSPFEFHHTQPELDAFIKYILNSNQSATILMENTGHYHYPVLKAFREAGLPVCMVNAYQIKKFGDMDLRKAKTDKKDAVRIARYALEKSYSLVPYTSMEQKYEDLRFLARQYNQRMLTLKNNKVFLLNLLDETMPGITNILPLTTRAPGTSLSVLFINRFKSYDRIKKMGKSRFLDAFEKIARKSRNRQTKTYGLAIYEAALRNITTRGENEYTLAAQDQCLELVCESQKAADSIILKMQTLAETLPEYAVLRSMAGVGDRLGPLILAEIGDIRRFHSGKALNAYAGNDAPPYQSGTFESHNRHISKRGNAALRKYCFEVMQALKLTRPQNDPVYLFLLKKEQEGKPYNVAKMAGVNKFLRIYYARAMETLK

SEQ ID NO: 84113 - protein, 428 aa, unidentified
MNQEDGSRLEEFRQFRKEVRGSAEYLLVGIDVAKDKHHAYFGTASGKTLLRRLVFENSLAGFGKLLAQAEAMKVQEGLRKIVFGMEPTGNYHKPLGEHLIRCGQGVVLVSGVAAHENRKTLDGGWDANDSRDAANVADLMSQGKCLFYEFPVGALQELRNLLSLKRRLKRMEHSHRVRIRNHLVAKYFPELDRYYEQSESTVLGIVRWCLDPSEIAGMEYEKFVQRVSSVRGRSSQEKRLQTIWKMAVDSVGCEAGPAVDFEAQVMVEGLREIRKRIQEIEEKIQEVCSGFVEYEFLLSIPGFGPDVSSKVLGAIGDPFRFQHGRQVLKMAGLDLSAERSGKSSQSAVPVISKRGKADLRYALYQAAFIASMRDRHFIVYFTNQLRGREREPGIKTKMRVKLAAKLLIMAWTMMKKKEPFNPDYLGLE

SEQ ID NO: 84114 - protein, 347 aa, unidentified
MLIIGCDFHPGFQQVAIFDNRTGEVLEKRLGHRGEAEQFYRSVAQEQVVVGMEACGHYPWFERLLEELRIELWIGDAAKVRASVVRKQKTDRRDAEHLLRLLMENRFPRIWVPSLEERDLRQLLVHRHKQVQQRTRTKNQLQAMALSCGVQKKRKLWNQWGRQELEKLPLLPYAAQRRKQLLEELDGLDAVLVEFDRKVAEQARQRPEAARLMTHPGVGPVTSLAMVLTLGPAERFASAKQVSSYFGLIPSEDSSGGKQRLGKISKQGSSFLRFLLVEAGQTAARYDPQLKRFYRRLATRKNRGVAKVAVARKLATRLYLMLREDWTYAQLCQAVMQVSPSHSVAGE

SEQ ID NO: 84115 - protein, 525 aa, unidentified
MMNRKKGDTAAVRVDRIPISACFGEPVQEFDPRPVPDNIGDTQQLFSLRGSRLRDFHLLHAWLVAERHERRRSMAKQKRRKHRKLDRSLPEMRPNAGGIDIGATEIFVAVPADRDTDSVRSFPTFTQDLHELADWLQRCRVDTVAMESTGVYWIPLFQILEARGIEVHLVNAQHVHHVPGRKSDVVDCQWLQYLHSVGLLKASFRPEHAVCEIRSLMRHRQSLVEMSCVHVQHVHKSLDQMNLQIHHVISDITGVTGLAIVDAIVAGKTNPRELAKLRDHRIKAPIETVTKSLVGDYRPEHIFTLKQSLTAYRHYQQLIADCDREIQQRVETFDTKGGDPPAAAVVDSSTSISTTEPTFDLRRHLERIFGVDLTAIPGFDTLRVQTIFSELGADLSKFPEDDQFCSWLNLCPKDGFSAGRRIRGPKVKTKNRVTQAFRLAAQSLHRNQSYLGDYYRSQRARHGAVKAIKNTAHKLARIFYHLVTTRQPYDESIFATLEAHNRNRRLHKLQSLAKQFGYSLVEANA

SEQ ID NO: 84116 - protein, 343 aa, unidentified
MDIGDLFNHICVLNQDGAVLQTTSIDNTVTGINMFFDDFSSPQKVVVAVETGTHSPWISQLLRARGFKVLVGNARKLRLIWDSTNKNDQRDAEMLARIARFDPDLLSPVHHRSRSAHMDLALLKARDALVRCRTSLINFVRGTSKTAGVRLSSCSAEAFAKSVVEHIPKDLLPAALPCINSIAELTRKIRQFDAQIEILCKESYPETMVLRDIAGVGPVTALGYVLTLEDPSRFKKSRDVGPYLGLTPKRDQSGQSDKPLPITKAGNTYMRRLLVNASQYILGPFGPDCDLRRYGMRIASRGGKVAKRKAVVAVARKLAVMMHHLWKTKTVYEPLYRCLLMAA

SEQ ID NO: 84117 - protein, 335 aa, unidentified
MNQEKYIGMDVHDATISAAVKNAQGKLLMECVLETKAATILEFIQGLRGTLALTFEEGILAAWLHDLLKPHVSRLVVCDPRKNALMRDGNQNDRADARNLAELLRTNQVKAVYHGKHGTRALKELGRSYLTLTKDSTRVMNRIKSVYRSWAIPCGGTSVYSRRHRAEWLAKLVEPAVRIRAEHLYQQLDSLEPVRQAARGELLRESRKHAAVNLLRQIPSIGPIRSALLVAILQTPHRFRTKRQLWAYGGFAVQTYDSGEYRMVRGKLQRNRERITVRGLNRNHNHDLKNLLKGRPSPPSNVPGHCRIFMLPWWRRGCGPAWLVSLWHARLPPSL

SEQ ID NO: 84118 - protein, 309 aa, unidentified
MTAVGIDVGKMGLDVAIDGVAGVARFANNVAGIRKLLGRLEGVSDARIVVEATGGYEDALLEACCDAGLWVSRINPRQARDFARATGELAKTDAIDARLLCLLARLFVDRLRRHEAPAPWQRELRDWLRRRGQVVTTLQAQKQQTALTSPAIRKLIARTVAALKRELAAIDRAIQALLKAHTTPALSSSKGMGPIFQATSLALLPELGTLSRRQIAKLVGVAPMNRDSGQMQGKRRIRGGRAPVRVALYMATLSAVRWDPTMRAHYQQLRARGKLGKVALVACMRKLLTIVNARRRDELRFAGEGSIAA

SEQ ID NO: 84119 - protein, 357 aa, unidentified
MVAVAGGRPVAPGAYEPVGEYGAPPVGSVIPNGRKGRSASPHVQGWEANRMFIGIDVSKTRLDVHVRPNGEAFAVDRDGDGIEQLIARLQALSPELIVLEATGGFETVVAAGLSAAGLPLAVVNPRQIRDFARATGRLAKTDPLDAAVIAHFAEAVQPEVRPIASEEARTLGEFVARRRQLLEMMTAERNRRRQLTSQRLIKGVDRVLATLQAQLTELEGDIDIAIRGTPAWREKEDLLTSVPGIGPKIARTMIAELPELGALTRQQIAALAGVAPFNRDSGTWRGRRSIAGGRAPVRTALYMSILVTIRRDLPLAVTYRRLRNAGKPAKVAIVACMRKLITILNAILRDKQPWQMA

SEQ ID NO: 84120 - protein, 385 aa, unidentified
MLFLGIDQHARQITISLRDETGDVLLARQVSTQPEKIQAFFQQLTRERLQSGEQFVAILEVCGFNDWLIRMLYDYRCQKVILIQPEERKKRKTDRRDAAALSELLWANRARLVHGKPVRGVRQVDIASTTDQENRRLTTLRKHAAIARTRLVNKVRQILRRHNLQWEMPTKRFPTLAAVAWLEKLVLPEIDRLEMDHLLADLKQVQKRIEDLEKVIGLRCAGSEDATLLATIPGVAAFTATSLACRIGRIERFPRSHSLANYWGLTPGCRNSGDNDQRLGRITKAGSTMARFLLAQVTHKVLRKDARLRQWYKRVKRRRGSTIARVAVMRKLATIIWMMASYCTSCHIGFTQRASLLAMLSSVLAPNFRSCQLGRVGLVARFVVA

SEQ ID NO: 84121 - protein, 412 aa, unidentified
MDTLVQRCAGLDVHKASIVACIRLAGPNGSVRKEVRTFTTMTADLEALAGWMAGKGVTHVAMESTGVYWKPVFNILEGRFQVWLVNARHIKQVPGRKTDVKDCEWIAQLLQYGLLRPSYIPELVIRQLRDLTRQRSQLVAEQTRVANRIQKVLEDANIKLAAVASDVLGVSGRAILDALITGEATAEMMARLARGRLKAKIPQLEQALCGHVTDHHRFLLRLYLDQLQGTDDLIARLGQRIEELMAPFQGALQRLMTIPGVDRRTAQSLIAELGHDLTAFPDADHLSSWAGMCPGNHQTAGKNQSGRTAKGNRWLRQTLTQSAWAASHTKNTYLAAQFHRLAARRGKKRALVATGHTLLVIVYHVIKHGMVYQELGGDYLERLNPQRMTRYHVKRLERLGHKVTLEPQPDAA

SEQ ID NO: 84122 - protein, 342 aa, unidentified
MEHYAGIDVSLEYSSLCVVDTCGEIVREGKVVSEPEALIGWFGALGLSVARIGLEAGPLSQWLYARMQQAGLAVELLETRHVRTALQTMPVKSDRNDARGIAQLMRLGWFRPVHCKSIGAQEMRAVLTARKLVQSKLRDVENSVRGILRGFGLKVGKTTSRGFAPRIQELVASHPRLEMIADALLSVHAVLLRQLQAFEKQVRAMARADANARLLMSAPAVGPIVALTYASAIDDPRRFKSSKRAGAHFGLTPRKYQSGQTDYTGRISKMGDATVRTALYEAAHIMLIKPIKGCAQLKSWAMRIARRGGMKKAKVALARKLAVILHRMLANGTPFNAAMAAV

SEQ ID NO: 84123 - protein, 346 aa, unidentified
MANPVVGVDLSKSVFQLSVADAKHHVIDRKRLSRAQFHRFLAQSTPARLVMEGCGTSNYWGRTAQLHGHEVKLLHAKYVKAYVRRTKTDAADADALILADRDTSLHPIPIKSEELQALQGLHRIREQWKRARVARICEARALLGEFGIFASVGVRGIGKKLTLATEQAPVLLQPTLLDLIQEIEDLEQRLKRVEQALAAYAQTNPEAQTLLSIQGIGVVVATAFVARVPSIHMFKRGRSFSSWLGFTCREYSSGQTRRLSRITKQGDRYLRTMLVHGARAALMAARRKAANGKSLTRLETWAVNTQARVGHNKATVALANKMARIMWAVWTRHEIFNGDDALRFAA

SEQ ID NO: 84124 - protein, 442 aa, unidentified
MLPTLHAHAAGIDAGSTHFFVAVPEGTVTSFESFTADLYRLRDHLKVHGVTTVAMEATGVYWLALHEVLEAAGLEVCVVNGAHVKNVPGRKSDVQDCQWLQQLHAHGLLRKSFVPPGQIRALRSYTRLRDDHIRTGAMYVHLMQKALDQLNVKLHTVISQINGVSGLAVVRAILKGERDAAKLAQLCDERILKTKRAAVERSLLGLWKEEHLFALKQALAGWEFCEAHVIECDAAITAQLAALTRDLPKPSAPGAPGPKKKNHARHHVPQVPELHESLLTLSGGRDVAQLPGFTPANWLKLLSEVGTDLTRWPNEKAFCAWLGLSPGKNQSGKTKRRARRRAKTTAGQIFRLAAHSIAKSKYLALGGFYRRLKARTNAAVANVATARKLAVFFYYAMREGMAYVERGLEAYEASYRKHQERFLQKRAAELGFALMPTPDQTI

SEQ ID NO: 84125 - protein, 318 aa, unidentified
MENISQWVGIDISKATLDVYLRPLGKAMKVANTKEDISKLVETLKSYTVNLIVLEATGGLETELVIQLQAADLPVALINPRQGRDFAKATGKLAKTDAIDAQILAHFGEAMQPQILAVESEESRQLGDLISRRRQLVEMRTAEKNRRERARGKALVDIEAHLEYLDNCLEKLNQEIEELTQANQQWLEKVNLLKTVPGIGQVISTTLVSDLPELGQLTAKQISRLVGVAPINHDSGQHKGKRMIQGGRAQIRATLYMGAVVAMRHNPVIKTFYERLVGRGKSKKLALTACVRKILVILNAMVRQNQPWQLADNLPPCS

SEQ ID NO: 84126 - protein, 342 aa, unidentified
MSYLGVDLHTNSFTVCRRTQQGKNSIRTFQISRISDFRKTLRKRDLLAVEATGNTAWFVSQIRDRVKKVTVVNPFQFEVVRRSVKKTDKNDSKTLALFLSKDMLPEARMKTKENAQLHSLATTRDKLVKQRTALINKVHNVLNSYGIKFKKESLGSEKGLKSVWAYDWDVIVRIELEVLVEQIRSLNKSIKTLDKEMSDHGQKLKGHESLTSIKGIADRSATVLLSVIGDVNDFADENKLAAYFGIVPRVSDSNETVRHGRITKHGSKLGRTTLVQCTLVAKRYSPYLHQYYERIKSHRGSGKAIIATARKFLAIIYNTLKNEWIFEDFPNFVLASSCVKKQ

SEQ ID NO: 84127 - protein, 481 aa, unidentified
MAITRPSGLNRKQRRELARRLQAADPGLEVMHPHAAGIDVGNSTHYVAVRPDRDPDPVRRFDCFTADLHRLADWLQHCGVTTVALQSTGVYWIPIYEILEARGFEVYLVNARHTKNLPGRKTDVQESQWLLKLHTYGLLRNSFHPSVEIRAVRTYWRQRGDHVRAVSTCIQRMQKVLTQMNIQLANVISDLSGWTGQRIVRAILAGERDPATLAALSHPGIHATHAEIAKSLEGTWQPDLLFVLKQEVDLYDTYQLRIAECDQELERHLKGFADKTPDPPADPEPSPTLAPSDARAHQHHPKRRRKAGSHAPQFDLGRELHRISGVDLTRIDGIDVGVAQTVISEVGLDMSRWEDEDHFASWLGLCPDNRITGGKVLRRGTRHVINRAATALRLGASTLLRSQSYLGAQYRRFRGKLGAPKAITAMAHKLAVLVYRMLRWGHAYVDKGLQYYEERHRQQQIHLLKKRAAKLGLQIVEPQVA

SEQ ID NO: 84128 - protein, 339 aa, unidentified
MRLYVGIDLHSNNSVLVILDENDKVVYERRHPNDLALILEQLAPHRENIQAIAIESTFNWYWLVDGLMEAGYTVKLVNTVAVKTYDGLKYSSDEHDARHLAHLLRLGILPTGHIYPKRERAVRDLLRKRAQLVHNHTMHILSIQNLVIRNSGKGIAASAIAKLDDAAIGRICGGDAMLVLAIKSSLVVLRCLKKQIAELERVILKQARLKPEFRNLLTVDGIGEMLGMAIMYEAGGMERFARVGQFASYARCVGSSRWSNGKKKGEGNRKNGNKYLAWAFIEAAHYAVRYNENIRRFHQRKAAKTNKAVAAKAVAHKLARACYHVLKDQAPFDAARAFA

SEQ ID NO: 84129 - protein, 348 aa, unidentified
MKHIGMDVHSTTTNVVVINDAGKRLLSHKVATTAKDLKEVISSIPGDKRVAVEESQMADWVVRELAPLVKEIIRCQPQHNRLISRSEDKYDERDAESLAVLLRLNELKPVHHAAWGFRLFREAVRSYWLRSRDLSRAKNRLKAFFLYNGIHEPSKRIYTQRHREEYRERLRQRSGNLELAESLWEDTRYCRLKKAHHVKLMREAGKPWKAEIARVQSIPGLGVIGAHTLVAYLERGYRFGNKRQAWSYAGLGLRRKESAQRGYRKASRCGNRYVKNVILTAAANIAAGRRQHALWEMWRQGMVAGVDARRMRRNVGRKIVVIAQHLLRSGEEYADDQMTASTTGSRQQ

SEQ ID NO: 84130 - protein, 319 aa, unidentified
MAQGNLVVVGIDVAKDKVDTCIRSLSLRQIFPATPQGQRKLVAWLRKHQVNKAVMEASGGYERVWAKVLREASIEVRIVDPKRVRGFALSAGRLAKNDTIDAEMIAWFADTFRDAPGQKHDAAHEELQALVKARLSLIDFRMRLVGRREHAAPGLVRNAHARILRSLASEIARLEAAICAKIKSMPDFAERAEIIESVPGFAETSSANLVAGMPELGQVSDEIAAALIGAAPYDDDSGRRRGERHIKGGRRWVRNAIYMPCVGAATQNNPVLKAYYQRLIAKGKEPKIAIIACMRKLIVILNTMIARRQKWDPGRYALS

SEQ ID NO: 84131 - protein, 344 aa, unidentified
MAIVGGLDIHRRQITYDWIDTTTGETGRGQLSPATRLELRAWLAQFDGPQADFALEATTGWRFVAEELERAGFRAHLAEPADTRALRGPKRRAKTDRTDAHHLRELLRAGTLPGSWMPPPHIADARTQVRLRRALVGERTGWYQRIHAILFHHGLPERSQLLTADGRAWLARIELPPVARQAVDLALRMIDHLEVELDTLDTQLARIARHQPGCTALMGRYGIGWLTAVAIWAEFGDVRRFANSRQAVRFTGLDITISESDGKRARGHLARQGSPVLRWALHEAAMCAARPSSPDHAYYLQVKQRLGGKRAALSVARKLAREAYHTLRELGDQALIPAELPTAA

SEQ ID NO: 84132 - protein, 427 aa, unidentified
MKKIKIDYLSTLFVGIDIGSRTNVISALNFDQDFLIKMVPVANAQGGAEQMEEMVAEVLSQHHEFKTVIIGLESTGFYGVHIANYLSTSEKLAPFSTKVYCLNPNEVKQYKKSFNSLDKNDGIDSFVIADFARVGRIHTEPWRGAQYLALQRLTRHRLHITECIAREKTYMLNNIFLKFSEFAMLGKDEHPFSDKYGATAEAVLTDYLSTEDIVDASVDDLVAFISSKSRGRISDPEQTTYLLQKAAQDSYRLDQCLYEPLTVSIGCSFNCISAFEKELKAINGAIHRAVKGLNPTEYQILTSVPGIGPVYASGILAELGTIKCFKSNDALAKYCGIVWKENQSGEFQAEDTPMNKAGNRYLRYYMIEAAGSVIQHCPEYKAFYDKKFAEVRTHQHKRALALTSRKLIRMLFGLLANGKLYSVEKSR

SEQ ID NO: 84133 - protein, 455 aa, unidentified
MANRIMGITVKIGKDTTKLQTGFLYNSKCRKNKKIEQVKETTMIVGIDVGSEKHYFRAFNWRGIELTRKPIAFSNSMEGFNSFYNTIVELMQKSELEEALVGIEPTGHYWFALGQFMGEKDIKFVMVNPHHVHKTKELDDNSPSKNDRKDPRVIAGLVRDGRYFYSYMPTGVYAELRNASNRRFVLVEEQTRAKNRLQKWIAVYFPEYKGIYTHIDAKGGMLVLKKAPTPEEIVRLGVEGIIKIWKDAKLRGNGHKKAMLILAAAMRSIGLKAGLTEARMEIQDLIEDYELQTKRLERVNDLIKGLCQQVRYADKLLEIKGIGITTVAGFIAEVGDITRFDSTKELQKLAGLELVADSSGKHNGKTKISKRGRKRLRYLLFEAAISVVGKNEEFKEIHRYYTTREKNPLKKMQSLIAVACKLIRVFHAILTKGIRYDASKMLKDIRHPGEQLKAA

SEQ ID NO: 84134 - protein, 418 aa, unidentified
MKVVYPICCGVDVHKTFLVATIITSQGITPHYSKKRFSTFNNSILQFKQWLFDNNCFDVCMESTGKYWVPVSNLLEDNIRITVANPKWVKAVKGNKDDTKDSKWIGDLFRLGLVPGSYIPSKPIRILREYTRYRFKLVCCKSSEKNRFQNAFTVCNVALDAVVSDMFGKSASSITDYLVSSDSFDPVHCSSLLHKSLKKKADTVIESIEGYQMTMEQKERIVMIRSHLEFVQQSIAKLDEKLDKMVAPHESAIALLRTIPGIDRTSAITIISEVGTDMSQFTNSKRLCCWAGLTPSNNESAGKKKSVRITRAGVYLKPALVQVAHAAVKSDKAPYYKIKYERLCKRRGKKRAIIAIARMILTAVYNMLVTGEEWNPSDLYKIDMPQEMLEKQKEKAIRQALKLLISNGVIKAADISVA

SEQ ID NO: 84135 - protein, 351 aa, unidentified
MEEYIAFDSHKRYTWVERQEANTGKTRAYRLEHGAGAIGQALAGCAPGTAVAIEATANWYWIIDEIEQAGCVARLVHPRKAKLMMGLINKTDKLDAHGFNTLQRNGTLPTVWIPPGGLRELRELTRTRLVLVAQRTRWKNRITATLAKWGMPPSAYSDPYGKKARVELEQQLERLPEQTRWATRQMLAQLDSLSEQTRQFEKRLEQLVEVSPMMQWLMTLPGVGVILAATIALEIGEIERFANAERLASYSGTTPRVHSSGDRTRHGRTRPDVNRYLKWAFAEAANSVAVNHRRNPERHVSRLYTRLRASKGHARAVGAVARHLAEAAFHVLQRKEVYRDPSLNPRPEMGV

SEQ ID NO: 84136 - protein, 432 aa, unidentified
MTNVTFPQLIHRGCGIDVHLKVVVATIDGVGIRKETRTFDTFTSCLTEMKEWLLANGITHVAMESTGVYWKPVMRVLEADIPNVWIVNARHIKNVPGHKTDKMDREWICKLFLAGLLKPSYIPPKEQRQLRDLTRYRNKLIQAIAAEKNRMMRVLEDCNIKLSSVVANTSGVTATALIDMLCEGRKLAIEVIESVYHKKLSASPQELLEACTGFVEEHHVYMLQMIRKSIAQTQGLVDELSKRIKEILIKYDNVLELLKEIPGFNTKVVEDLVSEIGLDISAFPFEKHLASWAGICPGNTESAGKKNGRITHGNKQVKAVLTEAAWAATRTKNTFFSERYHRISARRGKKRALIAVAHSQLTAAYLILSTGARYHELGAQYMQAKIEKKRKLYLTAELKKLGYKLVLRKIESNKILRQHYLRPILIGTPIVR

SEQ ID NO: 84137 - protein, 380 aa, unidentified
MCILKANGSKVIQEFSTLTVDVESMRDLMKEHGVEEVGIESTGVYWIPIWRILQGHFDLKLINPYFIKQLPGRKTDVKDSEWIATVVQKGLVRGSYVPGRNIQELRQFERRYVRLCEHSTRIEQEIDRQLHRCNIQITNYASRIGSTSVINVVKAIIAGETTAVKLEKHVHGRIKNKHKEKIAASLTGVISGTDRFIFGQNISEYDLILAQQEECLREMSVFCEKYFEKELLLLCTIPGIQKLSAMIIIAELGVDLRTFATAAALTGWAGLRPRNDESAKKIRSRKTTKGNKYLRRILVQCAWAASRQKSCWLKSKYEQLCIRKSSKKAIIAIARKLLVIIWNVLSKHETYREFVPKIDPKQRLKRIEYYNKRLQELKIV

SEQ ID NO: 84138 - protein, 389 aa, unidentified
MIYVGIDVAKDKHDCCILGSEADKLYPVFTIPNNKTGFDELYEKIFSVTDDKTEIKVGLEATGHYSLNLLGSLIDKGLTTCVINPLHTNLYRKGLSLRKTKTDKVDAGSIAMMLMTDKTLKPYSNTSYHSEELKSLTRYRFDKVHERAKLKTSVARLVNILFPELEKIVPSLHMASVYALLSEFPGASYIAESHLTHLRNVLEIASKGRYGRDMAVTIRDAAKDSIGSVMPAKSMELKHTIHLIEVMTDEIDEIEASIKSIMDTCNSPIMTIPGISYRMGAMILAEIGDFNRFSNADQILAFAGLSPSTYQSGQLDSSYSHMEKRGSRYLRYALFNATKFVCKWDENFGAYLSKKISEGKHYNVAVGHATKKLIRTIYRMELTGEAYRK

SEQ ID NO: 84139 - protein, 353 aa, unidentified
MTKITRAGVDIAKSVFHIHAVDRHDQPKWRAKLKRGEWLEVLCDRLAPGAEVGMEACASSHHWGRELEKRGFRVKLIAAQFVKPYVKSNKNDRVDAEAICEAMGRPGMRFVSIKSVWQQDRQAAHRIREELVGQRTAKANQIRGLAGEYGLIAPVGILHLRRALPEWLEDAENGLTDEFRVLLNDLAEDLRQLDDRVTGLGEWISECVRKDPVAQRLMKLRGIGPLTASALSGALGDGRGFARGREFAASIGLTPRQHSTGGKDRLLGISKRGDAYLRKLLVHGARAVIRHAKNRDDELSGWINELMRRKHANVVAVALANKTARVAWALVYGNMDYDPMQIARRQAVSAITA

SEQ ID NO: 84140 - protein, 326 aa, unidentified
MKKLVIGFDVSKDSLDYCILQGVDRSIESRGVIRNDKKSILKWIKKLGDNHCTVSMEHTGNYGALLASLLTQEGICFYMVNPLDVKMSMGVQRGKTDAVDAYRIAMFTISNAHRLKPYCLPTEKLRKLKVLVTSRERYVKISVQLKNSLRADLILAKTLNMKDLVKEGKKHINNINKTINTLEKQMLEIIRSSQELKESYDKIKRVIGVGPITATKCIIETDNFLSFTNARQFSCYCGLAPFPYQSGSSVKGRTRTHHLRNKALKSILFNAAGSAIQHDPQLKRYYARKVNEGKHKLTVLNAVANKLVLRIFAVVNREEPFVKLSA

SEQ ID NO: 84141 - protein, 417 aa, unidentified
MNSPPETNPIQRYIGIDIHKYYVMIGGQNRHQEWTLRPRQVQMARFRSWAEKNLKPEDEVVVEATSNVWDIYDIVAPLVRKTVVANAYKVRQIAEARVKTDKEDIRRLITLLIADIVPEVWVPPQHVRELRSLISFRWRLTKQITMSKNRLHSVVQRFNLHPPEGGLLTDKNKSWWDRQEFSDLTGFQVERDLEIVEHLEGQKEAIDQKLAELSNTEPWASEVVYLMQIPGFGLIFTMVILSAIGDISRFARPRELVGYAGLGAGVHASGEKYQEKSITKAGRKELRWALVEAAWVAVRSDPYWKAQFIRLKKRMHVNKAIVAIARRLLVSIWHILIKREPYRHFDEETIAYKMLIWSWAMDEKSRDGMTPQQFAKYGLLRLGIGQDLERIVRGGAPRRLASTEEILALKPELVPPR

SEQ ID NO: 84142 - protein, 387 aa, unidentified
MPLAADLPAQTQPVPRPAQVLYVSLELSPSKWLVTSLLSGTGRMSKHLVIGGDGNALLRLLAALRTRAEQRAGAPVVIVAIQEAGLDGFSVHRLLEANSVESWVVDPASVAVPRRMRRAKSDAIDGETLLRTLLAFRRGEPRVCSMVHPPSVEEEDRRRITRERRTLLRERIEHTNRIKGLLMGQGVTGYDPLGKDRWARLESLETRDGHALPPRLKAEIGREIERLELLARQIRQVEAERDALAATVPEVAASPAALLLRLKGVGPEAATLLWLEGLFRTFANRRQLAAYAGLAPTPWLSGRIRREQGISKAGNPRLRTAMIELAWLWLRHQPESALSRWFGERVRAGGGRNRRTTIVALARKLLVALWRYLAHGQVPDGAVLKPS

SEQ ID NO: 84143 - protein, 335 aa, unidentified
MALYCGIDLHATNHLVVVIDDEDRRVLERRLANDVSVTVDALGPYRDQLAGIAVESTFNWYWLIDGLEDAGFVACLANPAAIKQYEGLKHTDDPYDAFFLAHLMRLGILPTGYIYPREQRGVRDLLRRRLSMVQMATRLLLAVQSQVWRSTGINISNSRIRRPDFELPLKPGPVHEGAVAQWRLFQQTQAEIHGLERLALDLYRGEDNYQLLQTVKGIGRILGLTIGLETGSISRFRKAGNYASYCRCVSSQRISNGKKKGENNRKAGNRYLSWAFSEAAHFAVRFEPKVQRFYERKRQKCNGIVAIRAVAHKLSRAVFHMLKHHEPFDVDRAFG

SEQ ID NO: 84144 - protein, 309 aa, unidentified
MFTCAGIDVSKDTLQIELDPQGMGAVFPNDINDFSRMVEWLKRHQVNRALLEATGGYERRAMKALQAAGFEVLRVNPCRAKSFARAMGLHAKTDPIDARLLAQFAAVIQSPESRITNAEQDNLRALVQQRENFVQQRDDDKRRLKTTCSEIVKPALQSHIDYLRKAIKSIEKLMGQSAEQLDSKKVARLCSVKGIGLVTAASLMSYLPELGEVGRHEIAALAGVAPYNDDSGKHKGKRHISGGRFAVRRSLYMASWIVIRYQPEFNARYKALRDKGKCAKVALIACMRVLLIRLNAMIRDGSEWKEHVA

SEQ ID NO: 84145 - protein, 332 aa, unidentified
MMAQNEVVVVGIDVAKDKVDACIRSVSQRQTFPSTAEGRRALIRWLRKHKVGKAAMEASGGYERDWAKALREAGLEVLVVDPKRVRSFAKSAGRLAKNDPIDAEMIAWFAETFAEAKSQAHDAAREKLVQIVNARQSLLDMQTSLQNRGEHSTLEVVQKMQERLLKKIASEVAKLEVAIAAQVKATPHFVELAEIIESVPGLGKATSAGLIAAMPELGQASDNVAAALLGVAPYDDDSGQRRGNRHIKGGRRKIRNLFYMACLGAATRHNPVLKAFYDRLVAKGKEKKVALTACMRKLICILNTMIARRQKWDVTRHKASDPARPLPSACPA

SEQ ID NO: 84146 - protein, 333 aa, unidentified
MDIAKHIFQAHGADGSGAVIFRKKLRRAQVLAFFAAQPPCIVAMEACGGAHHWGREISRLGHAVRLIPPAYVKPFVKRQKNEAADAEAICEAAQRPTMRFVKVKSEAEQAEALVFRTRDLLVQQRTQVINAVRGHLSEFGIVVAKGAQNSGLLAAQVEEPASGLPEPVRGMLGILIEELRRLNERIAELDREVMRRAKANATARRLMTIPGIGPVTAMALVALAPAAATFKRGRDFAAWLGLTPQQRSSGGKERLGRITKQGERMLRRLLIIGASAVARWAARNGAAPGSWLERMLSRKPPMLVRVALANKMARTVWALLAHGGVYQAPAAAA

SEQ ID NO: 84147 - protein, 456 aa, unidentified
MPNYYFGIDVSKGYADFIMLDANKHVVEPNFRLDDTFAGHNALFRFLTQFFTAHDQATVFAAVESTGGYENNWYQTLHKFQQQFHLQVARVNPKGVNHNSKAGLNRIITDKLSAKNIAEYLITHAEKVMYQQQDYYYALRRKWKFIKSLTKEKTKYLNQLETMLYESNPELLVYCKNGVRQWLLKLLQQFPTAQALSQASVDTIAKIPYISKARAKKLLNSATHSVASMNDAMSEDSIKTIATRIVELQKLIRQQVAFMAEHFPTEELNLIKSFKSIGEFSAIGLLIEIGTIQRFPSVKHLASYFGLHPVFKTSGDGTRGMRMSKQGRKEPRAILFMVTLTAIHQNPLIKNLYINQLKKGKCKMDAIGVCMHKILRIIYGMLKNKTQFDPAIDQQYQNQQLTKKEDGQINKNRRYQQPDAQAPISRKQSMKRKEQERSQNEQVAMNGIAFPPLSLN

SEQ ID NO: 84148 - protein, 420 aa, unidentified
MRNAGIHANSLLEVRRMYNAVGIDVSKGKSTVAVLQPGGTVIRKPFDVSHTSQNLNELADYLSSLDGTTKIVMECTGRYHEPMIKALSEAGLFISIVNPHLIKNFGNNSLRKVKSDPADARKIARYTLDNWTELRQYSGMDNTRTQLKTLNSQFSFFMKQKVAAKANLIALLDNTYPGVNKLFDSPTREDGSEKWVDYAYSFWHADCVRKIGLKAFTERYMSFCKKHHYIFQQDKPEKLFNASKELVAIFPKEKTYKLLIQQSIQQLNLASEHVERLRREMNELASTLPEYSTVMGIYGVGKTYGPQLIAEIGDVSRFTHREALTAFAGVDPGVDESGQHKSKSNRASKVGSARLRKTLFQIMTTLLQNAPEADPVYRFLDKKRSQGKPYYVYMTAGANKFLRIYYGKVKECLRNLEQTE

SEQ ID NO: 84149 - protein, 376 aa, unidentified
MITCFIGIDAHTTNYTLSTAIDAEDKPFNTCKYAPKLTYILKYANALCKKYNLKKEDILLGYEAGCLGFKLQRDLNENGFNCVVMAPSTIPGTAINRRKKTKNDIRDAEAIAKALRNDDYSSVATPDEEDEAIREFIRAREDVRMELKRCKQHIMAFCNRHGQHYEETGWTQKHMKWLNNLAFSQPVLKETLKSLLLEYEYLTEKLEEKDRRIEEFAQMDKYRESVHKLTCFKGIKTLTALAVIVEIGDFARFMKAKNFVAYLGLSVGEQSSGNDHNQTGITKQGNRFIRKLLTEAAQCFSRATSKKSKELKKRQEGNVEEVIAYADKANERLRKRYHHLVIHNMKSPNKAKCAITRELACFIWGMMTDNIHTVLV

SEQ ID NO: 84150 - protein, 371 aa, unidentified
MADYREAFIGIDVAKLKNAIAVAESGREGEVRFWSEVDASDTSMRRIIQRIAAKFDRVHFCYEAGPTGYGLHRLIRSLGHECVVVAPSLIPRKPGDRVKTNRRDALALARLLRAGELTAVWVPDEGHEAMRDLVRARAAAVETLRVHRQQISAFMLKHSRIYPRKKGWTMRYLRWLQEQQFDHPAHQIALQEMVEAVRVSKERVERLEKVIEEFVPTWSLAPVIRALQTLRGVDLIVAVTFATEVGDVSRFESPRQLMGYLGLVPGERSTGETVRRGGITKAGNGRVRHMLVESAWTYRHPPKVGTRKLYLMEQAPSKVREIAWKAQSRLTSRYRMLATRGKRTTVVCTAIARELTGFMWAVAREAQAIKS

SEQ ID NO: 84151 - protein, 333 aa, unidentified
MGQEYVGIDLHKRRSVIVQVGEAGQRGYTKRVENSPTALVDAIAGAELPEVVLEATCGWYWAYDSLVDAGARVHLANPSGLNWGQRRVKNDERDAQDLADMLRLGRLPEAWPAPQKARELRELVRYRAKLVCVRSGMRSQVQGVLTKCGIVISRSKLCGAKSDATVEALGLSGPYKLRVTSLRALITAMGAEISALDDEIAMWLAGDVGYRAILAIKGIGPVLGAVFVAEIGDVGRFASPDRLCSWAGLTPKHRESDLSVHRGRITKQGSRLVRWAAVEAVSRARDTSVAGLYARVAARRGANVARVAAARKLLSLVYYGLRDGEVRCLAKVS

SEQ ID NO: 84152 - protein, 388 aa, unidentified
MQFAADRLEAPTAIRTDLGAIFISLELSRSSWVVTSLSPGGGEKMSKHTVRGGDVAGLLKRFAQLREKAKGRTGKVFPLIVIQEAGLDGFWIDRVVQNEGIESHVVDPASIATSRRRRRAKTDGIDGEALVRALLAYKRGEPRVCSMVRLPTPEDEDRRRLCRERKVLIAERVKHVNRIKGLLFSQGVSGYEPLRRDRRERLDALQTGDGRPLPPHLKAQVRRELDRLELLLAQIKAVEAERDALLAVEQTTAPVPPAMLLGVKGIGPEFAAVLWSEGLSRPFENRRQIAAYAGLAPTPWQSGSVDREQGISQSGNPRLRTTMVQLAWLWLRHQPDSALALWFHDRVKRNGGRLRKTTIVALARKLLVALWKYVTAGVVIEGAVMKTA

SEQ ID NO: 84153 - protein, 387 aa, unidentified
MYFVGIDISKFKHDCAIVDELGNVITPSWSFQNDCEGFSLLRELLNALDGEKKIGLEATGHYGQNLKLFLENSDFSFMEFNPLLINRFVRSKSLRKTKTDSIDALMIAQYLMTVEYKPYPPSFYTFEKLKSLTRFRDSLIRQRSRQLVELTNILDKVFPEFKPFFKGRFSATALYILSHYASPEKISNMNSKSYEPLRRLSRGRFSMVDFVELKTLARNTVGSTCDYLLQEMEITIDIYNQLQSKVEEIELQINDCVLGLAPPMLTIPGIGVASAAVILSEFGDLSKFCSPSKLLSFAGLEPGYFQSGTSESTGKMVKHGSSHLRYAVMNCAQTVVNNEPTFAAYYAKKRAEGKGHRVALTHVAKKLLRVIYTLQTKELSYNPDFVR

SEQ ID NO: 84154 - protein, 324 aa, unidentified
MHYLGIDVSKATLDVSDASGDSRLSSANSRAGVRKLIKWAQDKHEDKLQFVIEPTSTYHHVLLDELSNSDIAFTVINPARTKAYSNSLGKRAKTDRVDAQLLASLGQTQQIAPSHQPERSQEQIKSLRRHRESIEQQIRSLRNQIGSVTCSPWADPEVLRSLRSTIRHLEKQTVSADRRLEQLIDEDETYSTTSSLLQTIPGIGPKTAQLLISEMPPAWQCSTSRAWVAFAGVCPQPFQSGTSSYSRLSRMGSRRVRSGMYIAAVVSIKSNPAIAELVARLKERGKSGKLVVMAAMNKLIRICYGVIKSRRPFDPTLNVAPRNT

SEQ ID NO: 84155 - protein, 365 aa, unidentified
MKNNLKVEQQMIAAPMGNSTIGMDLGDRWSRYCVVDAVGTIGKEDRVRTTSEALEECLGRIPSTRIVIETGMHSPWVSRLLEKLGHQVIVANARKVRLIYESNQKNDRLDARMLAKLGRVDVSLLAPVQHRSAEAQTDLVVARGRDALVAARTQLINAVRGVVKSTGARLPAGTTAAFATKVAPLIPATLKSALAPLLKSIESLSEQIQHCDHRVEELADKKYPQTKLLRQVKGVGPLISLAYVLTLEDPTRFRRSRSVGSYLGLQPKQSQSGDSEPQLGITKAGNHFLRRLLVQAAQYILGPLAPDSGLRRWGLELAKRDGKNSKKRAVVAVARKLAVLLHKLWVSGEVYDPLYGMTPVSAPTT

SEQ ID NO: 84156 - protein, 349 aa, unidentified
MTTQRLSYVGQSVYVGVDVHKDTYAVTCVCNKQIVKTATAKADPAGLTASLSQWFPGARLYTAYEAGFSAFVLHRALTKAGIMNIVVNPASIAVAANDKVKTDRRDSKKLALDLSDGRLQGIYVPTEDEELARLLPRTRAQIVEHRATIARQIKAKLHQFGLIAPASRRLISNRYVREIDAWPLPPDLRVSLTFLAEQWRFATRQLIEMRRLLREQAKAHPAIEQVYRSVPGIGEVVARTLATALGDMTRFANERALCSYTGLTPSAYASGPSVRRGHISRQGSSRVRHLLIETAWRALPRDAVLKEIFDRIAATRGKKRAIVAIARRLTGRIRACFRQGTTYAVGTYA

SEQ ID NO: 84157 - protein, 353 aa, unidentified
MITIGVDAHKRVHVALALDEAGRELGQWRGPNSTVGWQALVQWVLAFGGDRQWGIEGAWGYGRGLAQHLVAAGETVYEVNARWTASGRRSARRPGKNDRLDARAVALLVRQEAPTLPQVQAEDETAVLDLLTTEREQAISEATRLRNQIHALLLQLDPEYQVHLPMLKSRASLAALETYIAPGGGPLQLERAASVRRLAQRLRLALTQAEELASRIRDSAAEDFSPLTRLCGVNLLTAGTLAGVLGPGRRFATDAQLAAYAGVAPLEASSAGLVRHRLNRGGNRRLNAILYRIALTQAHHSSEARAYLDRRVAEGKTRREAIRALKRFIIRAIWRLWQECRSVSNTSLEVRAA

SEQ ID NO: 84158 - protein, 315 aa, unidentified
MAQTNITTAGIDTSKAKLDIAVHGRTERWQVANALPGWRTLAANLAKAGVTRVGIEATGGYERGVVEHLRAAGFTVLILQPLQVKAFGQVHLRRAKNDALDAVLIAACAAAVDPPEIAPDPRLTELADYLTFLEQIEEDIRRFKTRLEHIDEPALRRIVNSDIARLRARKAAQMRDIAKRLRSHDDLAKRLKLVLSIPGIGERTALAIVIRMPELGRVSREEAAALAGLAPFDADSGQHRGQRKIAGGRSRLRRSLFAAALPAAFRWNKALIALYTRLTAKGKVHNAALIACARKLLIYANTVVQRGTPWTEKAA

SEQ ID NO: 84159 - protein, 411 aa, unidentified
MRLFVGDDWAEGHHDIEVMGRDGTVLAKRRLPEGVAGMTGLHELTGRCLGEGEQDAEVVVGIETGRGPWVAALIAAGYTVFPVNPLQASRYRERHGVSGAKSDGADAHMLADMVRTDSHQLRPAAGDTPQAEAIKVVARTHKTLIWERTRAVQRLRHQLREYFPAALEAFEDLDAPEVLELLGKAPDPERARRLTRAQVSAALKRARRRDIAGKTSAILAALRGEHLTQPAALTAAYAVTARSLIALIATLNEQVKILQEQVRQHFGRHPDAEIYQSQPGLAAILGARVLGEFGDDPYRYANAKSRKNYGATSPITRASGKKKVVTARYIHNDRLIDALVSWAFASLNASPGARAFYDELRARGLQHHDALRRLANRLVGILHGCLKTRTLYDEAAAWSHRQNLPQSGVAA

SEQ ID NO: 84160 - protein, 342 aa, unidentified
MKHYAGLDVSLEETFICVVDESGKRVWRGATKSDPQTISRVIRKRAPKLVELGFEAGPLCRWFWHEFKEMGLPVVCLDARHAKAALSMQVNKTDANDAYGLARIVRTGWYRAVEVKSIESHVVRSLLAVRSQLVGIRTRLSNQLRGILKTFGLVVGKVSGRSLESRGRELTAGNLMLKDVVESILNVWRTIYDQLAVIDKKLRQFSHSNEVCRRLMSVPGVGPVTAAAFMAAIDDPDRFKRSSSVGAYFGLTPKRYQSGEVDRSGKISKCGDSRVRSYLYEAAGVLLTRVKKWSKLKAWGVRLATRVGLRKAKVAVARKLAVILYRIWVDNSKFQWGDAPSL

SEQ ID NO: 84161 - protein, 459 aa, unidentified
MSKKRKSNQKSNPKTGASLLSCLNLNAAGIDIGATEIYIAVPGDRDPQPVRCFPTFTEDLHAAAAWLKACHIETVAMESTGVYWIPLFQILEARGFKVFLVNAHHVKNVPGRKSDVSDCQWLQYLHSVGLLRGSFRPEQAVCSVRSVLRHRDSLVQMASSHVQHMQKALDQMNLQLHHVISDVTGLTGIAILEAILAGERNPHTLAALRDRRIKASADTIAKSLVGDYRREHLFTLRQSLASFRHYQELIADCDREIAQSVEQFESKLDPPVDPPPATPSPSNDGSKPKASEPSFDLQTHLHRIFGVDLTQVPGINVLTAQTLLAEIGPDFSHFPSGPEFASWLGLCSDNRISGRKVLSARTRKVKNRAATALRMAALSLHRSQSFLGHFYRRMRAKLGAPKAITATAHKLARILYHMVTTGHAYDETICAQNEVQNRQRMEARLRKQARELGLQLVAL

SEQ ID NO: 84162 - protein, 371 aa, unidentified
MKNSITSVGLDVHKDSIEIAAADHDGSQEVRRYGEIGGDLASLDKAVRKLQSKGKELRFVYEAGPCGYDVYRHLTKQGYSCTVVAPSMVPKKSGDRVKTDRRDAVSLARLDRAGELTPVYVPSEEDEAMRDLCRAREDAKNAQRITHQRLGAMLLRLGFRYPVRKTTRTPAYFRWLSTLKMPHPAQQIAFQEYIHAVKESTERVDRLTDQIQKLMPEWRLAPMVNALQAMRGVAPMVATITMAELGDLGRFANPRQLMAYLGLVPSEKSSGKKEKRGGITKTGNGHVRRALVEAAQTYRYPARVSRHLLERQEGIAEPICKIAWKAQVRLCGRFRKMIARGKTPNKVVTATARELSAFMWAIAKEVQIQAA

SEQ ID NO: 84163 - protein, 344 aa, unidentified
MKFTRCGLDIAKQVFQVHGVNEHGVVKGRKALQRAKVREFFAQLPPCLIGIEACGSAHYWARELSKLGHTVKLMAAQYVAAYRKRDKNDANDAEAICEAVGRPNMRFVAVKSEEQQAVLMVHRARALAVVNRTAQMNQIRGLLGEFGLVVPKGAARLRRELPGILEDAENGLPVLARGVLCGLLEQLREVDARVSGYDRQIRTLAEASEPARRLMRVEAIGPQTATALVATMGDPHVFKNGRGFAAWVGITPRQHSSGGKERLGQITRQGDGYLRTLLVHGARSYLRVVDKKTDAKSDWARRLKERRHANVAAVALAAKHARIAWAMLAHGTEYRPAGPQTAVA

SEQ ID NO: 84164 - protein, 376 aa, unidentified
MEHNSEAFIGIDTSKLKNAIAIAEGGRDGEVRYLGEIETTDAATRKLVKKLATKYRKVTFCYEAGPTGYGLYRLITSLGHECSVVAPSLVPKKPGDRVKTNRRDAVGLAKNLRAGELTAVWVPDTRHEAMRDLSRARETAVDDLKSKRQQISSLLLRLGLHYPGEKTWGKSHRNWLASLKLDQREQRIVLEELFGAERQAQERVDRLVSAIIDAVPEWSLAKIVTALMAVRGIDLVAAVTIMAELGDLSRFASPRELMAFLGLVPSESSTGDSVKRGGITKAGNRRARRILVESAWSYRYPPRISRDKLAKVAAAPEPVRAIAWKAQTRLSSRYRALIKRGKRSTIVATAIARELCGFIWAIHRAVTAPGGRQLVS

SEQ ID NO: 84165 - protein, 265 aa, unidentified
MTSTKYIGMDVHKESISIAVMNAAGKIVMECVIETKANMILQCIEGLRGDLHVTFEEGTSAAWLYDLLKPHVTELIVCDPRKNASMREDSQNDKIDARRLAELLRIDHLTPVYHGEHGLRTLKELVRSYLTVTKDLVRVKTRVKAIYRSWAIPCNGKEVYAACHRAEWLEKINELGVRRRAEFYYQQLDALRVLRQGVRRELLAESKKQKAWKRLCQIPAIGPIRAAVLLGILQTPHRFRTKRPLWKYSGLAIETCSSADHRSID

SEQ ID NO: 84166 - protein, 408 aa, unidentified
MKTLHRRCAGLDVHSDSVVACARLTVRTKATHEVRRFSTTTRDLLELADWLAAQGITHIAMEATGIYWKPIWHVLEGRFELVLANAAHIRNVPGRKSDVNDAVWISDLLAHGLIRASFVPPTQIQEVRDLTRTRTQLGREVGQHIQRIQKTLENANIKLTSVISNIMGTSGRRILKAIIRGETNPANLAELGSTGLKCLRTDLTAALDGRVTAHHRFLIAHHLRLIEELEKHIAAFDARIEELLAPLGNAVAQLITIPGVSRVSAQVILAELGADMTAFPTSGHLLSWAGLTPRLDESAGKRRSTRVRKGAPWLKPVLVQCAWGSARTKGTYYQARFFRIKARRGPKKAAIAVAASLLTAAYHMLKNGTFHQDLGADFLVQHDKARIATKLANRIKDLGYDVCLTPVA

SEQ ID NO: 84167 - protein, 400 aa, unidentified
MHLTANISVPQKNFIDINLHSDNAVICVRRNALNKAGELVGKNIWCGRVSIRDGLDSFVKALLPYCQDFDHVAVVESTYNWYCLAVVFEERGWLLRIADPSTVSQANLKSSDDRTDAQYLAERLRVGSLKHYLPLSYSSRALWDLCRYRMAMVQDCASLKIKLINLYRNQPSKNLRVADLLDRCRNHMQSNYRFDPDILEEFKDPNIRLRVAFEVSRIAMLEEMIEECNAEIQKQCKDQELVKLCKTIPGCGPVLSAVICTEIGTMQRFKSAGDFVSYCRLCSTSKLSNGKSKGLGNAKNGNAYLSWAFTEVAQYASRNPVIQEILQRLLRKYGGLRVKAIRTLAAKIARVTFYVLKNKQPFNAAKCFGIELTKSIKMKLTHKTLREDAAVVLPTVAGQA

SEQ ID NO: 84168 - protein, 350 aa, unidentified
MLIIGCDYHPSVQQIAFVDTDTGELRERRLGHREEAEQFYRELKQQNLTVRAGMESSGHSRWFEGLLQELGFELWIGDPAEIQSKRVRKQKTDRQDAQLLLRLMMEDRFPRIWIPDAVNRDLRQLLWHRHRLVQMRTRVMNQLHVVALNEGLRRKKALWRPAGRTELEAIALAPWATRRRQDLLDLLDQLTPKIQQLTQALEEEVEKRPVTRLLRTHPGVGPLTALAYELVIGTPERFHCGKHIASYVGLVPEEKSSGDRRRLGHISKQGNVLLRFLLVEAAQVTVRSDPQWRSKFFHLAMRRGRKIAKVAMARKLAVHLYWMWRKGHDYGQSQKFGSHAGEPGNRDGVQ

SEQ ID NO: 84169 - protein, 416 aa, unidentified
MNAVGIDVSSRKSTVAVLRPLGEVVCLPFDVTHDIAGLASLAEKLKAIDGETRVVMEHTGRYYEAVAKALHEAGFFVCAVNPLLIKEYGANSLRRVKTDKADAVKIARYALDNWADLRDFTPMDAIRYDLKTLNRQFQLASKQRTASANNLIALLEQSFPGIRKCFDSPVRSDGTQKWVDFAHSFWHVDCVRKQPFAAFCERYRKWCKRHAYLFKQSNAEEVYALAKRAVVLTPKSKVVKVLVQEAANQLISISRSVEVYRAEMDRLAAMLPEYPVVMAMYGVGKSYGPQLMAEIGDVRRFERKQALIAFAGIDPMPNQSGDKNVRSNKSSKRGSPYLRKTLFNVIRTYLQCAPQDEPVFRFLNRKRAEGKPFYVYMLAAANKFLRRYYAKLRDYFASPDTLQSVDPIPATLKASL

SEQ ID NO: 84170 - protein, 377 aa, unidentified
MSNLRFIGLDVHAETIAVAVAEAKGEVRSLGIIPNRSASIRKLVKKLGAPEQLRVCYEAGPTGYVVYWELTSLGVCCEVIAPTLVPVKPGDRVKTDRRDAVKLARSYRAGDLTPVWVPDAAHEALRDLVRAREAAKKDQLRARHRLGKFLLRHGRRPPTTVKAWTQSYVAWARSAVHFDYHAQEATLLDYLHEVEHAADRIVRLERAIDEAVRTAPARQRAVIDALQALRGIALISAVTIVAEVGALSRFVKPRQLMGYSGAVASEDSSGERIRRGGITKTGNAHLRRIVGEAAWAYRHRPAVGPALRKRHALVDDAVKAIAWKAQHRLHSRYRTLTARGKTPQHAATAIGRELLGFIWAIGVHVEAKEGHRTPVAA

SEQ ID NO: 84171 - protein, 425 aa, unidentified
MKSRLVNAQNQRIERISTTTLVVGIDIAKEKHAAQAINFRGIVLNNKPVVFANDLSGFEHLGQTIRKLQKAHSMDNVIIGMESTGHYWFNLSNWLVKQGIDVVLVNPMTTKRNKENRDNSPSKNDPKDALVIADVVSRGYYTPFSPKEEAFRRIRVVVTNREHWVVERGRIENRIHRWLDIRFPEYIQAFEDLFSTRSLATLRRFPAPSDMLKLTPERMVKIWGEFMSRPGGARGTRKAMELLHLARQSVGDTVALEEDKWELTHLVDEYERVQKIVDEADEMIEKILPEIPGADLIRSAGATIPATAAILAFGGDLSQLSHGNQLLRKAGLNLAERTSGKYKGQIKLTKRGNSLLRKHLYFTVFHLLSYNQAFQALHAHNIEVKRMTKMQSMMKLIGKLARMLVAMVRTGEKFSQDKAQFSIAA

SEQ ID NO: 84172 - protein, 323 aa, unidentified
MQGQKSPERSAQPGVYVGVDVCKDWLDVYLHPIGQKFRVANTPQGLKALKRRLAELPAELIVMEATGKFHRQAHRTLHAAGLAVAIVNPLRARLFAEAVGQLAKTDRLDARVLALMGQALQPSAIAPAPEALEALQELARARAAAIADQTALSNRRGASQTAFLKAELGRRLKGLAGHIERLEAEIERRLGADPALKRRYDIVVTIPGVGPVAAVALVIGLPELGACSAKAAALLAGLAPLACDSGDKAGERHIRGGRAFVRTGLYLAAIAAARFNPQLSDDYKRLRNAGKKAKVAITAIMRKLVVLANVLIKEDRPWKPIHA

SEQ ID NO: 84173 - protein, 281 aa, unidentified
MLSGNVKYIGLDVHKEAVAVAVLNGAGKLVMESIIETKVSTLLDFLQGLRGELHVTLEEGTWAAWLYDVLKPHVAELVVCNPRRNALLKEGSKSDKVDARKLAELLRSGMLRAVYHGEHGLGTLRELARGYLTIGKDQRRVMSRLKALYRSWGIPCSGKQVYTPRHREQWLNKITQPGVRRRAELMYQQMDGLSVVRHTVRGELLAESQKHQAVKILRQIPLIGPLRAALLLALMQTPHRFRSKRQLWTYSGLAVRRTTAHSIVTWMANCNVPKSLNRSAA

SEQ ID NO: 84174 - protein, 325 aa, unidentified
MDKFSDYYGIDISKDVFDVMDSNGKHVQYSNNQAGFKSFLRAMNKNGCAVMEATGVYHTQLADYLFSKSVFVSVVNPLVIKRFIQMNLRRIKTDKADAEMICTYAQSHDLKAYKPSPVYVKESRIICENIDLLLKSRTMFKNRLHALAHKSDKQRSILITPLKMTIASLTKQIEKLEKELKKLMEENDSDLFTRLQTIPGIGKSTAMFMIVLSDGFKKFESAKQFTCYIGMSPVEKRSGSSVRGRSGISKQGNPKLRNLLFMCSFNACTTNKACRELYERIVAKGKSKKLALIAVANKLIKQAFAIAKSGLVYDPEFRSVQPKLN

SEQ ID NO: 84175 - protein, 312 aa, unidentified
MAQMVTTAGIDVSKLWLDVAVWPTREEIRVSRDAAGLAVLIGWLSEHGVMRVGLEASGGYEREAIDTLQAAGFEVALLNALRVRRFAEAKGRLAKNDRVDARTVAQFTAVMVEAVPPQRRRDLDALTELLTYRRQLKGWCTDCTNQLEHLRDTALRKVIAQRQASFERDLAKIDKQVADLLAEHDDWNALARRLRTVPGVGPVVSASLIALLPELGTLSRRAIASLAGLAPFDDDSGGRQGERHIKGGRKTVRDALYMAALSARQHNPRIAAFAKRLAGKKPKVIITACMRKLLVMLNAMVRDGTDWRAAAT

SEQ ID NO: 84176 - protein, 408 aa, unidentified
MRIIGLDIHRAFAEAVAWKNGKLSRLGRVIMRREQLQDFAKQLSNSDVVVIEATGNAASVAAVIGPHVSRVVIANPKQVRLIAHAKIKTDKIDASVLAQLYASGFLPEVWIADEATQALRRQVTRRNQIVRQRSRLKNIIQSILHAHLIPSCPHQDLCGPIGRAWLSEQILPGDERLAVERHLREFDRLTDDLKVIERDLAQSALADDRATRLMTVPGINMVVALALIAAIGDIKRFAKAEQLVGYLGLNPSVRQSGPGPAYHGRITKQGRGHARGMLVEAGWVAARCPGPLRSFFLRVQSRRGQHVAAVATARKLAILIWHLLTKNENYLWSRPALHARKLRDLELKAGHRSARGQKGTAHAYNLKSQRDQERRWVEQAEAGYARFVAGWNARGPKARTGAAKEERQ

SEQ ID NO: 84177 - protein, 436 aa, unidentified
MNPHGVSDQLSLEKLSSGCLRVARVRQKPATPCVEIVKHKTINLKRSNIMIKKRGRVVGLDVHPDSFAGVVVEGSDPASAQVSSTSTRVELERLEQWALRHTRTDDTLVLEASGNAFAVAERLRAIGRKVEVLDSHCAGKVGKTYCANDRVDALKIARIYLSGLSPLVWQPDPKTLERREVFSAYQAVVKESTRAKQQLRSMLNEHCVRLEKGFRLCHPNAIRRLVALREWTPARTMLLQQLHGTLVAARGRRTLLRRHMAQEIAAEEALLRLTRLCGINLITLYGVVAAVGDVRRFTHSKKLVAYLGLNPSVSQSGNFEGNGALKRHGRGALRALLIQSGKKLLEVNNPLQKWGLAVAARRGRNKAAVAVARKLCVALWHVMMGHLIGALERLDMLQTKLSKFATEIGPAALTAFGYTNKADFVEKKLYVLRSYP

SEQ ID NO: 84178 - protein, 321 aa, unidentified
MYVGIDVAKASLQVCVLTSPVQQVSFDNTRSGWKALAKYLKQWDAVWVAMEATGRYGDGVSKHLYAAGYRLSVVNPARIKAYAQSQMKRQKTDVIDAHLIADFCRTQEPDLWQPLSAEGEELREITRHLDDLKDARQREKNRLEAKPKSKAVVKQIEQLIALLDKQIKQTQKDIEHLVKQHPHLQSQSNLISSIPGVGLLTAARVMAELGDLSQYDDVRQIVALTGLDPTRKQSGSSLNRSGGIARMGHSALRAALFMPALAAMRYNPILKAFAERLKAQGLLPKQVVIAVMRKLLHLAYGVIKSGIPFDPNFGKVKLSTP

SEQ ID NO: 84179 - protein, 377 aa, unidentified
MTIQSVPTPAASADLAVIGGVDTHKHTHYAAAVDSHGRLLGHREFPANDRGYRDLLSWLQGHGTIAAIGVESTGSFGATLTRFLTAQAVHVIEVNRPNRLARHMDGKSDRLDAEQIARAVLGRTSTATPKAKSGTVEVIRTLRVARASAVKARKNTFNTLWGVMIGAPSPLRDELVILTKRTLVNRCHGLRPETDDLLSLSASPDRMLLAGVKTALRDLARRWKALDAEIKALNKQIEALVRVAAPALVQLHGVGIEIAGQFLVSAGDNPERIRSEAAFAKLCGVAPQPASSGRTSGRHRLSRGGDRAANSALYIVTIVRMRHHQPTRDYVARRTAEGLSKREIIRCLKRYIAREVFANLPRATDTSAVTAPVAPAA

SEQ ID NO: 84180 - protein, 404 aa, unidentified
MQECNAAMHRIETASSQVALSAASGKGAAKQYAAYIGLDVHKETIAVAVAEPGRGEAMYRGEIANTPKKVEKLIAQLSEAYDGGLLLLCYEAGPCGYGLYRQLIGGGHDCQVVAPSLIPKKAGERIKNDRRDALKLARLLRSGDLTAVWVPDREQERMRDLSRARDDLKAQERTARQQLNAFLLRHGQHWPKGKSRWTPAHENWLAGLKLDDPWQQVVLQTYIDAERAAGERVAQLTDQLMRALPEWSLAPVVASLVALRGIDKLAAIVLLAELGDISRFDSPKQLMAFLGLVPSEHSTGGRRRQGAITLTGNSHARRMLVESAWSYRFPARQTKHLKAKAANASPEAKRIAWKAQVRLCGRYRSMTRAGKNTKLVCVAIARELAGFLWDIVRREMPQPAQHGA

SEQ ID NO: 84181 - protein, 310 aa, unidentified
MDAIYVGIDVSQARLDVHVIPSGEAFAVARDGKGLEELIERLRAFSPQLIAVEATGGFETIVAAAVAGAGLPLVVVNPAQIRHFAQALGKRAKTDPIDAAVIAHFVEAVKPELRALPDEAQRLLAELVGRRRQIIEMMVAERQREKRAANVRVRKSILRHIRVLEKELPEIDEDIGTLVRGSPVWREKEDLLVSFPGIGNTLARTLLAEVPELGELTRREIASLVGVAPFTRQSGHWKGKSKIGGGRGSARRALYMAALVASRHNPGLRTFYRRLLAAGKPKMVALIAVARKILTTLNAMLRDKRKWQPA

SEQ ID NO: 84182 - protein, 310 aa, unidentified
MDTIYVGIDVSKDRLDVHVRPGGEAFAVERNGKGLEELVERLRGLSPSLIAVEATGGFETIVAAAVAGAGLPLAVVNPAQVRHFAQAVGKRAKTDPIDAGVIAHFAEAVKPEPRPMPEETAVLLAELVGRRRQIIEMLVAERQREKHASNVRVRKSLSRHIAVLEKELPTIDQDIDGLVRGAPVWREKEDLLISVPGIKNTLARIFLAEAPELGRLDRRSIASLAGVAPYTRQSGRWRGKAMIGGGRTALRSALFVASLTASRHNPVLKPFYERLLAAGKPKKVALIAVARKLLTILNAMLRDNRRWQSA

SEQ ID NO: 84183 - protein, 441 aa, unidentified
MEAVYRRCAGLDVHKDVIEVCVLPPAGQSGSPQRRRFATFTSDLIRLRMWLVSLKATEVAMESTGLYWVPVWRQLEGHIGKRLLCNPQQVKALAGRKSDRRDGQRIAEFLQDGRLDPSFVPPKEIQQLRELLRMRVSLVQEHNRLSNRVEKLLQSYGVKLSSVASDILGKTGQRILTALAAGQTDPDQLSWKAVGSLREKEAQLRRALRADFDEHSCWMLGVLLGQLKENEQWREQLEQRITEGMKPYEPIVIRLMTIPGVDRLTAWSMVAELGTDMSVFPDQRHCASWAGVCPGTNESAGKQHSTRTRRGNRYLRRILTQSAWATSRCKRGYLRAAFHRIAQRRGHKKAVVAIAHKILVAAYFIIRDQTTYLELGEDYFDLLSPERTARRLARRLERIGYQVTLTKAAATAPRSSEGQQPKKRGRPCKCAERGIDCKHKR

SEQ ID NO: 84184 - protein, 340 aa, unidentified
MKKLYGAFDLHSTNNHLAIIDDEDKRLYKRRLPNSPDVILAELEPFRKSLVGVVVESTFNWYWLVDLLMDEGYKAHLANPAGIQKYKGLKHSDDNHDAFWLAHLLRLGILPEGYIYPKEDRPIRDLLRKRGHLVDLRTSLINSLQGILRRNTGQKLNINKMKQLTTDHVAPLLAGQEDLELSGLVSKETIDYLTGQIKRIETAVREKVKIRTPFEGLQTMPGVGVILSLTIMLEVGNIKRFPKVGDFTSYCRKVPTEWKSNEKKKGKGNKKNGNKYLAWAFSEAAELARRFDETARSYYNRKAAKTKFMVARGALAHKLARAAYYIIRDGVEFDHRKLFG

SEQ ID NO: 84185 - protein, 340 aa, unidentified
MRQYKLIVGLDISLDSFLAFLISSDENFTAGPKKFKRSEDGIAQLLLWIYKLGFNPNEVKVVMEATNNFWEIIAVKLDKVGIGAISIVNPKIIKDFSKSLRKKAKTDNIDAEVVALYGVRMKPENTDLKKSKKFGELRYLIRTREFWIKEKVRLENYVRNLKRSVFASKKETEWIEKEIKRIIEHIKEIEKEIEKLVEEVEELKKAVKLVDSIPGIGKVNGVVILVETGMFEGFKKGKEVVSYAGIVPRVYESGIRKGDRGITREGNKRLRNAAYFAAVASLRSSCEVFRKFYERLVSRGKAKKVALVALAGKILRIAFALVKKEEIFNDQKLRLTNSGA

SEQ ID NO: 84186 - protein, 342 aa, unidentified
MSTFIVGIDVSRLTLDVAIARDKQEAVFLGQYTNDASGFERLVPAVQRAAGGTTIQLVMEPTGGYEQPLAHLALDLGWRVSLPNPRHVRDWGKSQGRRAKTDRQDALLLARYGAHHDLPLWQPLPAPVAELEALLARRTDLEGMLRQDRNRQHALTSQDAFTGPVAASVAATIAWLEQAIAAIDAAINEHLKCHPDLREQAQRLRQVPGIGPRNVLPTLVRLDRGGSLTTFLGTARGLTAFVGLDPQPYRSGTTVYRPSAISRQGAPAVRSLLYMSALGGARGHNVLREFYQRLVAAGKPKKLALIAAARKILVWAWAVFRDHADFDPTRANGAEPARLLVA

SEQ ID NO: 84187 - protein, 402 aa, unidentified
MRFFVGIDWASRAHAVCIIDQTGRVRWQGSVPHTAEGLTQLVGRLRRFRGRGHLRVALERPSGLLVDTLVDAGVEVVPIHPNALKATRPRYSAAGGKSDPGDAFILADLLRTDGHRFPPLRPPSDDTRALRALVRGRDDLVAQRIALANQLRALLERFWPGAAAIFADVDSPIALAFLARYPTPQSAARLGEKRLAQFLGQHAYCGRRPVAELLARLRTAPASQVGEAEAEASGDVVRALVAVLTPLVAQVQHLSAAVEAALAQHPDGPLVQSLPRSGAVNAAQILAELGDDRARFPSDEQFAAEGGLAPVTHASGQHHAVVFRWACNKRLRRALTTFADNSRHASRWAALVYQRARARGCRHQHAIRILARAWARILWRCWQDRTPYDVRRHRAAQALAAA

SEQ ID NO: 84188 - protein, 312 aa, unidentified
MTEHCYCGIDVAKDRLDAQVLPHRQRFSVDNNATGWAELVERLHALPIAAVGIEPSGGYERGIIRILLAAGLSVRRINPSKLRQFARARGILAKNDRLDAQLIAEYVSIMPTRVVQRVATAERLAEVVTMRRQLCDQHVTIENQAAHVEDAILRRLNKRRLARLKADIHLLDKRLAEIVAADVILAQRYELLTSMRGVGPTLAFTLIALLPELGQISRKQIAALVGLAPYDFDSGKLKGHRCIYGGRMPVRNILYMAALSAARYNPALKVFHNRLAATKKKPKVVIVAVMRKMITTLNAMVRDNAAWQPRAA

SEQ ID NO: 84189 - protein, 349 aa, unidentified
MSQTAQTAVAVIGIDIGKNSFHIVGHDERGAIVLRQKWSRGQMEARFANLPPCLIGMEACVGAHHLSRKLNGLGHDARLMPAKYVRPYSKGQKNDFRDAEAIAEAVQRPTMKFVATKTADQLDLQALHRVRERLVSQRTGIINQIRAFLLERGIAVRQGHRFLRAELPRILATPPDVLSPRMARVIEDLAGDWRRLDERIESLSSEIEAVARQDAGCERLMSVPGIGPIISSAMVAAIGAGDAFTKGRDFAAWLGLVPRQMSTGDRTILGKISKRGNRYLRVLFVQAAWAVLIKPKSWERHGLKPWIEAAKKRLHHNVLAIALANKLARIAWSVLAHGRNFEVSKIQTA

SEQ ID NO: 84190 - protein, 489 aa, unidentified
MSTAPKQEREKEGSDAQRSAPKRKARGSHCQKGGGNQRRSKLTITNPDAAGIDIGAQVHYVAVPEDRAEVSVRSFGAYTAQLDELVQWLKDCGIKTVAMESTGVYWIPLFQKLEEAGLEVLLVDARQAKHVPGRKSDVQDCQWLQQLHSYGLLRAAFRPEDSICRLRTLQRHRKNMVESAAMWIQHMQKALNEMNLHLHHVLSDISGLSGLAILDAILAGERDPRKLATLAHYRVQKSQAQIEAALRGDYRPELLFVLSQTLQNYRQMQQQIAQCDLTIEKQLAKMADCTNPNQASEPTQQSPDSAGCKPPKRKPKDALELSLAGHLKRILGVDLTTIPGLNILAVLNLLSEIGTNMGKWRNEKAFVSWLGLSPNNKISGQRVISSRTRKVVNRAATTLRLAAMLLGKSNTPLGSFYRRKRAQLGAPKAITATARKLGCLIYRLIKNGQGYKEPDLHTYELKYKDQILNSLRKRANSFGFDLVEVPNAA

SEQ ID NO: 84191 - protein, 457 aa, unidentified
MYGPFNVASSTRIRFAVSLQLPRATAPPLVRRVEVVRVQVAQDDQEIIARVAALDIGKAEVVCCVRVPGEGPRARRMQEVRTYTTMTRSLLAMADWLTELGVTRVVMEATSDYWKPPFYLLENTFQTWLVNAKDVKHLPGRPKTDRLDAVWLCKVAERQMLRPSFVPPPAFRELRDLTRYRVDLITTRTSEKQRVEKLLEDAQIKLSVVASDIFGVSGRAMMAALVAGERDPKVLADMARGSMRGKTARLEEAFTGRFTDHHAFLLRTMLARVDAIDTDIDVVQARIDEQIAPFAKAVTRLDEIPGIGVTTAQVIIAEVGLDMTRFPTPDHLASWARFAPGISESAGRKKGGSSTGKGNRYLARVLGEAAVGAGRTKTFLGERYRRIAKRRGKKRAIVAVGRSILMIVWELLSDEEKRFIDLGPGYYDSRVNRNRSTRNHVRELQALGYKVTLEPAA

SEQ ID NO: 84192 - protein, 453 aa, unidentified
MTKRKTGGHPDLNVVNPNAAAIDIGSTMHMAAVNPDTAAMPVRAFGTFTQDLHDLADWLQSCGVTSVAMESTGVYWIPAFEILEAHGFEVILVNARYAKNVPGRKTDVSDAGWLRQLHSYGLLRGSFRPEAEIATLRAYMRQRERLTEYAAAHIQHMQKALMEMNLQLHHVVSDITGATGMRIIRAIVDGERDPEVLAAFRDIRCHSSLDTIKGALVGNDREEHVFALTQSLELYDFYQEQIEACDRRLEAAVGALTARADGELAPLPKARIKGRQHNAPSFDVRAALYGVLGTDLTQIHGLGPSLALKLVAECGTDLRAWKSAKHFTSWLCLAPDNKISGGKLLSSRTRRSSSRAAALLRLAATTIGRSDTALGAFYRRLSSRIGKQKAVTATARKIAVLFYNAVRHGMSYKDQGAAAYEERHRKRLLSNLQRRAKTLGFVLAPIHETAAVS

SEQ ID NO: 84193 - protein, 349 aa, unidentified
MEKITTVGIDLAKQVMAVCGMDAEGRVVVRKVLRRDQLLRWAAATPSSVMAMEACGGAHYWARELTQQRHTVGIIAAEFVQAFRKSGKNDANDAEAIATAARQSTMRFVAVKSVEQQAALCVHRLRQGLVEERTAVINRLRGLLTEFGVVAPLSPEKLRRELARCQDPDDLRLPATVRQLVGDQVIALDQLDARLASYAEMIATQARQSEVAQRLQTIAGVGPTTAAAMVATVGDANDFRNGRQFAAWLGLTPRQHSTGGKTRLGRITKRGDAYLRTLLILGAKSALQAALRKPPEGRHRLQQWIVTLLGRIGYHKTLVAIANKHARIIWALLVKGEGFDVRRLAQHTV

SEQ ID NO: 84194 - protein, 343 aa, unidentified
MAIYMLGIDIAKSTFQLHGADQAGKEVLRKRLPRHKLAAYIANLPVCTVVMESCGGANYWARVFQRSGHTVKLISPQFVKPFVKTNKNDANDAQAIVEAASRPSMNFVPIKQVEQQDIQSTHRVRTRIVKNRTALINEIRGLCLEYGVVLTPGAARVKSSLTTALADETNELTESSRNCMQGLYEELIDIEARLKKLNTRIRQLCRNNESCQRILKVPGVGELTATAIVAAVPDPGEFRNGRHMSAWLGLVPRQSSSGDRQVLLGISKRGDRYLRTLLIHGARAVLSHSKDSGSDYDRWVAKKKATLSHNKAAVALANKNARIIWSMLNTGEEFNYERQARAV

SEQ ID NO: 84195 - protein, 431 aa, unidentified
MNYKQKDKKNQRIQQITDQTLIVGADIAKKTHYARAVDFRGIELGKRCIFENHRQGLLKLVLWMKELQKVHGKSEILFGIEPTGHYWFPLAEFLRKNGIKVVLVNPHHVNKSKELEDNSQTKNDLKDAKVIANLIKNGDYTEPKLPTDIFADLRVMMNLREKVSNSLSQAKIRVQNWLDRFFPEYSKVFSSWDGKASLMTLKEFPLPQEIVSLRAEEILRRWKTQVKRAVGIKRARKLVEYASTSIGITEGCVGAKLELAVLLEQYELYTKQLEQIMEEVQTLLKRIPGTKEMMSIPGVAEVTLAGFLAEVGNLEDYTHPQQIIRLAGLNLRENSSGKHKGKTTISKRGRARLRALLFRCVLPMVSKNKEFKYLHEYYTKRKERPLKKKQSIIALCGKLIRVLYYLGTRKQSYDGKNVLGPMHSIQQLQAA

SEQ ID NO: 84196 - protein, 417 aa, unidentified
MKSIKTEKIKTINEKTLVVALDIGKKVHYGYFRTPKNQDVKPFPFYNSGRSFNKFWKKLCRFKEKHMLGEVVIGFESTGPYAEPIANYLRKKPVKLVQVNPMHTKRIKELTGNSPNKTDKKDPRVIADVISLGHSLTVVVPEGAAAQLRRLTHARERAMERRTAMNNQLQDLVFVIFPELGDIIKPSTKTGMYLIKHYPDSESIVSIGFETLYNIVRKISRGKFGIDRVEKLYNAAKESVGITEGKESILLETSHLVSNIETENRYIESLEGQMIVYLDQIPYSHSILSIKGIGNITAAGLIGEVGDFRKFKTISEVMKLAGLDLFEVSSGKHKGKHRISKRGRALIRKLLFFAAINTVKSHGIMRAKYQKMLNNGTPKIKALIAISRNLFRIIFALARDNTKYVENYKSHEFKLAA

SEQ ID NO: 84197 - protein, 452 aa, unidentified
MAKPTAHMRKKNQPATQVRPELRPDAAGIDLGATVHYVAVPPDRDSNPVRFFGTQTGDLHQLADWLIACKITTVAMEATGVYWVPLFQLLEDRGLEVCLVNARHVKNVPGRKTDVQDCQWLQYLHSVGLLHASFRPPAAVCAVRAFVRHRESLVRTGCEHLLRVQKALDQMNVQLHRAVTDITGETGQKILEAIIKGERNPEVLAQHRDSRCKKSEAEIAAALCGDWRPEHLFTLRQSFEAWQYHQKLIAECEAELRKQLDGLADQTKEAAPPKVRPDKRCDEPTRQHLFEKFGVDLTAVDGVNVQTAYMFLSEVGPDLSKFESAEHFSSWMGLCPDNRKTGGRPIGVSTRAVANRLATALRMAAQSLHRVESPLGEWFRRMKAKLGPSGATTAVAHKLARVLYAMIKYRKPFDPERLGNPALRKARKENSLRRAAMELGYVLQPIQAVAVS

SEQ ID NO: 84198 - protein, 326 aa, unidentified
MQKVLGIDVSKEKHDIVLVIEGKKYHQEISNDPKGFDYLERWLGAHQATHVHACLEATGQYGEAIAEYLYTRGYLVSVVNPARIKRYGESKLHRNKTDKADADLIAEFCLKEKPTLWEPLSPEVKHLRSLIRRLQALKANLHQEKNREKSGETDSWVMDDLAIHIEFLNERIQAIKKEIRDFLKQTPDLKSQHDLLISIPGIGHLTAITLLAEIGDFLAFENAPQLAAYAGLNPQGHRSGSSVFKKTQISKQGRVELRRCLYMPAIVALSFNPVIQSLAERMTKTNHHKMEIIAAAMRKLLHLTYGVLKNQLPFDPNYGKKFDFSS

SEQ ID NO: 84199 - protein, 331 aa, unidentified
MNYIGMDIHKQFTVAVVKDEQGNKLAEEKFNNSEENFGNFMQIYKPEETKIVIESTCVWEYIYEILEAKKYKVKLANPSRTRAIAEARIKTDSIDASTLADLLRANLVAESYIPPKEIRRLRETTRERRTFVKQTTQIKNKIHAILIRRGTQIPSTTLCKKTLLWMREKFKDENVILHYINLLEYHTKELESINDNIREKAEINRDAKLLMTIPGIAELRALDIIAEIGEINRFSSADKLCSYAGLVPSIKQSGNTIHFGRLIKQSSKILKSDFIEICWNIVRTRRNNPLQIFYKKLVKKKGKQKAICATARKLCCVVYAMLKKQEEFRDS

SEQ ID NO: 84200 - protein, 362 aa, unidentified
MKQFIGCDVHKKYSVFVSLDEAGTASRAVRLAHEKDELSVYLSSRPAGTPVAVETTGHWYWLLAEIEKAGLEPHLAPALAAKRMMVNPNKTDKLDAKGLATLLRNGTLPEVWVPSGELRDVRGLMRSRLAARRFGTALKHRISSALARYGWPKEFRGDLFGTSEAAQRAWQQSLAALPKQTQFATKREWHLLHEVEENVKQLNEQIAGSVGKMGWVRRLRTLPGIGEILGPTIYLEIGHGSRFATAGNLAAYAGLVPRVISSGGHTRLGRTRKECNRFLKWAFVEAAEVIVAQQESMSARHVVRLYRRVKSNKPERHNKAVVAVARHLAESAGHILTRNEDYREPQPTPGMIQRFHSEGRPL

SEQ ID NO: 84201 - protein, 446 aa, unidentified
MDHVNGLSRGDRNRNSRLTRLRGLVPPSNAIAAIDLAGEKQMLVVTDHDSRVLARKTFRLAAWHMGSALDWAAEHAARAGFAGMTVACEPTGHRWRVIGQLAADRSMPFVCVQPLLVARSRENENYSPDKTDDRDAVLIARLTAELRCYAPEATDEVWARLRHLGARRARHLEETSSLVQQMRDLLECAWPAMLDTAAKQFKAKTWLAALAVVTDRCNGDPARLRRLGLTRFSAAVRREMPRWQAERPCRRIVEAVFAALADTTGVTVQRRGILERVGLVLDDWRDLHRRIDDTEARMVAVLDELNLTELVTSIQGLSAVNAAAILAESGDLRRFATGRALVKHSGLAPAEQTSGKLVGRTRLTGRGRPGLRTAAWRAAWGAMKSNTVYQARLVHLTTREEGKLKPAQARCAIAAALLRQLHAVVTTGRAWNPAVAANGTRMTLAA

SEQ ID NO: 84202 - protein, 310 aa, unidentified
MQDTIGIDISKDTFDIYRLSDRRHERFGSDKAGLAALRRWIGKAPVRIVNEATGRYHRDLEAVLGAAGHDLVKVNPTRARRFAQAISQGAKTDRVDAAMLARMGAVLELDAKPARSESMHEIRELHIARRALNKDRTACRNRLEAARNKVVLAQLRARLRQVDSQLEQIDTELARLIAEDPALARRQEILCSIPGIGAVTAVAMIVEMPELGTMEPKEAASLAGLAPITRESGKWKGRSKIGGGRRGVRNALYMPALVAIRHNLHLAETYRKLVDAGKPAKLAIAAIMRKLVILANALIRDDRKWTKTAP

SEQ ID NO: 84203 - protein, 400 aa, unidentified
MRAVFGIDVSKTSSEVAILVNGEKVHGYTILNDAIGFNRLLGDLKTVHNPEIIFEATGVYSRRLQAFLEEYGYAYTRLNPLEAKKQLDSLRVRKTDKIDAEKLAKSQLVHNRKPTYVQEEVYQHLRDLSRFYQNMTEDLVRTKNRLHKVLQVTFPELENLLSTPTGEQYWNLVMAFPCKEFVLSLSQSNLCEIIRQSTSKRISEKRIAYLTDKLIKLAKQSFCAVKKTSPMLEEVRYYAQELLRLSERRQVVLNDMVALAQPLPEYDILRSIPGIAETTATSIIGELGDIRRFQSTNQINAFIGIDLRHYESGNFLAKEHITKRGNPYARKILFKCIHNIASASHTNPCHIADFYEKRKRQSTIASTKPHTIASIHRLIRTMYYLITHNKLYDYSLTQNR

SEQ ID NO: 84204 - protein, 437 aa, unidentified
MDTLSPNKDTVSPGKETVRPNKAGIDVHKKMLAVVVRSQQQDQVHYEKRTFGTNRQQLMELTIWLLDEKVSEVAMESTAQYWRPVWAELEPHFKLRLTHPLETRAPRGRKRDFRDAQRLVDRLWAGDLATSFIPDAEQRDWRSLTRRRVQMKRQIVAIRNQMEGVLEECGIKLSCVVTDLLGITGREILRAMAQGQTDGEALARLARGSLKSKRKDLEAAVAGGLRPVQRTVMGQMLEQVSLIESQIKALTQELVRAMGEHIALIERLTHMPGIDVEAAQELLAEIGPRAEVFATPQHLASWIGVCPGRQESAGISRSNRSAKGNVYLRRLVCQIAWSAVRVKDSFFEGLFRRYCPRMGPQAAIWAVAHRIVKVLWKLLREQVEYKEKGRGAISLHTMKSKLRRYVKQLLQAGLDPEKFFKDVADPLTAASTENGCG

SEQ ID NO: 84205 - protein, 342 aa, unidentified
MEIVNYFSKTKSKVMQDFLLIGVDVSKASLDICFKPMGTLLRIENNPVGYKQWITELHKFYVDNAKLLVVMEHTGRYSKRFETFMQSQKIAYCKVAALQIKRSLGVVRGKDDKIDAQRIAEYGWLRRDILVADPIVEESIQELQSLLSLRSKLVRDRSGYVCRLKELSVAGDSLNSFEGKLQQQVIKVLTAKIDEIEVKIKALISTNAELSKTCDLLRSIKGIGWIVASYMIACTANFKRFRNARKFNCYAGLAPFKHESGTSIKTRSRISHLANKQAKTILNLAACCAIRFDPELKKYYQKRVAEGKRKMSCLNIIRSKIVGRMFAVVKRQTPFIQHVQAA

SEQ ID NO: 84206 - protein, 452 aa, unidentified
MKESSADSREGMPIVHMHAAGLDIGSEEIWACVAAERDRGSVRKFGTFTPDLYVLADWLAECGIETVAMESTGVYWIPVYEILERRRFEVQVVNAHQLKNVTGRKSDVQDCQWIQRLHSCGLLRGSFRPEAEMCVLRAYLRHRAELLEHRAAHIQHMQKALQQMNLQLTQVLSDITGVTGLAILRAIVAGERDAHQLAGMRDRRCEHTAEELVKALTGNYRNEHLFALKQALALYDFYTTQVVECDAEIERQFTNLKPTHEGDLPPLDPHDKVDTHSKNAPNYDARTYLYHLAGVDLVAISGLNASTVQAIISEVGLDMSRWRSEKHFCSWLGLAPHNDVSGGKVLRSRTLKTRNRAGQAFRMAAQAVSHNSQTAFGAHFRHMRARIGPAQAIVATAHKIARTFYHMLKDHTPFRQLSAEEYQRSARERELAQLHRKAAKLGFTLTPAPAPE

SEQ ID NO: 84207 - protein, 359 aa, unidentified
MKSKISNQASIGQKIFIGIDVHLKSWKATIMLDQTPFKTLSMEPSAKVLKQYLEKNFPNSEYFSAYEAGFCGFSTHRKLEENGIKNIVVNPADIPTTDKERKQKEDKRDSKKIANGLRLGQLQPIYVPEIEMEELRGLGRYRKSLVKDISRNKARIKQYLHNKGVEIPEELFAASKHWSSNFTKWLKGVKFHTESGHLVLDGTLETVNDLRKELLKTTKNIRLIISKDLNYNTAIQNLMSIPGIGFIVATTLFTEIFDVNRFKNVDHLRSFVGLVPSTNSSGEKERVGGMTHRGSKQIKEMLIESSWIIIRNDPTMAIAYNNYRKRMKPNEAIIRIAKKLVSRIRYVLKNNTKYEANKA

SEQ ID NO: 84208 - protein, 479 aa, unidentified
MVTGSRKRASKGSKKRFVGKPSGQIQERVQAVGPERFGIVAVDCAKRRSKWLLCNFYGKVVIEPTAVEHTAGALRVMTQHVTEACQAEGLTDTIVAVEMTGIYHKPVYRAFRKAGFDTRIVHPFASNHYRRPLHPDIKTDDKDLEAIFHAAVKGYGLATLPVGEVYQSLQAVSRHRHNLVKQRARLMVQMRRLLHQTMPGFADLFVDDKLFHRTIAMPIALKFSSAEAIRRAGVEGITSYLSQTKVRFQTRTIERIVAWAGTAAEPSELAAMHTRQWQQLNEVRRLFDEQIDAAEREAAGFLVKTPYILLLSVTGINVVSAARLAGEAGPIEHYASARAINGRAGLYPSRYQSDEVDHADGSLVRQCNRKLRGAAMLVAENLIKCHPYYRGLSALWIQRKVDPRDRRCRIANRAMRMVYQLVGGRQVWRGKGVDREYLLAKLQEFHLLHKTRIDQSVRDTRRAHSASTVWGLFSPGGIG

SEQ ID NO: 84209 - protein, 341 aa, unidentified
MTLYIGVDIHARQQTVSYLDTEDGNLEQQELHHERDDIRAFYSQFSGEVIVGIEACGYTNWFEELIEGLGHKLLVGDAAEIRRLARRRQKNDRRDADLMLDLLVHDEFPALFRYPPESRELLRQLRYRHKLVKLRTMVANTLHALAINAGVSLRAHLLTSGGRKQLAGLRLSLIAQQQRDELLSLADELSRRVVTVEQWLKEQARSDQRVQRLQTHPGVGLLSSLCLVHTLGDLTRFSSTRKVAAYVGFDPMEDSSAERKVYGGISKAGSRLLRYLLVEAGQSACKHDEQLKQFYRRLVPRRGKPRAKVAVARKLLLRCFIMAREEIDYAEFLRRGRKVAE

SEQ ID NO: 84210 - protein, 322 aa, unidentified
MKMAKPTTITAGIDTSKDKLDTAIHGQAGGLIVENMPAGWERLATWLRRAGVGRIGIEATGGYERGVMRYLQKAGFNVVLLQPLQVKAFARMRLRRAKSDRLDAALIADFTHTMDAANKMPPDARFDAMGELLTHIEQIEEDIVQRRTRLEHHRDVRIRKVIKDQIRSFTKQRLAEIRRLRAQILAHDDLKERYNLVLSIPAIGIRTALSLVVRMPELGRLSREEAAALAGLAPFDDNSGKHQGQKHIAGGRARLRRALYMAAFTGAFHWNPALQALYQRLTARGKGHKCAIIACARKLLIYANTVVARGTPWEKQSPPAAA

SEQ ID NO: 84211 - protein, 408 aa, unidentified
MELTPMHQRVVALDVHQAKITACALVEHDDGRLEVIQREFGAFKRDRRALAQWALEIAPQVVVMESTGVYWKSPFAALEAVGIVAWVVNARHVKAVPGRKTDVADAQWLATLARAGLLRASFIPPLLMRQLRLVARQRQKLVGMCSAEKNRLHKVLVDAGIRLNVVVADIHGASARAMVKALIAGRPMHEVLDCKGRLRASRDDLFEALSTEQFSAVHRFVAEEILQHIEQIEQRIARLDNYLLDGLKAYEPQLRLLQTIPGIDLQGAAMLLVEIGADMDHFGSAERLASWVGICPGNNESAGKRKSGRIRRGNAWVRRLLCEFAQAAARTRSALKAKFESLAIRKGHKKSIVALAHKMLRTIFAMLSTDTHYQDKTVDYEALSVARNAPRWIKMLRKHGFIATPASA

SEQ ID NO: 84212 - protein, 366 aa, unidentified
MKKHTSKKQTTRKGTAKETFAFYIGIDLGDKKSDICVLDEQGELHDQFRLRMNAQELQTYFGSLARSRVAIEAGAQSRWVAEVIERCGHQVYVSNTRQVPYIHQSDAKNDPGDAYKLAELVRFQPRLLHPIQHRSQEAQADLSWIRAREVLVGSRTQIINAIRGMSKAFGERLQKCSTTSFTGKRGDQIPAPIRSAVAPLLETIDHLNEQISYYDQMIEQVARTRYPRHRLLDQVQGVGVHTALAYMLTIGDPERFDKSRAVGSFLGLRPKQKDSGERKPQMGITKAGDEYLRKTLVNCGHYILGPHGADSDLRRFGLRICERGGKNAKKRAVVAVARKLAVLLHRLWISGEVYEPLRNRQVAAAA

SEQ ID NO: 84213 - protein, 347 aa, unidentified
MKFYTTFHKYYCGIDLHARILYICIIDERGNKVVHQKIKADKHELLRLISPYLEDIVIGVECMHCWYWVSDLCAEHDIDFVLGHALYMKAIHGGKAKNDKIDSYKIASLLRGGNFPLAYNYPANMRSTRDLLRRRTRLVQHGAQLKAHIVNTNSQYNYPPLELHMKNKCVRQEFQTRFDDQAVQRNVNFDLAILDAYAEELKKLEYYLESKAKKHQPNYYAQLRTIPGIGLILAMTILYEIGDINRFESVQKFASYCRLVKCKAESAGKTYGTSGNKIGNGHLKWAFSEAAVLYLRGNDKARCYLNKLQKRMSKAKALSVLAHKLGRCVYFMLKNKTVFDDERFLKS

SEQ ID NO: 84214 - protein, 374 aa, unidentified
MADYSEVFVGIDTSKLRNAVAIAEGGRSGEVRYLGEVENSEAATIKLVKKLAAQHRRLTFCYEAGPTGYGLYRQIKAFGHECVVVAPSLIPKKPGERVKTNRRDALNLARLLRAGELTAVWVPDARHEAMRDLVRAREAAVDDLKSKRQQVLSLLLRLGRHFTGKRTWTRAHMTWLVSQKLAHREQRIAFEEMLLAVRQAGERVIRLDQAIVAAVPDWSLAKVVTALMAVRGLDLISATIFLAEIGDLSRFASPRQLMAYLGLVPGEASTGDRIWRGGITKAGNHRARRILVECSWSYRHPPRVGKKKLSKVEAAPPAVQEIAWKAQARLTARYRALARRGKRPTLVVTAIARELSGFIWAVSRAAGTPATLAM

SEQ ID NO: 84215 - protein, 438 aa, unidentified
MRRKKNKATKKVHFESLSLIHPNAAGIDVGSKEHLVAVPPDRDPQPVRTFQAFTPDLHELAAWLKRCGIETVALESTGIYWISLYEVLEQYGFEVRVVNARHVKNVPGRSKSDVLDCQWIRKLHSFGLLNGSFRPDQQIRKLRTYMRLEDNLVVESTQAVHHMQKALFEMNVQLSNVISDITGESGLRIIEAILAGERDPEQLADLCSTRIKASRQTVAKSLHGNWDEALLFCLKTALETYRFSQKKIQDCDQCIERQLATFEIKAPLPDSKQNLQTQLHQVCGVDLTKIPGIKEQTAKIIISELGLDMTRWNTEKQFSSFLGLCPNNLITGGKIIRRSTRKVYNRAADALRLCAQSLTHCKSALGAKYRRLRTRLGAPKAIVAMAHHLARLVYRMLRYGQDYVEKGIQQYELKFRLQRIKWLKKEAHSLNLELVAAQ

SEQ ID NO: 84216 - protein, 448 aa, unidentified
MAKNSVTQVSNTIRSSHIHRRWQREFLQRMHQEPLSNWRCIGVDIGKYEHVVVAFDGHGALMGEPIRFGTQRCHYQDIFRKIDDWCASVKALPVIGMEPTGHYYEQFAYETANRYGQEQLFLIQSYDVSQRRKTWNKGTFKNDAVDASIIAQLLQEGHGRPYRPPKGVYQILYHLERYRWAREQAATRLKNQIIGHVDRLYPGLVIRNRELASRYKPMFRDLWKQKTPQRFIELFPDPYQLQKQTFMSLYESFRNAGYWMTRPYAKRIITATRSLCLPDPGLVEVRTGMLLRDLESLSFAEKQVTETEAEMARYLDQTWGKWLRPTGVREPLLASLVATIGDMKNYHYSRQIFGRSGLHSGCNDSGVKQRRGQGRRIVAPGDRHLRRQLLRFSYSMTPRYPVLLHYRAKLYSRGLSNVQAHVAISRRLTGVVYSVVTKQEPFDPGRFQ

SEQ ID NO: 84217 - protein, 346 aa, unidentified
MKEITTIGLDLAKQIFQVHAADFEGAPVISRKLRRADVLSFFRKTPRCLVGLEACGGAHYWAREIAALGHEVRLIPPAYVKPYVKRGKTDAADAEAICEAVTRKTMRFVPVKSADQQAAAMVLKTRELLVRQHTQAINALRAHLAELGIIAATGTTKVASLIDIVRDETDNRLPQAARFALSEIADQIEALNRKIGKLEHAVVMEAKRDDDMRRLCTIPGVGAIIAASIKATVPDPGGFTSGRHFAAWLGLTPKPHSSGGKERLGGISKMGNPMLRSLLVLGATSVLRHVKGNASAPPWLSALLARRPFKVVAVALANKMARIIWALLTKGGKYRTSGTTSEAAHA

SEQ ID NO: 84218 - protein, 424 aa, unidentified
MKVTYQTCCGVDVHKSFLVATIVKTTGGIEPSYQKKRFSTFNNSILEFKQWLLDNDCHDVCMESTGKYWVPVFNLLEDDINVVIANPKWVKAVKGNKDDTKDSKWIGDLFRLGLVKGSYIPCKKVRILREYTRYRYKLVSCRSSEKNRYQNALTVCNVALDSVVSDIFGKSSTSIIDYLLEQSGSSINHEEIASKLLRSLKSKEDAVIESVEGYQMTDAQKYRMRLVRAHMDYITAEINDVDKMIENMISSNTDFENAVQFLCTIPGVKRDSAITIISEIGTDMSQFSSSKRLCCWAGLTPGSNESAGKKKSVRITRAGVYLKPALVQCAHAAVKSDKSPYYKKKYESLVKRRGKKRAIIAIARMILTAIYQMLSTGEQWNPSDLYKIDMPVALVEKQKAKAIKQAKKLLQREGLLPPDEPFAS

SEQ ID NO: 84219 - protein, 372 aa, unidentified
MIVIGVDTHKRSHTLVALGAATGATCGQPRIAATDNGTLEALRFAAELDEDRVWAVEDCRHVSGRVERGLVASGDRVIRVAPGLTETSRKAVREAGKSDPIDATAIGRAALREGIDNLPVAHLDEQALEIRILTDYRDQIVAERVRLANRLRWHLVQLAPDIEAGLAPASLDHPQVRARVARRLARGPQVRVAKLILKRIGQITLEERELRAELKALIETHCPALLAEHGCGAITAAIIIGHTAGAKRFPTDGCFARHAGIAPIPANSGNTRRHRLHRGGDRQLNRAIHIIAFSRARTDPTTQAYLARKRAEGKSEAEAIRCLKRHLARHIWRLLYATRPPAPPTPIPPRPQSRRPISDIAGAAPTLMSCTG

SEQ ID NO: 84220 - protein, 338 aa, unidentified
MTIVMGFDQHREQITWDALDSSTGELRRGRIRPAERESFRHFLSRFEGERIEAALEATTGWRFMVEELRAVGAEVQLAEPAETSALRGPKRRAKTDRADARHLRELLQQGRVPRSWIPPEQILELRSLVRLRRALVEQRTGWQQRIQAQLFHHGHPARRDLLVRERRAWLEALELPHAARTQVEVALGLIDQINVQLEPLDRELRQIANSWPGTKALQAHYGIGPLTAVAFLAELGDASRFSSSRKAVRYSGLDITVSQSDSKRAPGRLSRQGPATLRWAAYEAAQAARHPRSPDRDYYLQASDRLGGNRACLALARKLVQRAYHTLRELGQEALQPA

SEQ ID NO: 84221 - protein, 366 aa, unidentified
MKKISTMQAFSNEIVKEQKLTIGMDLGDRWSFYCVLDEAGKIILEQKVATTPEAMKQTFGKIPRSLIAIETGTHSPWVSRLLTELGHEVIVAHAQKVELITKSNRKDDRHDARTLARLARIDPELLGPVRHRSAKAQIHLTVIRARAELVSARTALVNAARGLVKSFGERLPKCGTYQVNEKLAEGVSAELRDVLAPLLREVASLNERIKEYDERMEKIAKEVYPEVSLLQQVKGVGTQIALTYILTIEDPYRFPKSRQVGCFLGLRPGRRNSGESEPQKKISKEGDRYLRTMMVQGAHYILGPFGEDSDLRRWGMKLAERGGKNAKKRAVVAVARKLAVLLHRLWVSGEVYEPLRNSQKAMRAVA

SEQ ID NO: 84222 - protein, 400 aa, unidentified
MPVPGNRGIEYSKKPFKFSNTEAGFVTFKEWILDIKERHEKDKVVLGMEPTGHYWFNLGKFLQDNEMKPVLVNPHHVKKSKELDDNNPTKNDRKDPKVIAGLVREGRYMIPYLPDGVYADLRTASNIRFQLQAELTRIQNRISRWFNIYFPEYKTVYGKPDAKSGILILKAAPLPEDILTLGIDGVNQIWRDAKLRAVGKARAKTLIEAAEHSVGSKEGAVAARMEIRMLLEDYESRSIRLQEVMTLIEGLVKQIPMAEKLLEIKGVGIRTVSGFLAEVGDISRFNNPKELQKLAGLALVENSSGKHKGETTISRRGRKRLRYLLFEVAMSLVAKNPEFRELHNYYTTRRLNPLKKMQSLMAIAAKLIRVFYVMLTKGVNYDPKKMVNDIKRPAVYLQTA

SEQ ID NO: 84223 - protein, 355 aa, unidentified
MKYLGMDVHAKSTTWCLLDASGEVVREGSVATTAATLAALVQELAREEPILAGQEVGTMSYLVHDTLSAIGTKILSFNAAQLRMIAASRKKTDRRDAFWIAKALASGMYPHPVYLPTGEIRELRALLTRRRMLQTERNRWQYRARAALRASGRTLRTGGHYLRRSLKGYLETVSELEAPLRDTLALCQRQETALALELRQVDTELRRKARAIDAIQRLETIPAVGDLVATTIYAWVGEIGRFPDAKSLAAYAGLVPSVYQSAASQRSGGITKQGSKALRSALVQSAHVLTSRCRTVEARPLQAIGQRVRTSRGRRKIATVALARHLLRIAFYILRDGTTYDAKRLRGSTAESAAA

SEQ ID NO: 84224 - protein, 410 aa, unidentified
MEVLYPVCCALDVHQASVTACLRAPGDGPQRRQQVRTFGTTTPELLRLAGWLTAAGCTHVAMESTGIYWRPVYNILEGSCELSVVNAQHVKMVPGRKTDVRDSEWLAQLLELGLLRRSFVPPAAQRELRDVVRYRKRLIEERAREANRVQKVLETANIKLASVVTTVLGVSARAMLKALIAGEQAPEQLADLAQRRLRRKRAALGEALTGRVTAHHRFLLDHLLRHIEFLDGAIAACDRQVETLTAPHAEALTQLDTIPGVARRTAEVIAAELGCDMTRFPTAGHAASWTGLCPGNHESAGKRLSGRTRFANRTLRQALVESARGAVRKRDSYLAAQYRRLVKRRGDKKAIVAVAHSILVIAYHVLRDGQPYRELGSDYFERLNADRLTRYHTKRLAALGYTVTLTKCAA

SEQ ID NO: 84225 - protein, 427 aa, unidentified
MNYTQNEKIMSITEKTLVIGIDIAKQVQYARAFNYRGVEVGKVNPFENTAEGFRTFEEWAKSLATENQMNEIVVGLEPTGHYWFNLGSFLRNLGIKLVLVNPFHVKRSKELDDNSQTKNDLKDPKTIAKLVIDGRYSEPYIPEGIYSDLRIAMNMKESLSKNLNIIKNKVDHWLDKYFPEFNEVFADWEGKAALISLTEFPTPEKVLSTGVQQVVETWKKSVKRGIGFNRAVRLVEAAKISVGIIEGIRMAEKELKANLEQYNLYLKQYEQLEKEIEEMALQIPGVKEMLTIKGVGIMTAAGFVSEVGDIKRFTHPSQIQKLAGLNLIENSSGKHKGKTTISKRGRARLRALLFRVIMPLVSKNNEFKMLHEYYTSRKENPLKKKQSLILLCCKLIRIFFAMMNKQVEYNPQKLIKDTGFDLLPRVA

SEQ ID NO: 84226 - protein, 429 aa, unidentified
MRQVALDVHQGFCEVAIRQDGVTRSAGRVATGRDTLELFAQSLCPSDEVVMEATGPAMEIARIIEPHVARVVVANAQDVRAISHARVKSDRFDARTLAELLAAGMLESVWVPDAVTSGLRRRVARRAALVRQRTRAKNEIHATLARCLLGRCPVSDLFGTQGRAWLGAQELGEEEAETVAGCLRQIDFLDGEVAAIDQKLAQWAASSKDAKRLMSIPGVGAGVAVTLMAAIGDVSRFSSPRQLVAYLGLDPKVRQSGDEPARHGRISKRGNAQARSVLVEAAWIAVRQPGPLHAFGERVRARKGSQVAAVAVARKLACLAWQLLTKGEDYAFAQPSRVRAKVRRVELDAGAPPLATRHGGQRISASATEREAERPLAQQAEASYRRLIADWKATGPAKTKGAGATHGHASQRPSTGQAARQAQAQTPAL

SEQ ID NO: 84227 - protein, 388 aa, unidentified
MIQHESEESNRGRTVVGIDPCREFLQLAILAPNQETKFLKLPLAPSITAEIVKSTNPHTTQIAIESYGSYGKLFIYDLLKKGYDIREVNPHLSKKLSGLYSEEHSDRKDAESLAKALLLIPNLPKVAITDKQQWLAKLIRTRRKLVKDLNGYLNRLHIALTESYGAVYKKLFKILSMKKALKFFVDYPTINDSVSDERLKERLGEEKWELLRQAGKWEDNTYLETLRTEIRGYIGIIRSITSTKVAIETKIRDAADVVEEMKLLGTFPGIGGVAGATLLSEIGDIERFGTESHLSAYCGVSPVIWQSGTGQIRTKRRRRYSRRLKGILYFISLSQIRINPESRAYYDRKRNEGKTHWQAMNALSRQLIKIIYYILKDKVPYQRTPLVN

SEQ ID NO: 84228 - protein, 345 aa, unidentified
MPIVGGLDIHRKQITFDYLDTVTGEVRRGQIAPADRQHVRAWLARFAGQDDVAFAVEGCAGWRYVAEELAAAGIAAHLGEPADTAALRGRKRHAKTDKTDSRHLRALLAEGRLPECWIPPAQILEYRALLETYHDLRRAHTAWVQRIHAVFFHQGAPPLSEGALRTEPGLAGLRAAAAAHLSTAGQQQIATALDMLAATEAQLGPLRHQLRDAARHLTGAKVLAERLYGVGPLTALALTCWLGGADRFSSSRKAVRFTGLDITVHSSDRKGPPGRLSRQGPPVLRWAVYEAGKTHARTTAPDHGYYTAVADRKNTKRAALSEARKIVRQACHILTELGDDALTVT

SEQ ID NO: 84229 - protein, 377 aa, unidentified
MLRFPEIPLNKKGVTMTTTTCLHEFTAAAAPTTTMALLLAFELGDRSWKLGFTTGLGQPPRIRQVPAGAIDQVVEEVARAKRRLKLPANTSVISCYEAGREGFWLHRWLGAQGITNHVVDSSSIEVNRRARRAKTDKLDLTGLLNLLARYLLGDRRVWRVVRVPNVAEEDARQLHRSWETLQQDRTRLLCRLQGLLMTQGVRLHITADFLAQLDAVHLWDGTPVPAGLKARLTRVWAQLEVLDAQLKDLERTRAVLPADPGTATGRYARRLPTLRGIGPVGAWMLATEIFGWRQIRNARQLGGLVGLVPAPYQSGETAHDQGITHRGRSPPPHWPPTRSRDPRSPHRARVQRSRCGDRELVPTASYLRVGGRAPNMP

SEQ ID NO: 84230 - protein, 341 aa, unidentified
MEKATIIGIDLAKRVFQVHAAAKDGRPILRKKVSRAQLLGFLAKQPRAIVAMEACATAHEWGRAISGLGHDVRLIPPIYVKPFVRRQKNDAADAEAIAEAASRPTMRFVAVKTEEQQSRSMIFRTRDLLVRQRTQLVNALRGHLAEHGIVVAQGLAKVKVLATAMRDTGSLHPLVRELGERYLDHIARLDVEIAELDKRLRRPSKDDETAKRLQSMPGMGPITAAAIEAFAPPMATFKRGRDFAAWLGLVPRQHTTGGKPRLGRTSKMGQRDIRRLLIIGAMTVVRWAVRRGAAKGSWLARMLAKKPRLVVAVALANKMARSVWAMLSKGEEYRGSALASA

SEQ ID NO: 84231 - protein, 350 aa, unidentified
MSSTSTLITISTIGIDLGKNTFHLVGLDRRGAIVSQLKLSRAQIERRLANLPPCLIGMEACSGSHHIGRQLTALGHDVRLIPAQYVKPFLKGHKNDYRDAEAIAEAVQRPTMRFVAIKTPEQMDLLALHRVRSRLVGQRTGLINQIRGFLIERGITVRQGVMPLRKALPDILGSSTGTLSSRVVRLIADLMQDWRRLDERIETVSTEIEALAQQDESCQRLMTVPGIGPIISSAVVAAIGNGSGFKQGRNFGAWLGLVPKQESTGDRTILGKISKRGNKYLRTLFVQAAHVVLARRPATAKRGLWPWIEQASKRLHRNMLAIALANKLARIAWAVLARGRAYEPRVPVHA

SEQ ID NO: 84232 - protein, 353 aa, unidentified
MGVAEGTRGGEVRSFGTVANRAEAIEKLVGRLARDGYCLSFCYEAGPCGYGLYRQLTALGHECVVVAPSLIPIRAGDRVKTDRRDAVMLAKLHRAGELTAVWVPNGAHEAMRDLIRGRATAVQVLGKARQHLQGFLLRHGRVYPGKRGWTQAYRRWLTTVRFDHPAQQAVLQDYIHPVTDAEARAARLTREIEGLVAEWLMAPVMAALQAMRGVAFLVAVTVVAEVGDFSRFATPRQLMAYLGLVPSEHSSGASVRRGGITKAGSGLARRILIEGAWSYRMPARVSRKLYDRLEALPQAVRDIAWKAQARLCTRYRRLTAAGKAKVVVTTAIAREMVGFLWAIAHEIQPRPAS

SEQ ID NO: 84233 - protein, 404 aa, unidentified
MGQRLDPAHVARKDGEVKMSIVMGIDQHRAQITAEWIELETGEIGRARVRPADRTGVRRFLARFSGQPLEVATEATTGWRFLVEELRAAGAEVHLAEPAETSALRGNKKHAKSDRADARHLRELLLAGRVPESWIAPDHILDLRTRVRLRHTLIGQHCEWQQRIQAVLYHHGCPQRRGLMVGDGREWLAGQPLPETAREQIVVALAMIDALEVQIAPLDRELRAYARAQTGCRALIDAYYGIGELCAVTIVSELGDCRRFANSRDAVRYGGMDITVYQSDRHRAPGHLSRQGPPALRWALYEAAQVARHPRSPDRAYYEQAAERLGGNRACLALARKLLKRCYHTLRELDDHALAPPAQQTRARAGSRAERRPATPPASSRQANPRPSACGGRSIRSSTALRGN

SEQ ID NO: 84234 - protein, 345 aa, unidentified
MKIVGCDLHTRYQQVAMLDQETGELIERRLEHQSGEALAFYAALLGPVRVGIEATGHTRWFERMLAELGQELWIGDAAQIRASVVRKQKTDARDAAHLLDLLLSERFPRIWRPTMAERDLRQLVWHRQKLVWMRNAVGNQLHALAMGEGVCRKKKLFTKKGRVELEGLGLGVWASYRRQELLTMLDQFDGSLRELDRAVAEQAEQNAAAVLLMTHPGVGPVTSLAFVLTLGPVERFERSKQVASYLGLNPREHSSGGRQRLGAISKQGNPMMRSLLVEAGHTAARLDGELRQDYQRLKLRRGSGVAKVAIARKLAVRMYWMLRGPANYAQLVRTQGSPRGTLVGQ

SEQ ID NO: 84235 - protein, 359 aa, unidentified
MKIVGCDFHPSYQQRAILDKETGEEEEKKLMHAGGEAEKFYRELQGPALIGMEATGNSRWFELLVEKLGHTLWIGDAAKIRACYVRKQKTDKRDAGHILKLLVEDRFPRLWLPDAQQRDMRQLLTHRHKLVSVRTRLKTELQHLALNQGVQKKRKLWNEQGRALLASLPLQGWTQQRRKDLLDLLGVVEPQIEQLDKAVEQAAQADPQAVLLMSQPGVGPITALAFSVTIGDVSRFERSKQVSSYLGLIPTEHSSGSKRRLGSISKQGNVFLRTLLVEAAQSVVRHDPGFRKEYQHRCHHKQKGIAKVAAARKLAVRLYWMLKSNKPYSELVLNGGSPRHPVAAKANAVHLNGHPRISH

SEQ ID NO: 84236 - protein, 428 aa, unidentified
MTYRIAAIDVHKKMLAVVVADVAGEDEYEFERRKFGATPDQLHLLAQWLVEQEVEEVVMESTAQYWKPVWGALERYWKPACQKRDGATKMSGTLHLCQAKSNRGPRGRKNDFGDGERMIKRLVAQELVLSFVPDPEQRLWRTVTRRKYQLTRDKVRFRNQLESLLEQAHIKLSSFVSDLLGVSARRMLKALAEGETDPAALAALADHRLRATPEELRDALGACTELHEVYRRLLKMALEELRLMEEQIEQLDREALGLLQEHQDVVQRVAEVPGFGVDSALQMIAEVGPEAAAFRSEKALASWVGVCPGEEESAGESQSTRSPKGNRHMRRLLNQAAQSAVKVKGSIFEVTFHRLLAAGLKYKEAIWAIAHRQCRLLWLILHKGVRYEERGPAVSAKSKRTRAARMIKELRKLGYRIEGGPLPAGNPA

SEQ ID NO: 84237 - protein, 344 aa, unidentified
MSIVRSVVGGVDTHADTHVAAAIDSNGGMLGIESFPADLAGFEALLGWLTSFGEVSLVGVEGTGSWGVGLSRFLHDEEIEVVEVDRPNRQTRRKVGKSDPTDAVAAARAALSGAASVIPKTRNGPVEQMRVLLVARRSARHQRIQTLNQLRHLVFTAPEEIRVRFKDRYKTGLVTEAAKMRPRKGSDPVTYTTNLVIRNLARRIQGLNTETASIDDMLRELVAAAAPSLLALYGAGADTAASLLVTAGDNPDRLSSERSWAHLCGVAPLPAGSGKTSGRYRLNRGGDRNANSALYRIVLTRMSSNDETRRYVARRRDEGLSTPEIMRSLKRYVARHVFKHLQMA

SEQ ID NO: 84238 - protein, 402 aa, unidentified
MHIGWDWASEAHDVTVINDDSEIIDRWAPTHDEAGIAASIERLAQHGDPAELAIGIEATHSLVIDRLLAAGHPVVPIHPNAFHATRPRWGASKAKSDPGDSYKLADYLRTEGHRLRRLQPLTPPTAELQTLTRTRDDLITAKVAASNQLRALLERHWPGGTWIFARLDSDIALAFLTDYPTPTAAARLGERRMAAFCRRHHYSGRRPASELVARLRAAPAATGVLGDHILRAAVSARITQLRSLLNSIEQLDHAINTALDAHPKTPLLVTLPRVGRINLAQLIAELGPILDRALDADHACTEAGVAPVTRASGKSASVNFRWAVNTRARTAVTIWADNSRHNSPWAAQLYANARARGKRHPHAVRILARAWLRVVWTCWTTNTTYNPTRHRAEQRLNQQIVA

SEQ ID NO: 84239 - protein, 372 aa, unidentified
MDKGTSFVGMDTSKGSLRVAALYEGREGFGEWEVVHEAAAVRRMVRKVQREAGGPVLFCYEAGPCGYVLQRQIKALGSDCIVVAPSLIPVKPGERIKTDRRDARKLAELLRAGLLTEVHPPRVEEEAVRDLVRCREDVVEDLARCRHRLAKMLLRRGYLWRSGRQWTTAHRGWMRALVWDHQADRVVFEDYLLGLEQAESRLLNLNKELETAAQTEPYRLLAGVLGCYRGIGTVTAMTILTELHGIERFTSPRQLMAYLGLVPSEFSSAERVFRGSITKAGNAHLRRVLAEAAHQYRHRPWVGPLLRRRREGQPAFAIAQADKAQQRLHRRFRRLLLRGKPYGTIIIAIARELVGFLWATLQQAQTSQRKAA

SEQ ID NO: 84240 - protein, 411 aa, unidentified
MRLFAGDDWAEEHHDVEVMNEAGKVLAKKRLPEGVAGIAQLHELIGRHLGEDADEAEVIIGIETDHGPWVTALVTAGYTVFPVNPLQASRYRERHGVSGAKSDGGDAHMLADMVRTDSHQLRAAAGDSAEAEGLKVLARTHKTLIWERTRATQRLRHQLREYFPAALEAFEDLDAGDTLELLGKAPDPARAAKLTRAQVSAALKRARRRNIPDKATAILAALRAGQLGQPPALAAAYAATVRALIAVIATLNEQVKNLQGQVEENFGRHPDAEIYRSQPGMGAILGARVLGEFGDAPHRYADGKARRNYAATSPITRASGKKKVIAARFIHNDRLVDALNAQAFASLNASPGARALYDELRARGIEHNDALRRLANRLVGILHGCLKTRTLYDEATAWSHRQNLPQSSVAA

SEQ ID NO: 84241 - protein, 376 aa, unidentified
MERGSPMLNTTTFVGLDVHARSIKAVALDAMTGEVRSATFGYDAAEVAGWVSSVDPSAKCVYESGVTGFDLQKRLSSMGIDCVVGAVSKMIKPSADRRRKNDRNDAEFLARMLSVGNVVEVWVPDDECEAARDLVRALDDARDDLKRCKQRLSKFLLRHGHAFSETTPSGRRKGNWTAAHWAWIKSISFAEKADDDVLAYYIDATRRAMEDKARLERLVEAEASKPRWKRRVDSVRCLKGIDVMSAADLVFEAGEFSRFKNARSFAAWIGLTPSEHSSGESVRQGGITKAGNKHLRRVLVESAWHYLGCSPHSKDLARGQAPDPGARRHAAKGVRRLVGRRAAMLERGVHKNKANVATARELACWCWAIGCMVENG

SEQ ID NO: 84242 - protein, 353 aa, unidentified
MEIVVALDVHRRQITYKALDRETGEVRRGRIAPAARAEVRAWLAQFAGCEAEFALEGTTGWRFVVEEIERAGHSAHLADPAETAARRGRKRRAKTDNADCDLQLRLLLAGELPESWIPPAQILELRTRVRMRKTLIDQRTAWQQRLQAQLFHQGIPAGLRLRTEAGRDALAQAELSPAGRELVALGLRMIDALDRELAPLDRELHAFARRQRGCRALIAGLYGVGPVSATAILAELGDARRFASSDDAVRHSGLDVTVYQSDSKRAAGRLSHEGPELLRWALFEAAVSAARAGSPDHAYYLQVAERLDHTRACLSVARKLCRRAYHILRELGDEALAPVDRDRQAEEAIAAAA

SEQ ID NO: 84243 - protein, 421 aa, unidentified
MQVLYERCAGIDVHKDQVTVAVRVPGSGPGGRDTKVRKFEAFYGVLQRMARWLASQGVTHVAMEATGIYTMPVYHALLEPGCFEQVLVCNAAHVKNVPGRKTDAVDASWLAELLECGLLKGSFIPAAGIKAARDVIRYRRKIVQQRSSEVQRLGGVLQDAGIKLDSVASSIDTVSGMAMICGLIDGERRGQVLAELARGRMRRKIGDLSQALEGRFGDHHALMCQLHLDHIAQLNEMIARLDAQVEAMMVPFAAQRELLATAPGIGQVAAAGIISEIGTTPHEFFTTASRLASWTGLCPGNHESAGKRKHGKPRKGNQHLQSLLVECAWSAVRTDGRLKARYHRLVLRFGGYRNKAAKKRAIVAIAHTLIVIIWHMLATGQAYTDLGPDFYARHADPEKETQRLLARLEALGHKVTLAPAA

SEQ ID NO: 84244 - protein, 415 aa, unidentified
MTEQIHVSAGLDLHKKFILATILSDAGHKEQRRFERTESGLFALREWTIENRCDVIACESTSDFWVPVHTMMSGHVTVIVGNARDIKMFSHKKTDKVDSELIAQLALKGMIRPSRIFAQVHRDFRSLVRLRHKLVQKKTDIKNEIHHILDSELFRLSSVMTDLFGKSGLRILDTIIAGSSMDEIMKTLPRNLRKKRVQFEEILKTTISTEAIFRLKHCLNILKCLTDEIADLTARSLFYANENFRHEMKILKSVPGVGNIGAFTLLAEIGDFSDFSSGDKLASWLGLVPNVYQSADKLRTGSITKRGSNHARWILVQIAHAATRSKNSVFRQFYDRKKPIIGSGKSIVALARKIVTIIWHLITHNEFFNHEDRRANISHNSVKVQIPTSVSLDEVLTILRNAAITLKEPDSGLGD

SEQ ID NO: 84245 - protein, 341 aa, unidentified
MKSTTIAVDVAKEVLEVAVSVRPGQVSEQHRLSRAAFMKFCTDQPSATILLEACGSAHYWGRRLQSLGHRVVLLPPHATRPYVFRNKTDRTDTRGLLEAFRNEDIHPVPVKSVSQQALTALHRLRSTWLATRTARLNTVRGLLREFGCTIPVGAHHVLAKTWDLLADPESGLPDALRPGLAAACTEIRDLEGRIRVVEDQLQALADQTPAVARLRSIPGVGLITATALVAFVGDVQRFPSGRHFASYLGLTPRERSSGLVRRLGAISKRGDVYLRMLLIHGARAVLWAAKKRAAPDRLRLWALHLQNLRGHNKAAIALANKLARIVWAVWKHDVDFREVAA

SEQ ID NO: 84246 - protein, 364 aa, unidentified
MTKLQVKVDFTDQIIYVGLDIHLKSWHVTIYFGQRLQKSFRQDPCPKKLANFLKENYPGAKYKCAYESGFSGFWVQRQLAKLGIECIIVNAADVPQTNKGMHFKTDKVDSKRIGVALESGMLQSIYIPDSEQESDRHLVRCNERLGRDLTRCKQRIKSMLYQIGIAIPQEFNNGSWSNKFVQWLKDYKLENNSSRRTLDHYLQIMFNIHQEKQNTLKDIRQMLKQEHYSNLVKLLRSVCGVGQMTAITLTTEIIDMRRFRTFDALNCYIGFCPNEYTSGEKQRKGHMSFRLHKRLRSLLIEDAWIAIRHDPALSYCFYKSKMRLGEKRAIIVIARKLLGRIRAVWLSGKPYEKGIISQGESINN

SEQ ID NO: 84247 - protein, 355 aa, unidentified
MDKIKTNFEGQTVYVGMDVHKASWNLGIYLNDVYVKNVHQKPNPDVLRNYLQNQFPGAVYKAAYEAGKFGFWIQRQLSSRGIECLVVNPADIPKSQKDSLQKTDKRDARNISLRLQSGVLRGIHIPDEQQEADRIFFRHRKRIWKDLTRCKNRIKGCLAFSGIDIPEQYDNASWSHNFINWLKELDCKQVSRRTALDYMIKQMEFLRQELLSISNGIRKIMREQRYKTNYYLLRSIPGIGPLTAASLLVEIGDVKRFLTFNHLNSFVGLLPMEHSSGLSENKLSLTVRKHRQLRSDLVESAWTAKRTDPAMALYFQEQIKRKDSKIVIIKMARKLLNRIRFVLLNQQPYEFGIVK

SEQ ID NO: 84248 - protein, 345 aa, unidentified
MSNTMIGLDTAKSVFQIHAVDEAGNVAIRRKLRRNELIPFFEKQAACTVVMEACGAAHHWARVLTGLGHEVKLIAPEAVRPFVKKGKKNDAADAAGICEAASRPGMRFVPIKSLEQQGILALHSARSLLVKQQTMLANAVRGLAVEFGLAVPQGISKLAELMALVEADATFPEKARQVVRGLLDQRRWLAESIETFEAEIVAHARRDDAARRLATIPGIGPITASLIAATVADIGVFPSARHFAAWLGLVPRQHSTGGKTRLGRITKAGNREIRRLLVLGTTSMVHRAAHWNSAAGVWARGILERRPVRLVTVALANKMARIAWAVMTRKEVYHAKGRVAAAAAA

SEQ ID NO: 84249 - protein, 490 aa, unidentified
MKKRSIYGQQSQELMRIYEEAGRPSKVLIGAIDYAKRDHVALFCNGNGDILRKPFPVRNTPEGVEFLLARMDEVCRYHRINPKHAFFGGEDCGSYTENFAECLRERGWLVAGVNAQDAKRQRENLQASTDRLDLLGIARMLINRRGNCAPSQHGAYRNMRTLVRHRRRLVSLTTEERNRIHALVDRLFPGFLDEKKSGLTPFHPPSLRLMEDRFSARQIARRKRETLAGLISRAGGLRAEEGATKLQDYAATVLHASAEYVSTMQFSLAQHVSLYRGLQGNIGALEREMAVWLAQTQGAFLTTVKGVGMVLSAGVAAEIGDPTTQRPVNNLVSYAGIIPRVSQSGGPDAEAHVGSVARRCNRILKDYLVQSASHIGLHGVADLMEDHRRRDAAGQHADYGIARRYLRLGMRLMRGSCVYLPPALRQPDVTESERVEYYQSFWPYLVDKWKKYGAHEIAFAPENPLGQWRAMIQELYGLELKLTGKTKARG

SEQ ID NO: 84250 - protein, 365 aa, unidentified
MIQDTVVGLDVHADSITAAILSPTSDTPEVVKLSGDLMQVRRLFRRLSDAGPVKGCYEASGSGFVLQRLLTYDGFSCEVIAPSLIPRKPGDHRKTDRLDAIMLARLYRSGHLTPVHVPDEGHEALRRLLRLRETYHAYCTATMQRISGILRNHGHVFKEGKTTWTKKHRRWLGELRQSLQGPLQTALATELEHLEYLETVQSAMDAELERYAAFPCYRKTVEALCCLRGVKTLTALTLLVEIGDVRRFRSPRSLMAYFGLVPSEHSSGSREYRGSITKAGNVHVRRLLVEAAWNNRHNAGAALILKRRRQGQPPEIVAIAMKAQLRLVNKFLRLDQRKHRHVAITAVARELCGFVWAILTALPEH

SEQ ID NO: 84251 - protein, 388 aa, unidentified
MYYAGIDVSKYKHDCFIQTDFGDVINAGFSFDNNAVGFDVLQAELEKYGRGNIRIGLEATGNYGINLKLFLERVGFDFMEINPLLISKHIRSNTLRKTKTDKLDARAIADYVASKEYRQHPTAFYPGFALKQLTRLKSSLVKGRSRYLIQLTNVLDCIFPEFKPLFNNKFSITALYILANYPSPDAIANMNSRSYDIIRRKSRGHFSMDKFVRLKSLAKNTVGVFSECHRIELETLLDLYSQIDAKIEELETHITEIITELNPPTLSIKGIGAISAAVIVSEFGNFSRFDNPNKMLSFAGLEPGHFQSGTTEYKGRMVKRGSSHLRNALMNCARAIRLHNETFAVYFRKKMTEGKPYDVATSHVAKKLVRLIYALETKGIMFDPEALR

SEQ ID NO: 84252 - protein, 312 aa, unidentified
MKGEEPSVGIDVSKAFLDVSLYPSGKTWQIEYSPQCITVLAEELADLGPAVVVVEATGGLEMSLTAALSVGGLPVAVVNPKRVRDFARATGRLAKTDKLDAQVLAQFGAMVQPPIRPLPDADRQELKALVTRRQQLLEMITAERNRLRRTTPGIQHRIDVNIQFLREQLKELDRDLADFLKSSPLWQEEARVLRSVPGVGPVVTATLIARLPELGSRNCKQVAALVGVAPFNRDSGAFRGKRKVWGGRGALRTALYMATLVATRCNSVLQAFYQRLCAAGKPKKVALIACMRKMLVILNSMIKHHRTWNPAS

SEQ ID NO: 84253 - protein, 413 aa, unidentified
MDLLVERCAGIDVGQAEVVVCARVADAATGAAAELVASYGTTTPDLLELHDWLAGLGVTQVAMESTGVYWKPVYYLLEDDFTVLLVNAAHVKHVPGRKTDTIDAVWLAQLLAHGLLSPSFVPPKPIRALRDLTRYRKALINERTAQVNRVHKVLQDAGIKVATFASDIFGASGRAMMRSLIAGEADPTALADLAKGRMRAKIPDLNKALTGRFSEHHAFLLQRMLDHIEFQEAEIAEPDARIEGLLATSAAQVQLLATIPGVDVRSAQTILAEIGTDMSVFPTPGHLASWAGMCPGQRESAGKRGSGKTRKGSKWLRAALVQSARDTTRSKGTYLRERYVQLRRRRGDARAVVAVGHEILLAAYRVLDTSQPYLDPGAVEVTERSAERARRHAVANLRRLGFTVTLGPAPSAV

SEQ ID NO: 84254 - protein, 348 aa, unidentified
MFYKKRTMQTTKYFIGFDISADDFSASCITSPDNLVFSTQKFLNNFDGFSSFVSLLSKHNIQPSEVIICMEATGVYSENLSYFLASKGFIVCIEAPHKIKNKTKDSPRKNDFVDALAIAEYTYRYTDKLSAWKPKDEILEQIQVLLSTREHLTVQMTANVNALKTLKYKYYQTPLANQIYEQTINKLKEHIKQIDQEIKNLIDKDDSFKSKTSLAKSVPGVGLLLAANLLVLTKGFTEHVNYKHTAAYSGICPYEQTSGTSLHKPPRSMKSGPAKLRKLLYLAALSVRTHNINFKKYFLRKVAEGKNKRLVLNNIENKLLKIIFAVINSGVAYTENYKSINPTLLKTA

SEQ ID NO: 84255 - protein, 342 aa, unidentified
MEKITTIGLDLAKHVFQVHGIDAGGQVMVRRQLRRGELLKFFEKQSPCLVGMEACGTSHYWAREIAAFGHTVKMMPPAYVKPYVKRGKTDAADAEAICEAVTRPTMRFVPTKTIEQQSVLMLHKTRDLLIKQRTMLTNALRSHLAEFGVISAQGPTGLQSAIACLHEMQDQWPELARVALHGLVDQLRELRLQIEKLETRLHAWHRSDETSRRLAKVPGVGPITASAIVAAVPDASIFRSGRQFAAWLGLTPKAHSSGGKEKLGGISKQGDGYIRRLLVVGATSVIRVARKETSSKLWAAKLLERKPARVVSVALANKTARIVWAMLARGEDYAVQAQAGAA

SEQ ID NO: 84256 - protein, 392 aa, unidentified
MKYVGIDLHKKTIVLCVMNKERQVVQRQKFFCAETDRISEYFRGLGEFSFAVEATGTYEWLANLLSPLAQSWVLVNPSRFEMIAKSAQKTDRHDAHNLAEFLALGMLPKAYYPPARVREHRLLVRYRVQCRRRVSHLICRIRQVAARYNADRKDLLDSEVMEAFQQRADLSEADRFVLKRLLIEHRHALEYLEEAAAELSRFAKQASPAEKREREILQSAPGVGPIVTDVVLAELGEVSRFPSIKDVSAYAGLVPKLDESGDKAKQLKITKAGSRLLRWGMVQAAWQAVRTSDRWRGVFESIKRRRGAKRAIIAVARRLLGVLVSMLKQGKEYRWSLAELKYREGQQEKRRQRRIMKRQAAATKQATKSEVAPVQEEKPKRTRRTKKETVMA

SEQ ID NO: 84257 - protein, 372 aa, unidentified
MNNTTVYVGMDVHKESFTLCAYTLEKEKGSYSRRTPADYKEVLKYLEFLRTVYGNDTIFVCGYEAGCLSYTLYHQLTDHHVNCVILAPTTMLEQRGRKRIKTDKRDAEIIGKCLAQHNYSPVHVPTASDEEVKEFLRMRDDHKLALIKVKHQIQAFCLRHNYRYDGNSHWTAAHINWLKSLTPEALYKEILDEYLLTYTTLSNKLERLDKRIEELAAKPEYKEAVKKLCCFIGVKTHTALSVIVEVGDFKRFASAEKFASYIGLVPGENSSGDGQTRLGITKAGNRHVRMLLTEASQCYSRGQIGYKSKALKARQDGNTPQVIAYADKANERLRRRYYKMVLSKCKKHNVAKTAIARELACFMWGMMTDNIA

SEQ ID NO: 84258 - protein, 379 aa, unidentified
MDRTTTSADLRDTLYGAMELSKNTWLLAIQFPDRPQPSLYPIAGGNTEDLVAKLIAASDRWAKVSGKRPSITLCYEAGYDAFWLARFLKTRGIECLVVDAASLQVNRRGRRAKTDRIDVEMLLRALIAWCRGERHVWSVVRIPSIDEEDLRRSHRERSRLVQERTAHINRIKGLLFAQGIRGINVRSKYKRLEVSKLVTGEGRPLPPRLAREVVREIERLTLVQQQLVAIERERDEAPTPCTSTEKKRLQLSLLNGIGPTVSAIMAREVYYRQFTNRRQVAGFLGLATSPHDSGAVERSQGISRAGSGPVRVTMIQAAWLWVKHQPKSEITRWFLRRTDRQSGRIKRIAIVAVARKLAIALWRYVEQGLVPQGAILTSR

SEQ ID NO: 84259 - protein, 359 aa, unidentified
MNRLAEPMPIKSLVAGVDLGDADSHVCIIDSESGEVVEETRLRTRPRDVAAYFARHSKLRVAVEAGAQSNWVSEAITAAGHDVTVANAARVRLIHGGTRKNDRLDAQKLARLLRYDASLLAPIQHRRLSTHHDMAMLRSRDALVRTRTALVNHVRGVVKQFGLRVQTCETSAFAARARDVIPPELAPALAPSLDAIATVSEKIRTLTWGVERLCKEKYPETALLMQVHGVAEVTALTFVLTIENPARFARGRDVAAYLGLTPGEKQSGASNPARGITKAGDKQLRRLLVQCAHRILRQDAPETDLKRHGLKLARGGSKDNKRKAVVAVARKLAVLLHALWLSGEVYEPLRNTRGQTDRT

SEQ ID NO: 84260 - protein, 347 aa, unidentified
MEKVIRIGMDTSKSVFQLHGVNAAEEVVLRKALRRRKVLEFFARLAPTKVGMEACGGAHYWARELRALGHEVFLLPPQYVKAYVKRGKNDRADAEAICEAMSRPTMRFVPVKSAEEQAALMLAGLRDQMVRRRTQLTNAIRGYAGEFGLVAPRGLSKIEPLLVRIAEDESVPELAKDIFAAYGQEYAELERRIAKVETRLMAWFRQSEPSQRLTQVPGIGPIIASMLVMKVPDPGAFHSARHFAAWLGLTPTDHSTAGKHRLGVITRAGDEDLRRLLVGGAMSVIQQADRGRGSPSPWLLGLLKRKELKLVAVALANKMARIAWKLLVSGENYDPRRSKVRALDKAA

SEQ ID NO: 84261 - protein, 349 aa, unidentified
MSQIAQTAVAVIGIDIGKNSFHIVGHDERGAIVLRQKWSRGQVGARFANMPPCLIGMEACVGAHHLSRKLNSLGHDARLMPAKYVRPYSKGQKNDFRDAEAIAEAVQRPTMKFVATKTADQLDLQALHRVRERLVSQRTGIINQIRAFLLERGIAVRQGQRFLRAELPRILATPPDVLSPRMVRVIEDLAGDWRRLDERIEGLSAEIGALARADSGCERLMSVPGIGPIISSAMVAAIGAGDAFSKGRDFAAWLGLVPRQMSTGDRTILGKISKRGNRYLRVLFVQAAWVVLIKPTSWERHGLKHWIEAAKKRLHHNVLAIALANKLARIAWSVLARGRGFEASKLHAA

SEQ ID NO: 84262 - protein, 308 aa, unidentified
MRYIGAGIDISKAVLDVAVEGEKVVRRFANSPAGFAQAIAWLAPQQPDQVVLEATGGYEQAALDALYEGGLPMIRINPRQVRDFAKATGQLAKTDRLDARILALMASVLPLIRYRPLDAKALHLKQFHLRRAHIIQMLTAEKQRRRQVVEPVLREMLEEHIRRLEGDRAQLDAHIDRLLVGTLPARVLGSIKGVGAGLLTSIICDMPELGHVNRKAIAKLYGMAPLSRDSGTFSGQRTTWGGRASPRTATYMAALSAVRHDPYLKAFYDGLLARGKLKKVALVAAARKLLTILNARMRDALLAEQATC

SEQ ID NO: 84263 - protein, 346 aa, unidentified
MMIIGCDYHPSWQQICWLDTATGETEEKKLEHASGEAEKFYRQLPGPALIGMESTGNCQWFVEMATTLGHEVWIGDAAKIRASEVRQQKHDRRDAALILKLMLEKRFPRIWTPSGLEKDLRQLLIHRYKLVRIRAQVKNELQHLAMNQGVTKKKKLWSKVGEQVLRELPLKPWASRRREDLFKVRGMLDEQIAPLDQAVAEVAEKNEKARLLMTQPGVGPITSMAFVLTMGDVSRFQRGKQVASYLGLIPREYSSGGHQRLGPISKQGNRFLRMLLVEAAQAAVRYDPGFRNEYLHRCHTKAKGVAKVAAARKLAIRLYWMLRTNRGYPEVVRVESSSRVAVVRAS

SEQ ID NO: 84264 - protein, 385 aa, unidentified
MDPTSCPMPSARALHCALELSKKSWLLAIQFPDRPQPSLYAIEGGNTEKLMARLTAARDCWAKMSGAVPVITVCYEVGYDAFWLARFLEERGVECLVIDPGSLQVNRRGRPVKTDRVDVKMLLRTLIAWGRGERHVWSLVRIPSIEEEDLRRSHRERSRLVCERTAHINRIKGLLFAQGIRRINVKCQYKTLAVDKLVTGDGHRLPPRIASEIAREIQRLAMVQDQIAEIERERDTAPTPCEATERKRQLLLQLKSIGPAISALLSREVYYRQFANRRQVGSFLGLTPSPYNSGEEERCQGISRAGSGHVRAIMIEAAWLWIRHQRKSALTRWFVERTAGQSKRMRKIMVVAVARKLAIALWRYVEYGLVPHGAILNPPTTGKAR

SEQ ID NO: 84265 - protein, 346 aa, unidentified
MRPNLFNDQDHVLSQCVGIDVSKKSLMATMCMFSLAEEAHYSKAIEFSNTKAGFNQLVKWSRKETCKGVPLRYVMEATGVYHEDLANHLAKIGCVVIVLMPNKAREFAYWEGMITKNDIVDSRVLALVGCVKRRIRQWQPQTPIYHELRTMTRFSQDAKKLRTELKNHLEALIHGHDTEKSVIKHYESMMAALNKRIEMNQKNMEKKVASDKALSKKVANIITAPSLGFLSVVTVIAETNGFALVQNRKQLASYAGFDVIDKQSGPVEHKSRISKKGNSRIRSILYMPAVQCPLHNRHLKKVYDRIVGKHPDSKMIAVTAVERRLLLLIYTLWKSDKPYSDDFNKE

SEQ ID NO: 84266 - protein, 402 aa, unidentified
MNAVGIDVSKGKSMVAIMRPFGEVVASPFEVTHTGSELSELANTLKNLHGETKVIMECTGNYYLPIAYDLHEAGLFVSAVHAKLIHDYGNNTIRRVKTDKADSIKIANYGLSNWMELPRYWPEEDIRRMLKAYSRQYTKYIKLKVMLKNNFIALTDQTFPGVNELFKSPPRKSDGHEKWMDFAFKFWHCECVCGLREKEFIERYRKWCRRAGYHFRQEKAEDVYVSALGHVCVVPMNDCTKQLVTLSINQINAVSESIAVVAREMKRLAELLPEYPVISQFYGVGDILGPQIMAEVGEVARFRSKGSLVCFAGLEPPEYQSGKFESENRHISKTGSPHLRKALFQVMDCILKKSPQGDPIYQFLDRKRTEGKHYYSYMIAGCAKFLRMYYARVNEYIDKMDD

SEQ ID NO: 84267 - protein, 312 aa, unidentified
MNEKKTSVYAGLDIAKASLQLHLQSQSYDLPNTTEGHAQLHKRLGTVPGVHVICEATGGYERAVVAVLHAALVPVSVINPARVRQFARASGELAKTDPIDAAVLTAFGQAFTPQATAPRPATEIKMAALVTRRAQLLELRVAEEQRADTCTEAALGKLFPRWLAQVEKQITKVEALIEELLHEQTKLAAQVQRLDDITGVGRLTAVTVLATMPELGQLNRRQAAALAGLAPYNRDSGKWAGQRHISGGRADVRRGLYMAALSASRSNHLLKPFYDRLIAAGKPAKVALTAVMRKLIVLMNHLLKTPEFALAT

SEQ ID NO: 84268 - protein, 331 aa, unidentified
MEQRKTIIGIDVSKKTLDIFIKTLDVYLQISNNAEGFKKLLALLKASKLKLEDCFFVLEYTGGYEYRLVQFCQSKQINYVRISGLAIKRSMGLVRGKNDKIDARRIAEYGDEKQSKLEAETASMDGIIRLKRLLSQRDVFVSDRKAHQNRYQEIQYMMDLPEKDSMLKRYKKIADELQKLIDKTEDEIRKLIKANDAFQFNFDLITSVKGIGEVNGWTMIAYTENFTSFDNARQFGAYIGVVPYPYTSGTSIKGKSRTSKMANQHIKALLDMAARAAINHDRESTLYYERRIAAGKHHMAVMNEIKFKLVRIMFAVVKKQQPYVDKYKNVG

SEQ ID NO: 84269 - protein, 357 aa, unidentified
MDVHKETVQIAVFEERGEEPIYERQLNNDTELLVKEAVRFARKGKTVVAYESGCLGYVIHRAMEKAKIPCYVLPANKVAKKRDSRIKTDKRDARLIGRELRSDSIRPISVPDSADEATRDLLRCREDIKGDLRRMKQRLLKFLLRHGHRFTEGECNWTVKNWRWIDKIEFTHEHERIVFEEYRSQIRSLEERLTRLEEQIIEAAESPRYKAKVSKLRAFKGIDYIIALSVLCEIGDFKRFRNAKAFMSYLGFVPSENSSGGKRSQGGITKAGNGHLRRLIIEGAWHYAKGARTGKRLEQRRQNCALNDIEVADRALHRLSKKFFKLVFRGKHKNVAVTAVARELAGFIWAVQVSSAA

SEQ ID NO: 84270 - protein, 362 aa, unidentified
MAIIAQLYSFVIGVDTHAKEHVLSILRCSGELVETKSFRVNSLAAAIRWVSATTGGSRENLWVIEGVATYGATLAAQVVAAGYRVVEAARMNARAHHAVGKTDVLDSQRIAQAVLPLDESRMRLPRAHDGIQAALQVLVTAREQLTTQRTANINYLTALLRQWELGIDARRSLANKQISAVSQWRSRKDEEIGLRTARNDAIRTAKLIESLNIEIADNYKEIAALVQASPAKVLLSEPGIGPITAAVSFCAWSHLGRVRNEDAFKSLAGVNPIPASSGNTTRHRLNRGGDRRLNSALYMATIVREKRDEETRSYILRRTEQGKTRKEIRRCLKTYLARKIFRLLNQAAKEENNLVENHTLTA

SEQ ID NO: 84271 - protein, 426 aa, unidentified
MRFIGLDVHKDFCEVAVIEGDACWSGPRVRSRPEDLKVFAQSLGPKDQVVLEATGGALAIARILEPHVGRVVMANPMAVRAIATAKAKTDRLDARTLAKLLAAGFVPGVWMGDERTRLLRRLVSRHAHLVRQRTRAKNEVHAVLQRTLKGRPPVSDLFGKRGLAWLGAQDLPADERETVEASLRHIDFLDGELRLVDRTMAIQVLSWPEVRRIMTIPGMGAMAAAGVMAAIGDVRRFPTSRHLVGYLGLDARVHQSGSGPARHGRISKQGSAEARHLLVEAAWAAMRTPGPLRAFGERIRARRGANIATVAVARKLAVLCWHVLSREQDYAFGRPSLVREKIRRLELAAGAPNRNGYRNPVRVFATPAQRRLEREVGDQAEKAYRRFVKDFRSSGKKGAGATTGARISAARKGQAARQEQAPDPAL

SEQ ID NO: 84272 - protein, 280 aa, unidentified
MGEVTIIGIDLAKRSFQVHGARADGSVAYRRKLSRGKLLGFLASQPPCTVAMEACASAHYWGREALALGHEVRLVPPIYVKPFVKRSKNDAADAEAITEAAQRPTMHFVAVKSEAQQARAMLFHTRDLLVRQRTQTINALRGHLAEYGVVAPQGRARIGQLAGVIEDGDCGLPLAVVELGSVLLGRIEDLDEKIDGLDRKIRTSARECEETVRLMAIPGIGPVTAMAIQAFAPPMESFRRGRDFSAWLGLVPRQHTTGGKPRLGRISKMGQHLPSRTDLF

SEQ ID NO: 84273 - protein, 319 aa, unidentified
MPNISVGIDIAKLSYQVHLVINNHSYSKPFRNSPADFYKLLDWLEKVHAGQVHVCMEASNRYWEHLAKFLYEAGLMVSVVNPTCIHNYAKCKLTRNKTDPLDAALIADYCTTQNPPLWTPPAPQVQKLQAMIRHLDSLKQMRTQEHNRYLLENPSESVSALVFQHLSFIEHQIEQLTDCIRLHTESHEDLKTGLALLESIPGIAFLTAAKLLGENIQNFKSTRELAAYAGLNPSFGISGTSVRHKPRLSKIGSIHLRTALYLPAVVAMHHNPSIIDLRQRLEKRNKHKMVIIGAAMRKLLALSLGVLKSGLPYDPVYSS

SEQ ID NO: 84274 - protein, 428 aa, unidentified
MDEVNRNRLDEFRQLRQEVRHSDQYLIVGIDIAKDRHYAFFGTPTGKTLLRRLVFSNDHEGFRKLLEQAEALRVQHGLKKVVYGMEPTANYHKPLGEYLIGLGRTVVLVSGVTVARNRESLDGRWDKHDGKDSANVADLISQGKCLYYEHPSAELRGLRGLLSLKKRLKKQEHGYKVRIRNHLIAQYYPEMDREYERLGAEGLSVVRWCLPASEMAQLDVGPFIERVTSRRIRMEKRRRLEAVWEKAGESIGCDGVPGVEHEAKVMVEGLRQVREMIKETEDKIEELCKLFSEYHYLLTIPGFGPDVSAKVLAAIGEPDRFQSGRQVLKMGGLDLSADRSGKDSDKAIPEISKRGKADLRYALYQAALIASLKNRDIMIYYTNKIRGREKEKGIQIKMRVKLAAKLLVIAWTLMKKKENFNPAYLNAE

SEQ ID NO: 84275 - protein, 364 aa, unidentified
MNSVIRNTELSSLEGTRCQFNSSRAVIKLGIDVHQAYYVVVKQEGGTNPKPAQRFRKEAFLLWVAKLKSQGSEVHAVYEACGFGFGLQRQLSALGITCQVVCPQKLDERNKRVKTDGLDAKALCLKLDRFLQGNRDALALVRIPTEEEEQKRAIHRQREQLVKAGKRLEAQGRSLMVNHGMEGVSNWWKARTFAQLSVPEWMKELLSNMQPILLALQEKIQGLTQQLQAAAGAGQRRGFGALSSVVIDREVGNWNRFNNRRQVGSYTGLCPGEYSSGNTRVQSGVTKHGNPRLRAALVETAWRLVRFQPDYKAVRKWRQTLAKGALATKAARKKAIVAVARQMAVDLWRIRTGRVQADALGLRI

SEQ ID NO: 84276 - protein, 316 aa, unidentified
MTSTRFVGIDIPKATFDVAFSAESRAVYSNDPAGFTQFRQALADDDHVVMEATGTYFLKLATFLSAQDITVTVINPAVISYFARMRLVRTKTDRVDADIIREYGCFEALSAWTPTEDVFIELNQLDSHLNGLQGDRNRVIGRLEALQQCAKINAYTLEDLQQQLTDLEVRIKQTEKELVVLTQAHFPELLTLLTSIKGIGQKTAIMFIVLTRGFTRFSSPKHFASFLGLSSFIRQSGTSVRGSGGISKMGNPRMRQLLYMAALTARTRNSACKTFAERLAGNGKPPKVVRIAVANKLIRQAFAVCLKGESYSECYA

SEQ ID NO: 84277 - protein, 419 aa, unidentified
MAFKILRKNCCGLDVHKTWIFACIGITDANGRTEYKQARFSSFSNGLRDLADWLAKHGCSDVCMESTGKYWIPVLNILEKTCWVTLAHPKYTKPQKGNKTDRKDAKWICDLYMCGMVKPSFIPPPDIRQLRDLMRYRTKLTNMLTSEKNRALNCLTVSNLKLDDVFSDVFGKSSRSIIQYILEHPGEQFDVAPFLDRRCKHSVEEIQAAVDGAVSREQAAKLRECLQHIEQLTEHRENIEAEILRLVQPYPHQLELLRTVPGFAAAPLTAVALISEIGADMSVFPSAKHLVSWAGCCPRNDQSSKTVKSTRISRAGCYLKPLLVQVANAVIKSDKYPECRERYRRIKARRGHKKAIIAVCRMLLTAIWNVLSKLVPYSAKGYLEDKLTEHSVVISKAQGLELLRKRGYIFKDELVAESG

SEQ ID NO: 84278 - protein, 349 aa, unidentified
MKNLAVRPPICAQAYSADAPPRLSYFSTGEGCMTSEMLIGIDVAKDELVIDSEQGLLTLANTAEAIDAWLKTLPTGSYIGLEATSDYHQLMAEQAVLMGMVVYVLNPRHMRHYALGLGRRGKTDRVDAQLIRRFITAERGHLRPYQPASAMQHQVALLQRRRATVVKHRQALQKALRSVKELEAPLIDTVAALDGLLKHIDQQLDDLLTLQPALKAEARRLESIPGIGRQTSTQLAVLFDRVPLSRSDAVVAFVGLDPRACDSGQKRGRRRVSKRGPGELRRLLYNCAQAAVKTAVWKPYYQELRAREFSATQALVIIARKLLRIAFSLWQQADARFDAQKIACLNNAA

SEQ ID NO: 84279 - protein, 413 aa, unidentified
MDVVNESCCGLDIHKRTISACVISSSQTSRAKKQMRVFGTMTCDLLALADWLNELGITHAAMEATGVYWKPVWNVLEGRISEILLVNAQHVKMVPGRKTDQKDAEWLADLLRHGLLRGSFIPPAPIRELRDLTRLRVTVVEDLNRVTCRIQKVLEDANLKLASVASDTVGASGRAMLAAIISGQTDPAQLAQMSRGKLRRRIPELEAALHGKVTDHHRFLLKQLLAWLSFLESQLNNLEAAIADRLAEDAEQIARLCTIPGIERITASGLVAEIGLDMGRFPTAHHLASWAGLCPGNCESAGKRLSGATRKGSPAIRRCLCQAAWAVAKTRNNYLSALFHRLVGRRGKKRAVIAVAHAMLIAAYHILKRNECYRELGGDYFDRLDVARTQRTLVRRLERLGNTVILAPAPSRA

SEQ ID NO: 84280 - protein, 394 aa, unidentified
MKLVGIDVGKNSHHFCVMDKETGEFNVTPTSFSNNKEGFDFLINSLKPYSKKSILLGMEDTGHYHVALLKFLLSNGYTVALINPKTTDLTRKMEGGITKNDKLDTITICDVLDTPERKKQYRITKVDRFDLYEQRQLTRHHHNLKEELNVYCNRLQKSIDLVFPEFNTLFSSKYGIVYMNLLKTFGSAEAIASTDIRTIRKFFEIKGKGNRISLTPEKLKECAKNSIGISSEVETIQIKHLVSQITLIKEQIAEIDKKIEEFSIPNNSPILSIPGISHFSGTSILAELGDIGNYSKPSQIIKFAGVAPYHYESSQYNAQHTAITKKGSKYLRKTLYQIILPVINNNPVFKKYYLLKISQGKGHRCAQGHCIRKLLRIIYHLLETGQSFDPALLR

SEQ ID NO: 84281 - protein, 350 aa, unidentified
MLIIGCDYHPGFQQIAYVNTDTGELSEARLGHKEQAEQFYYDLKTHGVPVRVGMEASGHARWFERLLAELQFELWIGDAAEIRTKRVRKQKTDRQDAQLLLRLMIEDRFPRIWVADAENRDLRQLLWHRHRLVQMRTRVMNQLHVVALNEGLRRKKALWRPAGRRELEALSLAPWASRRRQDLLDLLDRLTPKIHELNEKLEQIVARRPVTRQLSTHPGVGPLTALAFELVIGTPERFACAKQIASYVGLVPAEESSGDRRRLGHISKQGNALLRFLLVEAAQVTVRSDAQWRSQFFHLAMRRGRKIAKVATARKLAVELYWMWRHGWDYHEMQQLGSHAGAPGNRHGVQ

SEQ ID NO: 84282 - protein, 415 aa, unidentified
MTQAFKYLSGIDWASDSYEVCVVDENATVLGKKQVEHSGDGIRQCIEWLLQLAGGDASSIAVAIEVPHGAMVESLIENNLAVFAINPKQMDRFRDRYTVAGAKDDALDAFVMADSLRTDQPCFHRVELDEPAIIRLRELSRMEQDLQTDSNRLGNQLWEQLRRYYPQMLKLSPAADEVWLWDLLESAPLPGGTLKLAKVKAILRAHRIRRITAEEVLEQLRQPALRLAPGAAEAASEHVLMLLPRLRLLQQQREATARRIQQILDELCTAPREGQGREHRDAEILLSLPGIGPVIAATMLAEASQPLRDRDYQALRNYAGAAPVTRRSGKKKVIVMRYACNERLRNALYHWARTSMQNDARAKQHYAEMRARGHSHGRALRGLSDRNLAMLMSMLKSDTLYDPTRRGSAALAQAS

SEQ ID NO: 84283 - protein, 344 aa, unidentified
MAKDTLVAVDLAKSVFEVAVSNHPGQVAKQRRYSRRQFPLVLAQLPPATVVMEACGSAHFWARRIQSLGHEAVLLPPHAVRPYVRRNKTDRTDTKGMLEAYRNEEIRHVPVKSVAQQTLASLHRIRSGWLAERTARINTLRGLLREFGILIPLGAHHAVPTAWAQLEDAESEVPDPLRPALAEICSEIRDLERRIKMIEHQLAALAAQTPVVAQLMTIPGIGLLIATALVAFVGDIQRFPSARHFASYLGLTPRENSTGLRRRLGSISKRGDVYLRTMLIHGARSVLLAAKRRSPDRLRAWALAREKARGHNKAATALANKLASVWKHDRPFQSVPDLAQADRA

SEQ ID NO: 84284 - protein, 351 aa, unidentified
MSRKTDAVIARTIGIDTGKNTLHLIGLDDNGAIVLREKVARGRIAARLTNVPRCLIGIEAGMATHYVARELIALGHDVKQVPPAYARPFRQGHKNDFRDAHAIAEAVQRPSTRCVPIKSDDQLDLQALHRVRSRLIGDRTAAINQLRGFLLEHGIPVRQGPRFLRQQLPQLLATRTDVLSPRMLRIIGDIVDDWKYLDDRIDRVTDEIEALARTDVSCEQLMTVPGIGPIIASAAVAAIGNGAAFAKGRDFAAWLGLVPKQMSTGDRTILGRITKRGNRYLRMLFVQGARAILLRPKSWVKHSFGPWLTTAARRLHRNILTIALANKLARIALSVLIQGRSYETRIVPAAA

SEQ ID NO: 84285 - protein, 307 aa, unidentified
MLIRTVARDNKPAFTRKNNMENISQVHVGVDVSKGRLDVHIHPLEKHFSVANSARGIEDLISKLSIYEVQRVVYESSGGYQKMLHRKLKEAKFKVWEVDPKRVKYFIASEGVKAKTDTIDAKMIARFSALKPQERKEIPLSDSADELRALVKRRSDLVEMKATEKKRLVHPAQIHCTKKIKRHIRFLEKEIQEVEDDIEKIINKDKQLKKKCEILESMPGVGPKISQILVAEVPELGILQNSQIASLIGVAPYVNQSGNYKGVASIREGRPSPRKGVYMGACRRVIAKTTSFNAFLTDLLKRASQLK

SEQ ID NO: 84286 - protein, 340 aa, unidentified
MQVAVLGIDLGKNSCSIVGLNDQGAVVLRRRMRREGVIRLAAKLKPCVLGMEACCGAHHLGRVLRAQGHDVRLMSPEYVRPYVKSQKNDDRDAEAIAEAATRPTMRFVKLKSEEQLDMQTLHRARDRLVGQRTALINQLRAILLERGITVAQGRRKLERHLAGLDAQGDISQRMRDLIQDMRTQWSELDRRIAAFDKEFAEWARNEEAARRVMTIPGIGVLNATALVAAIGRGESFARGRDLAAWLGLVPRQVTTGGRPRLLGISKRGNKYLRKLLIHGARAALPTLLESPTLLGAWLRGLAARMHKNAAVVALANKLARMAWAVLRHNERFRSVASTAA

SEQ ID NO: 84287 - protein, 419 aa, unidentified
MTKKSKNSTLIQIVHPICCGLDVHKDKISACLITVDENGKEQHEIREFSSFTQDLQKMKAWLIVNNCPVVAMESTGVYWHPVYNTIEDAMQVVLVNARHIKNVPGRKTDICDSKWLAGLLRHGLVKGSFIPPEHVREWRELSRLRRTYTESQADFKRRVHKLFITANIKIDSVVSDLFGVTGLNLIDLLCKNEEVTLEKVQECTKGSLKKKAPELYLSLHGYFKDHHRFQLIGMMESIEMFQNQIEQIDARLEILTRDHEDLLERLDEIPGIDKKSAQSIIGEVGVTLEEFEKMVAFVAWAGLCPGNNESAGKRKSGRNAVRNHPFKTILIGIAWAAIKTKGSYYKAKYYKLKSRRGAKKAIVAIAHKIAKAIYNIIKYGDRYKDLGEEYLSKPNKQRMLKNLAKKADALGMKLVSCEN

SEQ ID NO: 84288 - protein, 412 aa, unidentified
MKDLLEISCGLDVHKDKIVACILSGPIGKTTVSEIREFTTLIPDMAALRDWIVSCNCHHVAMESTGIYWQPIYEILEDAYSGDITLLVVNARHMKNVPGKKTDMRDSEWIATLLRAGLLNGSFIPDKQIREFRYLNRYRKSIIRDITSQKNRVEKFLQSSGFRLSTFISDIFGASGRNIICHLIQHGCIDRESLDSCLKTKTRNHINEILVAVNGTLSKIQQDFLEMLMDHYDSLKSHLAEIETALEEAMAPFSLHIEQLTSIYGINTTASCAIIAEIGTDMSYFKTAEHICSWAGLCPGNNESAGKRKSTSITKGNPYIKSMLCEIAWVIAGKRNTYLSAWYWRIKQKKGAKKAIVALARKLLVIIYTMLKQGTLFDENCFETRRKNCEQKQVSHYIRELEKRGYHIEASA

SEQ ID NO: 84289 - protein, 476 aa, unidentified
MAGAKKVRPDLALIPMLPHETLYIGVDVGKFRHVAGFLSRTLLQRHERFEGCPVFAFEQSREGFLAFVDRIREYVPLEQATVLIEHTGHYHKNLEQYLLEWDITVYRIHVQERPKGMTKTDKRDALGLANRLYTQLELGAQVEEKMQLVRRTLSPTQAAQQLRGFMQHRYELSHQRTRLRNKLTAICDELFPEFTQIFHDPNLEVALTFREKFPTPHDIATASLSALRETRVKYFPSEANLLRLQQLAEKTIGINNKDRLRGMKLEQELLIKELHLVQGHLERLDTEITDIVRTSREGQILLSMPPIGPVQAATIIATIGHIDNFEKAGELKSYLGWAPTRHQTGVTFDRTKLSHRGVRPVKQMLYLMAVRAATLDCEWARIYRRLLPRLATYDDRIKDYRGKKKVIGRIAGQMVSMIFALLKTDQETLSRVPSGENPPPPMLYNPEVHRRHQEGSYRSLKPGTQPRKILRLPSKS

SEQ ID NO: 84290 - protein, 393 aa, unidentified
MARVWVGIDAGKEHHHAVAVDEVGRVLWSVRVANDQNAIAELLDRIDGGDEAVWAVDLVSSETALLRAVLAAAGVAVLYIPGRVVKSMAAGFVGEAKTDARDAMVIANTAPLRRDFLPVAPPTELMAMLTLLLAHRGELIEDWVRTVQRLRRLMTGICPALERALNFTSIAVLTLISGYQTPAQIRAAGRDELIAHLRRHRALHTAKVADAALAAAGQQDATLPGQDTAAGLAADFATALLALRRRINETDKAIAAAFATHPQAAVIRSLPGMGTLVAAEFAVAVGDLSTFAGPDQLASYAGLAPVPRDSGKRTGNLHRPQRYSRRLRHAFYMAALTTIRFDGPNRDYYQRKRGEGRRHQQALIALARRRVNVLWALLRDDRPFQLEPPPKPA

SEQ ID NO: 84291 - protein, 396 aa, unidentified
MLYVGIDVAKRNHEVVVLDDRGQARGRPFSIPNSHAGLKRLIERVKQANPEREPVVFGLEATSHYWLALYSHLRKAGHEVVALNPLQTSAYRRLQIRPVKNDRRDAWCIAEVLRLEPIVRTALASDAILGLRHLSRLRSELVDQMADQKRRVLGVLDQVFPEFETVFGKVFGTTAMALLEEHPTPEEIAQLDLEQLTSLLHDHSRGRFGQAKAEQLQEAARTSFGVTIALDALAAQLQVLLAQIRFLGEQVSALEERIGAYLKQVPQHLTSVPGIGTVSAAAILGEIGDIRRFKNGSALVAYAGIDPVVFQTGEFQARSTRMSKRGSHYLRRAIWQAAHTAARDDPALKPYYEAKRRAGKHHFGAVGAVANKLTHIIYAVLRDNKPYVPVARPIAS

SEQ ID NO: 84292 - protein, 449 aa, unidentified
MSKSGKSIGLPIVNARAAGIDIGSRIQVAAVPPELSDDPVQTFQSFTADIERMANWLISVGITTVAMESTGVYWIPVYEILEDHGLTVVLANARDCKAVPGRKSDVNDAQWIQRLHACGLLRASFHPARDIAALRAYMRIRDRHLEYAAAHLQHMQKALTLMNLQLHHVLSDISGVTGLKIIRAIVSGERDPDVLASMRDVRCHESIQTIRASLVGNYQPEHVFALSQAVALFDVYQARIADCDRQIENSLQLLNADRPEPEALLPPPRTKTKQANAPKFDVRSMLYQLTGTDLTLIHGIGPSIALSLVAECGTDLSKWPTEKHFTSWLCLSPGCKISGGKVLSSHTRKSSSRLASQLRLVAVNVGRTETALGAFYRRLAARIGKAKAVTATARKIAILFYRTMRFGMQYVDPGVDQYEQRYRERVVKQLQRRAAHFGFSLQPTEVGVS

SEQ ID NO: 84293 - protein, 323 aa, unidentified
MIHYLGIDVSCRTLEVSDAPGTLTGQFANTPKGVASLLSWVHRHVSEAAHVVLEPTSTYHHLLLVELNRKGVPYTLVNPAHTAAFATVQGKRAKTDRGDARLLADYGASQGPQATPPPDQDQERVKSLRRHMAWLEREARSARNRLETARRSPWTLPEVVESLERTATALEEEAAQVARVLEARVATHPRWQQEIALLTTVPGIGVKTAVLLVSELPAQARCGSAKAWVAFCGVNPEPRESGSSRYSRLSRRGSPQVRAGLYMAAVAAMRWNPAVHALCQRLQSKGKSGRVRVMAAMNKLLHLSFGVLRSGKPFDPALHQLTP

SEQ ID NO: 84294 - protein, 340 aa, unidentified
MLDLTFRVKETSVCIVDDTGRIVREVKVASEPEALLQVLTNPAYRFKRVGLEAGPLSQWLSSALAEAGLPVICVEARHMRAVLKAQINKTDRNDARGIAQMMRAGLYRPVYVKTIRSQKLRMLLTHRKLLQSKAIAIENDLRATLRNFGLKVGMVGTVKFDARIKELVENLPDLAVLVEPLLIVRRVLREQVGILHRRLLAIVRDDDVCRRLMTTPGVGPVVALTYRATVDVPARLRNSKAVGAVFGLTPSKHQSGEIDRMGGISKCGDAMMRTVLFEAAQSMLTRTIKWSWLKAWGMKIAKRRGLKRAIVAVARRMAVVMHRIWVDGTEFRWTKEFAAA

SEQ ID NO: 84295 - protein, 399 aa, unidentified
MNPFFLGIDVAKAKLDCALIRPDGKWRQKVVENTPAGFDALANWLTNQGVSELHAAMEATGIYWEGIAEFLSNTGVTVSVINPAQIKAFGVSYQVRTKTDSVDAKLIATFCRERRPEPWCAPPLSEQTLRALVLRLEALQTMQTQESNRLQVAREPVKPGIESHLQWLDKEIQSLIKTIRTHIDSHPDLRQKRDLLDSIPGLGERTIAILLAFLGSPERFHKARQAAAFAGLDPRQCESGSSVKAKPKLSKIGHAFLRKAMYMPAMVALYKTSWGRSFLARLQALGKPPLLIIGAMMRKLIHVAFGVLKSAQPFNETLLRLTGITVSTTGVSGARGAPARERPWVGESANGASHRARSRHRFTGTAHTRLASALHVLYDDPLRVGFDLRQRRQTRADLR

SEQ ID NO: 84296 - protein, 338 aa, unidentified
MYYTGIDLHKLTSYLTTVDSSGNIIKEADIKNVNHNFVQYFADLGNENITTVESTMTWYWLNDLLSSLNIPMVLAHAKYVKAIAYAKVKTDKVDSHTLAQLLRMDYIPVAHKISNDNRLLRDALRARLKIVQRHTSVTNSMHLLLAKYNLDSPEQLDTIPRFQFDQLSEVEELLKEQILDLEKQLYPFLIPNDDIQRILWIPGIGKMNAFTILLEVDDINRFENVKHFFSYCRLTPAARNSGGKSKQRSSKDGNKYLKVAFSDAAVHACQYYPPIRNYHNSLLRKKNKHIAKTIIAKEIAEIVYHVLKHKFDFNNKFKGRDLIERKSFQWPRVVNPYA

SEQ ID NO: 84297 - protein, 364 aa, unidentified
MADIFALDVSMGKSYCVWYRGKHCLKEFSLVHTKAGFNALRDMIKKAQKPIIYFEATGIYSRVMEHFCETNGLRFCRLNPLELHLKSESLRRVKTDQKDAHRIALTVQENAFRLTVPWKKDYLQLHELSRFYNQLNADWNYRLNHLHTALEQVFPELKQLFVNRTSKLALNIVELFPHPALVRPYSRVKLKNILMASTDKRISKMKAYKYADRLIDLAQKSYPAVSGDAIQVDEVRYYARQLIALTRKREEVIKRMESIAQRLPEYILYCSFPGIGKQTAAQLMGELGDISRFDNANQLNAFVGIDIRRYQSGTYLGQDHINKRGNPIARKLLYFTVGNMIRQQHANSNHIVEYYFRLNRVGDN

SEQ ID NO: 84298 - protein, 351 aa, unidentified
MLMIGVDYHPSVQQIAFTDTETGKFGERRLIHSNGEAERFYRDLHERGILVRVGMEATGFSRWFERLLAELDFELWIGDPAEIKAKRVKKQKYDREDARLLLRLMREDNFPKIWVPSPENRDLRQLLWHRHRLVQMRTRIMNQLQALAMNEGKRWKSKLWSAQGRAELEKLALGPWASRRRKELLELLDRLNPSIEELTVAVEQEARKRPDALRLMTHPGVGPITALAYVLIIGTTERFPCGKQIGTYVGMIPSEDSSAGKQRLGHITKQGNSLLRYLLVEAAQAAARINPHWRRRYLHLAMRRHKSIAKVAMGRRLGIRLYWMWRNSCEYSPSFEFGSYAGQLGTGHSVR

SEQ ID NO: 84299 - protein, 349 aa, unidentified
MEKITTVGIDLAKQVMAVCGMDAEGRVVVRKVLRRDQLLRWAAATPSSVMAMEACGGAHYWARELTQQRHTVRIIAAEFVQAFRKSGKNDANDAEAIATAARQSTMRFVAVKSVEQQAALCVHRLRQGLVEERTAVINRLRGLLTEFGVVAPLSPEKLRRELARCQDPDDLRLPATVRQLVGDQVIALDQLDARLASYAEMIATQARQSEVAQRLQTIAGVGPTTAAAMVATVGDANDFRNGRQFAAWLGLTPRQHSTGGKTRLGRITKRGDAYLRTLLILGAKSALQAALRKPPEGRHRLQQWIVTLLGRIGYHKTLVAIANKHARIIWALLVKGEGFDVRRLAQHTV

SEQ ID NO: 84300 - protein, 445 aa, unidentified
MHYKRLLTFIDGVSSYLSVGLDVGADFTWMSIALPNGSFVGKPFKIIHSDSRSRDLAVTKIKEAQETYSLKSRCFLESTGIYHIPLLCFLRDKGFDCSVINPIITKNSTNINIRKLHNDKFDSKKAALVGLNVSLKTSILPDDSVVDLRNLVRDYYYFKDLQSAVALKLTAELKVSFPAYAKVFSKVTTQSSLKLLSSYPLPADMLAASKEDIVDIIRSTARFGEAYALRKYDAIIAAAQDAAVFGRALPSNAVRIRLYIDTYQEYQKHLDALLKALHETVEKLQDTLIYDQICLLQSLRGIGFLSAVVLIAEMGNFKLFSSPKKLYAYFGLDPAVKQSGKLNGDKVHMSKRGSSLARRVLHMAALNNVKVDKGSGTPVNPVVYDYYTRKCSGKKKPVAMGAVMHKICNIIFAMLRDNKPFEIITPEEHCRRFATEHPDKIRKAA

SEQ ID NO: 84301 - protein, 321 aa, unidentified
MNPVSCVGIDVAKAKFDVALLKPDGKYRSKVFSNNSEGFRQFLDWLEKQEALKAHLCMETTGAYGRSLARFLAQQQLLISVMNPALIHAFGKTELSRAKTDKADARLIARYCQMHRPAPWVPPAEAIVTLQALVQRLDDLLGMQNMENNRLEMAEPAARASIEALLLTIHQQIDAVRRQIQDHMDDHPDLKSQKALLLSIPGIGEATAAMLLAFLSPLTRFHSAKQVVAYAGLNPRIRESGQWAGKSHIAKAGNVLLRKALYLPAVVAKRYNPAIAAFCDRLLSRGKCPMQVIIAAMRKLLHIAYGVLKSGQPFDPEKALA

SEQ ID NO: 84302 - protein, 356 aa, unidentified
MQLQDALIKPKIFIGLDIHKKSWTVSIQTDLFFHRTYSMPSIAEDLFQYAEQTFPNHEVDLVYEAGCCGFSTARYFLNLGWHVLVVNPSDVKTADKERYQKTDALDSKNLSNQLKAGVLRGVYIPTEEHEQFTTLARHRTQVTKKLRQTKLHIKSMLLFHGIKIPDEFDTPNWNKDFMVWLENIRFSTSCGELALQGKIRMYKFIRSEYLEIANQMRAHCRKTHKKDYNLLRSIPGIGGYLASVILAECGDLRRFNNEGQFSSYIGLVPGIYNSGGSEKCLGITPRSRSQLRSYLVEAAWVAIRKDAEMQNYYRKHQGRNIKSVIIKIAHKLARRILSVIKTEIPYQINRNLMLEK

SEQ ID NO: 84303 - protein, 356 aa, unidentified
MTMLAEITTCVIGVDPDKARIQVAAIDSATNGELGTESFPNTPDGHDAAMAWADAYADAGSRAWAIEGSGSYGSPLARSLRAVGEWAIDFSFPTQPPAPDGAKSDHLDAVRAGRETLGRTKLVSPRASGDGAQGAIRALMAARRSMVGSRTCHINALKAAVMCAPEEIISELEGLSTAALIKRCAGFRPASNAGPCDEIAATKRALRSQARAIRALETEIAELTDAIAAHAEHVAPELLDENGIGPVTAGQLLVSWGYQGRIHTEAAWARLAGVAPITATSGQNQTRHRLSRSGDRALNCAIHTIALCRARNDPATCAYIDKKTAEGKTTREARRCLKRHIARRLYRILENLDTTP

SEQ ID NO: 84304 - protein, 314 aa, unidentified
MRKCIGIDIAKQYFDMYVLCSRQHHRLDNTAEGVRQCVQVCKAATPELIVMEATGGYELALACALQAEGLPVAIVNPRRIRDFAKAAGQIAKTDKLDARIIAQFAATLEPMTTEQINEDTQKLKALVARRNQLVGLHTAESNRLEHADNRDIQHSIAAVLKVIEDQMKAVERKIEDHIRNTPELKQRSETLQSTPGIGPTTAHMLVTELPELGRLNRRQIAALLGVAPIARDSGTLRGKRMTGGGRKNIRSRLFLPTLVAVRYNPVLKAYYDRLVSRGKCKMVALVAAMRKLICILNTMIKKNQNWQPNFTKIA

SEQ ID NO: 84305 - protein, 411 aa, unidentified
MLEVKAERCAGIDVGKKFLAVCVMMGPVNQKPAMEVRRFGTNVKELERLRAWLTETGCTEAVMESTGSYWKPVFNILEGSLKIILANPEQVKALRGKKTDPNDSRWLASLLRHGLVQASFIPPRDIRELRDLTRRRRTLVGEGASERNRVQKILEDANVKIGDVLSDVFGMSGQAMLEALLENKLKPSEIAELVHSRLRPKVPQIVEALEGHRMRDHHRLLIKQCLGHMRYIEQMIDELDKEIAERLKPYQKQIDLACTVPGIGPGAAAGILAETGMDMTPNGPFPDCHHLASWAAICPGNNESAGKRKTGRVRNGNRWLRATLNQTAWAGAAKKDSLFQHRYQRLKLRRGAKRAVTAVAHAQLIAIYWTLRNGVPYLEHVRQIQEDRRNAQIQHHLHQLTKLGHQLDEHS

SEQ ID NO: 84306 - protein, 456 aa, unidentified
MGHVPQRVGHDECPVGSRATERQYRDRQPSWRPVRNIGEDIRMVEETIAWFAGVDWGSAKHQACLVGAQGAIVGEREFPHSGKGLSELADWILSMTGRASAVAVAVEVPHGPVVDVLLDRGFIVHAINPKQLDRLRDRFSVSGAKDDRRDAYVSADGLRTDRHLFRRLQIADPRLIELRAWSRLAEELQEERVRLSNRLHQQLWRYYPQMLELTDDLTATWLLELWLKAPTPAKAARLRVSAVERLLKQHRIRRVNAEVILRTLRRPAIKVSDGVAAAAGIHIHSLIVRLQLVSRELNDAKRKLDELCTAIGETGAASEERAEYRDVAILRSLPGIGRINLATLLSEASGPLSRRDYQALRTLSGVAPVTKRSGKSHVVVMRYASHVRLRNTVYHWARVATQHDHESRTRYTALRRRGHSHGRAIRGVADRLLAVACVLLQRQTLFDPHFRQPTAS

SEQ ID NO: 84307 - protein, 343 aa, unidentified
MQTITTIGLDIAKSVFQVHGVDAGGQVIVRRQLKRSYVLTFFQKLSPCLVGIEACGSAHHWSRELQALGHTVRLIPPAYVKPYVKRQKNDAADAEAICEAVTRANMRFVPTKTPEQQSGLVLHRTRHLFIRQQTAVINAIRAHLVEFGIVAPVGRHGVEELLNVVTDPNDRRVPEMARACLSAFGAQLRRIQEQVREFDRLIRAWHRSDEMSMRLDDVPGVGPVLATAVVATVADPKSFRSGRNFSAWIGIVPKQHSSGGKNRLGNISKQGDRYLRGLFVAGALAVIRYAKIHGTKHRPWLTALLARRPTKVAAIALANKLARMVWAMMARGERYKEPVALAA

SEQ ID NO: 84308 - protein, 410 aa, unidentified
MDAIIERVGGVDVGQAIVVATVLVGGAHERTQKETRTFCTVTQELLALRDWLLAKGVTHVAMEGTGIYWQPVYGLLEDAFEMILGNAQHIKTVPGRKTDVKDSEWLAELARHGLIAKSFVPPKPLRQLRDLLRYRRKLMETRTAERNRLLRLLETANIKLASVMTDVFGVSGRLMLTALIDGATPPAAMAALAKGVLRKKAVELQHALEGRLEEHHRFLLQLQLRRLDQADADLATLDAHIDEALAPYRAPCQALQQIPGVSRVVAAVIVAELGTDMSVFRSARHAAAWAGVCPGNNESAGKRRRAGARKGNVHLRTALVEAAVAASHRKGSYLRDKFYRLRARRGTKRAAMAIGHKILIAAYHMLATGLPYRDLGVSYLDGLEKRRTTRNLVRRLERLGYEVTLGTKAA

SEQ ID NO: 84309 - protein, 343 aa, unidentified
MQTVTTIGLDIAKSVFQVHGVDAAGQVLIRRQLKRRYVLAFFQKLPSCLVGIEACASSHYWSRELQALGHSVRMMPPAYVKPYVKRQKNDMADAEAICEAVTRSNMRFVPTKTPDQQSGLVLHRTRHLLIRQQTSAINAIRAHLAEFGITASVGRRGLEQLLRVVADPSDKRVPELVRSCLAALGSQLLGLKKRILEFDRMILAWHRSNQASKRLNCIPGVGPLLATALVASVGDPKSFRSARNFSAWIGLVPKQHSSGGRERLGSISKQGDRYLRSLFVGGALAVIRYAKLHGTNHRPWLTGLLARRPTKVAAIALANKLARMAWALMARGERYNYPVALRP

SEQ ID NO: 84310 - protein, 345 aa, unidentified
MKHYAGIDVSLEASSVCVVDADGTVVREAKVLSDPEALIGWFAGLGLEVELIGLEAGPLSQWLHAAMTLAGLQVKLLETRHVRAAFKTMPVKTDRSDARGIAQLMRLGWFRPVWCKSLLAQRTRAVLQARRLMKDKQHDVELSLRGLLRNFGLKLGKVTPKTYEQRVRELSAGEPVLEGLVEAMLRARAALMAQYAVLHRQVLALARSSDQARLLMTMPGVGPVIALDYASAIDDPKRFSSSRRAGAYFGLSQRKYQSGKTDITGRISKIGDERVRSSLYEAAHVVLTRTTRPSALKTWGENLLRRIGPRKAKVALARRLAVVMHRMLVDNAPFDPAKGAPAAAA

SEQ ID NO: 84311 - protein, 410 aa, unidentified
METVVERPAALDVHKEQVTACVRVPGKPGRREEHLAEFRTTVQGLLGLRDWLKAYGVTHVAMEASGVYWKPPWAILEDEFECLLVNARHVKQVPGRKTDVSDAAWLCQLLEAGLLNASFVPPKPIRTLRNLTRYRKTQIQERQREANRLHKILEDTGIKLDCVATDILGASGRAMLDALVAGTTDPAVLAELAKGKLRQKLPALREALEGRFDAEHGIVVSAILAHIDFLDEQIDRLCEAIEEQLRPFAAAVELLCSIPGVQRRTAEVIVAETGAEMSVFPSAAHLASWAGLCPGNDESAGKRRSGRTRKGSKWLSIALTEAAQANTRSRDTYLSAHYRRIRARRGHKKAIGAVKHSIIVACWHMLTTGELYNDAGGDYFTRLDPDKQTRRLVAQLERLGHVVALQKAAA

SEQ ID NO: 84312 - protein, 356 aa, unidentified
MNVRRVQHFVVDGKEIFVGLEDSKKTWKLAVRSEGMLIHQASMEAKYSVLIRYLRNNFPNCTIHLIYEAGFKGFNLHDRLVDDNIDCVVIPPHVVTEPKVNRVKTDKRDAKRLALILENHDFRDVCHVPDRERREDRQISRTLIAMQKDIIRTRNRIRKLLDFHGIEVSLPDRWGRDEFRSLKKLSLPDPLRISLDVLLTQLEELWAHQMTLRDALRKLCRKERYRKAFEIAVSLPGIGWFTAIRLVLELGEDLSHFTTGKKIASFVGLTCSEYSSGETEWKGRITGMGSGFIRATLIENSWIAIKKDPVLLAKFSRIWRASGSKKKAIVAVARMLIVRLRACIVLGTPYRIGVVR

SEQ ID NO: 84313 - protein, 392 aa, unidentified
MYIVGIDIGKNHHEASIVSPEGKQIGRSLRFATTHKGADSLMSFIFKNIGNSPCVFGMEATGHYWYPIYSFLKAKGYTIYVINPIQSDSLSKMYIRQTKNDSIDSFLIAEVIRFGQFGTTSMADENILAMRQLCRYRDSVISSRTEIKLRIGTIMEQIFPEYEKQFSSLWVSTSMGILEKYLTPENIENAPIDELFEIIKDKSHNRLTRAKAISIKEAAADTFGIKIAQDAFSFQLKQLIDRMNFLDKQIEALDCQILEYYEKFDCYLHTIPGIGIIGAATILAEIGDISRFKNSSALVAFAGIDPTVRQSGEFNSTHNHMSKRGSPYLRHAIFLAATTCSFHNSPLNAYYKKKRDQGKHHLTATGAVARKLTTIIYAVLRDSKPYEPKKFC

SEQ ID NO: 84314 - protein, 404 aa, unidentified
MELKPIYRCVAALDVHQAKLTVCIIYKDEKAELQVLLREFGGFKRDRRAMAQWVASFQPEEVVMESTGIYWKSPYAALEKVGIASLVVNARHVKQVPGRKTDIADAQWLAMLSRSGLLRGGFVPPENFRSLRLVSRQMQKLTGMLSGEKNRMHKVLTDGGIRLAVVVSDIHGKSARAMIKGLLVGKTPEQVLCYASKRLKATEEELLDALEGELTQNHCFVISELMDHIEDLEKRIRCHTERLLEGLGPQQAILQVLQTIPGVDIRAAAMLLVEIGDNMNAFGSANKLASWAGVCPGNHESAGKKTPGKKRKGNPYVRRILCECANAASRTKCTLQDKFKSLLVRRGRKRAIFALAHKLLKIMFVLIKRGDYYRDASINYEALSVARNAPRWMKMLKKYGYVAA

SEQ ID NO: 84315 - protein, 366 aa, unidentified
MQKLSTRRVTGNKILKGHQLTIGIDLGDRWSFYCVLNELGEVLQEEKLPTTPDAMKRTFEKLPASRIVLETGTHSPWISRLLAEWRHEVIVAHAQKVQLITKSSRKDDRHDARTLARLARIDPQLLGPVRHRSAQAQIHLTVIRARAELVSARTALINAARGLAKSYGERLPKRGSEQVGRELATALSTALREVLEPLLREVESLNERIGEYDQRMEQIAKQAYPEVALLKQVKGVGTQIALTYRLTIDDPHRFAKSRDVGCFLGLRPGRRNSGQSEPQKSISKEGDRYLRTMLVQGAHYILGPFGEDSDLRRWGLKLAERGGKNAKKRAVVAVARKLAVLLHRLWVGGEVYEPLRNTNRAMGAAA

SEQ ID NO: 84316 - protein, 266 aa, unidentified
MEHFSGLDISVKETSVCIVDDKGRIVRELKVASEPDALLAVLTNHHFKRIGLEAGPLSQWLFSALAEAGLPVICVETRHMRAVLKAQINKTDRNDARGIAQMMRAGLYRPVHVKTLRSQKLRMLLTHRKLLQSKAIAIENDLRATLRNFGLKVGVAGKVKFEARIKELVEDLPDLAVLVEPLLIVRRVLREQLGILHRRLLTIVRNDDVCRRLMTVPGVGPVVALTYRATIDVPARFRSSKAVGAVLGLTPSKYQSGEINRTGGIS

SEQ ID NO: 84317 - protein, 313 aa, unidentified
MIIPLRCVGIDVSKHYLDIFDEGLGVPERIANATQAITQIAARWRCNVLVVFEATGVYDLELREALAQAGIRFARINPARARDFARASGQLAKTDPIDARMLAAFARAMQPTGEQVANPARNALARLAKRRDQLVLMRAQEKNRRSEADDCAMADRISRLIEVLDGEIAEIEADIRKLIKAEQEIADDARLMRSLPGVGPVACTQFIAKMPELGHVGAKQIAALAGLAPFNVDSGTFRGKRKIAGGRKRVRDALYMAALNAVRRADPFKAFYARLRQAGKPAKLALIAVARKLLTVLNAMMRDRKPYLKARPT

SEQ ID NO: 84318 - protein, 337 aa, unidentified
MEYFAGLDVSMEETHICVLDRDGGVVLETRATTSPKAIAAGLAKAPGCQRIVFETGRMAPTLYHGLDALGLPVTCIESRQAYQALKSLGTHKTDRNDARGLAHLARTGFFKPVHVKSLPAHAVRALIIARKKLVGQRVTLENQIRGLAVVFGVRLPRGLSPTFAEQAINGSEGIAGLSGAMHGLLAARNAVLKAIAAINGDLKRLARSSEACQRLMTIPGVGQLTALAFVAAIDEPERFRRSRDVGAYLGLVPRRYQSGEIDYTGSISKCGDRRVRTLLYEAANVMLTRYKPSLKLKDWALAIAKRSTMRKARIALARRLAIIMHAMLRHGTEFKTA

SEQ ID NO: 84319 - protein, 346 aa, unidentified
MKHYAGLDVSQQTTSLCIVDEEGKIVAERKVASSPDAIAEALKPFAVTRAGLETGPMSVWLWNGLKERGVPIVCMDARHANAALKMMPAKTDRNDAIGLAQIIRTGWCRSVHVKSTASHEARALLATRSQFVQIRCDLENQIRGVLRTFGILFGKRVGGFAKRAEEIINGELHASPTIQAVVEALMRARANILEQVRLLDAKVRSVARQNAVVRRLMSVPGVGVITALGFTATIDDPTRFKRSSSAGAYLGLTPRIYASGETMRSGRVSKRGDDFLRRSLYEAANALLTRVPQFSSLKSWGLRIARRNGYRKAKVAVARKLTVILHAMWISGESFRWSPQDPNEHV

SEQ ID NO: 84320 - protein, 340 aa, unidentified
MNESKQFFIGIDVSKLWFDLALLTVTNHQKGQVITQCFDNDAAGIKALHQWLKKQQVSFDSNTLVVIENTGIYHRHIWSYCSKVNLPLHIGNAARIKWSLGITRGKSDSIDCKRLCNYAYKEADELKATPVLNPVFLKLKDLMAARSGLVKQLHSIGNYLKELSQSPDQKLKKMMDKAHRQALEGIKASIKNLEAQIVKMIDADEALNNNYKLIKTIPGIGHLTAVYLLCCTNNFASKVSGKQLASYAGVVPFGNDSGTSIKGKPRVHKMANKTLKKMLHLCALTAIKYSPEFKQYFDRKKAEGKNGMLVLNAIRNKLVLRVVSVVNNQMPYVNYTEKAA

SEQ ID NO: 84321 - protein, 322 aa, unidentified
MYQYIGIDISKATLDVYDGKKSIKVSNSATGFKKLLKLVPKEKRACFIFEPTGIYAHALMEFCQHNSIEALIVGSKEARDYARSIKQRSKTDKIDAEVLYRYASQINHEKGIVPKIPILDSWMRRLNQRRNLYEHYQMMIQQFKNLLESTYSGDRALCRELKREIVSFTQKAEKLHKEIEALLCEKEENETHLEHLQTIPGVGKKSAVTFLLELCRYPDATVKEMTALMGLDPVLRESGIFKGKTRISKKGGKRFRQALFLPTIIAIRHNDRIKIFYERLISRGKPKKVAILAAMRKLLIIAMALVRYKTPYQAAAEKQAII

SEQ ID NO: 84322 - protein, 331 aa, unidentified
MHYSHYIGVDISKNTLDAVIYAAEMRRSDTKHLTNDKAGLKELVTWAKAAGAKPKDMLICAEHTGVYGNELQIFCEKKGIALCLESPLQIKRSMGLVRGKDDQIDAIRIAQYAYEHKDKLKLFHRPSGNIITLSNLLRERRLYVRQKATLASQQGELGSYETAQSRNRRESLINKQDAVIKAVEKQMLEIIKSDEALQKTYDLISTVVGIGPITAIDTIVYTNNFQNFDTPRQYASFIGVAPFDHTSGTSVNGRTRVSQFCRKQQKVSITMAARSAIIHDPWMKNYYHRKMKEKGEQRNQHGVVLNAVKFKLVLRMFAVVKSGTPYKVMKY

SEQ ID NO: 84323 - protein, 407 aa, unidentified
MICVGIDVSKRKSTVCFMAPGDKIIRRPFDVKHTKEELQPLVDEIRVQAKYDEIKVVMESTGVYHLSIAYFLQQNGIFVSVVNALKVANFNKAENFRHTKTDSIDSTNIARYGIAYWAKLPQFDLNGDKYFLLKRLCDAYLNFSEERSRILLQLQSQLEQTMPGIFDLFGGFDINSGKDKLLDFLERYCHIEDIIAKSEADFVASYSEWAKEKGYRSNESKAATIYAQAKNGIPSIPNNPIVRETIMWYVGLLRRADEALMASLTRMEDIAKDLPEYELVGEMGGVGRVTRVALIAQIGDVRRFKNKHSLICFAGLTPSIHESGKFRASQNHIVKKGPARLRKVLYQVMMSLVMHKIPKDDAVYRFIKKKEAEGKYKKVAKVAGMAKFLRIYYGRVMHLYRDLGLAA

SEQ ID NO: 84324 - protein, 366 aa, unidentified
MKKDSIRMKNRKGDWEGKKLTIGMDLGDRTSRYCVLEEGGEVLLEASVATTQKGLSESFAALPPSRIAIETGQHSPWVSRHLSGMGHEVIVAHARNVRLIGESTRKDDRLDAKTLARLARIDPALLSPVRHRSAEAQAHLTRIRARAVLVGARTALVNAIRGLTKAYGERLRKCDPRQIRKELAAELSPELRTALEPLFQEVQSLTERIQHYDHEIEKIALQHYPEVAQLRQVNGVGALIALTYVLTVDDPHRFGRSRDLGCYIGLRPGRRNSGNSQPQLHISKEGNCYLRKLLVQGAHYILGPFGKDSDLRRWGLTLAQRGGRNAKKRAVVAVARKLAVLLHKLWVSGEVYEPLRNHREGKCAAA

SEQ ID NO: 84325 - protein, 438 aa, unidentified
MPQNLTRMNPGAAAIDIGSTMHMAAVNPDSADMPIRAFGTFTHDLHDLAAWFRSCGVTSVAMESTGVYWIPAFEILEQHGFEVILVNARYAKNVPGRKTDVSDAAWLRQLHSYGLLRGSFRPNAQVATLRAYLRQRERLVEYAAAHIQHMQKALMEMNLQLHHVVSDITGATGMKIIRAIVSGERDPDVLASLRDVRCHSSVETIRASLIGNDRDEHVFGLSQSLELYDFYQAKMLECDRKLEASIASMTVDPEAPLPPLPKVRTKTKQTNAPSFDVRAALYGLTRTDLTQIHGLGPSLALKLIGECGTDLRTWPSAKHFTSWLCLAPGNKISGGKVLSSRTRRSSSRAAALLRLAATTIGRSDTALGAFYRRLAGRIGKQKAVTATARKIAVLFYNALRLEWSIGTQELRPTMNGIAVASLRTSSVAPGPWAMSWHP

SEQ ID NO: 84326 - protein, 371 aa, unidentified
MQDSIFIGLDVHKATISVAIAKAERGGEVRHWGTIPHRPDHVRKLVERLGINGSQLHFCYEAHPCGYGPHRQLVEMGHDCIVVAPSLIPVKAGDRVKTDRRDAVMLAKLHRAGELTAVWVPDAAHEAMRDLVRARATAVRVLGKARQHLQGFLLRHGRIYPGKKGWTVAYRRWLTTLGFQHPAQQIVFQDYVDAVSDAQARVDRLTRQIAELVPTWSLAPVVEAVQAMRGVAFIVAVTVVAEVGDFHRFDNPRQLMAYLGLTPSEHSSGSSVRRGGITKAGSSLARRALIEGAWSYRMQARVGRKMFDRLEALPQAVRDIAWKGQLRMCQRHRHLVAAGKPKVVVTTAIAREMLGFIWAIAREVSVAPART

SEQ ID NO: 84327 - protein, 411 aa, unidentified
MRLFVGDDWAEGHHDVEVMDEQGKVLARRRLPEGVAGMAQLHELTGRYLGEDGGDAQVAAGIETDRGPWVAALVAAGYVVYPVNPLQASRYRERHGVSGAKSDQGDSHMLADMVRTDSHQLRPAAGDSAEVEAIKVVARAHKTLIWERTRQVQRLRAQLREYFPAALEAFEDLDAPDALELLGKAPDPARAVRLTRAQVSAALKRARRHHIADKTTAIIAALRGEQLAQPPALTAAYAAAARALIAVITTLNEQVKALEGQVGEYFGQHPDAEIYRSQPGMGAILGARVLGEFGDDPHRYTDAKARKNYASTSPITRASGKKKVVAARFIHNGRLIDALMSWAFSALNASPGARAFYDEQRAKGLEHNDTLRRLANRLVGILHGCLKTRTPYDEATAWSHRENLPQSGVAA

SEQ ID NO: 84328 - protein, 480 aa, unidentified
MAPARNPLMNRKRRKELARQLRSEDPGLEVLHPHAAGIDVGNNAHYVAVRPDRDPQPVRRFECFTADLHRMADWLHRSGVTTVAMQSTGVYWIPVYEILDARGFEVYLVNARYTRNLPGRKTDVQESQWLLKLHTYGLLSNSFHPTAEIRTLRIYWRQRGDHVAAIGTCIQRMQKVLTQMNVQLANVISDLSGRTGQTIVRAILDGERDPEKLAALRDARIRASHQEITKSLEGTWRPELLFVLKQEVDMYDTYVLRLTECDRELEAHLQRFAAKLPPTPSSPTPTATPTGPSNTPTRRTKRNKKPQGHAPQFDLRRELQRISGVDLTRIDGIDVVVAQTIISEVGVDMGPWQDEGHFASWLGLSPDNRVTGERIIGKGTRQVVSRAATALRMAASTLLKSQSYLGAQYRRFRTKLGAPKAITAMAHKLARLVYRMLKFGHEYVDKGASYYEEQHRQQQIALLKKRAAKLGLQVVQPEAA

SEQ ID NO: 84329 - protein, 347 aa, unidentified
MRFYNRQHRHYCGIDLHVKTMYVCILDAAGQVLVHRNVKSTPEAFLEIVARYREDLVVAAECMFTWYWLADVCAAEGIAFVLGHALAMKAIHGGKAKNDRIDSHKIASLVRGGLLPQAYVYPAAMRSTRDLLRRRLHLVRKRGELLAHIQNTRAQYNLPAFERRLAYPANRDGVSAHFSDPSVRKSIDVDLALIDQYDTLVVDLELTIVREATRHDADAFHRLRSVPGIGKILALTILYEIHDVTRFDRVQEFASYARLVKCVKTSGGKKLGTGGAKMGNVHLKWAFSEAAVLFLRHTKEGKTLLAGIEKKHGKGKALSILAHKIGRAVFYMLSRGTVFSMEKFLAA

SEQ ID NO: 84330 - protein, 340 aa, unidentified
MERRYVGIDLHRRRSVIVRMNDAGEVLAVSKIDNDPVALSMAVAEAGPDPEVVLEACYGWYWAADLLQAEGARVHLVHPLGLHWDTRRVKNDVKDATELANRLRRNDLPEAWIAPPEVRELRELVRYRAKLTALRTSAKAQIHAVMAKLGILPPQPEMFGPSGRRLLDAMDFPGPYGLRVESLRDLLEIYDREHVMVDREIARWLKDDPGYNAIQALHGIGPVTAAILVAEIGDVHRFASARHLCSWAGMTPKLHESDTTSKKGRISKQGSTIVRWAVVESVARYHGGAPIAPTYRRIAERRGGKTGVKIAKVAAARKLLTLVYYGLRDGEIRCLDREAA

SEQ ID NO: 84331 - protein, 375 aa, unidentified
MKEKLRFLGMDVHAETIAAAIAEPDGEVRSLGTIPNRMESVRKLIKKLGPVEKLRVCYEAGPTGYVLYWQLAELGVQCEVIAPSLVPVKAGDRVKTDRRDAEKLARSYRSGDLTAVWVPDEGSEALRDLVRTREAAKQDELRARHRLGKFLLRSGHRPPTGVRAWTHLHLIWVSQIRFTQPAQESTRLDYLHEVEHMRERVLRLEQAIVEAVKLASPALQEVITDLQALRGIAHISAVTIAAELGQVARFAGARELMGYCGAVPSENSSGKRSRRGSITKTGNAHLRRIVIEAAWSYQRPPAIWAGLRKRQQSASEAANEIAWKAQHRLHKRYVRLAAAGKDKRKIVTAVGRELLGFIWAIGTKAEAAAGQRIAA

SEQ ID NO: 84332 - protein, 390 aa, unidentified
MFYLGIDIGKFHHAAALMNQRGKVIATLPSFSNTRSGFQRLLGLISSHLPPAEELSIGMEATGPYWIPLAEWLKTHGRIPVILNPIKTASLRNYGVRGSKTDNIDSVLIANTLRIEGEQPQPRSPKHSEELRHFTRLRTDMVKDRTRLALRVTSLLDRLFPELLSSFSKTISPSCLALLSQAPTPSKVLAMGEEKLAALLHKASGGNLKPTRAKEIMTKAANSVGVPSQAMEEAVTLLLDQINLIDSQLTTLARRITDLYEEAGLYFTTIAGVGTLSAASILAEFGSITRFAQAKQMVAFAGIDPKLRNSGRHQGQVHISKRGARYLRRALYLACQVVVRNDDYFHSVYQRHRDNGKSHKQAIIAVMNRFIHVLYAIWRDNRPYYPLTQT

SEQ ID NO: 84333 - protein, 338 aa, unidentified
MATYAGIDLHSRNNYIGVINSKDKRLYGRRHDNNIDHVVGALSPFKKTLKGVVVESTYNWYWLVDGLQEAGFNIHLANPAAVQSYNGLKYTDDKWDAFWLAHILRLGLLPQGYIYPKEERPIRDMLRRRMMFVRQRTTHILSLQSMITRHRGLNYPGSSIKTFKDKMIDRLFDDKYLVLLAKNQMATIRHLGKVIKEIESVVTSEISLRKEYHYLLTTPGIGQILGLTIMLEVGDINRFKKAGNYSSYCRCVESKKMSNGKKKGENNKKNGNRYLAWAYVEAAYHAARSNDQARRFFQRKMSKSNRTLATKALANKLTKATYYIMRDQIPFDSEKLFR

SEQ ID NO: 84334 - protein, 324 aa, unidentified
MTKVSMIGLDLAKNVFQAHGVDAAGKVVVRRQLRRPQVEKFLAALPPGVVVGMEACSGAHHWGRVVQKLGHEARIMPAGYVKPYVKRNKNDGRDAEGVCEAMGRPTMRFVQVKSLESQAVLVLHRTRRLLVRQRTMSGNAFRSALAEFGIVAAQGLKGLRSLMELLADPASAVPEAARLPLRVLARQWETLNADICKLETEIVRAAKTDEVARRLMAIPGLGPIGATAILAAVPDIRMFKTGRDFAAWLGLTPRQFGTGGKHSSGGISKKGDRTLRTLLTVGATAHLRYERARDIKDPWLQALLARRPFKVAAVAYAAKMARII

SEQ ID NO: 84335 - protein, 341 aa, unidentified
MAVAGGLDLHRGQLTFDYVDTGTGESWRGRISPADRESLRGWLRRFHGVPDVEFAVEGCTGWRYVVEELQRAGITPHLAEPAETAGLRGRKRRAKTDWADARHLRDLLLDGRIPESWIPPGHVLEARALVRLYKDLLEERTSWQQRVHATLFHQGIPVVPKLGTADGRQRLDAAELSAAGRRAVQAGLRQIERLTQEMASLRRELARLSSRQPGCRALRRAHYGIGGLLSVAVWAELGDCRRFSSSDDAVRHTGLDITIYDSDGKRARGHIARQGPPVLRWALYEAALYASRPASPDYAYYCGVRDRIDGQRALLSVARKLARRCYHTLRDLGEDALAPAA

SEQ ID NO: 84336 - protein, 348 aa, unidentified
MKFYTKTHKHYCGIDLHARKMFLCILDASGDVLLHRNIATSPETFLKAVAPFRDDLVVGVECMFAWYWLADLCTKEGIEFVLGHALFMKAVHGGKAKNDKIDSQKIAVLLRGGSFPVAYVYPPEMRATRDLLRRRNHLVHKKAELLAHIQNTAIQYNLPEIGVNLSCEGNRKEVDQHFPDPQVRKIVQVDIAMIDAYDDVLKVLEPDIEKTARRHDWHALMLLRSVHGIGQILGLVMLYEIHDIERFQTVQDFASYCRLVKCIHESAGKKKGTSGAKIGNAHLKWAFSEAAVLFVRHNPSAKKLMDDLIKLHGKGKALTILAHKLARAIYYMLKKNVPFSLEKFLATA

SEQ ID NO: 84337 - protein, 343 aa, unidentified
MDHFAGLDVSVKETSLCIVDDAGRIVREVRVASEPEALLAVLTNPACHFKRIGLEAGPLSQWLFNALAEAGLPVICVETRHMRAVLKAQINKTDRNDARGIAQMMRAGLYRPVHVKTLRSQKQRMLLTHRKLLQSKAIAIENDLRATLRNFGLKVGVVGTVKFEARIKELVDNTPDLAVLVEPLLIVRRVLREQIGILHRRLLAIVRDDDVCRRLMTVPGVGPVVALTYRVTVDVPSRFRNSKAVGAAFGLTPSKHQSGESNRTGGISRCGDEMMRMMLYEAAHIMLVRSAKWSWLKAWAMKVARQRGLKKAIVALARRLAVILHRIWVDGTEFRWTREVAAA

SEQ ID NO: 84338 - protein, 411 aa, unidentified
MDVLYPVCCGLDVHKKTITACLRFPSARARAEEVRTFGTTTRELLRLADWLTAAGCTHVAMESTGVYWRPVYHILEASFEVLLVNAQHVKAVPGRKTDVKDCQWLAQLLEHGLLRGSFVPPAPLRELRELTRYRRQLVQEHAREANRVQKVLETANIKLGDVATDVLGVSGRAMLHALIAGERDPERLADLARGALRQKAEALREALVGRFTLHHAFMLQGLLDHIEFLDQQIARFDERIEEQTRPFGPAIERLDTIPGVGRRSAEQILAELGDDMRRFPTAAQAASWSGICPGNHESAGKRRSGRPRKGNAWLRSTLVESARAAVRNRGCYLSAQYHALARRRGDKKAIVAVGHSILVAAWHILRDGVEYRDLGPDHFDRLNRERLVQYHTRRLAELGLTVQLPGAQATA

SEQ ID NO: 84339 - protein, 463 aa, unidentified
MLLRARVTGSRSCRGPRGRRARIRYWEKKEGAVDIVHPRVAGIDVHKKVAWVAVRLPGEAPGERKVITKRFKTFWRPLQKMAAWLAELGVTDAAMESTGVYWWPVCHALAGAGIEVCVCNAAHMRNVPGRKRDIADCQWIAELHEHGLLRPSFIPAAEVAALRQRTRYRKRLIEQRTSEGQRLSKVLEDAGIKIDSVASRLLGVSGREMIEALIAGERNPGRLADLARGVLRRKTEDLQMACDGRFTAARAQMCRLHLDAHDHLTAAIAELDALIAEAAAPFAAVIAQLMTIPGIGQRTAEVIVAETGGDMTRFAASARLAAWAGLAPGDNESAGKRKHAAARKGNQHLRAAMTEAAWATARTRTRPGARFRRLARRFGKGHEKKAAVAVAHTLICIAWAVLSRGEDYAEAGEDYYEQRDRRNREHLIRHHQQALARLGCQVTLTPPGDGPPPADGPGQQPAA

SEQ ID NO: 84340 - protein, 341 aa, unidentified
MNTTTYGLDIAKTVFQLYWVEPSGKYFNRSFSRAKLIEFLATREPGRVVFEACGSAHWWARRLRALGHEPVLLHARYVRPFVQTNKTDAADAKAIWTAAQQPGMPVVAAKDESQQSVLVLHGLRMVRMKMRTMLINQLRSFLFEFGLTFPKGACAGLHEIVERMAEIEQHVPPMLLEFVQMQLQSIERAEEEVARLDQRIEAWGRQNRSCRAILAIPGIGMLTATAMVATIGDARTFKSGRQLAAYLGVVPKQTGTGGKVRLGGISKRGDPYLRTLLIHGARVVLSHLRRKNQGSWSETLAQRRPTNVVAVAMANKTVRTVWALLAHERTYDRDYVSVRPA

SEQ ID NO: 84341 - protein, 310 aa, unidentified
MAYFGIDVSKDALDVADTEGYLARFAYDEDGLHALCRRLAPATLIVLEATGGLERDVAAHLGTAGLPVAVVNPRQVRDFARATGRLAKTDRIDAQVLAAFAQAIRPEVRPLSPAQQQTLAALVARRRQLAEMITAEQHRLRRANAVVVPDITAHLAFLRQRLDETDAALRTAIEQSPLWRAGDDLLQSLPGIGPVVSATLLAELPELGRLSPPQIAALVGVAPLNNDSGRRRGRRRIWGGRVPVRCVLYMAALVGVRHNPVLRAHYERLLGWGKTPKVALVACMHKMLRWLNAMMRDAQPWNPALHALSP

SEQ ID NO: 84342 - protein, 368 aa, unidentified
MDKITSVGLDLAKQIIQVHAVDGAGRVVLRKAVRRERLLALLAQFPCCVMGMEACSGAHHWARELVKLGHQPKIMAAEFVRPFRKSLAAKNDANDAEAVCTAMRQPNMRFVAVKTVEQQGLLCLHRVRQGWMEERTALINRLRGLLAEFGVVVPQSATALQRALPTLIAAHEARLPAHAQRCVQELIDHLGALVARIAAFDREIGQHAHGNDAAQRVAALTGIGPITASAIVATLGNASDYRNGRQFAACLGIVATVFQWRQDPTRAHHQARRCLLAHAADPGRAINDAGGAAAAAYPARSHQCLDCATSAARRLSQGVGGDRQQARAGRLGTARARRDIRSQAQRYALTPQQQPNNLPTTAEMSSMR

SEQ ID NO: 84343 - protein, 315 aa, unidentified
MKESVEKSVVYYVGIDVAKARLDVATSQLNAVFTRNLTGLDRLVQWLHQLGGPVHVVLEASGGYEREVVAALQGRDFAVSVVNAGWVRNFARSQGRLAKTDRIDARVLVDFAAANAPRLSVPVCPEQQKLTDLVRARQQLVAVRTLLQNQLEHTRERLARRSQEELVELTDTRIRRLEKALAQLIADTPALAAKVQKLTAVRGIGPTTAALLLAELPELGTLNKAEAAALAGLAPRNHDSGTFRGQRHIAGGRPAVRTGLWMPTLVATQHNPILKAFYQRLRAKGKPAKVALTATARKLIVYLNGLLKSPSLSSC

SEQ ID NO: 84344 - protein, 338 aa, unidentified
MLGIDLGKNLCSLAGLDETGAVVLRRRMKRASVLPFTAQLERCTVAMEACCGAHHLGRQLIAQGHVVRLMSPAYVQPYVKAQKNDERDAEAIAEAATRPTMRYVEIKSEAQLEVQSLHRVRGRLVAERTALINQLRALMLERGIAVPQGRCKLARYLPEILADERNGLGPRLRQLIEDIREEWRSIDQRIKGYDDELAEQVRNEDTAKRLISIPGIGVLTATALVAAVGNAQTFSCGRDLAAWLGLVPRQATTGGKPRLLHISKRGNGYLRMLLIHGARTALPGLAKKDTPLGRWVKALLARAHRNVVTVALANKLARIAWAVLARDRQYVTVQAIGK

SEQ ID NO: 84345 - protein, 351 aa, unidentified
MKTQITATPKLYIGIDIHKRSWKIHCATDLFSGKSFTMPPNPEVLEAYVDKHFRGYQVTTAYEAGCCGYYAHRSFERYGWKSLVVNPADIHRKGKEKYTKTDKIDAQLIARELKDGRLDSIHIPGVEREQLRSLFRRRNDLVKDYRRVKSYIKMQLLYLGVSIPLEFDNDHWSHKFRDWLDGIEFDYLTARETLDSRMRYFRFIDKELRDVSSKLRAYCRKHYKKDYYLLRSIPGIGGIVACGIICELGDLRRFNNIKHLAGYVGLAPGVHQSGDNQRSTGITMRAHRLLRSYFIEASWQAIRTDPIMQAYYRKHIGKNVKTIIIKVARKLLSRTLAVIKTETPYAVGVIE

SEQ ID NO: 84346 - protein, 376 aa, unidentified
MREKLRFLGLDVHAETIAVAVAEPDGEVRSLGTIANREDSVGKFIKKLGPAEQLRAGYEAGPTGFVLYWQLTQLGVECAVVAPSLVPKKPGDRVKTDRRDALKLARSHRSGDLTAVWVPDEDSEALRDLVRQREAAKQDQLRARHRLTKFLLRTGRRPTLGLKAWTERYMAWLEQIRYTQPAQQATLVDCLNEVEHMSARVKRLEEAILEVVKLAPQSMQEVIRGLQALRGVAHISSVTIAAELGNISSRFESARKLMGYCGLFPSEDSSGKRIRRGGITKAGNAHLRRIVVESAWSYRHLPRVGAKLRKRQQGVPAEITEIAWRAQNRLHKRYMKLTMAGKDQRKIMTAVGRELLGFIWAIGIKAEAACQQQLAA

SEQ ID NO: 84347 - protein, 355 aa, unidentified
MKFYCGIDLGARKSHVCLIDEDDHKLLDMKMDNNLGVIEAALRPYKSSLEIVAESTINWEWLVYGLQKYGYEVKLAHTLGLKAITWSKKKTDTWDAFTLAKLLRGRLIPQAYIYPYELRPVRDLVRERIRLVTKRATEYGAINRMLLKYNIQGFDRNSVKRLNEKDMHELYHHPFVRVKATMELQRIELLTEQIRFIEKALFERARQDSMFSLLQTIPGIGDILALTILYEVGDIDRFEHTRGFCSYSRVVPGIHQSSARTYRSPNSKQGNRYLKWSFSQAAIMAIRYYPQIRKLYERLAAKRRKAARLVARSIIAHKLAQAAFHVMKHQVEYKEELLFRFSKEHAEGKTVTPSE

SEQ ID NO: 84348 - protein, 387 aa, unidentified
MDVLYQSCAGIDVHQANIVVCILHGPLTSTRPKREMATFDTTTKGLRACRDFLSQFHVEAVGMESTGVYWRPVWHALCDDFELILAQPAHMKAIPGQKTDKKDAHWIAKLTRIGLLPRSFVPDETIQELRELTRQRKHYVESRNRETNRIHKILQSGGIKLTTYIEDIMGLSGRNLLQLLIDETPITPRIVHQSVYTSLKKKVPQLLEALDGYFSDHHRFMLKQSLEIYDFYQKQIELLEERITVYLSQYENHVEILDSIPGIDVITASVIISEVGVDMSQFPTAGHLASWAGLCPGNNESAGKKRSTKIRHGNSYLKKCLCQAAFAIKKQKGSPLADRFYQIQSRRGSQKATIALAHQLLKIAYILLKEQMTYPEFLAQKRLLGTS

SEQ ID NO: 84349 - protein, 347 aa, unidentified
MLYAGLDLSRQRLDVHLLDEDGRTIEVTAVRPDADALQSLVARMDRYGQPVSAAIESMNGARFVHDVLERAGWAVEIADAQKVKGLAPLAAKTDRIDAWVLAELSRRELVPAIWLPDPANRAERERARFRLHLVRHRTALKNRIHATLIAFGHPVPVSDLFGVSGRELLDRLAIPDPWATTLATSLRFVDELDREIDACEAELRAIGADHPYLPLLRTVPGIAWVLGYTIAAEIGDISRFSSPKKLTGYTGLCPFVRQSGGRDDRGPLAKNGPKYLRWALIEAATHAARHPMYKDRYERNKKRLGRQRGSKVARVDIARELATAIWHMLSKNEPFAPGRSPATPLVA

SEQ ID NO: 84350 - protein, 353 aa, unidentified
MKVHRNCCGLDVHKETIAACLIREDAGGNTGKEKRIFGTMTQQLRELAQWLREAEVTAVAMEATGVYWVPVWNVLEREGLELLLINPEYYRAVRGKKTDLKDGERIAELLQDGRLEGSYVPRTELRVLRDLTRYRVKLVEHQCSVACRIQKLLEQCNIKLASVATNVLGVSGTAMLHALAQGETDPERLADMAKMQLRKKLAALQLALDGHLLPHHRFLLSEMLEELSHVQSSIARLEAEIELEMKPFEKALQAWMSIPGIKHRVAWTLVAEIGPDVHAFFSSANIASWFGICPGNNETPGNGKAERLTKETAGRGEPCAKRLGLRPKPRTATCRRSSAAWPLPEGRNERSLP

SEQ ID NO: 84351 - protein, 357 aa, unidentified
MTTQEKQKTLFVGIDVHKDTHTAVGVSPYGEKLFEITVGNYKNDFKMLEEKVKEHTGVLSPYIGIEDVRGYGERLSEYLYQKYPVYHVPSILVDRQRQNATHPEKSDSLDAFGVAKVMMNSLDSLLVYTISQESEKAKQLKEISIDREDLVLERTRLKNQVHTLLYRIYNTEYQTKYKNPFTLKALKFWLKSKPKCDPYLLKAMKRKVRRILDIHTEVFDLEKDMEVLLDAGEYTIQTASGCGLVVASTIIGEIGDIDRFTSPGALSKYAGCSPRERSSGKKVRHIKSRSGNRRLNCAFHRMALSQISRMGNDKARTYFKKKISEGKSKNQALVCLKRHMVNIIWMMLKHKTVYRNA

SEQ ID NO: 84352 - protein, 455 aa, unidentified
MVKKQKICVTTKSQGLRVTHPSTAGIDIGKDLMQVSVPEDRSEKSNRSFGSFTKDLKEIISWLRECRIERVVMESTGIYWIPLFLQLQEAGFEAILVNAKEVKNMSGRKTDVNDADWLRFLGSCNLIRPCFQIAAVSRRLREYHRIHASKVRDMARELQHMQKAMGSMNIKLDSVISDIAGKSGMSIMRAMLNGERNPATLASLTDPHCKNDKATIEAALQGTWDIEHMLALRMAMETYDHLQTQIVRIEKEMEIFLDSYELTPVPSVKASDIKDNRSGKRKQSKNPIHFDVELYSFLMYGVNLMRIPGVSDSTLITLMCELGPDFTSKFKTPGKFCRWCNLTPVDNVTGGMVTSSKVPKRPNPVGQALRQAASTLRKSDTPLGQYRRRMAARLGPAQAVVATAHKIAEIIYLMVERKVEYDESKTSQSESELTQKRIRFLEKKLSKLKSAQNTL

SEQ ID NO: 84353 - protein, 318 aa, unidentified
MQISVCFIGVDVGKFELQVAGHEGQIVAGVLPNNRSSIVGWLKRLPADSVIAMEATGGYQELLARTAHERGFEVYVLNPTHVHHYAISLGNRGKTDRLDAEVIAQYIAQRHAKLHRYEPISPELQQVRSLQALRSTVVRVGTSLRLSAQRHGCTSGHQKKALASLNLWAEQLERELIATIKAQSEWAKTYGLLTSICGIGPINGAALTTLFNRVHFASSDAAVAFCGLDPRPNESGRKMGRRRLSKQGDKAARTLLYNAASSAARSIYFKDYYAMLRARGLASTAALVVIARKLLRIAYGVWRTGQPFDPGKLRPGVG

SEQ ID NO: 84354 - protein, 390 aa, unidentified
MLTAADGSVTQETKTFGTTTAEILALGDWLKGHGVTIAAMESTGVYWKPLYNLLEGQVELLVVNAQHIKAVPGRKTDVADAAWIADLLRHGLLRGSFIPPQPQRELRELVRHRTNLVGRRAQAVNELHKSLESTNIKLGNVVSDLTGVSATEMLQGLVEGKTDPAALAELGRGQLKKKKPELQAALRGELRAHHKLILSQLLADISWCEEQIAEVSAEIALRLKDQEELMDRLDDIPGVNRRVAEIILAEVGSDVKRFPTAQHLVSWAGLCPGNNESAGRRKSSRIRPGNRSLRCGLIEAAQAGRRKKGSYLSALFGRLAGKRGKKRALIAVGRTILQSSYYMIERGTRYEDLGADYYERRSPEGLARRLAKRIEKLGFAVTFQALPQAA

SEQ ID NO: 84355 - protein, 367 aa, unidentified
MSNSRIQSKALNAKLSWEIIGLDLAKNDLSFVGITLEGEIIRIDRLSYEQLVEFSRDTDPTTFAMEPCCESHYLTNQLELYGHQCRIIPGKAVQNYIDTYFSGQKNDLNDAEALAFLGQQKRLKFVRAKNRDEMQLQTLLTVREHYIDEYRKTLTSLKGVAQYWGLRLAKSLSSEMRLIALIEDADLPEDVKGIFKEMVKTYKDLQKKARELTKKIEAFTQGDEFCQKIRKIPGLGPISSAGLKVAIGDIARFPSPRTLPAYFGLVPRNITTGHSLKMGKITKRGDKLVRTYLVQAASSLLMLDGKGKFRDCQLRRWIQRKRQTLNHGKLVVALAAKLLRIVWAILSKNEAFDYRKAGVAKCSLPKT

SEQ ID NO: 84356 - protein, 356 aa, unidentified
MQTQVTKKIDFKGKDLYIGLDVHKKSWSVTILVEGMEHRTFTQPPDPLALYTYLQRMFPGGTYYSAYEAGFCGYGIHRALNDLGIKNIVINAADIPTSQKDQIHKLDPVDSRKIARALEKGLLRAIHIFDRDMEELRSLNRTRFYLMRDFRRSKNRIKSFLQYYGIPIPPEYDNNLWTLKYIAWLKQIQMKTLSGQGAFSSLISSFEYNREQILSLSRQIRIRMREYDNELYNLLKTVSGIGPLTSSALITELGDINRFPHINHLSSFVGLVPRIKQSGETSYNAGMTFRCNEYLRTLLIESSWQAIRLDPALMQYYHQHVVNNKGQKVIIKVARKLLNRIRYVMKNRQPYVTGVA

SEQ ID NO: 84357 - protein, 442 aa, unidentified
MSNELPVPTAPEPEWAAFVAIDWADRKHYWKLVAAGSQKPEQGELDNTPEAVAVWAAGLNVRFGSRPIAVCLEQSRGSLVYMLLKFPQLVLFPVHPRMAASMREAFHPSGAKGDPSDTAVLLTILLCHRDQLRRLKPDTAETRLLQRLAEQRRLMVNEKTRHSNRLTACLKLYFPQILKWFDDPTSPLVGALLERWPSLEPLQRAHDGTLRKFFHQHNCRSEERIQERIDAIRQAVPATTDTAVLGAEAMAARGFLAVIATLRAHIAELDEQIAKAFAAHPEIALWDCLPGAGAALGPRLLVAFGTDRQRYAKAHELECYSGIAPVRSASGQSEWIHFRWACPKFLRQTFHEFAGHSIAKSEWARAYYDLQIGRGKSHHAAVRSLAFKWIRILYRCWKNRTPYDEQVYLQSLQKRNSPLKALLPGAAWKDVAGFQKLSENPS

SEQ ID NO: 84358 - protein, 402 aa, unidentified
MNAVGIDVSKGKSMVAIMRPFGEIVSTPFEIKHTSSDINSLVKLIKSIEGESRIVMEHTGRYYEVLAHQLSEANLFVSAINPKLIKDFDNDSLRKVKTDKADSVKIARYALDKWQNLKQYSVMDELRNQLKTMNRQFGFYMKHKTAMKNNLIGILDQTYPGVNTYFDSPARSDGSQKWVDFASTYWHVDCVRKMSLNSFIDHYQNWCKRKKYNFSQSKAEEIYGKAKELVPVLSKDAITKLIIKQAVDQLNSASTTVESLRTLMNETASKLPEYPVVMAMKGVGTSLGSQLMAEIGDVSRFTHKSAITAFAGVDPGVNESGTYEQKSVPTSKRGSADLRKTLFQVMDVLIKTHPQDDPVYQFLDKKRAQGKPYYVYMTAGANKFLRIYYGRVKEYLSSLPES

SEQ ID NO: 84359 - protein, 351 aa, unidentified
MIIIGVDYHPSSQTIAFLNQETGECGERQLNHSDGEAEKFYRELKQRGVSVRVGMEATGHSRWFERLLAELGFELWIGDAAEIKTKRVRKQKTDREDARLMLKLLLENRFPRIWVPSPENRDLRQLLWHRHRLVQMRTRIMNQLQAVAMNEGYRWKKKLFSEKGRGLLEKLPLAPWASRRRKELLELLDQLDPKIAELTAAVEQEAKKRPEVLLLMTHPGVGPITGLVYVLVIGTPKRFPCGKQIGSYTGLIPCEDSSAGRQRLGHISKQGNTLLRFLLVEAAQAAARCNPDWRRRYMHLMMRREKRIAKVAMARKLGVRLYWMWRNNWQYSQLVEFGSNAGKLVLVHGVK

SEQ ID NO: 84360 - protein, 349 aa, unidentified
MVHYAGIDVSLELSSVCIVDAAGKIALEGKVESHPDAIVAFMRKTGLAIERIGLEAGPLSQWLHAGLTNGGFETVLLETRHVKAALSAMTVKTDRRDARGIAQLLRMGWFRPVHCKSPGSQEVRALLVARKQLLAKLLDIEFSIRGILRGFGLKMGVVTRTGFEARVRELCAGQAMLEQIAEAVLAARAALRKEYSKLHKTMLALVRRDEICRRLMSAPGVGPLVAITFKTAIDDPARIRKSKGVGALLGLTPRKYQSGETDVTGHVSCVGDTMARTALYEAANAILSRITRFSALKRWGMDVAKRRGTTRAKVAVARKLGVILHRMWVDGTNFRWTKETLPAAGPANA

SEQ ID NO: 84361 - protein, 438 aa, unidentified
MSNKVIFNLDELFISVGIDVGADFSWMSIALPNQQFVGKPYKILHNSIDSLTTAVSKIKEAEELYSLESRIFLESTGIYHYPLFCYLRDKGFNCSVINPIITKNSTNINIRKVHNDRFDSKKAALVGLKPDLKVSLMPSDLALNCRNLCREYYDLMDNRSAYVNKLQGELRMAFPQYLGIFSKVTINTSLTLLETYTSPSAFLEADKQEIIDIIKSTARFGLTYAQNKYNAIIQAATDANQFGYIIESNIKRIRLYISFIRKYDEEINSILESLHELVDANEDADFVKQIHLIETFKGAGFLSAVSIMGEIGDFSAFSKPKQLFAYFGLDPAVKQSGKFEGTKVQMSKRGSSIATRVIHKLTLQSISISRNVEAKNPVLREYYLKKCDSKPKLVAMGAVSHKVCNMIFAILRDNKPFKIIAPQEHIKQYNSAKCDIAA

SEQ ID NO: 84362 - protein, 408 aa, unidentified
MQVTFGIDVSKSTSTVCELIGESKNELTITNNRPGFIQLLHELTAFSKHPQITFEATGVYSRTLQSFLEDYGYDYVILNPLKAKKEMDMGLRHNKTDKTDAYHLALIQRLYHHPINQLQSQTYKQLNALSRFYDQLTADLVMAKNRLHQALQSTFPEIENLFSSAKGKNYWQIVVRYPHCDLVRREDKKQLINWLMSLKGIAFKHALRTADKLIELAYQAYPVVSCSSIEVEQVQYYAHRLLNLSDQRENLIARMVKLAKSLPNHDLENLESIPGFAQTTAVRVLAELGDLRRFSNPNKINAFIGIDPGRYQSGEMDSNLSITKHGNAVARKLLYRAIGQIDNAAKTNPCHIADYYESKKLSSQTKGFKKIAIASIHKLIRTIYALIINDQLYDYNVATHNQKDFSCN

SEQ ID NO: 84363 - protein, 342 aa, unidentified
MSVMIGIDPHKGSHTAVVINGDEVVIEEIRVRASARQVGELQEWASGYEDRCWAVESARGLGYLLSQQLVAAGERVLDVPAMLASRVRVLDSSKSQKNDPNDARSVAIAALRHSGLTPVVADDHTRVLGLLAKRHRDVARLKNKAACRLHALLGELTAGGLASEMTVNKANSLLASVVVTDEVTRQRIEIATELVDDIARFNAQMRASKQRIRTAVVASGTSLCDIRGIGPIGAAIILGSVGDITRFPTKGHFASYNATAPIDASSGNHKRHRLNPRGNRKLNHVLHIAAVCQLRYPCEGRDYYQKKLTEGKTSKEAIRALKRRISDVVYRQLKADVHRSTS

SEQ ID NO: 84364 - protein, 392 aa, unidentified
MYIVGIDIGKNHHEASIVSPEGKQIGRSLRFATTHKGADSLMSFIFKNIGNSPCVFGMEATGHYWYPIYSFLKAKGYTIYVINPIQSDSLRKMYIRQTKNDSIDSFLIAEVIRFGQFGTTSMADENILAMRQLCRYRDSVISSRTEIKLRIGTIMEQIFPEYEKQFSSLWVSTSMGILEKYLTPENIENAPIDELFEIIKDKSHNKLTMKKAISIREAAADTFGIKIAQDAFSFQLKQLIDRMNFLDKQIEALDCQILEYYEKFDCYLHTIPGIGIIGAATILAEIGDISRFKNSSSLIAFAGIDPTVRQSGEFNSTHNHMSKRGSPYLRHAIFLAATTCSFHNSPLNAYYKKKRDQGKHHLTATGAVARKLTTVIYAVLRDSKPYEPKKFC

SEQ ID NO: 84365 - protein, 349 aa, unidentified
MDHRTPVTTYVGLDISLAETHICVLDQNGTRLYQGAVPSDPDALADIICRKAPNCERIGMETGATTPWLWRALRGRGLPVICIDARHANRALSMRKNKTDKNDAQGLAELMRIGWFKEANVRSPQTQYVRSLLTARYQLRLSRKDVLNQMRGVVKSFGLFSGSTATRRFPAMVQEIIQDNPQFGPLLAPLLAVHEALTRQIAVYEDELKNIAERDPDARRIMTVPGIGYLVALAFMTAVDDPARFSSSNKLGPYLGLAPRVRQSGEASWSAGIGHAPDKMMRSYLYQAATVVLTKTASWSALKAWGLRVYKRSGFKRAAVAVARKLAIIMHAIWINGTEFEYSQKGKAA

SEQ ID NO: 84366 - protein, 371 aa, unidentified
MDERIKFFVGLDVHKDSTVVAACESGREPARFVGTMGPDVAALLKLLAKAGDPAQVSVVYEAGPTGYGLYRELCRRGYRAQIVAPSLIPRRAGQRVKNDRRDCIRLAELSRAGELKAIWVPDQAHEAMRNLWRAREDAVGMRLKARQQLQAFLLRQGRRYPGRTNWTKSHERWIAGQRFEHDGDRIALAEYQLAAQAAEQRVQRLTTALREAAQGWRFEPVVAALRALRGIDTVGAIGLVTEIGDIGRFSGARQLMGYLGLVPSEHSSGNSIRRGSITKTGNAHARRLLTEAAWSYRFPARMSQQLRQRSSDLPEAVRHHAWKAQQRLCGRFARLSSRGVQVNKVCVAVARELAGFVWAIAHQAAPAAAVH

SEQ ID NO: 84367 - protein, 476 aa, unidentified
MEKKLSNRREEVIKLLARQKIRTVKDLESYKLSECHPHSAGIDLGSEEIYVALNPAIAAEMDIPIVHFFSTFTNDLLACKDLLVSCGIRTVAMESTSVFWTTIYFILEEAGIEVCLVNPKKFRMVPGRKTDISDCQWLQTLHLYGLLRGSFHPPHQIAMLRSYMRERDSIIKERSSIVQRMQKAMVKMNLLLHNVIDDITGKTGMKIITSILEGQRDPKLLASFRDPRCKKSEEEIMEALTGYYREDQLYLLKLNFQSFCFFDKQISDLDKQITTLLKQFPCKKEKKEKRPDNGKRNSKGKNDIRSKENPEDILYRILGTDLSRLPGIRGNAVLQIISEVGYDMSKFPTANHFAAYLGFVPRNKITGGHIISCKTDRIKSSAAQAFRKLVPSISQTKTALGAFYRRLAPRIGKAQAIIATCRKLAILFYNALAYGIAFVEQGEQIYKQKQEDYERRKLLNLAKKYNCTLVTNNAKN

SEQ ID NO: 84368 - protein, 354 aa, unidentified
MSPVNSRIAAIGIDIGKNTFHVVGQDERGALVLRQKWSRGQVEARLANLPGCLIGMEACTGAHHLSRKLQALGHDARLMPAKYVRPYSKGQKNDFRDAEAIAEAVQRPTMKFVATKTAEQLDLQALHRVRERLVSQRTGIINQIRAFLLERGVAVRQGLRFLRIELPSVLATRSDVLSPRMLRIIEDLAGDWRRLDERIEGVSGEIEALARKDQACERLMTVPGIGPIISSAMVAAIGTGDAFAKGRDFGAWLGLVPKQISTGDRTILGPISKRGNRYLRALFVQAAWVVLVKLGKKWQCYGLRSWIEAAKKRLHHNVLAIALANKLARIAWAVLYKGRAFEYVKTNATASQSA

SEQ ID NO: 84369 - protein, 343 aa, unidentified
MNSTVISLDLAKHVIQAAKFTQDAVMQFNKPMSPDAVIQLLANTKPCIVAMEGCGSFHYWGRVAERFGHTVRAMPPIKVKPFIGSQKTDANDAVGIYVACRQPGMTFCPIKSVEQQTIQSIQTSRRMLERTLKSTGNHIGALLYEYGFVFAKGKKALREAVARYLAPESETLNPAVKAVLTTLWEQYQATEKYFDMLTKQLNQHVMQTEPCKRLMKLEGVGEIGAAGLYASLGDGSGFKSGRHAAVYVGATPKQHSSGGKVVMLGIDKKGGDKSLRATLFIGALSAICSLPAEPKTEKQRWLIALVKRVGTKRACIALVNKTVRTAWALLRYSQPYQPTPLMA

SEQ ID NO: 84370 - protein, 446 aa, unidentified
MKKSSRMSVIHPHAAGVDIGAEFHVVAVPPDADAEPVRTFQSFTGDLHRMSDWLKTCHITTIAMESTGVYWLPAFEILEATGFNVILVNARDAKNVPGRKTDVNDAQWLQKLHSFGLLRASFRPEHDISVLRSYLRQRERLTEYRAAHIQHMQKALMQMNVQLHHAVSDITGVTGLSIVRAIVSGERDPSVLIQYRDVRCKKTPEVLQQALTGNWQPEHLFALEQSVAFFDFYQEKIRECDDQIETSLLQLSTGTEEPEGVLPSARHRTKQPNQLTFDVRPLLWKITGADLTQIHGFGPYLALKFVAECGTDMNRWPDASHFTSWLCLSPGNKISGGKVLSSKTRRSSSRIAAALRLAATTIGRSDTALGAFYRRLSSRIGKAKAVTATARKLAILFYNALKYGQKYVDPGADYYEERYRNRVLDGLKRRAKSLGYSLQQDPELCV

SEQ ID NO: 84371 - protein, 355 aa, unidentified
MCAKKSGSFEDVAVVGVDIGKDTFHLVGFDRAGQLVMRKQIKRLALNATFEQLPRCIVGMEACLSAHFVSRTLRGMGFEPRIIPAIYVKPFNKGQKNDYNDAEAIAEAALRPNLRTVSEKNQDQLDLQALHRVRARLVSRRTATINQIRAFLIEQGITVRSGLRALKNSFETILEQRRDEISPRMRGILIGLYGDWLWLDKRIGDVSGEIEAISRTEENCANIMTIPGIGPMISTAMVAAVGKGEAFDRGRDFAAWVGLVPRQFSTGGRTILGRITKRGSRYLRMLFVQAAKVIMMRPHRWSDFSFGPWLSEAVARMPRNKAAIALANKLARTAWSLLRHGTRFDAPKDAAMEAI

SEQ ID NO: 84372 - protein, 444 aa, unidentified
MNEQMPPIAVAAAAAPDVDDPAQAFGQLTHYGGFDWAKAEHHALVVDRQGHIVLSLRFANDADGWAQFRRKVAAFPGLGIAIETNCGPAVERLLDMGLTLYPLNPKAAERYRDRKAPAGAKDDALDAWSIADGLRTDGHGWRPLRPQDPLTTELRLLCRDEVALIEQRTALVNQLKAALHEYYPAALDAFDDWTGEGPWRFVITFPSPDVLVKAGRRKQERFLHANKLYRPQTAEQRLSAFAAAKAFANPNAAVTRAKMLLAVTLAKQLCSLESQLREYRARIIELFDDHPDHDCFGSLPGAGAKIAPRLLSELGANRAVFATAEALQGYAGTSPVTKQSGRSRFVIVRRACNKTLRATVHLWADLSRKSCVWAEAYYQKKKADGMGHAAALRCLGQRWVKILWTMWRNHAVYDEATHTRNQVRHGSWVVGLPPTNPAPTTAGR

SEQ ID NO: 84373 - protein, 322 aa, unidentified
MGTDVFVGIDVSKDTLEVATTEPQGERMNFAQTEDGLSLMADFIQSFTPCLVVLEATGGLERAAVATLAARGLPVVVVNPRQVRDFAKSKGILAKTDKLDALVIAQFAQAIRPEVRPLKTAEAQELEAILSRRRQIVQMLTAEKNRLHSAPGWTRKDIRLHITWLEKRLEKIEKELSGMIRKSPVWRVKDELLRSFKGVGPVLSQSLLSDLPELGSLNRKKIAALVGVAPLNRDSGKFRGRRMVLGGRSQIRSVLYMATVAAIRSNPVIGVFHERLIKAGKAPKVAITACMRKLLTILNTMMKNQTPWRPLTQNMLDMQHSC

SEQ ID NO: 84374 - protein, 336 aa, unidentified
MRYVGMDVHWRQTTICILDEYGRRVKRLTVRGAWEKVLSELARIKGPWQVCFEASTGYGWLYERLKKMAEKVTVAHPGQLRLIFRSKRKNDRADAEKLAKLLYLDEVPTVYVPSASVRSWRGMIEHRQKLIRERVRVKNQLRALLRTHGVVAPKGLWTRRGKGWLRELDFGMEMDALRRDILLERLEAVGAMIRRVEKALARIAKDHPAMGLLRQIPGVGIRTAEAVVAYVDDPHRFGRVSAAGSYFGLVPCQDQSAGTNRLGHITRQGPATVRKLLTEAAWQAIRLSPRVRAYFDRIRQDNPERRKIAVVATAHYLLRVMVAMWRTGEVWRGDAA

SEQ ID NO: 84375 - protein, 340 aa, unidentified
MVYVGLDVSLNSVAVCVIDREGQILKEASVASEAPAISQCPQPWRDRIAKIGLEAGPMSEWLSAGLAELRFPAISLEARQVKAALSAMPVKTDRNDARGIAQVVRAGWYKVVHVKSIGSQHARTLVAARKHLIRSIAASEQTLRGLLRAFGLKVGIVSRAGFASRVRDLVGNNAILAEVMALLLAARDALMQEYQRLHRLIVQPVRNDPVCRLLMTMPGIGPVSALTFRATIDAPERFARSRSVGAYLGLTPRRYQSGEIDRTGRITKVGDGETRTALFEAANVILRPSTCWSPMKAWAVRIAQRQGSKRAKVALARKMAVVLHSMWRNGTEFRWTAAAA

SEQ ID NO: 84376 - protein, 345 aa, unidentified
MELQTIGIDLGKTVFHLFGLDQCGRVAVRKRFSRSQLLHFTSSLRVELIGMEACGGAHFLGRALQQQGHQVRLMPAQYVKPFVKTNKNDYIDAEAIAEAVARPAMRFVPIKTDDQLDMQSLHRVRERWVMRRTEVVNQIRGLPLERGIMLRKGRRHVDAALPEILEDATYKLSGALRMLIAQLKIELDQLAARIDEADSAMEQTAREDEACRRLAAIPGIGPVTATALIAAIGNGAAFRKGREFSAWVGMVPRQDSTGGKQRLLGISKRGNSYLRRLFVQGARSVMMRRTKQTSGLSLWFEKLAVHKHHNVAIVALANKLARMAWAVLAKNGPYRPSALENAQVV

SEQ ID NO: 84377 - protein, 405 aa, unidentified
MGGDAMSGLKGSFDGFVGIDVSKDKFDACGITRDETKLFQFSTTMDRKGFEKLKGHLATVSISSVLIGMESTASYHVNLFSYLVSEGYKVLLINPLLIANYVKMQLRKTKTDKKDAVVIAQFLLTNGDTLVQRATPSLISDLRDLARQRESLVDEMTGLKIEIKQLLNITFPELERMVGIFTKSILKLLQQYPSASALRDADLGQLSQMLIADSYGHKREAFAVGLIKAAHSSIGSKSPAKDMILKQKIALLFHLEDALQEITDMLIEMSRKLMEEDINIMTSIKGIGDKTAAHFLIEMGGDINQYECSGKIIAMAGLDPAVYQSGKHEGKGRITKRGNRHLRRIIWLMTTSVIQYTDTFHTYYRKRRKEGLPYKMAVLATAHKLIRVIYAMLTQRTMFCAQVNS

SEQ ID NO: 84378 - protein, 343 aa, unidentified
MKLSRVGVDLAKNVYQLHGVDRHGRMVWKRRLRRGQWLQALLDKTDPGCEIGMEACTGAHHWARELQSRGYTVRLIAPQFVKPYVKSNKNDANDAEAICEAMSRPHMRFVTVKSVEQQDIQATHRVRSEIKDQRNAKANQIRGLVAEYGLVAPTTLLALRRAIPCWLEDADNGLTDYFRSLLHGLWSDLVALDDRMSELDKQIKTLADSNEVTQRLQQLRGVGPLVATALVATVGTGEQYKKGRQMAAALGLTPRQCSSGDKQRLLGISKRGDVYLRTMLIHGARAVVSQAKHREDRLSQWVTSISKRSHPNVAAVALANKTARMAWAMLRNDANYDPDFAFG

SEQ ID NO: 84379 - protein, 343 aa, unidentified
MKIVSLDVHSESSQVAVIAETGQLIKEAKVPTRRDALRSFIGRVSGPKRVIFEEGPMSGKLKDWLSDCCDDLSSLDPTHNSLVALSETSNDRLDARRLGEQFLKGGARKVYIPDERHRALRSMLNHDYFLHQAIVAAKNRISGLTRRQGLGSGSSVYRPGGREKLLSALSSDGYRAQLSSLYRHLDRLSDERGAFQRAMRDWVKDVAIIKTLMTIPGVGPVAARTLYGWIVDASRFRTANQVAAYVGLGIGQGWTNWKPVKRGRASKRGNRQLKRVLFISAKAAVRTDTALGRRYRSRIAAGWECDKATRDIARTIAICSWKIMATGEEYDDSRIATHANSAQ

SEQ ID NO: 84380 - protein, 414 aa, unidentified
MNTTQEDQMYWVGIDWGEQKHTIAICDDQRSIVSSFKTETTLEGLNMLVTRLHEFVGVVGVAIETPRDPVVVRLLEEGYTVYPINPKLSHNWRKCTSVAGVKSDEYDAGMLALELSRRHESLTSIRPKEASAQEFLGLCDALRFLIDQRTSHLQRLRAVLRRYYPAALNFWEDITAPSAWAFIKQFSTPSVLAKTRKDTLIKFLRAHRIGLRPCWLERIDKSRQAAAWPASPTATGDELMALACVAQLQALEPRIKMLEKEIAEKGKGFEALNLIESLPGAGKSLAPAITAIVVNLEEGDDTGKQLRCMAGVAPVKDESGKRVKTVIRRRCNKRWRNIFHLFAWCSIRRSTWANAFYKLCRERGDTFATALRKLADKWIRIITCMIREKRPYDEKEYIESLRKGGSPIYERLCG

SEQ ID NO: 84381 - protein, 349 aa, unidentified
MAMTIVEAARSVTGGVDTHLDVHVAAALDSVGALLGTEAFPTTPAGYQALLSWLESHGEVAKVGVEGTGSYGAGLSKFLARAGISVVEVNRPNREERRRSGKSDPLDAIEAARSTLAGKAKSIAKSKDGAVEAIRALVVAKRSARVARTAALTQMRHLIVSAPDQLRSRMRGLNVRTLTAEAARLRPSRHGEPVLAATKAALSSLAHRVQGLDDELAELDGRIEALLEALCPDLLGLFGVGPDTAAALVVCAGDNPERLRSEPAWAHLCGVAPIKTGSGQTSGRVRFDPAGDRQANAALWRIVMVRIAHDPETTAYFLRKVKEGRSKPEIIRLLKRYVAREVYRYLPRR

SEQ ID NO: 84382 - protein, 348 aa, unidentified
MRFYTNQHKFYCGIDLHARTMYLCILTQEGKIVLHRDIKTDPDIFLKTIVPFREDIVVAVECIFTWYWLADLCSQENIPFVLGHALYMKAIHGGKAKNDKIDAYKIAALLRGGMMPMAYVYPSDMRSTRDLLRRRTHLARKRAELIAHIQNTNHQYNFTDMGRIARKCDRIKIGVADRFTDPSVQKSIELDIALIEHYDKLLNHLEHELSLIAKVHDADSYFRLRSIPGIGRILGLVILYEIHDINRFPSVQDFVSYCRLVKSAKESAGKIIGSSGKKIGNAHLKWAFSEAAVLFLRRNPEAVKYRAKLERKHGKAKSLTILAHKLARAVYNILKKKEVFNPTIFFAK

SEQ ID NO: 84383 - protein, 461 aa, unidentified
MAKKAKKVKTAKGAELRIVNPDAAGIDIADGIMQVCVPADRSKDNNRAFGAYTSDLHAISAWLRECGIKTVAMESTGGYWIPLFCRLQEDGMDVVLTNARDVKNITERKTDESDAEWLMLLHQYGLLKASFQPHNDAKRMRTLTRHRDTLSREASSIVLRMQKAMQQMNIKLTLVLSDITGKSGIRIIEAILAGERDPKKLADLADIQCKTPKEEIAKALEGNWEEDLLFVLRQNYDTFKHFCAQLDRCDTELEKLMENYRTEVAGTGRPSYSPTKKRCDYHKRKRNVGFDVERKAYDMWGVNVFEIPGISHLTALGLMSELGHDFTRKFPSSKQFCCWCNIAPNTKISGGKRISSHVPHRRNNVGLIFRSIASSLANAKNQLGNFYRRIRSRAGGKAAVIATAHKVAEIFFAMVANQTTYNPEKVGIDEKVLLEKRIARYKRELERITGMHIEIGNACVP

SEQ ID NO: 84384 - protein, 349 aa, unidentified
MTIVEDARVITGGVDTHAGLHVAAALDPLGGLLGVQEFPATAAGYARLLDWLGGFGTVALVGVEGTGSYGAGLARHLAAAGVPVVEVDRADRQDRHRQGKSDPLDAVSAARAAQSGRASGAPKGRDGAVEAIRALMVAKRSARHERTQAINQARALIVTGPDELRARFARHRPAALVEAIAALRPRPGDVPGYATRVALRELGRRAQFLDAQLDRLDELIGPLVAARAPGLLSLHGVGPDTAALLLIAAGDHPERLRSESSWAHLCGVAPIPASSGKVSRHRLNRGGDRQANHALWRIVITRLSSRPGHPATRAYAERRAKEGLSKKEIIRCLKRYVAREVYHQLRGGA

SEQ ID NO: 84385 - protein, 426 aa, unidentified
MWEAPVKVQRTSVGLDVHARSVVACGLDGDTGEVFQRRLCPDHQEVLEWIKGLPAPVAVTYEAGPTGFGLARFLLAAGIMCLVAAPSKLQRPAGDRVKTDARDAAHLARLLHLGQIVEVTVPSVAQEAARDLVRAREDCRGDLMGARHRLSKLLLRQGIVYHGGQAWTGKHELWLRAQRFDNPALTLAYEAALDAMVACVHRRDRLDEAITTMAVDSEFTPVVARLGCLRGISTLTAFGLAVEIGDWHRLTGRSIGAYLGLVPCEYTSGTTRVQGGVTKTGNGHARRLLVEAAWHHRAPYRPSRDLRRRWDAATPSARARAHAANHRLHTRWAGFDQRKKRAVVANAAIARELAGWCWSLAVMPDWADPHNRPDEQRRCRQASWSDPRLYYEQSRCTATDHARSLDQRPTPTRKFRPAVTNPRISD

SEQ ID NO: 84386 - protein, 324 aa, unidentified
MSDSILGIDVSKETLDAYCARGQRKQGRTFANSPDGWKLVRAWLKAMGSKQAHVCMEATGRHSLGVALALHEAGHVVSVVNPAQIRDFARTKLGRNKTDKVDAALICEYAELFKPEPWTPPPPAMRRLCELQTMRAGIIRSRAEWKNRIGSGLGDSTATKLAAATIDHFTSQLEAIDRAIGETIKQDAELRGRCDLLLSVIGVGETLAATLMAEMPEPGVLRRSGEMVAYAGLNPSHHRSGTSIDRPTRISKIGNATLRSSLYMPALSAMRFNPAVAILVARLKSAGRLKPKQIVVAAMRKLRVLCFGVLKTGKRFDLAIAMPA

SEQ ID NO: 84387 - protein, 410 aa, unidentified
MERLIERCCGLDVHKKTVTACVRVPGANGAREQHVRTFGTTTADLLSLRDWLEAFQGTRVAMESTGVYWKPVFYVLEETAICVLANAAQIAQVPGRKTDVKDCVWIAQLLEHGLIRESFVPPAPIRELRDLTRYRKAVIQERTREAHRLHKVLEDAGIKLASVASRVLGVSGRTMLDALVAGTTDPAVLADLARGRLRKKLPALRQALVGRFRGHHAFLVAQILAHLDYLDEAIEAVSTQIDTVIVPFADDLTRLDTIPGVNKRTAEVIIAELGVDMRVFPTAGHLASWAGLCPGNNESAGKHRSGRTRKGNRWLRGALIEAALSAGTHSATGALAARYRRVMRHRGHKKAVVAVAHAILTTAYHLLAQQTTYQDPGADYYDRRHAERVRRRAIHTLERQGFRVTLEPAA

SEQ ID NO: 84388 - protein, 344 aa, unidentified
MSTSYIGADVDCRMTELAVEQNGEIVIRDRVTTDIKSLSSFLDSISGKKIMAIEEGSMSGWLYRNLKSKVEKFIVCDPRRNKLIYCDGDKDDSIDAAALASLLRGEYLREVYHTDDEKRLALKEAVALYHDRMRESVRQVNKLRGCCRCHGIKIPAGVLKNTLDRKKWLKELKPASLAALVSILLTGYDAVAKQVKMSKKEISQRSKSYPIINYWKDIPGIGPIRAITLFAYLDTPWRFGSCKKLWKYCGVGLKRFASGSDKEGRPKPGKLRLYRAANRKLKDAVMGAALSATIQPDNPFKDYYTRMIYNGLTASNARHTIARKILSVMWGMWKTNCRYNENLL

SEQ ID NO: 84389 - protein, 282 aa, unidentified
MKKQAIHYLALDVHQATVVATARDEHGSIRMRATVPTEASAIVGLVRSLGRVHVAFEEGTQAQWMHDLLEPEAERVVVCNVRGRSETSNKSDRIDSDRLSEMLRIGAVKSVYHGARSVLTLKELVRCYTNLVDDTTRVMLRIKALFRGRAIPTPGTSVYRASNRAAWLAKIESRGARMRAASLLEQLDCLLELRPKAKAAMIAEGRRQPGWKVLGSIPFFGPVRVALVLAIMGTPWRFRTKRQLWPYIRLAVVTRSSADQELVGGKVRRRRRAPLTRGLNRT

SEQ ID NO: 84390 - protein, 374 aa, unidentified
MTKIIRIGIDTSKSVFVLHGVDTAEQPVLRKKLRRKQVLEFFAKLEPTKIGLEACGAAHYWGRELAALGHQVVLLPPQYVKPYVKRNKNDAADAEAICEAMSRPTMRFVPVKTAEQQAALMLAGTRDGLIRRRTQLTNTIRGYAAEFGLTAAKGLDKIEPLLARITAAELPGLAKELFAAYANEYAQLKVQIAKIEAKLVAWHKHNEPSRRLVEIPGIGPIGAALAVMKVPDPQAFRCGRDFSAWIGLTPKDHSTAGKTRLGVITRAGDEALRSVLVVGATAVIQQTQRRRGHPSPWLIALIKRKPPKLAAVALANKTARIAWKLMVSGERYDRAAASRAGRCAALAGGFAPRPALDAHSTPRGAATPAAVTAA

SEQ ID NO: 84391 - protein, 358 aa, unidentified
MAVPTIAQPEPVRVTVGVDTHKDAHVAVAKDHLGRHLGENTIPTTPRGYRDLLAWAESHGEVEAWGIEGTGSYGAGLSRFLRGADQTVIEINRPDRKARRLKGKSDPVDAEAAARAVLSGEATALPKSGDDRVEMIRALRSARSSAVKARTQAINALRALVVSAPSELREQLRGLSATQLVRTCARLRSGDITAPLAATKLALRSLAGRYEALEAEIKILDPDLVRLTAEAAPALVEIFGVGSEVAGALLVTAGDNPERLRSEAAFAHLCGVSPIQASSGKTVRHRLNRGGDRQANAALYRIVIVRLRYDTTTKEYAERRTKEGKSKPEIIRCLKRYVAREVFAVLSDVGKKNLAAAA

SEQ ID NO: 84392 - protein, 409 aa, unidentified
MERMLERVAGLDVHKQTVAVCIKVPGDNGERQQHVRTFGTITAEWFALRDWLAAHGVTHVAMESTGVYWKPVYYILEEMVTCVLVNPGHVKQVPGRKTDIKDCVWIAQLLEHGLLRGSFVPPLPIRELRDLTRGRKALIQDRTRAANRLHKMLEDSGIKLASVATDILGVSGRAMLEALVRGTTDPDVLTDLARGKLRKKLPALRQALAGRFRPHHAFVVGQLLAQIDYLEEAIEAFSAQVADAIAPFADVVQRLDTIPGVNQRTAETLVAEVGVDMSVFPTAGHLASWAAVCPGNNESAGKHRSGKTRKGNRWLRSALIEAALAATRASNTALSARYRRIMRHRGHKKAVTAVAHAILIIVYHLIAHGTTYRELGVDYHDRRAAERARRRAIQTLERQGYRVVLEAVA

SEQ ID NO: 84393 - protein, 346 aa, unidentified
MRFYNRQHRHYCGIDLHVKTMYVCILDSAGQVLVHRNVPSTREAFLEIVAPYRDDLVVAAECMFTWYWLADVCAAEGITFVLGHAWAMKAIHGGKAKNDKIDSHKIASLLRGGLLPQAYVYPAAMRSTRDLIRRRLHLVRKRGQLLAHIQNTRAQYNLPVFGRKLAYRTNRAGVVEHFSDPSVQKSIEVDLALIDQYDTLIVDLELTIVREAKRHNADAFHRLRSVPGIGKVLALTILYEIHDIARFDRVQEFASYARLVKCQHQSGGKTLGTGGAKMGNVHLKWAFSEAAVLFLRHTEGKQLIARIEKQHGKGKALSILAHKIGRAVFYILSRGTVFSMEKFRAA

SEQ ID NO: 84394 - protein, 365 aa, unidentified
MTSTNTTQPIRFQDCRREVVLGVDTHKDTHVAAVISTTGKLINSRSFPATADGYQQLLDWARSSGLVSRAGVECTGSYGAALSRFLRTNELTVIEVNQPDKATRRRRGKTDTIDAEAAAHAVLSGRATATAKLADGPVEALRLFKMAKDSAVKARTQAVNQLRAVLVTAGPELREPLDGLTIPKLVRACKSLHRSTAGTATAAAVFTLRLLARRVEELDDEITALKQQITDMTRQHVPPLLDCYGVGPDTAAALLIATGDNPERLHSEASFASLCGVSPVEASSGKTQRRRLNRGGDRQANSALYTIVLARLRWETRSRSYVERRVAEGKTRREAIRCLKRYVARELYTTIIRAHARPRDQVLAA

SEQ ID NO: 84395 - protein, 326 aa, unidentified
MASSVLGVDVAKQKIEVALLVTDKVKNKSFKNSPEGFEALALWLRKCGVERVQACLEATGNYREDLAIFLHEAGHTVSIINPARIKGFAQSELIRTKTDKMDAGIIARFCLAMKPEPWVPPSPEIRSLRALVRRADSLIDMLTQEKNRLGTAHESVLPLIQEHIDYLDKEIEKVRDQIADLIDQNPDLKRKKDLLASIPGIGQATIAVILAELNDLGKFKHVRELVAFIGLAPKETLSGSSIKGKPRLCKMGHVRFRKALYMPALVSIRYNTLMIAFYQRLKEKGKNGKVIVCAIMRKLVHVIFGVLKSGKKYDPNYKPVYKPVLA

SEQ ID NO: 84396 - protein, 352 aa, unidentified
MKISRVGVDLAKNVFQVHGVDSRGKVVWKRQLKRGNWISALAEKIDTDCEIGMEACGGAHHWARELQSRGYQVKLIPPQFVKPYVKGNKNDASDASAICEAMGREDMTYVAVKTVEQQDIQAVHRVRASVMGRRTASSNQIRGLVAEYGLVAPKDLGPLRRAIPDWLEDAENGLTSRFRSLLHGLWEELLRLDERLAALDREIEVIAETHADAKRLLKLRGVGPLVATALVARFGDGSHFKRGRQAAASVGLTPRHHGTGGKNRIYGLSKQGDRYLRSILIHGARAVVTQAKRRDDRLSLWVTDLEERSHMNVAAVALANKTVRMAWSMLREGTEYDSELAAGERYRGWVTA

SEQ ID NO: 84397 - protein, 349 aa, unidentified
MNVTHYIGFDVHKKHINFCSKTASGEIRNEGRLVAQRAVLRQWAGEQGEAWRGAMEATMFSAWIYDTLKPYAAQLDMAHPAMLKAISAAKKKTDRIDARMIADLLRCNLLPNCYVATPEIRELRRLLRYRNLVVQQSVRMQNKIAGLLMESGTPFNKEKLHGNKYFSNLLKELEEVPDSVKDLLRLSRGALEMFQATQKQLIQRLLAHPGLAQRVELLASIRGVGEITALTWALEIGDPLRFSSSAKVMSYCGLTTALKCSADKQQRGPISKQRNPWLQTALMEAAKLAPRWNPELAALHARELERGHRNRATLAVARKLAAYLLAVDKQQQPFQPRMPSPVAMAQTAG

SEQ ID NO: 84398 - protein, 320 aa, unidentified
MMPQSDLVVVGIDVAKDKVDACIRTLTERKTCPTTAPGQRSLIAWLRKHRVAKAVMEASGGYERVWAKALRQAGIEVRIVDPKRVRSFAESAGRLAKNDKIDAEMIAWFAETFNEAPSQVDDPAHEEMKALVKGRKSLIDVRARLEMQKEHEAPALVEKARARLLKKLAGEIAMIDTAIGAQIKSTPAFAKRAEIIRSVPGFAEATAMTLLAGLPELGQVSNEIAAALLGVAPYDDDSGKRHGQRCIKGGRRWVRNALYMPCVGAATLNNPVFKAFYERLIAKGKAPKVALVACMRKLIVILNTMIARGEKWDPKRYQVV

SEQ ID NO: 84399 - protein, 331 aa, unidentified
MAKIGKIIGMDISKTTFDVAYRSGDSVKTRKWEYTEGQMEEFSKTLDRECVVVMEATGVYHTRLASYLYTKGIGVSVVNPLSAKNFARMLMRRTKTDRADSKLLLEYGETMELEMWEPREQWCVEVQQAYAMLESKNRELTATRNRMEALTHSECASKLCMEMCESDIERLSKDIRALEKEIERLADDNNSKGMEVLESIPGIGRRTACLLLALTGSMRKFDNHRQVSSYFGMCPRVYESGTSVKGKAKICKMGLESIRKMLYLCALSAKTYNKACRELYERLLEKGKPKKLALIAVANKLVKQAFAILKSGRPFDENHVSEKNVQKSLAY

SEQ ID NO: 84400 - protein, 412 aa, unidentified
MQVVYARCAGLDVHQKTVSAYASVCEPNGKKRRQIRVFGSFTGDLLVLAGWLREQGVTHVAMEATGVYWRPVWAVLEGQFEQLLANPRHMKAVPGRKTDAKDCEWIADLLQHGLLKGSFVPPTPIQDLRDLTRYRVELRQSQSRVANRIQKLLEQANLKLGSVASNALGVSGRQMLEAIVAGQDTPEQLAQLARGKLNNKIPQLVQALQGRVRDHPRFLLAEFIEEWDWFEQRIVRLEAEIDKQINPFEQALALWQTMPGVDRVTACSLVAQIGVNMNQFPTAQQLASWAAICPGNHESAGKRKSGKTRDGNKWVRRTLCQAAWAVSRKKNCYLSSQFKRIATRRGPKRALMAVAHTMLVIGYPMLKTGQGYRELGGNYLEQINQDQLQRHFVKRLEKLGFKVTVEPSLEAA

SEQ ID NO: 84401 - protein, 429 aa, unidentified
MNSTQNKKIEQVKETTMIVGIDVGSEKHYFRAFNWRGIELTRKPVPFSNSMEGFNSFYNTIVELMKKSELEEALVGIEPTGHYWFDLGQFMGEKNIKFVMVNPHHVHKTKELDDNSPSKNDRKDPRVIAGLVKDGRYFYSYMPTGVYAELRNASNRRFVLVEEVTRVKNRLQKWIAVYFPEYKGIYTHIDAKGGLLVLKQAPTPEEIVKLGVEGIIKIWKDAKLRGNGHKKAMQILNAAMRSIGLKIGLREARMEIQDLIEDYELQTKRLERINDLIKELCQQIKYANKLLEIKGIGITTVGGFIAEVGDITRFDNTKELQKLAGLELVADSSGKHNGKTKISKRGRKRLRYLLFEAAISVVGKNEEFKEIHRYYITREKNPLKKMQSLIAVACKLIRVFHVILTKGVSYDASKMLEDIRHPGVQLKAA

SEQ ID NO: 84402 - protein, 382 aa, unidentified
MRRQSRIREEPVVQSESITWVGMDAHKNSIRVAALLPGRSEAEEWQEQTTPEAIRRLGRKLLRLAPGAVSCCYEAGPTGYALQRQLTAAGVTCAVIAPSLTPVRLGVRIKTDRRDARKLAELLRAGLLTEVHPPSESDEALRDLCRCRDDVRVDLMRARHRLGKFLLRRHCIYRETKRHWGTRHWAWLEQLRFDDPMSQATFDSYMLAVQQLEERLRQLDAQLEEYGGREPYREPVSWLRCFKGIDTVTAVCLVAELHDFRRFRTARELMSYVGLVPSERSSGESERRGGITKTGNRHVRRLLVEAAWHHRYRPALSAPLRRRREGQPARVLAIADRAQERLAARYRRMTGRGVAPPKTIVAMARELTGYLWAALQPAPEAR

SEQ ID NO: 84403 - protein, 347 aa, unidentified
MDQISRIGMDTSKHFFQLHGVNAAEMPVLRKKLRRKDVVAFFEKLSPTVIALEACGASHHWARLLQSLGHTVKLIPPQLVKPYVKRGKNDAADAEALCEAMSRPTMRFVPVKTAEQQAALMLVGVRDRLIRNRTQLANAIRGYAGEFGLTAAKGMAHLGPLLDRIQADVTLPSLARDLFAAQAEELTALQARIDAVDAKLMVWHRADECSQRLAKIPSVGPIGAMLLRMKTPQPELFQSGRQFAAWIGLTPKDHSTAGKVRLGVITRAGDEALRSVLVVGATAVIQHAQRSGKASPWLSALLKRKSPKLAAIALANKTARIAWKMMITGETYKAIAAPAAFSHRGTA

SEQ ID NO: 84404 - protein, 329 aa, unidentified
MKNTTIAVDLAKSVFEIGISYRPGHVDQHHRLSRNQLSNFFAGQAPATVIMEACSSSHHWARQFVRFGHDVKLLPPFYVRPYVQRSKTDRTDVKGMLEAWRNSDIRPVPIKTEAQQQLIALHRVRSTWIATRTARINTSRGILREFGIVVANGASRVPARVTELIEDANTELPMGVRDVLNELVMEIRQLRSRIENVERQLAALADETPVVERLCSIPGVGLLTATALIAFVGNVERFPSSRHFSCYLGLTPREHSSGLRRQLGQISKRGDVYIRMLLTHGARSVLWAAKSKSKPDKFSTWALDVHRRRGHNKASIAVANKMARIVWAV

SEQ ID NO: 84405 - protein, 338 aa, unidentified
MYITTIGLDLAKNVFQVHGVTEDGTIAFNRPLRRNRIVPFFESLPPCLVGMEACASSHYWARELTKLGHDVRLMAPSYVKPYVKRGKSDAADAAAICEAVTRPTMRTVPIKSEDQQALLSQHRARELLIRQRTQLSNSIRGLIGEFGHVLRKGLKYVRDFVENMKVEKGPNLPDIARNVITSLCEQLASLDHRIDLLDREIFVASGRDERAKLLQTIPGVGPVTAAAIIATVGDAGAFRSGRDFAAWIGLTPMNKSSGGKERLGRITRMGDQYLRKLLVIGMTSRVRSARSHPDRVDPWLAGLLDRKPVRLATVAMANKTARIIWAVLTRGTPYQRAA

SEQ ID NO: 84406 - protein, 496 aa, unidentified
MARRVYQAVCVKKVLFQKAWESLAEGAVWVGADIGKEEILTVLRDTRGKFLRPWKTRQPGELRELVAALVEIARHRPMVVAMESTGTYGDALRQALSDAGLSVHRVSGKAVKDYAEIFDGVPSNHDGKDAAIIAELTALGKSRPWPYRARSAWEGELASWVQWLDTHQQIQQMWLGRLEGMLARHWPEATRIVKLSSATLHRTLAEYGDPRKLAEDAEATSLLKRWGGRFLSEAKRTALEESARTTVGVRMTAEDQKRMQCYGEEIRQTRREIRQAQRALKKLAEKDETLARQAAVIGAPTACVIRVGVGCVRQYASGEAYRKAMGLNLKERSSGKYKGKLKLTKRGPSLPRRWLYFAAMRILQKPPVRGWYEAKRARDGDRGLKAVIGVMRKLALALYAVGARGEPFALERLFPGQPRRKIKAASQRFSPGALPPDPRDLSPGCQSRRRKTENGATRVAPSPVLAPGSALGSVPTGALPSVRVKRRLAQKNEGGL

SEQ ID NO: 84407 - protein, 463 aa, unidentified
MKQATGKGKKRKRRTSKQGFRVIQPNVAGIDLGSCEHYVCCPPGPDGEPNVQHFGTTTPELYTLADWLEEQEVESVAMESTGVYWVPIYEILEKRGFEVLLVNARMLSRVPGRKTDMIDCQWIQMLHSCGLLTGSFRPGDDICVLRSLVREKNTMESQRSDWIRRIQKSLDQMNVCVHHAVSDITGVTGMAIIRAIVHGERDPRKLAKLRDKRCRKSEEQIIGELTGNWRTEHLFTLKQALQMYDHICEIITEYETEISRVLTSLQPPEYRSLEVPEVTNKTKRYNVRARGQEPMREALFRLIGYDLTSITGIGVDTAEIILSELGTDLSCFPSEKHFVSYLKLSPKLDISGGKPIPGKRKGSTTTRVGAALRTAAVTLTHSHSALGAEFRRISRRKGASVAVFAIARKLAIIIFRLLRYGQQYVDEGMQAYEERFKAARIRTCKQIAEQFGLIVIVPDQEAA

SEQ ID NO: 84408 - protein, 388 aa, unidentified
MEPASIHPTAVRTDLGAIFVSLELSRSTWLITSLSPGSGEKMSKHVVAGGNVAELLDRFEQLQQKARLRTGKLFPVVTIQEAGLDGFWIHRVLEAHGIESYVVDAASIATSRRRRRAKTDKIDGEALTRTLLAFKRGEPRVCAMVRAPDPKDEDRRRICRERKVLIAERVRHVNRVKGLLFAQGVSGYQPLRRDRRQRLEELQTGDGRELPKHLKAQINRELDRLELLLEQIAAVESERNSLLSTYEQPAVEATSPAAMLLSLKGVGAEFAAVLWTEALSRHFDNRRQIAAYAGLTPTPWMSGTVDHEQGVSKAGNPRLRTTMIQLSWLWLRNQPASALSRWFVDRVQLNGGRLKKAAIVALARKLLIALWKFVTAGVVIEGAVMKTA

SEQ ID NO: 84409 - protein, 349 aa, unidentified
MGEVITIGVDIAKLVFQIHGVDADGTVVIRKRVGRARVLEFFADLPPCRVGLEACATAHQWARELAKLGHDTRLMPPTYVKAYVKRGKNDAADAAAICEAVTRPSMRFVPIKSVEQQSTLMLHRARDLLIRQRTQLTNALRAHLAELGLVAAKGREGLHQQATVVTECGNERLPSDARFACQAILTQLHSVQIEISGLDKRISQTHRANADSKRLATIPGFGVILSTAVAATMADPKAFRTGRDFAAWIGLVPRQNSTGGKERLGSISKQGDRYLRRLLVVGAISVINSARARPYKYPWVIELLGRRPTKVVAVALANKMARIAWAVLAKGETYRAPTRSSSAVVAAAA

SEQ ID NO: 84410 - protein, 354 aa, unidentified
MMIIGCDYHPGFQQIAFVDTETGELQERRLQHREEAETFYRDLGAQGVKVRVGMEASGQARWFERLLTELKFDLWIGDAAEIRTKRVRKQKTDRQDAQLILRLMLEDRFPQIWIASWENRDLRQLLWHRHRMVQARTRIMNQLQAVALNEGLRCKKRLWRDKGREQLESFRLARWASRRRRDLLALLDRLTPTIAELTQAVEQEAEQCPEARRLRTHPGVGALTALAFVLIIGRADRFQCGKQIASYLGLVPLEESSGQRRRLGHITKQGNSLLRFLLVEAAQVTVRSDQEWRNRYFHLALRRGRKIAKVAMARRLAVRLYWMWRKGWDYEQLKKFGSHAGQPGHRDGVQLNTE

SEQ ID NO: 84411 - protein, 423 aa, unidentified
MMKLKYSICCGLDVHKNVIVATIVITNNDGISEYKQKSFSTINSDIQRFHNWLIENNCFHVCMESTGKYWIPIFNYLENDIDVCLTHPKYVKAIKGKKTDKKDSKWIADLYKFDLVRCSFIPPKDFRQLRELARYRFKLVCMKSSEKNRIQNCMTVSNVGIASVLSDPFGRTATEIMSYLLEHTADSMDEKAVRKLIKKGARAKSDAIIEAIRGYNIEADQAKKLELARGHLEYLDDMITQTEVELYVRIKPYYEFVEFVSTMPGMTELSSTIVLAETGVDMNIFDDAKHLCSWCGLAPANNESAGKKKSVRISKAGDYLKPMMVQCALAAVKNKKQPYFAIKYGRIKKRRGHKKAVIAIARMMMVCIYHMVSEKKPFSPTDYEELMDPRNHVERVVLNEDNVFAYLESLGYDSSKLVKRNDN

SEQ ID NO: 84412 - protein, 419 aa, unidentified
MRSITRCYEGRRGSIRVPPVVFASVFEAEGKEEAMALTTATQTSPYPDSPCLYMALELSAAKWGLALSAGGQRIREKSIRAGACEQLLEEISAAKKRFGLPEDAKVISCYEAGRDGFWIDRVLGRLGIENVIIDAASMKVDRRARRAKTDKIDAKRLLADLIRHVRGEKDVWKVVRVPSEEQEDKRRLHRELERLKKEKTQHRVRILSLLATQGVRPGNLKAFLVELDAARIWDGKPLPPALKAEIEREWSRLRLVEEEIRSITKEQREQLKQPGSPELKMIKMLTRLRGIGVDSAWILVMEFFAWREFNNRREVGGAAGLGGTPYSSGSIEREQGISKAGNPRVRTRAVELAWLWIRFQPHSELSQWFMRRFAGGGSRMRRKGIVAVARKLLIALWHLVEHGTVPRGAVIDLTESCPG

SEQ ID NO: 84413 - protein, 422 aa, unidentified
MLGVGVDWAESFHDVALGQPGKGVVAEFRIEHGPAGVARLIARCLELEPDPAEVRVVLETRHGLLVEALTDAGFSVLPVNPDLVARRRGPARKKDDAADARICCMLALDQYAELRKLIPHGQTGAELRAIARDDERAARDERRIGNRLRADLLAVFPAAIDIAGGDLGAPVFLRLLEHWPSAEALASASGGELEAFARSARHGWPGQFAGKVTAAMAEPRLPARPELARAKAGAIRLAAAQLLLLRAQRKTWERRMGELLLGAPRYGRAKTPKDPDPGKAFPGGEIYLSMPGLGDRLAARVAGEIGEHPEQFTTPNALQCYAGRAPVTRRSGRSEFTIARRLAYNRHLGEAVQQWAFCSLSRSAWAREFYDAKITAGKTHHAALRTLGNRWLEVLWHCLRLEIPYDEAIHTANRNHALKHAA

SEQ ID NO: 84414 - protein, 348 aa, unidentified
MRIIGCDLHASQQSIAMLDQETGETAEITLKHEGDTVRDFYAALPRPVVVGIEATGSMGWFLMLMEELEITCHVGHPATIRAAEPRRQKHDRRDAALLRDLLVEDRFPSIWQPSTELRDLRALLLHRHEWVRMRTRVRNALQSVALAHGIRRHAGLWSRNGQAMLSSLPLLPHAADRRSALQALHAELTQHIKDLDQRVSTRAHERPQACRLMTHPGVGPVTALATEVFVGDPSRFRHAKAVASYVGMIPSEYSSGPRQRLGTITKQGNRFLRFLWCEAGLQAARHETGLRRFYRRKLQQKGVGKARVAVGRKLGIRLWILLRDQIDYAEFCRRAPCHSAVKPVCGNA

SEQ ID NO: 84415 - protein, 386 aa, unidentified
MAHSTNIPQHSIDYDQTLILAIELSNKSWVLAAQVPGLSQTKAKRTIEPDKNHLLAAIEGYRIRAATAGRSVKRVITSYEAGWCGFWLARWLMAHGIEVHIVQPSSVPVDRRMRRGKSDGIDAELLLRTLLAWLRGEPRVCSMVPIPNEADEDARRCVRERSELVSERVGLVNRIGAVLATLGADDYNPLLQSRRRRLTELRTGLGDPIPPNALAKIARLLTRLELVLAQIAELELERDAVARTDAPDQAAKMIQQLVSLRGIGVQSATVLVREAFVRRFANDKALGSYAGLTSTPYSSGSIDREQGIGKAGNRRLRTVMVELAWLWQRYQPGTSQVVWFRKRVGSTGRRVRKVMVVALARKLLIALWRFVIDGVIPEGAITKPSI

SEQ ID NO: 84416 - protein, 472 aa, unidentified
MGYRSTSKRNKGRREESKRYTVGELETMPLLYPDLAGIDIGSREHYVSVPGNRSERPVRTFCCTTPDLLEMVNWLKVCGITDVVMESTGVYWVPVATVLEEAGFEVALVDARESHRLSARKTDVHDCQWIRQLYACGLLRNAFRPRSQILLLRSYWRQRHELVSMCATSLHHMQKALELMNVQLHKAISDISGVTGMRILRAIVAGQRDPEGFARMAHPNCKSSSTEFVHALTGHYAAEQVFALAQALRRYDLYQEQIAELDGELRRCLGDLPSGENWEPEAPTAGPKTLDGKRRKNQSHFDLAGEVHRIAGVDLTRIEGIDALTAFTVITEQGIDMSAFPTEKHFASHLGLCPNNQITGGRVRKKRTRRVHSRAAHALRIAAQSLARSKTALGAFYRRMRARHGAAKANVATAHKLAKIFYRMLKHGEQYVARGLEDYEKRYRERLLKNLKRQAKILGCEVLVLQTGEVLS

SEQ ID NO: 84417 - protein, 430 aa, unidentified
MKQFELLHSLFVGIDVSMKENVVHAMPFSPEDHPGHAQLRFSAPNTPAGSAEIIEKVGDFLKFYPDVTQVVIALEATSVYSFHLATFLSVAQFNGHIPAIVYSVNPKEIHAYKKTFTDVGKDDYVDAMVIADYARSNKIRSRPWKGPELLGLRILTRLRFHIARLIGILKNSTGNSIYLECSGFMTGENPFCNVWTATCQQLLTTFQGPDEILNLSDEELLNFITEKGHGRFSHPLDVVKKVKKAARNSYRLDKRVYEPLTSGLSVSFFIIHSLEAAIKKLDKSIETIAKSFSSDSYQILLSIDGVGPVIAGGLLAEIGDIKRFETDDDLAKYMGLTWRGKQSGQSESPVKHMSKAGDVYLRYYVLLATGQIINYSAKYREAYERIRSRKTLFPYRAALNLVARKIVRLIFTLLDRHQLYSDNKVMVTLE

SEQ ID NO: 84418 - protein, 357 aa, unidentified
MAVMIGTGPHQGSHTAVAVGAAEEPLGKLRVRACPDQAGKLVAWAQAWPERTWAVEGARGLGRLLAQQLAAAGERVLDGQPKLAARVRLLEVGDTNKTDPNDARSVAVAALRSKSRQEVTADGHAVVLKVRAKRHRDLSRTRNQVVCRLHPVLCELIPGGVPDEITAGQAARILEQVAPAGAVAQARCDLAAELWPASATWTPSGAEVKKKLAAAVTASGTSLTEVSGAGPVIAATVIGDVITVARFPSRDHFAACNGTAPVEVSSGQRKIYRLSLRGNRRLNHAVHMAAITQIRHKHSDGRAHYQRKLAEGKTHKEALRCLKRRISDAIYARLRADARAAGPGGQPGNDTGSSVTG

SEQ ID NO: 84419 - protein, 271 aa, unidentified
MQTMTTIGLDIAKSVFQVHGVDAGGQVIVRRQLKRRYVLTFFQKLSPCLVGIEACGSAHHWSRELQALGHTVRLMPPAYVKPYVKRQKNDATDAEAICEAVTRANMRFVPTKTAEQQSGLVLHRARHLFVRQQTSVINAIRAHLAEFGIVAPVGRHGVEELLNVVTDPNDKRVPDIARACLSALGDQLQSIKQQILEFDRLIRAWHRSNEMSMRLEAAPGVGPVLATALVAAVADPKSFRSGRNFSAWIGMVPKQHSSGGKNRPRQYKQAR

SEQ ID NO: 84420 - protein, 361 aa, unidentified
MCPPTLGLEVSQRMLADQLDYVIGVDPHRDSHALAVVHVLSGAIVFEANVAANSEGYAHALELVDQHAVGRRAFAVEGAGSFGAGLTRFLTGRDERVLEVGRLRRERRSGGKTDALDAVRAARSVLAQQKPATPRAGGERQALQALVAAREGAVNAKRAGLCQLRDLLITTPEPLRSELRPLTRARLLHQLAAIRPDGRRDPELRGSMLALRSIARRVLTLTAEERGLAGEIETITRKLAPQLLDQPGVGPHAAAQLVLSWSHRGRIGSEAAFARLAGAAPIPASSGQTVRYRLDRSGDRKLNRALHMILVTRKRSHPATIAYIERRVQEGKTRREANRCLKRYLARSLYRLLEHGPLPAT

SEQ ID NO: 84421 - protein, 388 aa, unidentified
MIYVGIDIAKLNHFAAAISSDGEILIEPFKFSNNYDGFYLLLSHLAPLDQNSIIIGLESTAHYGDNLVRFLISKGFKVCVLNPIQTSFMRKNNVRKTKTDKVDTFVIAKTLMMQDSLRFMALEDLDYIELKELGRFRQKLVKQRTRLKIQLTSYVDQAFPELQYFFKSGLHQNSVYAVLKEAPTPNAIASMHLTHLAHTLEVASHGHFGKDKARELRVLAQKSVGVNDSSLSIQITHTIEQIELLDSQLFSTELEMANLVTCLHSVIMTIPGIGVVNGGMILGEIGDIHRFSNPNKLLAFAGLDPSVYQSGNFQAHRTRMSKRGSKVLRYALMNAAHNVVKNNATFKAYYDAKRAEGRTHYNALGHCAGKLVRVIWKMLTDEVEFNLE

SEQ ID NO: 84422 - protein, 387 aa, unidentified
MSPTIAARRPAAVDYERTLILSIEVSNQSWVLAAQVPGLPHTKAKRTVDPEAEALMAAIAGYRSRAAAMGRSIERVIAVYEAGWSGFWLARWLTRHKVEVYVIQPSSVPVDRRMRRAKSDGIDAELLLRTLLAWLRGEPRVCSMVPVPDEADEDARRCIRERTELISERVGLTNRIGAVLATLGVTDYNPLLRNRRYRLAELRTGLGEPLPPNAHAKIARLLARLELVLAQIAELERERDAVVETETPDHASKMIQQLISLRGIGVQSATVLVREAFVRRFANGKALGSYAGLTSSPYSSGGIDREQGIGKGGNRRLRTVMVELAWLWTRYQPAAAQVCWFRERVGSTGRRVRKIMVVALARKLLIALWRFVIDGVVPEGAVLKPAA

SEQ ID NO: 84423 - protein, 482 aa, unidentified
MKKKNIYTNQSQELLTLFEEAGNGAKVMCVPIDYAKKDHVAMLCNGNGHILRKPFSVKNSPEGIEYLTEQITRSCKHRQIDLKHVFFGGEDVGSYAENFVNTLRSGGWLVAGVNAHDAKEQRTNMQASTDRLDLMGIASMLLNRRGNCSPAQSGIYRNLRTCVRHRKKLVAMSTEVKNRMHTVVDRLFPGFLDEKKSGVLSFSESSLYLMEDRFSPHQIRRRKRQKLIEILKRYGTAKPESTAAKLQKYAAHVLNTPNEYITTLQLSLAQHIKHLRCLQDSINQLEHEVAVWLAQTQGAFLTTFRGIGIVLAAGVSAEIGNPHEQAPLNNLVSYSGIIPRVKQTGGAEGKTYTGKVAKRCNHILKDYVVQSGNHMGLHGPEELMADYKRREAAGQHADFGISRRYLRTAMCLMKTSQIYMPEQLRNTKVKPEARAGYYLTIWPYLRKKWKKAGALDAAFEKDRPLGQWRCMVQELYEIKLKL

SEQ ID NO: 84424 - protein, 349 aa, unidentified
MLADELDYVVGVDTHRDEHVLAVLAAPVGAVIARYAIGANPRGYREALRFVEQYTGGTRAWAVEGAGHYGAGLTRFLVGHGETVLEISRPPRAERRLRGKDDSLDAVSTARAALASETLALPRAGQRREALRLLLIARRSAVDVRREALVQLRSVIVTAPDRLREELRGLPAGRLLERCRRLRRTRTMSADELATRLVLRSLARRVLAATAEADELEAEILADVRALAPQLLDEPGVGPIVAAQLIVAWSHRGRLRSEAAFARLAGVAPLPASSGQTTRHRLSRGGDRQLNRALHTIVLHRRQHDPATKAYVARRVSEGKSRRDATRLLKRYLARHLYRVLDGQELQMT

SEQ ID NO: 84425 - protein, 417 aa, unidentified
MDVIVQRPAALDVHNASVMACVRVPGEQGQRAQEVLEFSTTVGGLLTLRDWLQAHGVTQVAMEATGCYWKPVWAILEDDFECLLVNARHVKAVPGRKTDVKDAEWLCQLLEAGLLKASLVPPPPIRTLRNLTRYRKSQIRDRQREANRLHKVIQETGIKLDTVASDLLGRSGRDMLDALVSGTTDPLVLAELARGKLRKKIPALQEALQGRFGAEHQLVVGRILAHIDFLDESIAGLSAEIEAQLGPLGNKQVELLSTIPGVARRAAEVIIAETGGDMTRFPTAKHLVSWAGVCPGNDQSAGKRRSGTTTKGSKWLRATLTESAKAASRTKDTYLSAQYARLRVRRGANKATVAVANSILTSVWHMLTTGETYVDLGGDYYARRNPERATNRLIAQLEKLGHSVTLQPATTTTAVAV

SEQ ID NO: 84426 - protein, 331 aa, unidentified
MQKKEIFIGVDVSKQTLDVSVHGTRNHIRIANSSGGFKQLMSWLKSLNIALCDCWFVMEYTGGYEYRLVQFCRSKQITFTRVPGLQIKKSLGMQRGKNDKIDSRRIAEYGYEKRDKLKEKKSCNTAIVRLKQLLTQRRAFVKDKKAHEHRMKELLAMEEFKAGDPLIKYYKQAVDFALKMIDKVETEIRKIISKDEAMSRNFHLITSIPGIGEVNGWMTIAYTENFECFPDGRTYGAYIGVVPYEHSSGTSIRGRSRVSLMANKPLKADLSMAAKASVQHDPEMKAYYERRIEAGKKHMSIMNEVKFKLVLRMFAVVNKGEVYVKNLKSAA

SEQ ID NO: 84427 - protein, 352 aa, unidentified
MSNATRWVGIDLHRKRSHVAVIDDQGELTVSRRIVNDRDTFLELLGDPHDADTHVALEATYGWEWLAELLEEAGYDLHLAHPLRTRAIAAARVKTDAIDAKTLAHLLRTGFLPEAYIAPRELRDLRELLRHRATLTRMRSAVKNRVHAILAKHGIANEHSDLFGKGGREFLERLALRDAPRRRLDSLLSLICDFDREIEATTREIEELAKADDRVDVLTQIRGVGRYTAMLIIAEIGDITRFPTARHVCSWAGLAPSVRSSDGKARLGHITRQGSPALRWALVEAAQKITTGSGPLRDKFERIAKRRGRKIAKVAVAREILTLSYYGLRDGEIRCLARRSRASAKEKLADAA

SEQ ID NO: 84428 - protein, 418 aa, unidentified
MIIPFRFPYQATVGLDWADQKHDVFVRFANGDSYRRTIDSRPEAIQEWLLELRSTCGEGKIAIALEQRCGALFFQLCTHLSWIDLYPINPHSLASFRKTFFSSRAKDDPVDSQLLEELLRTHPERLRSYQSEPTAERKLDQYCRHRRSLLNLATKTELKLISTLKQYFPLAVHLFGEVGLKSDIALNFLSRWPTLDELRKAKAQTLRCFFYAHNSRSQSLIEERIQLIAQAHSVTNDLALIEPLALTTKCLVAQLRQFNKAINEFDHKIKELFKSHPDHFLFESLPGAGEQLAPRLLSLFGSDRSRWADATDIQKYSGIAPVVERSGKSLWVHRRLARPIFICQTFHEFAQQSTKRSSWADQFYRRQREKGKSHHSAIRSLAFKWIRIIFACWKTDKPYDESFYVDAIAKRNSASSST

SEQ ID NO: 84429 - protein, 512 aa, unidentified
MAKPKTKVPNPIDAYVGSRLRMRRMMLRMSQEKLGEAFGLTFQQVQKYEKGVNRMGASRLQQAAQILGVSVPFFFEGAQGGHIEGGDTLSPAYIDDFVSRSHGEVDSDRHSDRVRLLPPTLETTMQTIADRSEATIAIRTNLGAIFVSLELSRSTWLITSLSPDGGEKMSKYLVRGGDVAGLLERFAQLREKTRAKTGKVFPFVVIQEAGLDGFWIDRALQNEGIESHVVDPASIATSRRRRRAKTDKIDGDALVRALLAYKRGEPRVCAMVKAPTPEEEDRRRLCRERKVLIAERVRHVNRVKGLLFSQGISGYEPLRRDRRERLDTLQTGDGRLLPDHLKAQVCRELDRLELLLEQIKAVEAERDVLLAAQQVAAPAPAAMLLDIKGIGPEFAAILWSEGLFRHFDNRRQVASYAGLAPTPWQSGSVDREQGVSKTGNPRLRTTLIQLAWLWLRHQPQSALTLWFEERVRRNGGRLKKTTIVALARKLLVALWKYVTAGIVIEGAVMKRT

SEQ ID NO: 84430 - protein, 330 aa, unidentified
MRKVTEAGIDVSKDVLDVAVRRDERRLETARFANDATGHRKLIGWLTKGGRTVRVVLESTGTYSLDVALALHRARGVSVMVANPRAIKQFTGALMQRSKTDLTAAVALRDFVIRMPFVAWAPPAAPVLELRGIARRIAALVVERTRERNRLHALHATTETSRIVCNDIEVNVRHLERRIELLSAQAIELIGQRPKLQTAFDLLVSVPGIATHSAIQLLPELLVLPETMTVRQWVAHAGLDPRAHQSGTSVDKPARISKVGNAHIRRALYMPALVAVQHDAHVRAFFEKLVARGKTPLQAYVAVMRKLLHAIYGMLTTRTTFVAAKFHAAA

SEQ ID NO: 84431 - protein, 348 aa, unidentified
MASPIVETRSITGGVDTHADVHVAAALDPIGGLLGVREFPASPAGYARLLGWMGGFGTVCLVGIEGTGSYGAGLARHVTTAGVRVVEVDRSDRQDRRRQGKSDPLDAVSAARAAQSGRARGAPKGRDGTVEAIRALMVARRSAAGERTQTINRARALIVTGPDDLRARFARPSVAALVTELASLRPRPGSTVGYATRIALRELGRRAEFLDAQLERLDELIVPLVTAHAPGLLALYGVGPHTAALLLIAAGDHPERLRSEAAWAHMCAAAPIPASSGKTVRHRLNPGGNRQANHALWRIVFTRMGSHPATRAYVERRTAEGKSKAEIIRCLKRYVAREVYPHLRAAAG

SEQ ID NO: 84432 - protein, 337 aa, unidentified
MKTSENMFETFVGIDVSKLTLDVTILRPHNRKFRHRVFDNSDEGYSRLKEWLCNDHGIEFQRTLFCLEHTGLYTRSIDRFLIENRGYVWKESSLHIKKSLGLTRGKNDKIDSRRIAEYAYRFSDKADVNGLYPSGIQVLRDLLTTRERLIKSLKSIMVSVNELKRVDIRQAVTLETYQMAAIRGLKESIREVETAMFEAVFNERQLRTYCEMATSIPGVGKILFIKLIVYTQVFTRFKSVRQLACYCGVAPFEHRSGTSINGKTGVSKFANMDLKSTLHLATLSAIQHNPDLKAYYQRKVAEGKSKMCVVNAVRNKLLSRIIAVINRQTPYVVLTKA

SEQ ID NO: 84433 - protein, 418 aa, unidentified
MTDQITIPQKRFIGLDVHKHYLIALGVDAELNVVLPAQRVELFRLEAWMKKTLTKQDAVALEMTTNTWEIYDELSPCAHSVTVVHPPHVALITRSQVMNDKMAASILARLLAKGLLVSIWVPPVEVRELRALVAQRSKMTRLATQAKNRLHAILQRHHIVPPEGNLFHADQTEWWCALPVGKLEKINLQSDLDTLRFAETQLTRLASTMNQLAVKDERVTRLIHLPGFGAVVALTVLAAIGEIARFEDAKHLVGYAGLGARIHDSGLTTRTGRITKAGRRDLRAALVEAAQVAANSHPHWKAELARLEPRLGRNKAIIAIARKLLVAVWFVLSKQTTDRFAQPEMVARKLMQFAYKVGKHNRPVNQSAAQFIRQQMDALQIGADLSAIPWGTKNRSIPLPPSALLENKMSDVPNTQPC

SEQ ID NO: 84434 - protein, 407 aa, unidentified
MVFVGIDWAEQHHDVCVMSVDGQPLGRARVAEGVDGVARLHALVADHADDPAEVVVGIETDRGLLVTSLVATGYQVYAVNPRAVDRYRDRHAVSGAKSDGGDAKVLADLVRTDRHNHRQVAGDSVLVEAVKVTARAHQSLVWTRQRQVNQLRSALREYYPGALATFGTDLAHPDALAVLATAPTPELGRRLSSARIASALRRAGRVRNIDARAAAIRDGLRVPQLAAPTVVADAYGATAKALTNVIAALTVQIAELESALADRFEQHPDADILRSLPGLAVILGARVLGELGDDPNRYADAKARRNYAGSSPITKQSGSRKIALARYVRNRRLADAITWWAFSSLQSSPGARAFYDRRRAAGDTHHKALRALSNRWVGILHGCLRHHTLYDEATAWGHLTESHAAAA

SEQ ID NO: 84435 - protein, 351 aa, unidentified
MIIVGVGYHPSVQQVAFLDTETGETGERRLNQSDGEAERFYRDLQRRQVKVRVGIEATGHARWFERLLAELKFELWIGDPARIKAVRVRKQKTDRQDAQLLLRLLVEGRFPQIWVPSPENRDLRQLIWHRHRLVQMRTRAMNQIQAAAMNEGVRRKKTLWSKTGRRQLEALPLAPWATRRRQDLLELVDRLNTTIDELTAAAEQEARKRPEVLRLMTHPGVGPITALAFVLVLGSPDRFGCGHQIGSYLGLIPCEDSSADRQRLGHITKQGSSLLRFLLAEAAQAAVRWDPDWRRRFVHLAMRRDRRIAKVAMARKLAVSLYWMWRKGFDYPQTLPFGSHAGEPGYVHGVK

SEQ ID NO: 84436 - protein, 406 aa, unidentified
MDITPIHKRVIGLDIHQNKISACAIAEQADGTVTVEHREFGGFKRDRKALAQWVREFAPDVVVMESTGIYWKSPYAALEKVGIAAWVVNARHVKTVPGRKTDVADAQWLATLARAGLVRASFIPPADIRHLRLIARQRQKLGGMLSSEKNRLHKLLADAGIRLNVLVSDIHGQAGRAMVKALIAGQPVGEVLDCAGRLRATRAELFEALQPEELSAKHLFVLTEVMAHIEFLEATMARFEKTLLDGLQAWQPQLVLLQTIPGIDAMGAAMLLVEIGTDMASFGSAQRLASWVGICPGNNESAGKRKSGRTRKGNAWVRRLLCEFAQAAARSRCALKDKFATLSIRKGHKKSIVALAHKMLRIIYAMLTDGTPYQDRTVDYEALAVQRNAPRWIKMLVKHGYLPAAA

SEQ ID NO: 84437 - protein, 355 aa, unidentified
MNDEKYIGLDVHQATIVVAVMDSTGKLVMESILETKAATILQFFAGLRGTLAVTFEEGTWSAWLYDLLHSRVDKLVVCNPRKNALLKDGNKSDRIDARKLAELLRGNQLKPVYHGETGVRMLRELSRSYLTIVKDLSRVMNRLKAVYRSWAIPCAGRDVYYRRHRAQWLAKIREAGVRRRAERLYEQLDMLQHLRQQARRELLAESRKHTITAKLRQIPYLGPIRVALAVALIQTPHRFRTKRQLWAYSGLALETRTSAEYRFVEGQVRRSKKLLSIRGLNKDHNHDLKGLFKGAATMASVRPGPFQDFYTAALAKGIKPTMARLTLARKIAAITLTLWKKGENFDAEKLKSQAA

SEQ ID NO: 84438 - protein, 366 aa, unidentified
MKKISTVATNRNEIFKEHKLTIGLDLGDRSSYYCILDEAGEVILEHNFSTTPKGIHQVFNKIPRSRVALETGTHSPWVSRQLSQLGHEVIVAHARNVRLIGESSRKDDQLDARTLARLARIDPSLLGPVRHRSAKAQIHLTVIRARAVLVSARTALVNAARGLTKSYGERLQKCGTQQMNREIAKGLSQELREALDPLLEEIESLNERIREYDRRIEQIATEVYPQVALLKQVKGVGTLIALTFVLTLDDPHRFRRSRDAGCFVGLRPGRRNSGMSQPQLHISKEGDRYLRTMLVQGAQYILGPFGQDSDLRRWGLRLAERGGKNAKKRAIVAVARKLAVLLHKLWVSGEVYEPLRNNHKVVDQVA

SEQ ID NO: 84439 - protein, 434 aa, unidentified
MNPEFVLAADLSLDFLDIALMGPHKEWLIPEQRFTHNLPGYLALKQQILAHLAPFHSPHLTLTAESTGQLWWHLFYQIATDPDLAALSPSLALLNPAHVKHFRRVLPEQDKCDPKDGRLIASYYRTLGVKHPFTFAPRYLPLRHLSRAYFRLVHSLAAEKAFFLGLLYLLSSEYLRLKPFSDPFGVTSAHILTTFPDIAALAAIPLHDLALSLNLHANGTLKDPLVNARKLHQVARDSYPLPDFLRPTVHSLLALSLDHVRFMEHQQTHYRSLIDAQLQHLPEAQLALAFKGLGSILVAGCLSEIQDTRRFTTGLKYDTKRKRSRQRSYRDGQAGVARMAGLWWPRNSSGRFEGDDRHLARERNPYLRYWFVQAAYSLKRHQPEYAAYYRRKFVESSKHPHKRALILTARKAVRLIFALLYKGQRHCLEEDIVT

SEQ ID NO: 84440 - protein, 405 aa, unidentified
MRTVIGIDVSKASSQVAILVDGQLSQRIKIDNNQIGFQELDHLIQIATGSVEIVFEATGVYSRRLQHFLEQHTYPYCRLNPLAAKKDMDRLRPNKNDINDAIGLAQCQYELNYLRTYVEAPVYQELQIMSRYYQQVNDDLVRGKNRLHKALQMTFPELEGLLSTTSGDQYWTLVAQFPHADLVLQHEVEILATTILSSTKRNMSAKRANDLAIKLFKLAHLTAATVSANSYEVKVIHKLATQLMSLHHEKQEIIDRMVKLCEPLPEYRILMSIPGFAETTSVSLIGELGDIRRFKTANKLNAFIGIDLRFNDSGNYKSSGFITKRGNHLARKILFKAIGNMASSAAHNHPSHINDWYQKRKRSLSSKGTKKITIGAMDRLISTIHHLVLTNQTYDYTVATTHQHN

SEQ ID NO: 84441 - protein, 477 aa, unidentified
MDDKVMIGLDLSRRAQHQAVILRPGQPRPETRRLGSTAEEFEALVASAGGPERCVVVMEPTGMAWLPVSAWLIHRGCTVHRVDTRSAHGFRKIISRNVKSDRADAEALARMPTADPTRMRPLALATPSQFSLDRLVRMRADLVDQRARVYLQAVSTLEPFAPAMERLFGKSDRFTDARRYLMRHYCVPMDAAEAGVEGIRAALAAAEVDDLEDGELEAWVAAAQIDTALWRSMVECGRCPVDFQLLSFQVGVHLDRYEELTGHIEKLEDKISEVHRHTGLAKVIESLPGIGEVIGPAVLGAIGDVRRFPNAKAFACWLGLTPRKNQTGVSDRAGQRMSKAGNRLLRRYFYLAADSGRKSDLDLARWYFERTTRGMHHNAAITAIANRLAHRIYAVLKRAADGDTKGYTFHDEDGAELSKSESSRLVRERYPSKRARAAQAKKQVGRASNAQGKGQSKDSPRRSDEVSTQPESNPAPT

SEQ ID NO: 84442 - protein, 316 aa, unidentified
MSTTKYWVGIDVSKKELDIHIRPTGKSFSTTNNQSGIDQLSDSLNQLSPQLIVLEATGGMEILAAVALSRRGLAVAVVNPRQVRDFAKATGQLAKTDSIDAGILAHFAEVIRPEVRPLPDEQAQLLEELVTRRHQIVEMIKAETNRLPTMKGPMREHIQKHIDWLRQQRHDIEKQLQQSIRQSPVWQENVKLLKTVPGIGDVVSCTLIACLPELGSLTGKRIASLVGLAPLNRDSGQFRGKRTIWGGRARVRTALYMPTLVATRFNPVIKAFYERLLQRGKHKKVALTACMHKLLPILNSITKSGQPWRTSIAGES

SEQ ID NO: 84443 - protein, 356 aa, unidentified
MSIVAHSYPFVVGVDTHAKNHVYAVLNALSGELLQTRNFPTTSAGINRAIAWVARLTGADLAALWVIEGAASYGALLAGAVGAAGYPVVEAARMDAKARHGVGKSDRLDAHRIAAAVLPLEEQKLRRPRLNEGVRAALRILVCARESMTTDRTRATNALTALLRVNDLGLDARKPLTAIQIEEVSRWRAREEPLALSVARSEAVRLAKHVTKLGADIKSNNNQITELVEISEAAPLLQETGFGPFTSAVCLIAWSHPGRVRSEAAFASLAGVNPIPASSGNTIRHRLNRGGDRTLNKALHMIALSRMAFDARTIEYVEKRQADGRTKKEIRRCVKRYLARRIYRTLNATNLMPCGA

SEQ ID NO: 84444 - protein, 489 aa, unidentified
MRTIGIDVSVTAPHKAVVVEERGNALTTVLQVRNDPAELEALVNYARQGAAGDTVQVVMEPTGLAWLPLACYFIQRGVTVYLVNTQQTSDLRKFYRKHAKSDRIDCRVLARLPLVNPDKLHPLHLADADHLSGQRWCRQQEVLTELITAVKNRVQSWERAFWPGLEEAVGDLFAPWMQRFRQVWYDPWQLTAADGAVLARWLAEAGADQEQVESLAAALQQVARRSIALFGTPDGRPSLYVDYATLQDQVLRELRLLAIYQVEHQNLQRRIRALYRQVHPSRHLETIKGVGDQGAPVFAFFIADVERFAGQKSFRGWSGMVPRSDQSGEVEKKGLPISQAGPDIIKKYAYIAAETARQWDPQIAAIYYDQMVNKGKHHIQAVCCCATHLLDRVRAVLRYRRPYEVRDVDGRPVTWQEARDIIAERYQVPEEVRRRNTQRARKARRDARAERKQQKRRSRPRTTRGWRRNATSAGADFPSAPCSLIISQG

SEQ ID NO: 84445 - protein, 344 aa, unidentified
MTNTPIAVLGIDLGKNSCSLAGMDASGAVVMRKRMTRDAIVTFATTLPPCVIAMEACCGAHFLGRTLALHGHTIRLMSPEYVQPYVKAQKTDDRDAEAIAEAATRPTMRFVSLKSENQLDLQILHRVRERLVNARTALINQLRAVLLERGIILPKGRINLMRRLEDLMTGDPAVSARTATLLADLRGEWAGLDQRIRAYDDELAALTREDAQARRLATIPGIGVINATALLAAIGDGSAFAKGRDLAAWLGLTPRQHSTGGKTKLLGISKRGNGYLRKQLIHGARAAMPHLAAKPNQLGAWLQAMLTRAHPNVVVVALAAKLARIAWAVLQHEKDFNREAVAAV

SEQ ID NO: 84446 - protein, 365 aa, unidentified
MPSVSHLGPTHLGLDVHKDTISVAILAPDHEGPVVDRIAHDEASIRRLVGRLGAPRGLRACYEAGPTGYDLARLLASMHVRCQVIAPSLIPKAPGDRVKTDRRDCRRLARLHRAGELVAIRIPTVQEEAVRDLCRARADLVEDRTRARHRLGKFLLRHGRPWRGGNAWTLTHERWLLAQRFDDPALAATYAHYRAVLDGRDAQLEAIEADLAMWYDAPPFADAVHRLAAYRGITRLGALTLASEVGDWRRFPRAAAFTGFCGLVPSEYSSGTTTRRGHITKTGNAHLRAQLVESAWAYQHRPAVGVALRERQQGLDPQVVARAWVAQLRLCGRFRRLAARKDSTNVVVTAIARELAGFVWAEMSA

SEQ ID NO: 84447 - protein, 419 aa, unidentified
MLDTIQFQLMEEPFMYNAVGIDASKLKSTITIIQPAGVVIRKPFDVLHTSDELNILVTYLKSLEGEIRAVIECTGRYHEPVVKSLSEAGIFISAVNPKLIKGQKQNTLRKVKSDPADARKIAKYALDNWAELREYSSMDTTREQLKTLNSQFTFFMKQKVAAKTNLISLLNNTYPGVNKLFDSPTRDDGSEKWVDYAYSFWYVDCVRKIGLKAFTERYEAFCKKHYYNYQKNKPALLFEESKQLVAVFPKEKSYKLLIQQSIQQLRLASEHIEIIRKEMNELVSTLPEYEIVMSMYGVGETYGSQLIAEIGDVSRFTHREAITAFAGVDPGVNESGQFKQRSNRASKNGSTRLRKVKTRYRKLKELGMKEEYIQWHAAMRQGIWNCSSNRMVQFALNNAKLREWGYPTFTEFYLKICEN

SEQ ID NO: 84448 - protein, 389 aa, unidentified
MPTVADRHDAPTAIQTNLAAIFISLELSRSIWLITSLSPGFAGKMSKHSVQAGDVAALLARVSELKRKASERTGKSFPIVVIQEAGLDGFWLHRVLQSEGIESHVVDPASIATSRRRRRAKTDRIDGEALLRALLAFKRGEPRVCAMVKAPTPEEEDRRRLSRERKVLVAERVKHVNRVKGLLFSQGVSGYEPLRRDRRQRLEDLTTGDGRSLPMHLKTQISRELDRLELLLDQIKQAETERDALLASQQAAAPASAGRMLLEFKGIGAEFAASLWLEALFRSFDNRRQLASYAGLAPTPWQSGSVDHEQGVSKAGNPRLRTTLIQLAWLWLRHQPQSALALWFKERVNRNGGRLKKTTIVALARKLLVALWKYVTAGVVIEGAVMKDA

SEQ ID NO: 84449 - protein, 413 aa, unidentified
MEQIHERVAGLDVHRDSVSACARLPDLRGGAMVDKARFATTTAGLAELAEWLADREVTVVGMEATGVYWKAPYYALEGRFEVWLCNAQHVQNVPGRKTDLADAEWLADVVAHGMVRPSFVPPPPIRELRDLTRYRKRQIDVHAAEVQRLEKVLQDAGIKLTSVASEVLSMSGRHMVEALITGQQDPATLAQMAIGRMRNKLPELKEALTGHFGAHHAAVARQILDHIDFLDARIAAISEEVAVRILPFDAAMQRLIDVPGISQISAEVSIAETGGDMSRFPTPAHLASWAGLAPGNHESAGKRRRVGTRPGDRWLRRVLIEAARAAARTKGSYFGAQYRHIAQRRGPNKAAVAVAHSLLDLVWHLLSTSEQFEDLGADYFQKRHDPEREARRLVRQLERLGHRVSLTPAPSTA

SEQ ID NO: 84450 - protein, 428 aa, unidentified
MKYTQNEKILQVTEKTLVVGVDIAKERHVGRAFDFRGVELGKRIEFENRKEGMEKFLDWANKIMKANGKEKVIVGIEPTGHYWLCFEQYLRENGIKVVLVNPFHVKRSKELDDNTQTKSDIKDPKTIAMLVKDGRYTEPNIPEGIYAEMRVAMNIYERLQKQLNVLKNQIINWLDIYFPEFLEVFSDWEGKTAIATLREMPLPCDVVEKEVEGIIEYWHDKVDVRAISRRRAMDLVETAKRSIGKKEGRKLARLEIKYLLEEYELLKKQIEEIECEMAELLREVPNGEQLLEIKGVGVKTAVGFISEVGDIRKYEDGRQIQKLAGLNIIENRSGKYKGQTCISKRGRGRLRSSLFKAMITIVAKNEEFKQLHRYYTTRQNNPLKKKQSLIALCCKLIRIFFAILKKGMKYDGNKMLSDIKREVLARAA

SEQ ID NO: 84451 - protein, 386 aa, unidentified
MQKLNDFSRSLVALEPDSTLIAVIEMSLSSWLVAGIVPGVERQPLKKLAADESALLKLLHRWREEAEKAGRRIERVAVAFEAGRDGFWLARWLKARSIEAHVIHAASVAVSREHRRAKTDRLDTELLKRAFLGWLRGERDHCKMVDIPTIKNEDAKRPNRERENLVSEQSRIINRMKAALIRLGIRGFNPKLKRAARRLEDLRTPEDEPIPPNTLAELRRDIERRRLVRDQIRQIEEARLQRLDHAPGDGPHAMVRLLARVIGVGIETADMLVHEVLSRSLRDRRAVARYAGLTGSPDESGRKRREKGLARSGNGRVRRGMIQLAWRFLLHQKDSALAQWFRARTENARGTRKPMIVALARKLLIALWQLVRQGVVPDGVVLRSAQ

SEQ ID NO: 84452 - protein, 340 aa, unidentified
MITIGIDPHKSSLTAVALQPAGEVSATIRLEVNRDTVARLRAWAEQWPQRRWAVEGAVGLGRGVAQGLAAADEPVVDVPAQLAARARLLNTGHARKTDPIDAAAVAMVAQHHRQLHPVRAEDDSLVLRLLSERRDDLAAERTRTVNRLHALLRDLIPGGAKRNLSADQAAALLRGVHPVTAADAQRKQLSRELVADLGRLYVALQRNSEDIAAAVAAAGTSVTQVHGIGPVLAAKIIGHSGAIGRFPTRNHYASYCGTAPIEASSGEQRRHRLSRAGNRQLNRALHLVAVCQIRTKGPGREFYQRKLGEAKTPAEARRALKRRLCDTIYRHLVRDQQAVT

SEQ ID NO: 84453 - protein, 345 aa, unidentified
MTEAYDGRQVVGMDLHRRRSVLVRMTEDGRKLETARITNSPAALRAVIARAGKNPRVVIEATYGWYWAVDVLEAAGAEVHLAHPLGVKAFSYRRVKNDERDAADLADLLRMGRLPEAWIAPPEIRELREISRYRHQLVKARTSLKDQVHGVLAKLGIPVTHSDIFGVHGQAWLDELPMPQPYAGKVASLRQLAGELSAEITLLDTVLADLLAGHEGYAAIRQLPGIGPVLAAVIVAEIGDIRRFPGPGQLASWAGLTPRHYESDTKVIRGHVTKQGSRMLRWAVTEAIQRQPAGSRPGQVKDAIIARRGKEAKNIAKVAAARELLTLVFYGMRDGRIRRQAQPAA

SEQ ID NO: 84454 - protein, 359 aa, unidentified
MKTIVSNKQNWFNKINLTKDDEVYVGIDVHKKSYAVAVWLNDAPAIDFVMPADNQKVLTMLDKLRIALKQVVYEAGPTGYSLARLLQDAKLPIRVIAPSKTPRQSARESKTDKLDCRKLAQYAAKGLLRPIAIPTKQQEADRQLFRLREQLVEKQRRLKLQIKSFLLQHGIAEPAGLKSWSVLAVEKLRTIALPDKLRYCLDIFLDELAFLKTQIKKTEQCLKETFSAPQHAKKIKLLLTHPGVGPVVAGQFCTEIFNPKRFKNSTEIGKYVGLSPMVTQSGQSRKDGPVLKTGRPQLRSNLIEASWVWIRKDPHAYKTYIRLLHNTGEKNKAIVAMARRLAIHLWKMLSDNKPFVQAA

SEQ ID NO: 84455 - protein, 416 aa, unidentified
MKIVRPICCGMDVHKNIIVATIGITNKKTRITEYIQETFSTLNPDLLNLKQWLINHKCFDACMESTGKYWIPVFNILEDEINIYLTHPKYVKAIKGKKTDKKDSKWICDLFKHDLIKFSFIPPKEIRALREISRYRYKLVGMRSSERNRYQNCMTVSNIGIGSVFSDPFGKSAQAIMKEVLESDIIEDEKILKCIHGSCKNKDKILDSIKHCNIETDQRFKMNESMTHMEELQVHIDNCEIEMMKRAAPMFDQFMHITQLPGISTLSAILIISEIGVDMKQFESDKQLTCWAGLAPANNESANKKKSVRISKAGQYLKPLLVQCALGAIKDKEGYFGIKYSRIKKRRGHKKAIIAIARMMLVSIYHMILTGETFNPSDYESFRNPNPPIKQQVLTEESAIEFLKKSGFDVSKLTKP

SEQ ID NO: 84456 - protein, 426 aa, unidentified
MKVVTVEAEVKGAEVLVVACDVGSEWVDSYGKFSRDGRTYEVRDHVRRRTRDIETMLKNAQHVATEAGFAGVHVVCEPTGGYERMLLGSARRLGCQTGYVSGQAVNRLQIMEGNDTGKTDRKDPKVIQSLAIMGKTLSVRVLPGEYAVLRTLGEAYESLDRQLVELRTRLHSRLLYLFPDWPMQPPFLHTRTGAALLENYAGSPGRIAGLSLDRFVVAMRKVSGKVRRQTLECIHAAALISTRHVLERGQVEVLEGEIRALHEDIQRLEARKADLRQRMEELYRKLPESPKLSAIPRVSDFLMARLIAETGPLADFGHCRQLVRYAGLNLCERTSGKYVGQVKTSRKGRAGVRKVLYQIVMSTLIMGNGLYKTYYRNNVGNKSARMPSVVAVMRHFLRCVYGTYRSERAFDLGRVFCSESRQQKLA

SEQ ID NO: 84457 - protein, 286 aa, unidentified
MVYLGIDVSKAKLDCALLASATGKRKNKVVSNDKAGFETLLAWLARQDISVDEVHGVMEATGVYHEQAALWLTDAGMRVSVVNPTQVRDFARGLAVRTKTDGMDSVVLARYGTLIQPEAWEAPPLEIRELKALIARLEALETDARRELNRREKALVAKAPALVRESLDNHIASLSKEIARLQRAIDDHIDRHPRLKADRDRLLSIPAVGDKTANRMLTVLHSRKFTRAEQVAAFLGLVPVECRSGSSIQKRPRLARNGDAKTRAVLYMAAIVAIVATKYNPHVKAL

SEQ ID NO: 84458 - protein, 416 aa, unidentified
MTVLRREGSHSSHNGTTGSKFASRGLRCGLGLRPWRRAAYEKEPAVKKKVQFLGLDVHAETIAVAVAETDGEVRSVGVIPNRVESVRKLVKKLGGPKNLRACYEAGPCGYVLYWQLTEIGVDCEVVAPTLIPMKAGDRVKTDRRDAEKLARCFRAGDLTAVWVPDAGHEALRDLVRARLAAKQDQTRHRHQLSKFLLRHGRRRTAGTKAWTLAYLQWVRQQVFEQPAQQAVLEDYLHEVEQVGERIKRLERSIDEAIEKVPARIREVIEALQALRGIAKLSAVTIVAEVGRLSRFDKPRQLMGYTGVVSREHSSGERVQRGAITKTGNAHLRRIICEAAWAYRYKPAVGPALRKRQEELPKEVTDIAWKAQRRLHARYVGLLGKNKGAPKTITAVGRELLGFVWAIGVEVERRQAA

SEQ ID NO: 84459 - protein, 408 aa, unidentified
MNPLFVGIDVSSRSNVAYLMKPDGSKHSSFSVQNNPSGVKILSSRIVSALDGLHLSSVAIGLESTSIYGDHLVYALREDGNLGRFTPKIHVLNPKQVRKFKEAYSDLPKNDFVDAFVIADNLRFGRSNREVFMDDYRYKALQTLTRARFYAIQNLAREKQHFANYLFLKCSGLALDKEVKNTSATLLTLMERFPSVDDLASADLDDLTDFVSKSGRGRFADPEGVAKMVQKAARGSYRLPKTVNDSVNQAMSVSIASMRALGDQVKTLDKAIAKQFEAIPNTLTSIPGIGPVYSAGIIAEIGDIRRFAGHAQVAKFAGLVWTQHQSGDFEAESTRLIKSGNRFLRYYLLEGANSVRRCDSEFRRFYDLKFKEANRFQHKRALALTARKLVRLVFRLLKDNRLYKLPES

SEQ ID NO: 84460 - protein, 348 aa, unidentified
MDYYAGLDVSLESTSVCVVNGEGKVVREGKLPSDPDAIELFLSEWGVHLKRVGLEAFSFSAWLHTALDDKGLPVVCIETRHTKAALNAMLNKTDRNDARGIAQLMRTGWFRPVHVKSQAAQALRVLLAGRKALLGKVIDMENMIRGLIRPFGLKVGQVSTGRFDARVRELVAGIAELEQIVEPLLAARAAMRLQFARMHRMALAAARNDKAVRRLMTVHGVGAIVALTFRATVDDPGRFRKSMTVGAHFGLTPRRYQSGETDWSGRISKCGDEMTRAMLYEAAIAILTRIPKNFKLRLWGLRLLKKKGLKKAATAVARALAVLLHKIWVDGSTFRYGVGLKGGRIART

SEQ ID NO: 84461 - protein, 339 aa, unidentified
MPLYAASDLHANNNFLAIIEENGKRVFKGKLPNDPERILAALRPHQNDLVGIVVESTYNWYWLVDALIGEGYQVHLANPSAIQKYSGLKHADDQHDAFWLAELLRLGILPEGYIYPKEERPIRDLLRKRGHLVRLRTSLIISLQNIVSRNCGVAIQVNDVKRLKEDRISPLLEGNEDLALAGRVSKETIDFLTRQIRAIESVVERKVELKAPYRHLLTMPGIGKILALTIMLETGPISRFSQVGNYVSYCRKVSSQWESNGKAKGKGNKKNGNRYLAWAFSEGAELARRFDATARAYYDRKKQKTNFMIAHGALAHKLARAAYYILRDQVPFRPEKLFA

SEQ ID NO: 84462 - protein, 350 aa, unidentified
MNITTVGIDLAKEVITACTMNDHGHVLKTRDLRATEFSAWLVQLPAGTILGMEACSSAHHWARKMQTMGLVPKLMAAEFVQPFRKSRSSKNDHNDAEAIAIAVKQPQMRFVAIKTEAQQARLAWHRCREGWKEERTALINRTRGLLLEFGHPLARSSKAFTVGLQIALHHDALPPQFRTLLTHIQQQLQQLDQQLALCDRTIALSAKQDESSQRLQAQPGIGPISADALTATVGDARDFKNGRQFAAWLGLTPRQYSSGGKTKLGRISRRGDAYLRTLLVQGAKSTLQSALKKAPNLLSHMQQWILKLYGRVGYHKTLVAIANKHARQVWAILTKGEAYDQDAWKRIVST

SEQ ID NO: 84463 - protein, 338 aa, unidentified
MRSYAGIDLHSSNNYTAIIDEQDRRLFGKRLPNELDAVLSALNPFRESLEGVVVESTYNWYWLVDGLQEAGYKVHLANPSAIKQYEGLKHTDDKWDSFWLAHMRRLKILPEGYIYPKEERPVRDILRRRLLFVRHRTSHILSFQSAVTRNLSYKISAKEIKKLRKCDAGAFYKEPFLVLAAESSISIIQFLSERISQIEKAVMGRVKLRPEFEYLQTVPGIGKILGLTIMLEVGDIGRFSEVGDYSSYCRCVKSDRESNNKKKGEGNRKNGNKYLGWAYVEAANFAIRHYAEARSFYQRKKSTTNGIVGIKALSNKLARASYYVMRDQVPYNENHLFR

SEQ ID NO: 84464 - protein, 359 aa, unidentified
MTSIALGRGDVVVGVDTHKDAHVAVALDGLGGRLGELAIAANPDGYAELVAWADDLGRVAMFGVEGTGSYGSGLARFLRRNGRKVIEVSRPPRKGERRLSGKSDTVDAEHAAREMLAGKVKVTPKLADGIVEAIRLVKIARDSAVNAHSQAMITLKATLVTANDQMRGDLEPLTDFKLIKACAALDTDGDVADPAVAMRLVLASLARRWLELHEEIKQHSKNLKRLTKRAAPELIAAFGIGPDIAAEMLVTAGDNTDRIRSDAALAKLCGACPIPAGSGKTNGRHRLNRGGNRQANAALYRAVIVRMRWHPPTIAYVERRTADGLSKKEIIRCLKRYLAREIYRLLPPPSLPGQLASAA

SEQ ID NO: 84465 - protein, 332 aa, unidentified
MAWTVAIGVDTHKDIHVAVACNRLGAQLDVCEIEAGSRGYARLLAWAQELGEPAFAIEGCGSYGSGLARFLTAAGYAVWECERPRRRDRRRGKSDLIDAALAARRLLSGDGLSLPRSGERHDGLRPLLLERRGIVQAQTAALNQLQAAVLTPTLPERLRSLGGERLVRACLTLRAGSTERAVARRLARRIRQLDHELAEVDTQLRAAITSCAQPLLDECGVGVICAAQMIVSTGDARRMRSEAAFAALAGTSPVDASSGRQQRHRLNRGGDRQLNRALHIIALSRIRHHEQTRAYYQRLLASGKTSREARRCVKRALARHFYRQLRALPITT

SEQ ID NO: 84466 - protein, 400 aa, unidentified
MISVGIDVSKGKSTICILKPYGEIVSKPFNITHTQKDLSELSSMLFRLNDEVKIVMEATGIYHLPVLTYLQEKGFFVSVINPYLMKSYRNESLRKAKTDKIDSRIIANYGIDHWFKMKEFQTSGEIYEELKLLGQQYRHYMKLHLLSLAELTHLLDLTMPGIKNLLASWNETNRKDKRSDFVERFWHYDVITSMSEQEFTEEYILWAKEKKYVPSQEKAKVMYTLAQESIPTLPSETSSIKMLVTEAVRVLKEVDATLGLILSRMQEIAKTLPEYSVVREMGGVGNTLAPKLIAEIGDVRRFRNGKALVAFAGIDPPPYESGQFVGYNRKISKRGSASLRKVGYETMRSLKMRSRPEDPVYRYVVKKESEGKSKKSAKIAGLNKFLRIYYARVTELYKNI

SEQ ID NO: 84467 - protein, 326 aa, unidentified
MAGSAESTFVGIDVGKADLYVAVYGDDRVWQVRNDGEGIGRLLTLLQPLSPELIVLEATGGLELAVVAEMACRGLPVAVVNPKRVRDFARSTGQLAKTDRLDAKVVAHFARAVRPEVRPLRSEEGEHLTGLVTRRRQVIEMLVAEKNRRGTTRPRLRERVQKHIEWLEEELRVLDDEIADFIRKSPLWKEKEQLLRTVPGVGPITAATVLAHLPELGTLNRRKIAALAGLAPLNKESGKKHGKRRVFGGRAPVRSTLYMATLNAVRHNSVIKPFFEQLLKRGKEKKVALIACMRKLLVILNCILRDHQPWHPPARTLSATFSPAAV

SEQ ID NO: 84468 - protein, 452 aa, unidentified
MAKRKQKKNKNVAENLLVIQPNSAGIDIGASEIYVAVPGDRSDEPVRRFDTFTDDLHDAAKWLKKCGIESIAMESTGVYWIPVFQILDLYGLDVILVNARHVKNVPGRKTDVQDCQWLQYLHAVGLLKGSFRPDQDVCAVRSLLRHRDNVVKAASSHVQLMHKSLTQMNLQIHNVISDITGATGTKIIDAILAGERDPYQLADLKDRRIKADKETIAKSLTGDYRREHLFTLRQTVDSYRHCLQLIRDCDAEIESYLKEFDSRIDVDETPAPPSTKSKRKTKGNAPDFDVRTHMHRILGTDLTEIDGVGDLTAHVVFTEVGPDLSKFKTANHFSSWLGLCPNNKVSGGKVLSSHTRPGSNRLAQALRISANSLWKSKSYLGDHFRRMRARHGAPKAITATAHKLARIIYHLIKNQKAFDETVFAEQEQAHQKRMKKRLANQAKSLGLQLVPA

SEQ ID NO: 84469 - protein, 426 aa, unidentified
MNAITDFAATIGLDWADRKHDLWLQPADGSKAQHLQLEQTPEALHEWIAKLRDRFGNRPVALAIETTRGPVISALMAYDFIVIFPVNPKALKDYRAAFCVSGAKNDRTDAMLLEELVRLHRHQLKALQPDTELTRKLAGLVENRRHLINERTRLVNQLHSKLKTYYPLAQTLLEDQMTTPMAAEFLSRWPELESLQQTPSQTLRAFFYKHNSRSAKLIQERLEQVQQAQPLTSDPALIEPAALLVGALAGMLKSLHRTVAQLDKKIQSAMDQHPEAALFRSLPGAGPALAPRLLVAFGTNRARFASADQVAQFYGLAPVIEQSGNTKIVHMRYRCPKFGRQTFHENAACALRREPWTRCFYEQHKLRHDNQHHQACRALAFKLIRIYFACWRDHQPYQPKLYLQALEKHASPLHKKLGPAMSQSGQ

SEQ ID NO: 84470 - protein, 343 aa, unidentified
MFHVAIDLGARESQICVRKEDGTIVEERRMGTGQLGKMLEKLGPSRVSVETSAEAFSVADEALELGHEVRVVPATLVRALGVGDRGVKTDRRDAQRLSEVSTRIDLPSVHIPSKVNRERKSLCGMREGLIKSRTQLINTVRGWLRGRRRRVRSGAAETFPMRVHQHYGQLGQELPSYVVRQLLVIDQLSEQIKEADKELEQEVQQDAICQRLRSVPGVGPVTALRYVATVDTITRFDNAHALQSYIGLTPGEHSSGAKRCRTGITHAGSAALRWTLVQAAWSLRRCRPSDPMVLWNREVERRRGKQVAIVALARKLAGVLFALWRDGTRYNPLLAADARPGMQ

SEQ ID NO: 84471 - protein, 389 aa, unidentified
MLLAHPSDGPTAIHTQFGAIFVSLELSRSNWLITSLSPGKGEKMSRHSVPAGNVAELSALFAELKRKAEVRTGQGYPIITLQEAGLDGFWLHRVLQQQGIESHVVDPASIAMPRRRRRAKTDRLDGETLLRALLAYKRGEPRVCAMVVAPSPGEEDRRRLCRERRTLIEERVTHGNRIKGLLFAQGIFDFAPMRRDRRARLEALRTGDGRELPPHLKAQIGRELDRIELLLGQIKTVEAAQDALLAAARKPASEDAAPDPVTMLLALKAVGANFAAVLWSEAFYRQFANRRQVAAYAGLAATPWQSGGVRHEQGVSKAGNPRLRTTMIQFAWLWIRHQPQSALTRWFKQRSPQGRKRAIVALARKLLVALWKYVTQGVVIEGAVMKPAA

SEQ ID NO: 84472 - protein, 319 aa, unidentified
MQDILKICCGLDVHKETVVACLLKGDVDNKPETTIRTFSTLLQGLEELKAWLVKENCRHVAMESTGVYWQPVYNVLENAFDGNMVLIVANARHMKNVPGKKTDMKDAEWIAGLLRAGLLAGSFVPAQPIRRLRDLTRYRKSIVEEVGDQKNRIEKHLQSCGFKLSSFLTDIFGVSGRAIIDHLSRHGRISALDVEGYVQKRARTKLSEIKQAVNGQMDQLQVEFLQLLLKRLDESWQHLQLVEQKIEAELVNYQHQIKQLDGIPGIDITAAAAILAEIGIDMSRFKTAEHICSWAGLSPGNNESAGKKSPPEPTMVIPM

SEQ ID NO: 84473 - protein, 424 aa, unidentified
MKVTFQTCCGVDVHKSFLVATIIKTSSGIEPSYQKRRFSTFNNSILEFKKWLLENECLYVCMESTGKYWIPVFNILEDEINVTIANPKWVKAVKGNKDDTKDSKWIGDLFRLGLVRGSYIPCKKIRILREFTRYRYKLVSCRSSEKNRYQNALTVCNVALDSVVSDIFGKSSTSIIDYLLEQSGTSIDHEVIASKLLKRLKAKEDAVIESIEGYQMTDSQKYRMHLVRAHMDYITAAINDVDSEIESLIASDPDYENAVELLCTIPGVKYDSAITIISEIGIDMSQFCSSKRLCCWAGLTPGSNESAGKKKSVRITRAGVYLKPALVQCAHAAVKSDKSPYYKKKYESLVKRRGKKRAIIAIARMILTAIFQMLTTGETWNPCDLYKIDMPEALLEKQKQKAIKQAQKLLIREGLLPPTEPIAS

SEQ ID NO: 84474 - protein, 451 aa, unidentified
MEDEVIKMEVVNPQAAGIDVGSRSHWVAVGQREEDVREYGVFNDDLFSLCDWLKECKVRTIAMESTGTYWQNLYAVLISRGFHVILCNGKFTKNIKGKKTDIKDCQWIQRLHSLGLLSSSFLPDGKTEELRTYCRHRQNLLHESASTSKKMQKYLRLLNLRLDVVVKDTCGLSGLRIIRAICNGEKNPEKLAELRHANCHTSKADIARALQSNGREDYLFALKHELDMYDYLHKKIEECDLKIEEKLNSIINDDENKKQHHIEPKPYKKVNKNTPKNIDLNLKSYQMFEGTDLLAIEGMSYSTVLALMSEIGVEGIRKFPTAKHFASWLRLAPNNKVSGGKVLSSKVPKGSNNLKISLRNAANAIGNLKDSTPLRDFFMKISFRKGRVSAISATARKLAVIIWNMVVKGVPYHNPEEYLFRDQKKKLGLLKRIQKQITKFELESTDFQFSN

SEQ ID NO: 84475 - protein, 388 aa, unidentified
MLPISQPTAQKPFHGRRDDATLYASLELSQATWLVTSLSPGGEKMSKYSTPGGDSAALLGLLRRLQVKAEQIAAGPVNIMVILEAGLDGFWVHRLLEANGIESHVVDPASSAVPRRRRRAKTDAIDGETLLRTLLAWQRGEPRVCAMVIPPTPEQEDRRRTSRERAVLLQERVRHVNRIKGLLAGQGITDYEPLHKDRPAHLAALKTGDGQPLPKQLKAELLREIELIELLLRQIAEVEAERDTAVELDAEGNQSPVPLLTRLKAIGPQIAAVLYLEGLYRSFANRREVAAYAGLVPTPWRSGTIDREQGISKAGNRRLRHIMIELAWLWVRHQPDSALSRWFRARVGTVRGRVRRVAIVALARKLLIALWLYVTHGEVPEGAMLKAA

SEQ ID NO: 84476 - protein, 371 aa, unidentified
MKDTIKYVGLDVSKEKIAVAIAEEGRDEPRYWGMIPHTPEAVRKLMKKLGSTESLRVCYEAGPTGYALYRLLLTLNIHCTVVAPSLIPQRPGERIKTDRRDSVRLAQLYRAGELTSVYVPTPEDEALRDLVRCREDTVEDQLRAKHRLSKFLLRYDIQPPSKGKKWTVRYYRWLDTLKFENSKLQIVFQEYYHQIKELQQRILRLEEEIKIQATDSIHAPIIQALQALRGVALITATSIAAEIGSFKRFSTPRQFMAYVGLVPSEYSSGESRKQGKITKTGNRHVRRLLVESAWSYRYQPSVKGELQKRQAGQPPTIQAISWKAQNRLHKKYFRLLSRGKESGKAITAVARELAGFIWAITQELDEVIPKA

SEQ ID NO: 84477 - protein, 358 aa, unidentified
MKIIGCDLHARQQTIAMLDTDTGELEEKTLGHEGETVREFYSALSGPILVGIEATGSMQWFLELMEELGIECRVGHPAKIRKAETRKQKHDRRDARLLLTLLAENRFPTIWMPSTEQRDLRTLLRHRHQWVRLRSRVQHTLQSMALNRGLRLGHSLWSRVGQQALRALPLAPHASKRRAALLVLYPHLQGSIDELDKEVCEEVSQHPQARRLLTHPGVGPITALATEVFLGDPQRFIDGKALASYIGMIPSEHTSGRRQRLGAMSKQGNALLRYLWCEAAMHAVERDPELKRFYRRKLVQKGLGKARVAAARKLGIRLWIMMRDQIDYQEFCRRGKARQENGSVHAGMPDLDSGPAAQ

SEQ ID NO: 84478 - protein, 366 aa, unidentified
MPTLFGASERDDGFSMAAKKRQVTGGVDTHGKTHHAAAIDGAGRVLGDQEFPASASGYRQLLAWLRRFGQVIKVGVEGTGTYGAGLARHLTAQSVTVVEVDRPDRRARRAKGKSDSLDALAAARAALSGQASGTPKTRTGPVEAIRALRVARRGAMKARTAALNQLHGLLASAPESLRHDLSHPQAPLVDRCAALLVDETRLTDPVEATKAALAAIAARIQALTAEITHADRRLRPAVARTAPHLNAVYGVGTDVAGQLLTTAGDNPDRLRSEAALAHLCGAAPIPASSGRTDRHRLNRGGDRAANSALHTIALVRMRHDPRTRAYVDKRTKQGLNKKEIMRCLKRYIVREIHTALLADFTTLNTA

SEQ ID NO: 84479 - protein, 319 aa, unidentified
MFVGIDVAKAELVVSVRPTMERFTVANDERGVRTLVERLRAIGPELIVLEATGGYELLGVAALAAAALPVVVVNPRQVRDFAKATGQLAKTDRIDADILARFADVVRPAVRVIPDAEAQELEALLARRRQLLEMLQAERNRLGQVFGKGKRLVRKSLKAHIAFLERELRMTDTDLGEMVKNSPAWRERDELLQSVPGVGPVLSRTLLADLPELGRLSRREIAKLVGVAPLSRDSGTMRGRRFVQGGRATVRAVLYMAALVATKRNAVIRGFYQRLVAAGKPKKLALVACMRKLLTILNTMVRMRTRWNPAAACGMLTTA

SEQ ID NO: 84480 - protein, 344 aa, unidentified
MYIASIGIDLGKTTFHLVAMGERSKMLLRKKFSRAQLLAYTANLPACLIGLEACAGSHFLGAALRQQGHQVRLIPGQFVKPYRKSNKNDFLDAEAIAEAVTKQNMRFVPIKTEEQLDLQAMHRVRDRLVQRRTALINEIRGFLLERGITFAAGPIHLRQHLPTVLEDAEQNLSPRLRWLLDRLGQEWKQIEIDITAITEAIERISNEDARCRRLRQIPGFGPLVSTATVAAIGNGTAFRRGRDFAAWLGVVPRQCSSGGKQKLLGISKRGNIYLRRMLIHGARAVLLRVKYDTGGLGQWVHRLAQRAPRNKVVVAIANKLARIAWAVLSSGNDYRHQPLPAVAA

SEQ ID NO: 84481 - protein, 356 aa, unidentified
MSREVKYIGMDVHKEAIVIAVQNACGHLVMESIVETKASSILQFIHGLQGELHITWEEGTWAAWLYDLLQPHVHQVLVCNPRRNALLKEGSKNDKVDAGKLADLLRTGMLRPVYHGEHGLRTLRELARTYQTLSQDLNRVMNRLKALYRGWGIACGGTQVYAPRYREEWLGKIKHVGVRRRAELLYQQLDGLQVLRRTLRPELLAESRKHKAAKLLRQIPCIGPIRAARLLALMQTPHRFRSKRQLWTYSGLGIETRDSAQYRFVRGQLQRAKKPQQIRGLNQNHNHEMKEIFKGAATRASCGMGPFREFYVSLLDKGMKPEMARLTLARKIAAITLILWKKEERFDAQQVKTQAA

SEQ ID NO: 84482 - protein, 459 aa, unidentified
MSRKRKSKQKSNPKTGASLLSCLNLNAAGVDIGATEIYIAVPGDRDPQPVRCFPTFTEDLHAAAAWLKACHIETVAMESTGVYWIPLFQILEARGFKVFLVNAHHVKNVPGRKSDVSDCQWLQYLHSVGLLRGSFRPEQAVCSVRSILRHRDSLVQMASSHVQHMQKALDQMNLQLHHVISDITGMTGIAILEAILAGERNPHTLAALRDRRIKASADTIAKSLVGDYRREHLFTLRQSLESFRHYQELIAACDREIAQSVEQFESKLDPPVDPPPASPSSSNDGSKPKASEPSFDLRTHLHRIFGVDLTQVPGIKVLTAQTLLAEIGPDFSRFPSGPEFASWLGLCSDNRVSGGKVLSVKTRKVKNRAATALRMAALSVHRSQSFLGHFYRRMRAKLGAPKAITATAHKLARILYHMVTTGHAYDETICAQNEVQNRQRMEARLRKQARELGLQVVAL

SEQ ID NO: 84483 - protein, 402 aa, unidentified
MNCVGIDVSKGKSMIAVMRPFGEVVVSPFEVRHTANELSELAGLLKSLDGETRVVMESTGNYHAPVAWLLHGAGFYVSVVNAMLVHDYGNNSLRRGKTDKKDAVKLANYGLDHWLTLPRYVPEEDTRLMLKTCYRQYQQYSKVQTMLKNNLISLLDTAFPDANRLFTSPPRADGSEKWVDFVATFWHCECVCGLSKKAFTAKYQKWCRKHGYNFSEDKALDIYASACRHFGVIPKTDTAKLLVEQAISQLQTTSSALAALKQEMQSLAASLPEYPVVMGMFGVGPTLGPQLLAEIGDVRRFHSKKALVAFAGIDAPPYQSGQIDVRSRSISKRGSASLRRTLFLVMSVILQCAPIDEPVYQFMDKKRSEGKPYRVYMMASANKFLRIYYASVKAYLESLEHD

SEQ ID NO: 84484 - protein, 403 aa, unidentified
MKKTSTVRVNRNMIFKGHKLTIGLDLGDRWSNYCVLDEAGEILLEQKLATTPEAVKQTLGRIPRSLIALETGTHSPWLSRLLKELGHEVLVAHAQKVELITKSNRKDDRHDARTLARLARIDPELLGPVRHRSAKAQIHLTVIRARAELVSARTALVNAARGLTKSYGERLPKCGTEQVSRARAELVSARTALVNAARGLTKSYGERLPKCGTEQVSRELAAKLSAELREVLEPLLKEIESLNERIKEYDARMEKIVKESYPQVALLKQVKGVGTQIALTYVLTLDDPQRFAKSREVGCFLGLKPGRRDSGESQPQMRISKEGDRYLRTMLVQGAHYILGPFGADSDLRRWGLRLAERGGKNAKKRAVVAVARKLAVLLHRLWVSGEVYEPLRNSHKVMRAAA

SEQ ID NO: 84485 - protein, 343 aa, unidentified
MEHAATIGLDIAKNVFQVHGVCSDGEVVIRRRLRRVQLLKFFAKQPPCLIGIEACATAHHWGRELENLGHEVRLMPARYVKPYVKRNKNDAADAEAICEAVTRPTMRFVPVKSVDQQSVQMLHRTRQLFVRHRTRLTNTIRAHLAEFGIVAGVGRNGVAALLKLIASGEDDRVPPEARECLTAMAEQLDLVTQQIADADRRILTWHRSDTMSRRLAVIPGVGPLIASALVAAAPDPRVFRSGRDFSAWIGLVPKQASTGGKERLGSISKAGNRYLRQLLVVGSMAVLRRVKSLGHTRYPWLAALMQRRTVKIAAVAMANKIARIAWAMMVRGEPYRPAQPMQT

SEQ ID NO: 84486 - protein, 498 aa, unidentified
MKNRSEQVLPPEYKPSGGIAPHGARSAKSQLLKLPASSPARAAAPVPRSERTIAREAPGIRLTYDSATMPKEKGKTMKEWQSITHYAGFDWARDHHAVVIVNQQGQIVADFEFEHTQAGWKAFREKTAAFPNLAVAIETNQGAAVDQLLQAGYTVYPVNPVAAKAYRQRKAPSGTKTDHLDGWSLADALRVDGQGWRAIQPTDPLSAELRLLCLDEVTLICQRTQLINQLQQALVEYFPAATEAFDDWTLPACWDFVIEFPTPQALVQAGRRRWEKFLHTHRMWRPETAGKRMEIFARADQFAGSAPIIQAKSRLALSLCKLLRTLQQQLDEYRKQIEELFARHPDHDLFGSLPGAKKVLAPRLLAAIGSDPARYANAVSVLQAYAGTAPISFQSGQRNQVKMRWACDTFMRHTMHLWADCFRHASSWGQVYYQNKRHAGMSHTCALRCLGQRLLKIVFRMISDKKPYDAELHARNQQKHGSWILTLANKTSAATAGE

SEQ ID NO: 84487 - protein, 368 aa, unidentified
MFEHTFIGLDVHAVNTVGHALNPDTGEITRHTMTADPAAVLEWVRRFTPPVKVVYESGPTGFVLARYLRAAGINCVVAASSKLLRAPGDRIKTDRRDARVLAEMLAVGSVTEVRIPDPDEEALRDLSRLRSGTAKDLAHARQHVNAILLRHGIRYPNDTRWTREHSRWLHRQRFDQPALQFTYEADVEQAELLAGHLARIDKQVAATGTSCRYTPVIEALMCLRGIQITTAFGLAVEIGDWTRFTGSTIGSYLGLVPSEESSGQSRHQGPITKAGNTYARTLLIEAAWQHRRPYARPGERLLRQLDRVAPETRIRALEGNHRLHRKWEHFDERHKMSVKANTAIARELAGWCWSLAAPLQQGERMNAA

SEQ ID NO: 84488 - protein, 408 aa, unidentified
MKRYYLGVDWADEFHQVWVSDFDGKKVAEMKVVQSPEGMSEFGSWLHQRKAEEIELWAAIEKPHGRIVDFLLDHAVVVYPVNPKALDRVRDRFRMSQSKSDSFDAYVLAEFLRTDHAHLRALEPNSDEAQELKMLTRDHHRLVRQKSRLLNQLDRTLKEYYPRPLEVFSDLESKIALDFLARYPTPKGLTDLNRRKWNRFAKREHHLGEQRCKELWEKLNKPQLKVPEHVVRAKAQLLEVLLIQLKALIEAVQSYSEKVQRFFASMPAADLVKTLPGGKSGTIVPMLWAELGDAKSRWQSFRHLQAEAGAVPVTKASGKSRVVQFRFSCNKLMRYASYWFAFVSLNQSEWANRYYRDQRTKGHNHAQALRALGAKWLKIIFVMWRDHKPYDENYHLANITRQKMRQAA

SEQ ID NO: 84489 - protein, 369 aa, unidentified
MSKIVKYVGLDVHKDSITIAIADEGRDGNVRLYGKIRNDLEQINKVMRKLISHNSELRCVYEAGPCGYPIYRYLTSQGINCAVVAPALIPKKAGDRVKNDRRDAMNLATLHRSGDLTPVYVPDETDEALRDLVRARKDNSIALRKIKQQINAFVLRQGLSYAGKTQWSKTHLNWLTALKMPHPAQQIALTEYLDAMQNHEARIKRLETAITASCETWRLLAVVDALQALRGISMLSAVTLIAEMGDLTRFDKPAQLMAYIGLVPSEHSSGNTVKRGPITKTGNTHARRTLIESAQAYRLPARKSRAIRKRQEGLPEDVRDIAWSAQLRLCHRYRRMIAKGKNHNVVVTAIARELAGFIWAIARAVPVRV

SEQ ID NO: 84490 - protein, 403 aa, unidentified
MTGTTGQLAIGVLGGIDTHADTIHVAAIDTLGRPLGDQEFPTTPNGYRHALEYLVGFGDLQGIGIEGTSSYGAGITTAARDGGHHVREVIRPQRTVRRMQGKSDPIDAYQAARAVLSGQAHTMAKTDDVDAIRALLTARRSAVKARTAAMNQIRGMLITAPVEVREKYRSLSEQKLIDALAACRPATQTGVVLAVLTGFKMLAQRHQFLTAQSRELHAQLRELTAAANLALLSAKGVGPVTAAQLLLTAGGNPERLTNEGSFAALCGTAPVPASSGKTTRYRLSRGGDRHANAALHTIATVRWSSDARTKTFVATQRAKGRSNPEILRILKRAIAREIYKLLSRPNSVAAINDLRRTRREKNLPLRKVVEALGSSQIYVSRIERGLTHDNDFTHRYREWLNAA

SEQ ID NO: 84491 - protein, 346 aa, unidentified
MVSVYVGIDVHRKRSQVAVVDQGGKVALNRNVVNGQEMILKLIGGLPAGTPVAFEAAYGWGWLAQLLADYGFEAHLVHPLRCKAIASARLKNDKVDAAILAQLLRADLLPEAWIAPPGVRQLRALLRHRVALVRLGTMARNRIHAVCADHGYDRRASYWTGPGRGWLAELDLPPASRMVVTDCLAVIGHLAPLIEALDAQVHQHARADPRVPVLTQLPGVGEFTALVMLAEIGDIARFASARKLASWAGLTPTVRGSDLTVRHGHISKQGSAHLRWVLTQAAHTAKRSPQFAATYAAIARRRGHKIATIAVARKLLTRAYHLLATTQPPGTLASRHEPAARPRSSV

SEQ ID NO: 84492 - protein, 347 aa, unidentified
MQVSNERHGRDRMLTQFRGRAKAADGARVIFAYEASSEGYGLYDDVTDAGFECHVLAPSLMARSQKHRRSKTDRRDSDAMLDLLRAHVLAGNELPDVWIPDHRTRDDREVVRARIDAGCKLTSVKTQVKSLLKRNGFRRPKKLGKGWTRDYRAWLGGLSLFEERGLGLGARLALASYLRQIGSLETEIAHLDAAVCELAQTDRYREPVGALVARFKGVAGYTAMVFLTEMGDLSRFSNRREIGAYLGLVPSSDESGETTDRKGHITHQGSWRMRKALCQAAWSRIRTDERERIVYDRIVDKNPKHKKIATVAIMRRLAVQMWHVALEAQERAGCFCEAEPAPAAVGT

SEQ ID NO: 84493 - protein, 338 aa, unidentified
MLTIGLDLQWLISVICVLDETGQEAYIKTIRGRWDILLADLHKIKDPFKICFEASYGYGFLYDHLRQMPLCKEVVVAHPGKIRTSKRKNDRMDARKLAELLFFKRVASVHVPDIEVRSWRALIRHRCDAVQERGGLKNQIRALLRTHGIVPMRGLWTTPGRAWLADLPLPTSMALVHRDMLLTRLDALSAIIARAETELNAVARRHPGVQLAMAAPGIGVRTAEAMVAQVDDPRRFSYSKAAGAYFGLIPCLDESAGKGRFGHITREGPSQIPKFLDEAAWVAVRTSPEIAARYQRLLRNDPNRKRIAIVAIAHYLARVVVSMLHSGTAWDPQRAAAA

SEQ ID NO: 84494 - protein, 304 aa, unidentified
MRVSPCLPWACKPATEQGATLTTTVPNPDSRSGPSPHLQSRVMEKQPTLFVGIDVSKDRLDVHLRPSDEAFHVPRDVKGFEALTRRFSTRPVALVVLEATGGFEASVAAALAAAGLPLCIVNPRQIRDFARAMGRLAKTDTLDAEVIALFAERIRPPARPLPEPERSQFAELVSRRRQILGMINMETNRRDHAVDGQLLRRLSRHIAFLERELSEIDRDIGQAIKAFPVWCETEALLKSVPGVGDVTARTLLAQLPELGTIGRHQLAALVGIAPINRDSGLMRGRRSIAGGRTSVVSVVLRPRP

SEQ ID NO: 84495 - protein, 365 aa, unidentified
MAEITRSAVARVGVDLSKRVFQVHAVDRGGRVLVAKPMSPERFFAWCAELPVGCLVAMEACGGAHHVARRLRLLGLDARLIAGHFVTPYRMAGRSGKNDANDAAAICEAAGRPHMRFVPVKTAAQQGQLAVHRLREGFKEERTALINRIRGLLTEFGLVFPQSPEALRKVLAEVIEDGANELPGVARLALQRAHLHWIDIELQMSWCDERIASHVRSDDRAKAAATLQGIGPVTASALVASVGDFSQFDNARQFGAWLGLVPSQNSTGGKASLGRITKRGDDYLRTLLIQGAKSAVMSAGKRTDRISRWLVQFKERVGWQKAVVALANKNARILWAVLTRGVAFNPDHIPEPPAARCCLRPQPAA

SEQ ID NO: 84496 - protein, 369 aa, unidentified
MGAALHGVRWPPDPVRGARRPLPLRQQPLVSLGTACCSVTHDRTVARLSIAWTRQVTVTDLICGVDVCSAALDVRLGRDGAMRRFTNDSAGITELIAFCKEHQVGLVALEATGGYERLAFAMLWSAGLATAIVNPRAVRRFAEAMGFLEKTDRIDSGIIAWFAEVKRIAPRQPDGAAQRQLAALVTRLRQLTELRTAQDNQRRLVTEPAALASFTELLSLVARQIKAIGEQIGKLIATDPLWHKLDLAWREIKGVADRTVARLMAELPEIGTLSSKAVSKLAGLAPIARDSGKLSGNRSVRGGRSGIRSILFVVAELVRRHNPDFADFHRRLTLAGKPKKVIRIALAHKLLVRLNAKARDVRAQLPCSA

SEQ ID NO: 84497 - protein, 337 aa, unidentified
MDHFAGLDISMDETCVCVLDREGVVVHESKTASTAEAIAKELAKAPSCRRIVFETGRMAPVLYHGLSQLGLPVICVESRQAYQALRSLATHKTDRNDARGLAHLARTGFFKPVHVKSLPAHAIRSLIIARKKLVGQRVTLENQIRGLAVVFGVRLPRALTAAFIEKALKASEGVAGLSVALRGLAAARAAVMAAVAAIDADMRRMVRASAACRRLMTIPGVGQLTALAFVAAIDDPSRIRRSRDIGAYLGLVPRRYQSGEVDYVGSISKCGDRRVRTLLYEAANVMLTRYKGQLKLKDWAFAIARRSTMRKARIALARRLAIIMHAMLRDGTEFAPA

SEQ ID NO: 84498 - protein, 386 aa, unidentified
MSQTVAALIPAAVDYERTLVLAIEVSNKSWVLAAQVPGLPHTKAKRTIDPEAEALLAAIAGYRSRIATGRSIERVIAVYEAGWSGFWLARWLMRHGVEVYVVQPSSVPVDRRTRRAKSDGIDSELLLRTLLAWLRGEPRVCSMVPVPDEADEDARRCVRERTELISERVGLTNRIGAVLATLGVGDYNPLLRNRSLRLVELRTALGEPLPANAHAKIKRLLARLELVLTQIAELERERDAVVETEASDQASKMIQQLTALRGIGVQSATVLVREAFVRRFANGKALGSYAGLASSPYSSGGIDREQGIGKAGNRRVRTVMVELAWLWTRYQPAAAQVCWFRERVGSTGRRVRKIMVVALARKLLIALWRFVIDGVLPEGAVLKPAA

SEQ ID NO: 84499 - protein, 342 aa, unidentified
MDIEVLGIDLGKTVCSLAGLDATGAVVYRKRLQRHRLLDLLEGLDPCVVAMEACGGAHHIGRFCLEHGHEPRLMSPLYVRPYVKVHKNDDRDAEAIAEAATRPTMSFVAIKSEEQLDLQALHRARERLVTERTRLINQGRGFLMERGIRVGTGRHVFQKELVRLVATGTADLSHRILSMLSDMMAELATINDRVEAIDTEIKALAKADADMQRLMEIPGVGPTIASALVAAVGTGSSFAKGRDLAAWLGLVPRQITTGGKAKLIGISKHGNRYLRKLFIHGARTVLHLVRNRTSPITQWADGLKERAHVNVAAVAMANKMARIAWAVLTKGERYRPVALVGT

SEQ ID NO: 84500 - protein, 387 aa, unidentified
MQKPHDDSKACPTAFIQDTTLVAVVEMSLSSWLVAGMIPGVNREPLKKIDPDAEELLRLLYRWRDEAIAVGKEVTRIAVAYETGRDSFWLARWLRARGIDAHVIHATSVATSREHRRAKTDRIDTAMLKRGFLGWLRGEPGHCSMAVVPTVAEEDAKRPHRERDALVRERTSIVNRMKSILIQFGVRNFKAGLRKASEKLDAIRTPEGIPLPPNAVAALRRYMERFRLINEQIKAVEQTRLQRLERDPADKMNATVFLLVRIIGMGVETAEQLVHEILFRNLRDRKAVARYAGLTGSPDESGSKRRQKGLSRSGNGRVRNILIQLSWRMLKFQPESVLVLWFKTRTESSRGSRKPMIVAFARKLIIALWRYVNTGAVPEGFALRSTA

SEQ ID NO: 84501 - protein, 423 aa, unidentified
MSPKKENNSTVSVVHPICCGLDVHKNTVAACLLRSGENGREYPEQKEFGTFTDDLIMLREWLLAHDCPVVAIESTGVYWQAVHNVLEGYHKVVLVNPKHIKNVPGRKTDMSDSKWLAALLRHGLVKGSFIPAKQQRQWRDLTRLRKSYLQAVGDFKRTVHALFHSANIKIDSVASQLFGATGRNLMRLLCTSKSNLSLTEVESCLCGSLVEKAQELYRSVHGFFREHHRGQLIILLQTIDGLEKQIAKLDRKIREAMRDHQELLKRMKEVPGISDIAAPAILSETGETLADFSTAAAFASWCGLCPGNNESAGKRRSGRIRVTRNHLKTLMVEVAWAAVKKRGSYYKDKFYRLKGRLGPKKAIVAIAHRILKAIYHIIKDGVPFKDLGENFIIEQNRDAKLKYLKKQAKLLGHELIPIPKQLS

SEQ ID NO: 84502 - protein, 381 aa, unidentified
MKVEIDYMKALHDRTILGKSQAPRKERRCNMANYKLGCDVHKRYSQIAVLDEAGRVCQRDRLVHTPEILQGYFSQFPVGTPVAFETVGNWYWIAEAIEAAGCEPLLTHAAKAKVMMGNVNKTDKLDAEGLATLLHLGKLPTVWIPDAALRDERELLRTRMFLSKIRTGLKNRIHAALSKYALVIEDSDIFVGQGYEHLKRKLLELPTQTYACVAQELDLLDQVQKQIDLLEKRIHQCVQDTPATTLLKTLPGFGKVFSALVAKEMGRVDRFPDAEHFASYAGCVPKVSSSGGKTHYGHLRKEANHYLKWAFIEAANVIVTHRNRPSWRNKHVVRLYERTRQRKGHAVAVGAVARHLAEAAYWMLKKNQPYREPTSDLPRQA

SEQ ID NO: 84503 - protein, 337 aa, unidentified
MKITLIGIDLAKNVFQVCGVNQAGKSVFNRAVKRAQLLSFLAQHPAVQVAMEACSGSNYWGRTLQRLGHKVLLIPPKHVKAFVTGNKNDRNDAFAICEAANRPRMVFVQPRSIEQTDMILAHRARERLVGQRTTLINQLRGLLQEYGIVLAQGKEKLRNQLPDILEDAENELSMAARACFQQMLNEWAQLDESIAGHERSIKRQCKETAACQRLTGIKGVAEITATALVAYAGNGAQFHSARHFAANLGLVPREHSSGGKQKLGGITKRGNSYVRRLLVQGAWSIIRHLDRSSDRLSEWAKQLIQRRGKHVAALALANKLARISWAMLYKQQDYKAV

SEQ ID NO: 84504 - protein, 310 aa, unidentified
MDAIYVGIDVSKDRLDVHVRPSGEAFAVSRDGKGLEELVDRLCTAPPTLIAIEATGGFETIAAAAIAGASLPLAVLNPAQVRHFAQAVGKRAKTDPIDAEVIARFAEAVKPEPRPVPDAQARLLAELVARRRQIIEMIVAERQREKRVENVRVRKSLARTIRTLEKELPEIDGDIDTLVRGSPAWREKEDLLVTFPGVKNTLARTFLAEVPELGRLTRREVASLAGLAPYTRRSGRWIGKSMIGGGRAPLRAALYMAALSAIRCNPVLKGFYQRLLSSGKPKMVALIAVARKILTILNAMLRDQKQWQPA

SEQ ID NO: 84505 - protein, 406 aa, unidentified
MLRVGIDQASQHHDVCLAPEGQAPSYLRVPNDADGLEELLTAIRRLEPNPAQVHVAIEGSGQGLFVAALLAAGFRVYPVNPKAVDRYRDRLSPAGSKDDRRDALVLAEILRTDRHRLQPLRLESDILRQLRVAYSHHQTLVEERTRLLNQLTACLRAYYPRALELFADLGRPVAWTFLRAFPTPAHFARARRSRIEKLLRQHRYPGVAAKTAELLELARKPQLPADPATVALWARRMLFLVDQLEAVCRELEACHEQLETLVQAHPDGDLFRSMKGIGTVLAAGMITVFGEDRQAVPSVRPIQCRSGTAPVTVRSGKTIRVRFRHACNKQARNTLQLLAQQLVLHHAWAREIYQTHRDRGRHHHEALRIVAHHALRVLFAMWRNRQPYDPTRFEAARRQRQQPKAA

SEQ ID NO: 84506 - protein, 413 aa, unidentified
METLVERCAGLDVHKDSVTACVRVPDGHGGRQVETRRFTTTTAGLMVLAEWLASFGVTRVGMESTGCYWKPVWQLLEGQVECWLLNAAHLHNVPGRKTDVADAAWIAQLVEHGLVRPSFVPPRPVRELRDLTRYRKTQIQERSREVQRLDKVLQDAGIKLSSVATDVLGVSGRAMLEALVAGTHDPEVLAALAKGRLRTKLSALREALAGRFRTEHHGLLVAQILAHIDYLDEAIALLSQRIERVIAPFAEQVALLDTIPGIDRRAAEVIVAEIGPDMGQFPTAAHLASWAGVCPGNNESAGKHRSGRTRKGSKWLGGCLSEVAKAASRTKGTYLNAQYHRLRGRRGPGKATMAVAHSVLVIAYHVLDQGVPYQELGDDYFQQRHSAEHYQRQLVRQLERLGHQVTLEPIEVA

SEQ ID NO: 84507 - protein, 376 aa, unidentified
MHGGRTMKKYSEAFVGVDTAKKKHAVAIADAGRDGEIRYLGEIDSSPETVARVIRKLADRYETLHVCYEAGPTGYGLFRDIRALGQDCIVVAPSLIPKKPGERVKTNRRDAVTLARLLRAGELTSVWVPDAVHEAVRDLVRAREAAAEDFRKKRQQLLSFLLRHGRIFMGHKHWTQAHRRWLAGQKFERPAQQIVFQDAIDAIEDATTRAQRLEEQLALIVPSWSMAPVVAAYQAMRGVSFVVAVTFAAEIGDVRRFDNARQVTAFVGLVPSERSTGESVRRGGLTLAGNRRARRALIEAAWTYRYPARVSKVLQTRIEGLPKAVREIAWKAQIRLCARYRKLIAHGKKKPVAVAAIAREIAAFLWAIARHVAPAA

SEQ ID NO: 84508 - protein, 451 aa, unidentified
MSRRSNKPAGLPVIHDRAAGIDIGARFHVVGVPPELCDEPVQTFQAFTGDIERMADWLVSLDIETVAMESTGVYWVSVFEVLQGRGIHVIVVNAREARSVPGRKSDVNDAQWLQRLHSCGLLRASFRPERDIAALRAYLRLRERHLDYAAAHIQHMQKALTLMNLQLQHVVSDVTGVTGMKIIRAIVGGQRDPAVLATMRDVRCKASTETVRAALVGNYQPEHVFELTQALALYDFYQERLCECDAEIERTLVELSADKQGPAEPIPKPRHKTVQPNAMNFDTRPLLYQLTGVDLTQIHGIGPYLALRLVAECGTDLSKWPTAKHFTSWLTLAPGCKISGGKVLSAHTRKTTNRVSAHLRLAAVTVGRTNTALGAFYRRLAARVGKAKAVTATARKIAVLFYNAMRFGMTYQDPGADHYERRYKERVIKQLHRRAAEFGFTLQEAASQGVS

SEQ ID NO: 84509 - protein, 457 aa, unidentified
MKTTRLKKAKVNKSNDKMITMPTVNPHAAGIDLGSKSHFVCVAQDNVKEFGVFTSDLHAIAEHLKSYGVKTVAIESTGFYWRSIYLVLLDYGFEVFLVNAAHLKNVKGHKTDVVDSRWLQLLHSIGLLSNSFQPDALTHELRTYTRHRKNMITDASHLISKMNKVLVLMNIQLHGVLRNITGESGLKVIRAILQGERDPKILSSLVSLRVKASREDIEKALTGDIRKEYLFELGHCFQLYNFYWQKIEEADKQIEAWLKEHVTNLPPNDGYKRPKNKVRGTNDPKFNVGQYVHRLTGGIELLDITGVGSNTILTLASETGLDMSKFPTPKHFASWLGFVPNRKVTGGRVISSHTRKKTNPLAKVIRDAANSAGNSKSKLGDFFRHLAYRKGRTAAIGATARKIAVIIHKMLTEGKPYSYEYAQEQTEYLKVSKLKNIIKTMDKFNISKEELQLALSM

SEQ ID NO: 84510 - protein, 358 aa, unidentified
MKIVGCDYHPGHQQVAVLDTLTGEVGEWKLGHGGGEAERFYRELEAPALIGMEAVGNTLWFERLVERLGHQLWIGDAAKIRACYVRKQKTDRRDAGHILRLLVEDRFPRLWVPGEQQRDQRQLLLHRHKLVGMRTRIKTELQRGSRQAVFACWGVEHLALNQGLQQKRHLWTKDGRAQLARLPLEGWTGRRRGDLLALLSMLESQIEQLDGAVGAAAWGDAQARLLMTQPGVGPVTALAFVLTLGEVSRFARSKQVASYLGLIPSERSSGSKRKLGAITKQGNPFLRTLLVEAAQSAVQHDQQFRKEYRHRCHGKPKGVAKVAAARRLAVRMYWMLRTQTPYPQVAHFEGSPSHFVVG

SEQ ID NO: 84511 - protein, 341 aa, unidentified
MKITTVGIDLAKNIFAVHGVNEHGRTVLKKILKRDQVAAFFANLPACVIGMEACASAHHWARKLQGMGHTVRLIAPQFVKPYVKTNKNDAADAEAICEAVARPNMRFVPVKNIEQQSVLSLHRVRQGFVRARTAQANQIRGLLSEFGIVVPQGIAHLVRRVPELIEDATNELTGSFRLLIERLMDHLKGINRQVRELEAQIQAWHRRDGASCKLASVPGIGPLTASALVASIGDATSFKNGRQLAAWLGLVPRQNSSGGKNVLLGISKRGDTYLRTLLIHGARSVMQAARRKECKSGWLHDLLQRRNANVAAVALANKNARVVWALLAHGGEFRRDHQATG

SEQ ID NO: 84512 - protein, 346 aa, unidentified
MEHHVGIDVSLELSSLCVLDETGKVIREAKVASEPEALVAFLRGLGLTIVRAGLEAGPLSQWLYDGLQAAGFEAVLLETRHVKAALSAMAIKTDRRDARGIAQLLRMGWYRPVHRKSVPSQEVRALLAARKQMQIKAMDLEQTLRGLLRGFGLKVGDVSRGRLAARIRELVSGHVMLERIAEPMLTAREALWREFAKLHREVLAIVKEDQVCRRLMTVPGVGALVSLTYRAGVDDPGRFAKSKSVGACFGLTPKRYQSGETDVTGAITKVGDAGVRTALHDAANALLTRATKFSTLKRWALDVAKRRGMRRAKVALARKLATVLHRIWADGTEFVWGKDPAVAAAA

SEQ ID NO: 84513 - protein, 356 aa, unidentified
MSSNIKYIGLDVHKEAIVIAVLNDAGKLVMESIIETKAATLVQFLQGLRGELHVTLEEGAWAAWLYDVLQPHVHELVVCNPRRNALLKEGSKSDKVDARKLAELLRAGMLRSVYHGENGVRTLRELARSYQTISKDLRRVMNRVKALYRSWGIPCAGTRVYAPRDREQWLNKIAHAGVRRRAELFYQHLDGLQVLRRQVRSEFLAESRKHTAVKVLRQIPCIGPIRSAMLLALMQTPHRFRSKRQLWKYSGLGVETHGSAQHRYVEGHLQRSKKPSQVRGLNQDHNHEMKEIFKSTAISASRCAGPFHDFYAGLLAKGMKPEMARLTLARKIAATTLTLWKKGGRFDAEYLKPQAA

SEQ ID NO: 84514 - protein, 411 aa, unidentified
MDRVYDKCCGIDVHKKLIVACFKQGNRQEIRDFGATTRELLEMADWLKKGGCEMIAMESTSSYWKPLYNILEVCELNVIVVNARHMKAVPGRKTDVKDAEWIADLLQHGLLTASYIPDRDQRELRELVRYRKSLVGERNRELNRLQKMLEGANIKLSGTITDINGKSARNILEHILSGKKMDSAEYDILYQQKVIAHNLKATKEQIIDDLNGVMSDLQKKMMRILLNHLDELNAHIRELDDDIDNFMKPEEKRAAEVIQDIPGIGNTGAQAIISVIGTDMERFPTDAHLSSWAGLCPGSNESAHKRKSGRTTKGNALLRDTLVVCAHAAVKNKTSYFSAQFARISAHRGKKRAYVAVAHSMLVAIYHILKDGVVFNDLGADYYNQFNRERKINAYLKKLKALGCEVPVVAA

SEQ ID NO: 84515 - protein, 373 aa, unidentified
MNKSSTVFVGMDVHKDSIDIALAEAGARDEARHWGVVGGDMAALDRAVRKLVSLGRPLHFVYEAGPCGYWIHRHLSGKGFACEVVAPSCTPKKPGERIKTDRRDGMKLARLARAGELTRVYVPDAYDEAMRDLMRAREDAVYAQRRARQQLKALLLRNEIRYAAKTSWTPAHVRWLSRLKLPQPQQQIAFQEYLETVTEAGARVARFERAIDEQLPHWRLYPLVLALQALRGFRTIQSATIVTEIAGIERFERARSLMGYLGLVPSEYSSAESRTQGRITRTGNSHARKALIEAAWQYRLPARVTPIIARRQNDLPKPIRDLAWRAQLRLCGRWRKLAARRLPQNKIVTAIARELAGFVWAMAREVSSLTHQP

SEQ ID NO: 84516 - protein, 322 aa, unidentified
MSDVARQWVGIDVAKATLDVQVRPTDQAWSVANDEAGIRTLLEHVRAAAPTLIVLEATGGYELAVTSALAAAGLPVVVVNPRQVRDFAKATGRLAKTDRLDAAILARFAEQVQPTARPLASEDQHELDALLTRRRQLIEMLTAERNRLGQVFVKRGTRVKKSLKAHITYLERELRIADTDLGDLVRRSPVWRERDELLQRAPGVGPVLSLTMLAELPELGTLDRKAIAALVGVAPLNRDSGTLRGKRRIYGGRAPIRAVLYMGALVATRHNPVIRAFYQRLLAAGKPKKVALTACMRKLLVILNAMVRQRASWSPALAEVTS

SEQ ID NO: 84517 - protein, 319 aa, unidentified
MAQNDSVVAGVDVSKDKVDVCIRALALQQTWPSCAQGHRKLIAWLRKHQVNKAVMEASGGYEGDWAKVLREAGIEVRIVDPKRVRSFADSAGRWAKNDAIDAQMIAWFAETFREAPGQVHDAVHEELVALVKARIALVDLKMRLVAQSTHAASGPVQKARDRVLKSLVGEIAKLEATIAATVYATPDLAERAEIIASVPGFAKTTSANLVAGMPELGQVSNEIAAALMGLAPYDDDSGNRRGERHIQGGRRWVRNAIYMPCVGAATLNNPVIKAYYDRLIARGKKPKVAIVACMRKLIVILNTMIARHQKWDPSRYALG

SEQ ID NO: 84518 - protein, 408 aa, unidentified
MNPLYVGIDVSSKNNVIYLMLPNGDKHSSFSLANSHDGSTQLVKRIFAAMTSNNIDSVLIGLEATSVYGDNLVYFLKEDTTLASFDRKIHVLNPKQVNKFKESYNDLPKNDYVDAFVIADCLRFGRINKEVYMDDYRYKALQNLTRARYFAVTNLTKEKQRFINVLFKKYSTMTQEKVFSDTFSTTALAVYEKFESAETLAKMDLQELTAFIMEKGKNRFPDPDAVAKALQKAARSSYRLPKTVNDSVNQVLAISITSIRSLESQIKAFDKAITKQMELLPNVLISIPGIGPVLSAGIMAEIGDINRFQNQAALAKYAGLAWQQHQSGDFEAQTTRMIHSGNRFLKYYLCEAAFSLVRCDKEYSRFYHLKYKEVNRFQHKRALALTARKFVRLVFALLKDNRLYRPAE

SEQ ID NO: 84519 - protein, 352 aa, unidentified
MTSMTETVTVVGGVDTHKDLHVAAAIDRGDGALLGTAEFSTTRSGYRALLRWLVTFGELEAVGIEGTGSYGAGVARFLTEAGIRVFEVDRPDRSDRRRRGKSDTLDAEMAARAVISGRRLSAPKGKNGRVESLRVLRLTRSTAVRSRVKALQLLRNHAIAAPDEVRDQVRSLTRMQMIRTVAAWRPDYTDYDHPATATRIAMRSLARRILDLNDEIADLDDLIAPLVTQLGAALMTRPCIGIETAGQLLVTAGDNPDRLRTEAAWAMLCGVAPLPASSGMTNRHRLNRGGDRQANRALHMIAISRLRTDQRTREFAERKLAEGKTKLEVIRCIKRYIAREVYTLLKTTNTTD

SEQ ID NO: 84520 - protein, 278 aa, unidentified
MANLNQFCDFTKLIGIDIAKSVFQIYSCDTQTGEITNVQIKRDKVLESLTNCGKCLIGMEACGSSQYWARKLQALGHTVRLMNPKLVKPFVRHNKSDKADAEGVYHALVSGVRAVAVKTETERDIQTLLTMRALLVKQRTARINHVRGLLAEYGYVMPKSVDQFDKKVDACINSLEGDAVQLVIDMLRDTVKSIRDEHDRIKTLQREISRLANQTRNAKHFLTVPGIGETIMAYMCVLLADPTQFSSGRQFAAYLGLVPMHTGSGGKTVTTKIPRPMR

SEQ ID NO: 84521 - protein, 351 aa, unidentified
MNKVSTLAANGNGENIPTVIGIDLAKNVFALHAVNRHGKPVLVKPQIRRDQLLEFLAQLPPCIIGMEACSGAHHWAREMITLGHTPKLMAPKFVIAYRIQGKRGKNDANDAAAICEAVTRPNMRFVPVKTVDAQSILTRHRVRQGFVEERTATINRIRGLMSEFGIVLPQRAEVIRKQAQLAAEKMPSWAASAVYDLLAHLLTLDMRVSEYDEHLKCMANRDERCKRLMALTGIAHITATALVASIGNGHDFKNGRQLAAWLGLVPGQYSSGGKVKLGHITKAGDRYLRTLLILGARAMLANAVRKSDRISRWAIALQARAGYGKALVAIAAKNARIAWALLAKGEAVEPA

SEQ ID NO: 84522 - protein, 309 aa, unidentified
MPAINYVGVDLSKPEMVVDLSAEAKPRAFSNDANGHAALLAALPADAHVVCESTGGYQSALVRALQKAGVPVSVVLPGRVRAFARARGLRAKTDPIDARLLTAFGQAMAPAAAAPLSNAHDELQQLARARRDLVAQLNDEASRTEHFTLPCLQQQAQERRALLQRQIRDIEKRLRALIAADPAWRWKAERAQEVCGIGEVSAWTVLTELPELGQLERGEPAGLLGVAPDPQDSGPRRGHRHISGGRSHARKVLYMAALTASHHNPVLAPFYQRLVARGKPKLVALTAVMRKLIELLNRLLADPHFKLAQ

SEQ ID NO: 84523 - protein, 389 aa, unidentified
MQTARKTATHTIAPVECGAIFVSLELSRSFWLVTALATPVGSKMSRHQVRGGDMSGLLERFSDLQRNVQRRTGRVVPVIVIQEAGLDGFWIHRALVTEGIESHVVDPASIAVSRRQRRAKTDRIDGEALVRTLMAWRRGEPRVCSMVCVPTPGEEDRRRVCRELKTLIGERIRHVNRLKGLFFAQGIDGYEPRNKDRRERLEDLRTGDGRELPKHLKALALRELEIIELLNQQIEAVKAERNALLEKAPVSGSAPEPVRMLLELKGIGAGFAGALWSEGLFRQFANRRQVAAYAGLAPTPWKSGTINHEQGVSKAGNLRLRAIAVEMAWLWLRHQPDSALARWYYERVRRLGPRTRKVTIVALARKLLVALWKYATRGVVIEGARTKTA

SEQ ID NO: 84524 - protein, 304 aa, unidentified
MKIIGVDLHARQQTIAMLDTDTGEMVEKTLEHQGDELRKFYSALPGPVLVGIEATGSMQWFLQLMEELGIECRVGHPAQIRKAETRKQKHDRRDARLLLRLLAENRFPTIWMPSSEQRDLRTLLRHRHQWVRMRSRLQHTLQSMALNQGLRLGHSLWSQAGQQALQALPLAPHAAHRRAALLALYPRMQESIEELDEQVSEQVQQRPAARRLLTHPGVGPITALATEVYLGDPLRFADGKAVASYIGMIPSEHSSGGRQRLGAMSKQGNALLRYLWCEASMRSFLLPSFSRAFFRGSQTKTFAT

SEQ ID NO: 84525 - protein, 342 aa, unidentified
MQIAVLGIDLGKNSCSVVGLDTSGRVVLRRRLQRDGVVKLAAGLPSCLMAMEACCGAHHLGRKLRDQGHQVRLMSPEYVRPYVKAQKNDDRDAEAIAEAATRPTMRFVELKSEEQLDMQSLHRARDRLVGERTALINQLRAFLLERGITVPQGRRKLELSLETLLAADQALVSPRTRLLIEDLRAEWCELDRRIQAFDEEFAHQARTDETARLLSTIPGIGPLNATALAAAIGRAETFERGRDLAAWLGLVPKQMTTGGKPKLLGISKRGNVYLRKMLIHGARAVLPTLSKSETRLGEWLRGLLARAHVNTVIVALAAKLARIVCAVLRSGQQFEIKATAMS

SEQ ID NO: 84526 - protein, 337 aa, unidentified
MKFSGIDLHSNNAVVAVIDDQDRVLYCKRLTNDLGLIVAALAPYQAELEGVVVEATFNWYWLVDGLMAAGFAVHLANTAAIKQYEGLKYAGDERDAVFLAHIFRLGLLPEGYIYPPQERALRDLARKRLQLVQQRTLHILSIESLLARQINLRMNGEHIQRMDDAAVHALALPPHVERAMMANMAVLRTLCSEITALETILRQEAQLRPEFETLKSTPGIGNVLAATIMLETGTITRFADVGHFSSYCRCVDSKRISNGKKKGEGNVKNGNKYLAWAFIEAAAVALRCCPQARRFYERKKAKRLPVVAMKALAHKLARAAYYMMRDGKPFEVKRCFS

SEQ ID NO: 84527 - protein, 349 aa, unidentified
MTTLTPPRAAVIGGVDTHDDVHVVAVCDPLGAVLATRSFPTTPSGYRGLQRFVASFGEVEAVGVEGTGSYGSGLARHLTSEGVRVVEVNRPNRQVRRAHGKNDTVDAIAAARAVISGQATVAPKSHDGTVEALRSLQIVHRSAYKARTQALNQLHSLIVAAPEPVRGQLRDLPRRQMLATAQSFRPGDRDDLVSVAKLALRELANRVADLDAQIARVATRRRRLLTQTAPQLIAITGVGPDTATTLLLAAGDNPDRLTSQATFAALLGASPIPASSGKTTRMRLNRGGDRLGNAALWRIVITRMATQPDTRAYVERRTKEGLSKPEIIRCLKRYVAREVFNALPRELLP

SEQ ID NO: 84528 - protein, 393 aa, unidentified
MICVGIDVAKDKHDCFILNSEGEVLADVFTIQNNAEGFDRLLQTIRRCTRPEDKIKVGLEATGHYSYNILGFLLDKGLDTYVINPLHTNLYRKSLSLRKTKTDRVDARTIAAMLMSDVDLKSYTDTAYHNEELKSLTRYRFDKVRERAKLKQSVSRLVTILFPELEKLVPTLHMASVYALLSEFPGAKQVAEAHLTHLKAVLYGASKGRYGRDMATTLRDAARCSVGSVMPAKSLELQHTIRLIRELDAEIEDIETAIQSMMDEIQSPITTIPGIGVRMGAMILAEIGDFSRFDSPDKILAYAGMSPSTYQSGQLSLSGAYSHMEKRGSRYLRYALYNATKHVCHWDPTFAAYLAKKRAEGKHYNVALSHAAKKLVRLIFAMEKSQRPYCAAA

SEQ ID NO: 84529 - protein, 443 aa, unidentified
MQQPVEVHVEEHEQMVERVAAVDVAKASGMVCLRTPHETISQRRVTKVWPVAATTAALVELGDHLRCERVTRVVLESTSDYWRPFYYLLEAAGLTVWLVNAAQVKNVPGRPKTDKLDAVWLAKLAERSMLSPSLVPTEAMRQVRDLARARFDLVEDRTRVKQRIEKLLEDALIKISSVLTDVLGVSGRAMIEALTAGQRNPTVLAELARGRARRNRAALQRALHGRFTEHHARLARLLLGQLDELSARIDEVTGLLDAAIRALPTPTPTAGAEDNPAPAGYDSAGTRLCAVPGGGPDSVRAVLGEIGLDMSVFGTSARLCSWARVAPRTVQSGRRNGRARTGKGNPYLKSALAQIATGAAKTDTFLGERYRRLIKRMPKAKALVALQRSILVIFFHLLNDPTAEYTDLGSDFYTQRIDRARRTTHLLRQLHALGYTVQLIEAA

SEQ ID NO: 84530 - protein, 422 aa, unidentified
MKNNAARKLRQVPEGYLIIGVDPHKKKHAAVAITQDLTIHDRFKVDNTREGLEFLLRRVNTVMVKSGCRGIMFAIETGGHYWRNIAYYLDERGVPFRFINQYTLKRRREGKDLNKRKNDYRDSEVAAQLLCTGEFVESGIPQGVYAELRTAHNAYRRLVKERTRITNLVKGLLDALFPEFVRVFKDPCGLTSLSVLSTCSTPGIIAGMTEEEFIAAIEAAHHGRRLMRKKLGELRSVAKSSIGIEAGAHSVSVEIAFLIEKQKLIKGQIQTIERTLIKLVDASEEGKYLLSIRGIHYIAVAGLLAELGCFKSYRTAKQMIKMAGSNPTESESGGKRRSRTPMSKQGRPVLRYCAWTSVIPILRLNPDFRAWAKERRERPAHANPLNGREVVGAALNRLLRLCFAMVKNKTYYRSPHLVQVSS

SEQ ID NO: 84531 - protein, 331 aa, unidentified
MKLKTITIDLAKNVFQVCGVNQHIKPQFNKKLKRNELLDFMRQQLPTVVVMEACYSSHYWGREIAKLGHDTKLIPAQHVTPFVRGNKNDHNDAFAIAEASQRAHIRFVPVKSEHQQEISCFHRIRERLIKNKTTMSNQARGLLSEFGVVFPCGHKALLNGLTSVIDNPQYSHRLQDMVIDMLSEYDITLNRLKGIEKQLGEFVDASESGKILRSIPGIGVINASALLAAIDKGQAFNNPKEFAVWLGLTPKQHASGNISKMGGITKRGDRYLRKQLIHGARAFVSRAAKSTDPLALWATKLRVTKPFNKVAVAMAHRLARLIWISDLPHPL

SEQ ID NO: 84532 - protein, 337 aa, unidentified
MTQLTRMGIDVAKHVFQLHGVDERGHTVLRRRISRAQLRPFVAQLRPCLIGVEACGSAHYWARELKTLGHDVRLIAPQFVAPYRTKDKNDGNDAEAICEAVGRPHMRFVPVKDVGQQAVLTVHRARQLLVAERTALVNQSRGLLAEYGLIVPAGVGALRRALPALLETPELPVLAREVFADLADRLRALDERITHYDRRVETVARQTEPAQRLMQVPGVGPVTATAVVATVGDARTFKNGRQFAAWLGMGPRQHSSGGTRRLGRITKRGDVYLRTLLIHGARAVMRQVARRTDATSRWVMALTARRGFNKAVVALAAKQARVLWALLATGRPYVACP

SEQ ID NO: 84533 - protein, 330 aa, unidentified
MKPTVASEQVRQAIVGIDVAKAKLDVALKLASGKWRSKVVANTGTGFQELRSWLAKHGVSCAHVCMEATGVYWEALAADLADHGFAVSVSNPAQIKAFGESRGARTKTDQVDARLIGEFCAERAPVLWQPPSKSVRRLRALVSRREALLDLRTQESNRLEVAATQEVSSSIQTVIAHLDEQIARIERQIKKDIDGDPTLKAQRDLLDSIPGVGEKTISMFLSHYGGELRFGKTRQAIAFAGLDTKKHESGTSVKGKPRLSKMGHSQIRRGLYMPAVVAMSKTAWGKAFSSRLLAAGKPKMLILGALMRKIVSIAYGVLKSGTPFNPALHA

SEQ ID NO: 84534 - protein, 420 aa, unidentified
MKEWKEITHYAGFDWARDHHAVVIVNSQGEIVADFEFEHSLEGWNKFREKTTAWPNLAIAIETNQGAAVDQLLQRDYTVYPVNPVASESYRKRKAPSGTKTDHFDGWGLADALRVDGQAWKTLQPMDPLSQQLRLLCHDEVALIEQRTALVNQLQQALVEYFPAALKAFDDWICPFTWDFIIEFPTPQALVKAGKRRWEKFLHTHRLWRPDTAAKRLEIFAQADHFKASDPTTRAKSQLAGTLCKLLRTLQQQLNEYRKQIEALFQSHPDRDLFASLPGAKKVLAPRLLATIGTDPERYGSHQVLQCFAGTAPVSYQSGQISKAKIRWACDKFLRHTVHLWSDCFRKASVWGQTYYENKRKQGMSHACALRCLGQRLLKIVFKMLIDKKPYDAELHARNQKKHGSWVLDLVNETAATKTR

SEQ ID NO: 84535 - protein, 340 aa, unidentified
MVDISIIGLDLAKTVFQVHGSDTDGLPLFNKRLSRSSVLKFFSEKPPCLVAMEACASAHYWGREIGKLGHEVKLIPPIYVKPFVKRQKNDAADAEAISEAASRPTMRFVAVKGEDQQAACMVFKTRDLFVRQKTQLANALRGHLAEFGVIAPKGIVHLKRLAVVIEEDTGLLPASVLEYAGMILAQISALQEKIDQLEKRVQEHARGNDITARLMTIPGIGPITASALCAFAPPAETFSKGRDFSAWLGLTPKQHSSGGKERLGRTSKMGQRDLRRLLITGAMAVVRWAVRRGPEEGSWLARMLERKPRMLVAVALANRMARIAWALMANGGSYKEPVAV

SEQ ID NO: 84536 - protein, 338 aa, unidentified
MSLYAAIDLHSSNSVLAVMDGDGKPVLRCRRPNDLPRLLSDLAPYRDELVGVAVESTYNWYWLVDGLMDHGYAVHLVNTTAIPQYDGLKHGDDDSDALHLAQLMRLGLLPEGYIYPREQRGTRDLLRRRFSLVRQAVRLMLSIQSSFSRSTGQQLSANKVRQLSPSQLVDLFPDLSTRYGVLIQFKLWLTLQDQITALERWIRKDLTRPDLLVRLQSVPGIGPILGMTILLESGVIERFASVGDYASYCRMVESVRLSNGKRKGHGNRKCGNRYLCWAFMEAANYAVRFDPRIRRWYERKRARKHHVVAIKAVAHKLARACYHMLHEGTTFDLNRAFG

SEQ ID NO: 84537 - protein, 417 aa, unidentified
MQVVRPICCGADIHKDIIVATIATSNQNGIAEYIQRKFCTQNYDLINLKSWLKEHNCFEFAMESTGKYWIPIFNVLEDEIKVYVVHPKYTKSIKGKKTDKKDSKWIAELFRHGILTFSFIPPREIRELREISRYRIKLVAMRTSERNRYQNAMTVSNIGLASILSDPFGKSSKAIMEEVLKSSSLSEGKIRSLLNKSAKKKAKEVFASLEGSRIEPDQRLKMTVSSEHMNQIDSHIDTLELDLVQRCLPYANLINLLIDIPGISYISAIAVIAEIGIDMSVFKSSKQLTCWAGLAPANNESANKKKSVRISRAGTYLKPLLIQCALSAIKSTSNPYYRIKYNTIKKRRGHKKAIVAIARMILVNIYAILSTGEVYNPCDFKEVTSPKPAKKEMTIENALFFLQAQGIDTSALVLNVS

SEQ ID NO: 84538 - protein, 408 aa, unidentified
MNTLYVGIDVSSKSNVVYLMLPNGDKHSNFSVANSHEGSTQLVKRILSALTSHSLDTVLIGLEATSVYGDNLVYFLREDATLAPFNRKIHVLNPKQVKKFHDAYNDLPKNDYVDSFVIADCLRFGRINKEVYMGDYRYKALQNLTRARFFAVQNLVKEKQRFMNVLFKKYSTMTQEKVFSDTFSTTALAVYDEFESAEALANMDLHELTDFIIEKGKNRFPDPDAVAKAIQKAARNSYRLPKTVNDSVNQVLSISITSMKALESQIKEFDKAIKAQMELLPNVLISIPGIGPVYSAGIMAEIGDINRFNSQAALAKYAGLAWKQHQSGGFESEVTRLIPSGNRFLKYYLCEAAFSLVRCDKKYSDFYHLKYKEVNRCQHKRALALTARKFVRLVFRLLKDNRLYCPAK

SEQ ID NO: 84539 - protein, 345 aa, unidentified
MELHTIGIDLGKTVFHLVGLDLRGEVVVHKKFSRKQLLHFTANLQVKLIWYGGLRRVHFLGRALREQGHEVRLMPAQYVKPYVKTNKSDYIDAEAIAEAVGRPKMRFVPIKTDEQLDLQSLHRVRERWVMRRTAVINQIRGLLLERGITLRQGRGHVDAALPGILEDASAMLSGALRMLLAQLKLELDHLQMRIDEADAIIKKVAGENEACRRLVAIPGIGPVTATAIIAAIGNGAAFKKGRGFSAWLGIVPGEYTTGGKQKLLGISKRGNSYLRRLFVQGARAVLQQRAKQSSALSAWLARLTTRTHSNVAAVALANKLARMAWAVLAKNEPYRPPMWVGAATA

SEQ ID NO: 84540 - protein, 444 aa, unidentified
MARKSKKQRLTIVHPRCAGIDIGSREHWVAVNPEHSDQPVRCFTSFTDDLQVLADWLQSLAVKVVAMEATGVYWIPLYELLDARGFEVHLVNSRATRQVSGRKSDVLDCQWIWQLMSYGLLRGAFRPGEAVCALRSFVRQRDSLVEGRSRSVAHMQKALTQMNLQLDNVVSDLMGQTGTAILRGIVAGERDPQQLATLRDRRLKADEATIARSLHGNWRDEHLFALTQALAHYDFLGEQIAACDQQIEQALSRLPKLTEESTEAVKLLRSKHRSDTLQKQLHQALHTVMGVDLCAIPTIGVDTALVLAGEIGADLSRFPSEKQLGAWLSLVPPTNISGGKRLPGRKPKVFNRAGQALRQAAANARRSESFIGANHRARLARMDTAEAIKATAHQLARLIYAMLTKGQPYVEKGMKTYETLSKDRQLRALQRKANKFGLTLAEAA

SEQ ID NO: 84541 - protein, 355 aa, unidentified
MKILAIDMGWSNSVSCLFDCSTGEVQYQTLITGKEPFAKLLKEIDPEQVVIEAGPMAGWVRDLCEQMKLKLLVLNTNDEPWRWRNVKKKTDRKDAFKLTQVAALRQGSGVHVPEHAVRQWRQLIYYRQTLVDEMVSIKNRLRAVLLQEDLHLPSGQKAWESASWQKLSEMAKELEECGKDDLWRGMVKLELRRLEELAAHLAAVEKKLDGLAREDERVKRLKQVPGVGTRTAELVVALIDDPKRFGRGRKLSSYGGLSPRKHQSGKMDRDGHISRCGNGLLRKLLVQAAWSGKRNSLRMGRIYERVRKNTPKRTKQAIVAVARHLLVWLWAMLRDGSSWQVGHQPAPQKELPAVT

SEQ ID NO: 84542 - protein, 399 aa, unidentified
MLAVVVGHPSQPRETEWKRRKFGATVPELQRLREWQGAEGVQEVVMESTAQYWKPVWIALEGEFELQLTQARSNKAPRGRKSDFADARRLVKRWRAEDLTVSYVPAAEQRRWRAMTRFRRQAIRQRVQLQNQIESLLEEGQIKLSCVGSDLLGMSGRRILRALADGETDPQKLAEMRDARVRASEEEVKAALGGQLHPLHCRLLRLSLDRVEQIDQQIGELDMDLGQAMQAHQEAIARLVALPGLGVDSAQQVIAQIGPEAAAFPTPEQLASWVGVCPGRQESAGVSMSQRSPKGNRPMRRLITQLAWAAVKAKESYFQILFRRWVPRLGAKKAIWAVAHRLLRLIWKVLHKGVSYEERGPLGLNKNALHRRKRRLLRDLRALGYKVILEPLPTQGSTM

SEQ ID NO: 84543 - protein, 376 aa, unidentified
MEHDSTLYVGCDVHKDSITVAYALDAGEVELLGKTGTRQADIDRLCKRLQSKAPRIRFVYEAGPCGYGLYRQLVNKGFDCMVCAPSLIPKKPGERVKTDRRDALKLVRSLRAGDLSAVYVPGVDDEAFRDLARTWVSAKDDLKRARQRLKAFLLSHGVRYTGRADWGPAHQRWLGAQAFDSAWQQLAFEEHRRTIEDRLAQCARLEAALREAVPNWRFYPAVLGLQTMRGVQFTTAVGMLAELGELSRFAHPRQLMAWLGVTPSEHSSGEKRRQGSITKNGNSYARKLLVEAAWSYRHPARVSPDIQRRHEGIPKPIVDRAWDAQVRLCRRYRKLIARGKQKNIAVVAVARELAGFIWDVSRLAMSLAVPQEVSLA

SEQ ID NO: 84544 - protein, 425 aa, unidentified
MTVYCGIDWAEGHHDIALIDEEGRLVGKRRIEESLDGLAELTAMLAAAGDSADDPIPVAIETPRGLLVAALRATGRPIYAINPLAVARYRERSSVSGKKSDHADALTLANILRTDRHRHRRLPDDSDLARSITVLARGYQDAVWRRTKLVQELRARLREYYPGFLATFARTSGMSTTRLASAEARAVLAIAPSPAEAATVSRARVQAALRRAGRTRNIASVTADIVAALRIAQPRQAQLVEQAMRTQTLALLDVLNAICGSVEQLSAALIDAFTQHPDYEIITSFPGLADISGAIVLGEIGDDRARFTDDRALQAFAGSAPVTRASGKTRAVIRRRTKNNRLAAAGHCWAFTAAGRPSPAREHYLRRRARGDGHPAALRHLFNRSLGQLHHCLQTGQTYDPIKAFPHATTVVGTGHVESAAAAAA

SEQ ID NO: 84545 - protein, 384 aa, unidentified
MEKSITLHVGMDVHKQSIDIATADLGRDGEVRHVGSVGGDLASLDKALRKLTSRGHVLHVVYEAGPCGFVIWRHLMGRGIACEVVAPSSIPKRSGERIKTDRRDAMMLARLDRSGDLTAVRVPEAADEAVRDLVRAREDSVRECRNARHRLKALLLRNGIAYAGKSAWTPAHLRWLATLKMEHAAQQIGFQEYLHSITEATTRIGRLEQAMRDTLPQWTLKPLVQALMTLRGVQLVAAMTLVAELQDFMRFESPRKLMAFVGLVPGEHSSGPKRRQGSITKAGNSAARRMLVEIAWHYQHSPRVSPIIAARQDHLPKAITDIAWAAQLRLHSKFKRLLARRVMKNKAVVAIARELTGFVWAIGREVQSSAWQGITLESATAAAH

SEQ ID NO: 84546 - protein, 352 aa, unidentified
MQHFIGSDIHPRYQKVAWIDEQTGEIRKRRLEHEGREVKEFYAQFPLGTVVGIEATFPAYWFERLMGDLGHALWVGDAARIRASEVRYQKTDERDAEDILDLLRTGRFPRIWVPNLEERDLRQLLVHRMKQVRARTQVKNQLHYLAISQGVCRGRKLWSVKGRKELESLALLPWAVRRRKDLLESLDHLDEQVRELDRAVEEAGRERWQVALLRTHPGVGMVTALGFTLTLGPVERFANSRKLVSYWGLNPRENSSGGRQRLGSISKQGNTMMRWLLVEAAQTAARLDPQLRRTYQRLKKQKSSGVAKVAVARRLAVRLFWMLRTRHNYTQLVHMSGSPSSAVVPPQGGPNV

SEQ ID NO: 84547 - protein, 406 aa, unidentified
MNAVGIDISKGKSMVAIMRPFGEIVASPFEVTHTDSEIRSLAKKLESLSGETKVIMECTGSYHLPIAFALHDAGFTVCAVHAQLIHDFGNNTIRKVKTDKADAIKIANYGLTNWLDLTEYVPEDDIRHMLKAYSRQYNKYVKIKTMLKNNLISLLDQTFPGANELFTSPPRKSDGHEKWIDFAARFWHCRCVCDLYQSDFINTYRKWCKRNGYNFSETKAEDIYIESLGHFHIMPKNETTKLLITQAITQISTISESIAIVAREMKNLAEQLPEYSTVMEFRGVGDILGPQIIAEIGDVYRFPRKESLVCYAGLEAPPKQSGSYEASSTSISKKGSPHLRKALFQVMDCLIKHKPVDDPVYQFLDRKRAEGKHYYSYMTAGSAKFLRIYYARVKQFLDNFYDEAEA

SEQ ID NO: 84548 - protein, 351 aa, unidentified
MVIIGCDFHPGFQQIAVLDTGSGEVKDLRLAHKEEARRFYASLQGEEVLVGVEACGYTQWFEQMLEQMGHRYQVGDAAAIRASYVRRQKTDRRDAGHILRLLVEGRFPALWVPTASERDARQLIVHRHKRVQMRTRVKNQLHALALNQGLRLRWQLWSEKGLEQLRALPLLPYAASRRADLLEQLEAMNADIERLDRMVGKEAEARPAAVRLMSHPGVGPVTALAFVLTIGDVRRFEKSRQVASYLGLIPSERSSGGKQRLGHISKQGNSLLRFLLVEAGHTAVRGDAELKRCYQRLQHRHSTGVAKVAVARKLALRLYWMLRNQINYAQIHGPYAGKPVSFCGAKTRPAA

SEQ ID NO: 84549 - protein, 273 aa, unidentified
MNIIGCDLHTRYQVVAWVEESTGEIKVRRLEHASEEVRSFYAQWPRGTVVGIEATFPALWFERLLGELGHELWVGDAARIRASEVRQQKTDTRDAEHILDLLRTGRFPRIWVPSMEERDLRQLLVHRLKLVRARTQVKNQLHALAMSQGVCRKGKLWSAQGRAELERLALLPWAARRRKELLAWLDQWDGAVRELDRAVEEAGRTRPEVALLRTHPGVGMVVALAFVLTVGPIARFLNSRKLVSYLGLNPREHYSGSRHRLGSISKQGNTMLR

SEQ ID NO: 84550 - protein, 352 aa, unidentified
MLCVGIDLHARTFSYAVVDEDCRVIFEATLPTSCENLREAMEAIEAKKRVVFEESDLASWAYRVLEPYVDELIVADPKENHWISKDQRIHDRRAARKLAKLLRGGFISAVHHTSDAERQVFKSLVLGYHDACRELGRVKNKLKARFRQHGVICSGSTVYGESDREAWLLRLELSGARLHARLLFETMDHLEMQRHTLREEIQRRSLKYREIARFQEVPGIGLIRAATFHAIIDTPHRFAHKRKVCSYCGLGIVEAKSGDKGGPQHLNRDGNRYLKDVAKGAASSAILGENRFARQYERLLAKGKRPSMARLTVARAIVSTLYAMWRDDAPYQPPAEGDPRPWPPAHEEKGAE

SEQ ID NO: 84551 - protein, 339 aa, unidentified
MNITRMGIDLAKNVFQLHGVDKHEKVVVRKQLKRSQMLEMFVNKAPMLIGMEACGGANYWARELTKLGHTVKVMAPQHVKPYVKSQKNDKRDAEAICEAVSRPTMRFVSVKTEEQQDMQAIHRIRDRLVKARTALVNEVRGLLAEYGIVISHTGVPATRRGLLDAIEDADNGLTTKMRDILFNLNEEINEIENRIQHYLRQINLHCTQDDRVKRIIEIEGLGPISASAIVTAVGDAKQFKNGRDMAAWIGLVPTQHSSGGKEKLGGISKRGDKYLRTLLIHGARSVIRFSEIKTDKRNVWINELIARRNKNVATVALANKNARIIWSILAREECYRPAA

SEQ ID NO: 84552 - protein, 342 aa, unidentified
MQVTTIGLDIAKNVFQVHGIDAKEKVVVRKQLRRSQVIAFFKALPPCLIGMEACATAHYWARELTKLGHEVRLMPAKDVKAYVKRNKNDAADAEAICEAVRRPTMRFVRIKSPEQQGQLMQHRTRDVLIRQRTQIINALRAHLAELGIVAAQGNAGVNELRAIVADERETRLPIDARASVIVLAAQLEALECVIGAIEKRIKMQHRSNEASQRVETIPGIGVIGATAIVATVADPTIFRSGRDFAAWIGLVPRQDSTGGKQKLGPISKQGDRYLRRILVVGAIAVLRRALENPGKYPWLTQLLARRPFKVVAVALANKMARTAWALLAHGGTYRAPELAEAA

SEQ ID NO: 84553 - protein, 356 aa, unidentified
MAIVAHTRPFVIGVDTHARNHSFAVLTAATGEQIAAKQFPTTSAGLNRAVAWVSRLIGGDLTALWVIEGAATYGARLARVVTDAGYEVAEAARMDARTHHRVGKSDLLDAHRIGASVLPLEDDRLRHPRSDAGLRPALRVLTSARENMSSERTASVNALTALLRTADLGLDARKPLTNGQITEVASWRTRVEDLELAAARAEAHRLAKRVRALDIELADNRSQLEELLRQSKAAPLLDVIGVGPVTAAVAYSAWSHRGRLRDEAAFAALAGVSPIPASSGNTTRHRLNRGGDRRLNRALHMATVTRMAHDPETRAYVDRRRAEGRTTKEIRRCLKRYLARRIYRTLEALHAAPTTA

SEQ ID NO: 84554 - protein, 392 aa, unidentified
MFYVGIDIAKQNHEASIIDSNGKLLDKSISFSNSQVGCNKLIALLERFEADTSNTVIGMEATGHYWVSLYSYLLDLGFTVYVINPIQSDAFRKMYIRQTKNDSKDSFIIAQIMRFGEFSTTSLADEDIMALRQLSRYRLALVDECSDWKRKCIALLDQVFPEYSKLFSDTFGVTSRELLSKYPTPEDMLSIDTETLSKLLSEASRGRFGISKASEIQESATNTFGVNFAKDAFAFQIKQIIAQINFIEDQLEELETEISTLLHQTNSVITTITGIGDVLGAIIIGEIGDISRFESAPQLVAYAGLDVAVKQSGDFVGTQTKISKRGSPYLRRAIWLAATVAAFKDPALSVYYQSLRAKGKHHLTAIGAVARKMCNIIFAVLRDNKPYVPHVK

SEQ ID NO: 84555 - protein, 386 aa, unidentified
MHHPTTLPVSEQTCSREDCATLFVSLELSRSTWVATSLALGSRKMSKHTLVGGDARKLLDLLARLKSRAEQRIAAPVKVVAIQEVGLDGFWIHRLLEANGVESHVVDPASIAVPRRHRRAKTDAIDGETLLRTLMAWHRGEPRVCAMTVPPTPNEEDRRRVSRERATLLRERIRHTNRIRGLLFGQGITNYNPLHKNRRKGLEELRTGDGQPVPVHLKAEILREIDRLELVLRQINEVEAERDEMLRPAQASSPVALLMRLKGIGPEFAAVLYLEGLFRHFENRRQLAAYAGLAPSPWKSGSVDHEQGISKAGNPRLRTTMVELAWMWVRYQPASALSCWFRQRVGSERGRIRRISIVALARKLLIALSRYINHGEIPVGAVVKPV

SEQ ID NO: 84556 - protein, 338 aa, unidentified
MTVVTVGIDLAKNVFAVHGVNAAGKAVLVKPLVRRAKLLELIATLPACLIGIEACTGAHYWAREFQKMGHTVRIMAPQLVSPYRMSGRHGKNDAADAAAICEAVTRPNMRFVPIKSVEQQGQLFVHRAHQGYVSERTALINRIRGLLSELGIVLPQAFKAFLSGVAQVLEDLPGYCNQVIGDLLNELYHIEEKIKNSEKLIQQLARDNSAAQLLMQFKGIGPMTATAIVASIGNGHDFKNGRQFSAWLGLTPRQQSSGGKARLGRITKAGDSYLRTLLVLGARSVLLGAAKNDDPVSRWALQLKERRGYGRALVAIAAKNARMCWAMLHLKDEFRFPA

SEQ ID NO: 84557 - protein, 345 aa, unidentified
MAYYTGIDVSLRSVSICVVDDKGEVCLEAKVAAEIDAIVERLRRFSSEVKSVGFEAGTLTQYLTYGLQAAGFEVICLEARQVSVTLAAMRNKTDRNDARGLAQILRTGWYSRVHVKSLHSHQVRALLASRKAILKKCVDLENELRGLLKVFGIRLPSRVGHGSFDAELRETVCSDDMLACALVPLLDARTVLYKTYLKLDNAVKGLVRVDPICRRLMSIPGVGPVTALTFKAAVDDPNRFKSSRTVAAHFGLTPRRFQSGETDNPGHISRAGDADVRSALYVAAHSLLTRNAQWSTLKAWGVRLAKIRGHRRAVIAVARKLAVILHRMWIDGSEFRWGSQPQTVA

SEQ ID NO: 84558 - protein, 342 aa, unidentified
MNHYAGIDVSLECSSVCVVDANGKIWREARVASEPEALIAWFHSLGFGLERIGLEAGPLSQWLFAGMKAAGLAVELLETRHVRKAFEAMPVKSDRNDARGIAQLMRLGWFRPVHCKSMSAQETRAILTARKLVQSKLHDVENSLRGILRGFGLKVGKTTEREFAGRINQLVTNHPQLQRIADALLAVREVLRTEFAAFQKQTRKMAQSDSRTRLLMSTPAVGPIVSLTYASAIDDPARFRSSKQVGAHFGMTPKKHQSGETDYTGRISKIGDSSVRTALYEAAHIMLTKPVKGCSQLKSWAMRIARRAGMSKAKVALARRLAVIMHRMLADGTPFNAAAAAA

SEQ ID NO: 84559 - protein, 407 aa, unidentified
MQYKDCPVLARGRAVVGIDIGKQKHSAFAVGPQGERLASLASFENNRAGVDRLEAVVLQAAGPPEEVLFAMEATGHYWMPLYHELIRRGYEGVALNPIQTHGEARTRIRKTKTDHKDAEGIARFILTGKAHATRIPDEATEELRIMTRRLRQMTQMKGDVERAAHSLIDRAFPEYSGCFSKPFLASARKLILEVGLTPDRIAREPDGVRALLRRAGRGRLSDTTINDLITRAQTSIGIGRAGTVINEELATTVEMLDDLEMQIVLLDSRLTGIMEERDSPLMSLGIGPALAATIHAESDPASDFPSARQYAAYAGLEPDTFQSGAMKGTRARISKRGSPHLRNALYQTAFVTYRRHDCFHRMYKRFRKEGHKHKSALVIVARHVAMVIWRMLVDNRPFSKRPPKRTK

SEQ ID NO: 84560 - protein, 366 aa, unidentified
MIFVGMDVHVRNSYLIATDEKGQVLKKSRVSNDRDALAGFLDDLGAESMRVCLESTTNSRPIVCFLEAYGRQAGIDLTAQVLDARRLRIIAESTAKCDRVDAAAICELARSNLKLPVCYMPDDEVFALREHLRSRQDLVRVRTMLKNRVHAVLHRRGILPPEQGLFAMDGRMFLKQMPLDEAGREILDRMMRLIASLDEELMASIRSLRALSQRPRWQVEARRLQTIPGVGLITAMTILAELGDWRRFKSRAAVANYSGLVPVVRDSNDKQFRGGITHRGSNHLRSVLTEAAWVSIRRVPKYQQLYSRVRFKRNAATAIVAVARELLEDAFTLLCKQEDFRYVPTSADEPMTDTRSDREIAMSVAG

SEQ ID NO: 84561 - protein, 426 aa, unidentified
MLNQKPIWVPLNHLLNMVKGKHQSCWFGALCVIQANAVGLSARADTTFFSKAMGWTPPHLSTSMCQTECVYSVNDKEESAMKINRVGVDLAKNVFQLHGADYKGKTVWKRQLSRSKWLPVLCDTVEPGTEIGMEACAGAHHWARQLMQRGYPVKIIPPQFVKPFIKSNKNDANDAAAICEAMGRPDMYPVKVKTVEQQDLQAMHRIRDEIKSHRIAKANQIRGLVTEYGLVAPQQLHALRRAIPDWLEDAENGLSFLFRQLLQGLWGDLYALDQRMAELDKQIAVVAQEDPTAKRLQQLRGVGPLIATALVATIGDGKQYRKGRDMAAALGLTPRQHSSGGKDRLLGISKRGDAYLRCLLVHGARSAVRTAKDKDDRLSRWIINLQARRHANVVAVAMANKMARMAWVIMTKDVDYDPDLAAASIS

SEQ ID NO: 84562 - protein, 342 aa, unidentified
MREKRSIGIDLHRRRFTCCIRLENGRNCLSEWSLEQLPRFTQKLRRTDEVAVEVTGNTRLFYEAVAPFVARVVVVDPNQFCVISHSVTKTDPHDARNLALYLAKGLLPEVRMKEKEQAEVASLTQTRDRLVKLRTALKNKVNNLLSARGIELDKESLSSEKGLTWVLEQKIEPLAHLELDIIVEQIRSLNRSIARLERVIDEAGKKLEGHRNLTSIKGIGSLGASILLSVIGNVNDFAHEGKLAAYFGIVPRVQDSNETEHRGRITKRGSKLGRTALVQCALIAKRYSPYLHRYYERIRARRGTGKAIIALARKFLSIIYHTLKNNWIFEDFPNFVLAEAKA

SEQ ID NO: 84563 - protein, 428 aa, unidentified
MSARETVQPEPEFVAYVGIDWADQKHVWCLQAANSAQQEDGELEHKPEVVEAWVSELCRRFGHGPIAVAVEQVKGALVYMLRKYECLHLYPVPSTMTAKMREALYPSGAKDDPRDADLLLELLVLHRDKLRRLTPDNEATRRVQNLVEERRKLVEEKTAQLNRLTGYLKVYFPQMLEWFAKLDSKLVCDLLERWPSLEELQAVRAGEVKKFFRHRRGRHGELTEWRMQGISQATPAIRDRAVIEAKQTVVQVIAQLLRNLLEGIATLDRKIAEAAEVHPDFFIFQSLPGAGAALAPRLLAAFGSQRDRYSSAEEVQKYSGIAPVTERSGKKKWVHFRWACSKFLRQSFHEWAGHSIAQSVWARAYYQRQRERGKEHHAAVRALAFKWIRVVFRCWQDRVAYDETRYLAALARRGSHLTSAFAATAASM

SEQ ID NO: 84564 - protein, 416 aa, unidentified
MKSKSEEQNKRATSHPTQHHWHEMNRKQRREMMRKMQTEDLSLEVIHPDAAGIDIGNESHYVAVPPGRDSQSVREFGCTTAELKAMAAWLQQCRIRTVAMQSTGVYWVAVYDILEQAGLEVYLVNARDTKNLPGRKSDVQESQWLMKLHTYGLLRNSFRPSQEIRVMRTYWRQRNDLVQSAGRHILRMQKALTQMNLQLANVLTDISGATGQAIIKAILAGERDPHKLAAFRDPRVKASEEQIAQSLEGNWQEDLLFVLKQEHEGYEFCQKQMAECDRQLQQYLQQREDRSHGAPLPEEKRKGRLKKKKGNAPQFDLREGLFRMTGTDLTRIDGIDVMTATTVISEAGYDMGKWKTEDHFVSWLRLCPDNRISGNKVIKECGWKGGDRGGLAQWEQLEKEETKKKKEKMEKMKEKT

SEQ ID NO: 84565 - protein, 388 aa, unidentified
MGPVVGLDVSKGASVLQAFTERNKPYGRCKRIAHTPEGFEQLGELLKELEKSTGFEPAVVLEATGHYHRSLVAYLEREGYQHFIVNPLQSKRAKGTHLRKVKTDAMDAWHLAEMYYRGDLKPHRTWSEALTELQHLTRQHEFICSMLVQAKQNARALLDQVCPAYETVFDNLFCTTSLQVLRQMLSSTPVTAETIQAAAGSSHGQAWVQEKLERIQALPPLSQSSKAQQMALLSVLNMVLTGQEQLRQLEKAMEELAMMLPEVELLRTIPGVGDKLAAVLAAEIGDASQFETPKQLVAYAGLDPGVHSSGKFTASSSRISKRGSKRLRRALYLAAQCGIRNGVNERLKAYFEKKRKEGKPCKVAVIACANKLLHHVHAILVKGEPYKA

SEQ ID NO: 84566 - protein, 349 aa, unidentified
MIWIGVDAHKQVHEALALGSEGVVGQQRIPNTPQAWAALLDWARQWPERIWAVEGAWYLGRGLTQYLARQGERVHEASGRWTARRRRGMRTPGKSDRLDARSVATLLREEAATLPRVYAEEDELAAVQLWSRAQAELTKDITRLVNRLHELLLQCDPEYKAKLPALTAKAAIGALRQYAAPGTGTLAREREVLIRATAAQLALLDEQDRELRRKLERVSKTRFSPLRRIEGVGPDHRLRLAAEVGGPRPGFGEEQLAALGGRSPLEASSAGAIRQRLNRLGNRRLNMLFHQIVLTQARVYPPARTYLLRRQAEGRTSREARRALKRLIVRRVYRAWHACFETNLERGAA

SEQ ID NO: 84567 - protein, 344 aa, unidentified
MITFGVDAHKRTHTMVAVDDRGQAVGQTTVGTTSKDHFGLLRWAGQFGLERRWAVEDCRHLSRRLERDLLAAGERIVRVPPKLMAHIRDSARTYGKSDPIDALAVARTAQREPDLPVARLDGPDRDLRLLVDHRESLVAERTRLICRLRWHLHELDPGWEPMARSLDPKRTLIEVQVRLEDRSGLVARLARDLAERCVGLTISITRLAQEITQLAEQLAPTLLALPGCGPLTAAKIVGETAGVDRFKSRDACARYNGTAPLPVWSANKARHRLSRTGNRQINAALHRIALTQARWHPSAQAMIQRRRSNGDSGREAVRILKGRLSDAVFQALRTDQRELTTLAA

SEQ ID NO: 84568 - protein, 311 aa, unidentified
MSAAEKELSHKSFDNTPTGIQSLLDWIAGYHLSLSKLLFCAENMGSYVTELSVSSVSMGFSLALVCPLTIKKSIGLQRGKNDRIDAKRIANYAVLHYRKLELYKLPNKDLVRLRGWIIIRDNLVKQKVSSIKLLETFSQMAKLADVTESISFLEEQLKSIKEKILEVEEDMEQLIAASTSLYTNYLLLRSIKGIGIINAIVLLCVTDNFQRFDNPRKFACYCGVAPFEHTSGISIRGKTQTSSLANKEVKVYLTRAAITAISWDPQMKAYYKRKIAEGKHKASVINAVRAKIIARSFAVIRRQTPFVTLAV

SEQ ID NO: 84569 - protein, 398 aa, unidentified
MNPVIGLDIAKGESQVQAFLDKKKPISRTFKFRHDIEGLNNFYTFYEEVKYKAEIAPVIIFESTGHYHEPVLQFLEERKITYYLVNPVVSYETKKTSLRKVKTDPHDAKHLCELYYKEDLEIFHRKSVRTMNLRNLSRQHESLTKNYVQLKLQFQTILDQVFPAYKSVFGHLYSPLSLKTLLLYPTSKDVLQVSTEDLASKIYSLGAKRSYSWCLAKAEKLKEAARRNPFKNTLYKSHLVSLNMYIKMLLQQKEYLLILEEEIDQLAQEFEEYTIIRSIPGIGAKITATLISEIGKIDQFSNPKKLVAYAGIDPRIFQSGKFKASINRITKRGSTRLRQALYTAVQCGLTRSRNVKLREFYDKKRSEGKPHKVAIIACANKLLHWIYAILTHKEAFKA

SEQ ID NO: 84570 - protein, 340 aa, unidentified
MTITTIGIDLAKNMFAVHGVDQNGKTVLVKSKVTRAALPGLIASLPPCVIGMEACSGAHYWARLFLQYGHEPRLMAAKFVSPYRMAGKLGKNDAADAQAICEAVRRPHMRFVPVKDESQQAMQCLHRTRQGFIEEKTATYNRLRGLISEFGVIAPQSTDALRHMVSAQKSSLPLQVQQCVDDLLEHVDRIEANITEYDRILSRIAKTDHRSQRLMKLKGVGPTTACALVACIGNAHDFKNGRQLAAWLGLTPSQYSSGGKSKLGRITKAGDSYLRTLLVQGARSVLIGAEKRTDSFSRWVCSLAERRGYWCAVVAIAAKNARLCWASLHYGDDFRLYSAS

SEQ ID NO: 84571 - protein, 318 aa, unidentified
MNTKINQSINVGVDTGKTQLDIHIRPLDLFFSVENNDKGIKKALKTIKSHSPERIVIEATGRLEMPFVLACAEAQLPIVRANPVHIKRFAGAIGRRAKNDRLDAELIAHYGEVIKPALTIIKPKNIRLMSDLVIRRNQLLSMQTMEKNRIQILPASLHATIKPMLTTIKNQITKLEEKLVKLIEDSPEYQTKNTILQSVPGIGNIAAASIISNVPELGYITNKQAASLIGVAPITRESGRYKGKRVIQGGRAQVRTVLYMAMMSAMQCNPVFKATYARLLAAGKPKKVAIIACVRKMVVALNSMLRDGAMWDENTAKN

SEQ ID NO: 84572 - protein, 346 aa, unidentified
MKINRVGVDLAKNVFQLHGVDRKGKALWKRRLTRGKWLAVLCDTVEPGAEIGMEACAGAHHWARQLMQRGYPVKVIPPQFVKPFIKSNKNDANDAAAICEAMGRPDMYPVKVKTVEQQDLQAMHRIRDEIKSHRIAKANQIRGLVTEYGLVAPLQLSALRSAIPDWLEDADNGLTFLFRQLLQGLWGDLYALDQRMAELDKQIAVVAQEDPTAKRLQQLRGVGPLIATALVATIGDGKQYRKGRDMAAALGLTPRQHSSGGKDRLLGISKRGDAYLRCLLVHGARSAMRTAKDKDDRLSHWIINLQARRHANVVAVAMANKMARMAWVIMTKDVDYDPDLAAASVN

SEQ ID NO: 84573 - protein, 445 aa, unidentified
MTCRTIGIDLAIRGDHVAQFFEDGRPAGRPLRFRFDDTSLDTFVARATADLRDGDTVQALMEPTGMSWFPVAHRLRDAGVEVVRIKGTRVKALRRYLSEHAKTDLADAHVLAAMPSFGGPRLDPVHVPSPKGHALQRLTKQRGRLQDEVADAKRRLTDLVRWASPTLERVLPDLRTRLALAMLREWLDPDRVLRARRTTIARSVADNANGNQPHSGPFVDALVVGLRAAAAHARALHRGHVDFAELQAEVAVEIDLMTSRIDALAGLERRIEALYAELHPADLLRTIPGIGQHIAPVIAGILHDPKRFRSERHLRGFCGLFPKRADSGGVERPGQRIAQGGNDRIKRALVLAADAARRTDPQLAETYWRLMTTKGHHHKQALCAVANRLVNRIRSVLLSQRPYVLRDLDGTEITVAQARAIIAQRYTVPTVVRASRRATRSAPPT

SEQ ID NO: 84574 - protein, 386 aa, unidentified
MPQPKSELRKSLVALDQDKTVIAVIEFSLRNWLVGGIVPGIHRDPLKKPAADEHALLHLLHRWRDDAVKAGHRITRIVVTYEAGRDGFWLARWLRTHGIEVYVIHPTSVPVSREHRRAKSDRLDIGLLKRSSLGWLRGEEKHCTMVSIPTSEEEDAKRPNREREHLVGRCTSLTNRLKATLVRLGIRSVNPKLPKAAERLATLRTPEGEPIPPNTFAELQRDMAQLRFIKAQIKQIENARREQLEQAPQKCSNAKVMELKSIRGIGLETADMLVHEVFSREWRDHRAVARYAGLTGSPDESGARRREKGLAKAGNARVRRGMIQLAWRFLTHQKNSTLAQWFEARVVAGKKRKTMIVALARKLLIALWRFVAMGEIPQGLVLHAAS

SEQ ID NO: 84575 - protein, 341 aa, unidentified
MKNKSFIGIDISKNVIDASIFCEGTPIKDFPHAVFNNSRKGFGEMCTWLKKNHVVLSNCLFGMEFTGSYSMELEKFLNARNYQFCMLSTHVVKHYPMGPKDKSDKIDSAKIADFLYRYNGTECVKPYKMPDKTMQRLKTLMNERKFLVEQRTCFMNRRQLCITKEDAQLYDGYIRKLGHDIENIELEEQKLLATDDSLLTTYKNLLTIPGIGFVNAINAIVITRNFTAFETARQYASYVGVAPHSHTSGTSVRWRPRPSARCDGQAKADLSMAATVAVQYDAELQSFYNRKLGGKQDSDTKRKALNAVKFKLVLRMFAIGKQNRKWEPLDSKSSNEKLAIS

SEQ ID NO: 84576 - protein, 340 aa, unidentified
MSMKKPKQHLIAEVPRRDSKVGKTIWIDLGDVWSHYCTLNEGGEVVDRGRFRTSPSGVETWFTDLPPVRIAMEAGTHSIWISEQLQELGHLVIVANMRELRAISHSDRKSDQVDAEKLARYARLDPKILRPIAHRTVAQQEALTLIRARNLIVRLRTAAVNAVRGLAKPCGTRLPASSTLCFAKRCAAVLPPGLALALVPMLEQIAEMTVIKRLTEAEYPETQALIKVYGVGQLTALTYVLTLGSKERFQRSRDVGCYLGLRPRRSQSGDRDPQLGITKAGNIYLRSLLVECANHVLGPHGKDSGLRQWGLHLASRGGKQTRNRAIVVVARKLAVLRNRI

SEQ ID NO: 84577 - protein, 431 aa, unidentified
MLGGNQEKLMSENQPEIQYAAFVSIDWADQKHVWSLQEANSRTREHGEVGHMPEAIEAWIAQMSQRFAGRPIAVAVEQSRGALVFMLSKYEQLHIFPVPPAMTANLRKAFYSSGAKTDPADTDLLQDVLQMHREKLRRLSPDTDATRLIQNLVEERRKLVDEKTAQSNRLEAHLKIYFPQIPQWFGDVDSPLVCALLERWSALEALQKARPDTLRSFFRKHHCRKEELIESRIKAIGEAMPALKDRAVVEAQLAVVKVLVQVIQVLHQGIEDFNRQIQEAAEAHPDFFIFESLPGAGAVMAPRLLAAFGSQRERYRNAAEVQTLSGIAPVTESSGKSSWIHFRFACSKFVRQSFHEWAALSITQSQWARAYYELQCRRGKRHHAAVRALAFKWIRIIFRCWKERVAYDEKVYLAALAQHNSPLLAATKIAL

SEQ ID NO: 84578 - protein, 363 aa, unidentified
MQKLVLKATATQGARPEPAAGTAVSIGCDLSRTKWVYACRWGGAEQRRLSTPGELTHLQALVGEYQGLGCAVEVAYEACGFGYTIAWWLAEQEVGVVVVAPSTVEKAPGLQVKTDGLDASSLAFKLEKGLLRSIYVPTRAAHENRQLSRTYGQVLTDRRRQQARLRLLLQEHGYTPPGPTQGWAALERWLTAHPLPAPVQRCVSELLTQRGGAHASVQRLRGALRQVARQEPYAAVVEALAAQPGVGQFTAIRFVLEIGDIHRFGRAEALPNYLGLTPHEYSSGELVHRGHLRKCGPGSLRAWLIQCAWVAVRPGGDPALRECFERLAPRLGTKRAIVAVARRLALRLRARWLAAASEVAHAA

SEQ ID NO: 84579 - protein, 339 aa, unidentified
MSIVMGLDQHRGQVTGEWIDTETGEVERTRVAPADRAHVRKWLSRFCGQELEVALEATTGWRFVVEELRRVGAVVHLAEPAETAARRGTKKRPKNDRADARHLRELLMVERLPESWIPPDHILDLRARVRLRHRLKEQRSEWQQRIQATLYHHGCPQRRQLMTGEGREWLDAQPLPASARDTVTVALAIIDALETQIAPLDKALRSYARRQAGCKALMAHYGIGELCAVTILAELGDCTRFSSSRQAVRYAGMDITVYESDRRRAPGHLSRQGPPALRWALFEAAQQTRRRTASPDRDYFEQAAERIDGNRACLSVARKLLKRSYHTLRELGEEALAPA

SEQ ID NO: 84580 - protein, 338 aa, unidentified
MKLYCGIDLHSNNSVIVILDETDKVIYQKKLNNDLELILQQLSTFIDDIVAIAIESTFNWYWLVDGLQAAGYEVKLVNTTAVQTYSGLKFTDDKHDARWLAHLLRLNILPTGYIYPKEERAVRDLLRKRSQLVQQSTTNILSAQNILTRNAAQSLSVYRLKKIEDEQVETLLDDANITLALKSNITVVRCLQTAIKEIEACVLKQTRLRKEFLQLLSVSGIGQILGLTIMLESGDMDRFAKVGNYASYCRCVKSERLSNGKKKGENNRKNGNRYLAWAFIEAANFAIRYNDKIKSFYQKKKSKTNGVIAIKAVAHKLARACYHIIKDQVPFDVNKAFA

SEQ ID NO: 84581 - protein, 344 aa, unidentified
MGEVTTIGLDVAKSVFQIHGVDAAGAVVVRKRISRAKVLEFFSILPSCLVGIEACPSGHHWSRELRALGHTVRLMPPSYVKAYLKRSKNDANDAAAICEAVTRPSMRFVPIKSEQQQSGLILHRSRQLLVRQRTMLSNAIRGHLAELGIISAKGRNGTSELFKIIADEKDGRIPAAARFSLDVLARQHAAIAAEIGAIEKRIHAWHRSSEESRRLEQIPGVGPIVATALVSEVGDWKEFSSGRSLAAWIGLVPEQHSTGGKERLGRISKQGNRYLRWLLVAGAMAVIRYARQHGTRRLWLARIMERRPIKVAAVALANKIARMAWAMMVRAEPFKEPKLLPAAG

SEQ ID NO: 84582 - protein, 419 aa, unidentified
MRSNKTKKLRKVNGNTLIAAIDIGKKMNYGYFRAPDGRDIKPFGFFNLGNGFEFFWARLVEFKKEHDLEDIVVGFESTGPYAEPMLHFLRGKKVRLVQTNPMHTKRLKELTGNSPNKTDEKDPRVIADVIALGHALTLVVPAGPAAELRRLSQARERSIKTRTSMSNQLQHLLFVIFPELCWTLRDMKSKSVLYLVENFCAPESIVGMGIEALCAILKKTSRGKLGRDRARRIFEAAQKSVGIREGKESILLEINHLALNIRNEDRFIDNLESQMRHYLKQVPYSQSILSIKGIGEVTAAGLIGEVGDFRKFNTICEVMKLAGLDLYEISSGRRKGQRRISKRGRSYLRKILFFAAINTVKKEGILYAQYQQMLGRGMPKIKALIAISRKVLRITFAIVRDNTVYASNYEHRGISKLAA

SEQ ID NO: 84583 - protein, 347 aa, unidentified
MRFYTHQHKYYCGVDLHARKMYVCIIDAKGAVKVHQNIKTHPALFFELVFPYLDDIAVGVECVFCWYWLADLCAEHNIRFVLGHALYMKAIHGGKTKNDRIDSYKLATLLKGGNFPIAYAYPAKWRATRDLLRRRMYISRRCGELVAHIINTNTQYNLPAFRKKLSRKYNHDGVTERFEDPQVRKSVQVDLDLIASMNQLLNKLEYHIEKTARQHNYHTLYLLRSIPGVGQILALVILYEIHDIKRFATAQDFSSYARLIRPVKESDGKWAGHSNKKIGNHHLKWAIKEAAVLMLRDSAQAKYYVARLTHKYNKGKALGIFTHKLGRAIYFMLKNKKAFDMKKFFDG

SEQ ID NO: 84584 - protein, 478 aa, unidentified
MSTFERLQSGKMNRKEKKELVRRLNAEDAALQVVHTNAAGIDIGNESHFVAIPPDRDANPIREFGSWTADLQEMARWLKEHDIQTVAMQSTGVYWIAVHEVLEQYGLEVYLVNARGTKNLPGRKSDVQECEWLRKLHTYGLLRNSFRPPEQIRAIQTIWRQRDRLVKDCGRAIQQMQKALTKMNIQLANTISDISGVSGQAILRAIVKGTRDPHELAKLRDRRIAASEEEIVQSLQGNWKDDVLFELRQVLEAYDFYQNQIAACDQELAKYMADVPSREIPEKQDIPESACPLVSAKPSRRSKPMKKKNQPGFDLAAELHRTMGVDLTLIDGINSPIAQVIFSEIGPDFSAFPTENHFASWLTLAPQRDVSGGKVIRHIPSAGRNRVANALRMAAQSLWHSDSYLGARYRRLRARLEGKTAVKAMARYLACLVYRMVTKGQAYVDRGATYYEKKRHEKERDSLLKKAANLGLKLVPSA

SEQ ID NO: 84585 - protein, 410 aa, unidentified
MEALIECCAGLDVHQATVVACLNRGPPGKRSGKEVRTYGTMRGDLETMRDWLKGCGCTLVAMESTGVYWKPVHAVLEGAFEVIVGNAQHIKNVPGRKTDVKDCEWISDLARHGLIAASFVPPRPIRDLRDLTRYRRKLTAAQAAERNRLIKLLESANIKLAGVASDVFGVSGWAMLEALIEGQASAAEMALLARGRMRRKLPALERALHGGIDEHHRFVLRLQLQRIKAAQADLERLDERLRGKLADYAEPLRRLMRIPGVDWVIGATIIAEIGIDMSMFVSASHLASWTGICPGNHESAGRQRGGKTRKGNVYLKTALIIAAITGARKRGSYLAEKYRRLRSRRGTMRAAVAIAHKILVAVYHMLADSTEYRDLGAAYLDNLDQRRHANQLVRRLSIMGFDVQITPKAA

SEQ ID NO: 84586 - protein, 318 aa, unidentified
MSSAALAFVGIDVAKAELVMAIRPSGEHWTIANDGAGIQTLVQRVRGHAPMLIVLEATGGYERAVVAALAAAQLPLVVANPRQVRDFARATGQLAKTDRIDADILALFAERVRPAPRALPDDAAEALDALLTRRRQVLEMLIAERNRLEHAVPAVRRGITQHIRWLERQLADVDRDLDDTIQASPVWRAKDNLLRSTPGVGPVLSRTLLGELPELGTLPRKQIAALVGVAPLARDSGTLKHKRLVWGGRAPVRAALFMAALVGTRCNPVLRAFYRRLLAAGKPKKVALTACMRKLLTILNAMMRTNTAWRHIDPSPTT

SEQ ID NO: 84587 - protein, 334 aa, unidentified
MENIALIGIDLGKNSFHIHCQDHRGKAVYRKKFTRPKLIEFLATCPATTIAMEACGGSHFMARKLEELGHSPKLISPQFVRPFVKSNKNDFVDAEAICEAASRPSMRFVQPRTESQQAMRALHRVRESLVQDKVKTTNQMHAFLLEFGISVPRGAAVISRLSTILEDSSLPLYLSQLLLKLQQHYHYLVEQIKDLESQLKRKLDEDEVGQRLLSIPCVGTLTASTISTEIGDGKQYASSRDFAAATGLVPRQYSTGGRTTLLGISKRGNKKIRTLLVQCARVFIQKLEHQSGKLADWVRDLLCRKSNFVVTCALANKLARIAWALTARQQTYVA

SEQ ID NO: 84588 - protein, 387 aa, unidentified
MIYVGIDVAKLNHFASAISSDGEVLFEPFQFSNDADGFRLLLSHLEVLPDDSIIGLESTAHYSDNLVRFLVSYGYKVCLINPIQTSTLRRNNIRKTKTDKVDTFIIAKALMMQQSHRFVTVSDLDLMELRALGRFRQKSIKQRTRLKIQLKAYVDEIFPELQYFFKSGLHQKTVYALLKEAPSAKAVASMHLTHLAHLLETTSHGRFKKDSASQLRILARKSVGLSDSALSIQVVHAIEQIELLDSQIDHVEAEMTDIVDYLDSVIMTIPGIGPINGGMILGEIGDIHRFPSPKQLLAFAGLDPSVYQSGNFQAKRTRMSKRGSKALRYALMNAAHNVVKNNATFKAYYDSKVAEGRSHYNALGHCAGKLVRIIHKMLSDNVAFNLD

SEQ ID NO: 84589 - protein, 342 aa, unidentified
MDHFAGLDVSVKETSVCIVDDTGRIVREVKVASEPEALLAVLKNPAYHFKRIGLEAGPLSQWLYGALAEAGLPVICVETRHMRAVLKAQINKTDRNDARGMAQMMRVGLYRPVHVKTLRSQKLRMLLTHRQLLLSKAIALENDLRGTLRNFGLKVGMVGKVKFEARIRELVESLPDLAILVEPMLIVRRVLREQIVILHRRLLAIVRDDEVCQRLMTTPGVGPVVSLTYRATVDIPARFRKSKSVGAVFGLTCAKYQSGEVDWDGRISRCGDGMMRTMLYEAAQAMMRSKKWSWLKAWAMQIARRRGMKKAIVALARRLAVIMHRIWVDGTEFRWTREVVAA

SEQ ID NO: 84590 - protein, 307 aa, unidentified
MKKEEMTFVQVVKVGCGIDVHRDIIVATIRKNNDEYVTREFYAYTGSLTSLRDWCKIEQVTHVAMESTGVYWKPVFNVLEEYFEIILVNARHVKNVPGHKTDKKDSVWLSKLLLSGLLKGSFIPPCDIRELRDLVRYKKKVVAQAASEKNRIIKTLEDANIKLSSVLSNVDGAVGTKIINSLIEGQTDINELVKFYHGKMKVSKAEFKMALEGRITKHHRFMLQLHKDSIAEKERIIARIETQIDEATKAYRVEIDLLQTIPGVGKDSATSIVSEIGVDMSRFPNENHLSSWAGMSPGNNETGGKKK

SEQ ID NO: 84591 - protein, 364 aa, unidentified
MPQPNDLSRSFVALDQNSTIIAVVELSQSSWLVGGVLPGIERQPCKKLEPSAERLLGLLHRWRDEAVRAGSNITRIALAFEAGRDGFWLARWLQAHGVEAHVIHPSSVAVSREHRRAKTDRLDTELLKRSFLGWLRGERGHCSMARVPTMLEEDAKRPNRERECLVGERTRIVNRMKGTLARLGIRTFKPTLRKAAERLATLHTPEGSPLPPNVSAELQHDMARLSLLISQIKEIENTRQERLEQEPETGPHAMVRLLARIVGVGIETADMLVNEVLSRPMRDRKAVARYAGLTGSPDESGTKRREQGLARAGNARVRRGMIQLAWRFLLFQKESALALWYRARTADSRLGTRKTMIVALAASC

SEQ ID NO: 84592 - protein, 390 aa, unidentified
MILVGIDVAKDKHDCCITNTDGEMLFDIFTITNNSESFDILYERIRSVAPDLSKVKVGLEATGHYNYNILSYLLDKHLTAYVINPLHTNFYRKGLSLRKTKTDRIDSRTIALMLLTDLSLKPYSVSSYHRENLKSLTRYRFSRVQERSRQKSSISRLVTILFPELSQLVPCIHISSIYTMLEELPGASYVASVHLTRLTNILSKASKGRFGREMAITFREAARTSIGAKIPAKSLELRHTIADVRAIESEIREVETEIQKIMDEETTTITSVPGIGTQMGAIILAEIGDFSRFDSPDKILAFAGMSPSTYQSGKMISSYAHMEKRGSRYLRFALFNVTKHVCNYDPGFAAYLAKKRAEGKHYNVAISHAAKRLVRMLYAMETNGTLYEAA

SEQ ID NO: 84593 - protein, 420 aa, unidentified
MAYRIAGIDVHKKMLAVVVADVEVQGEYQFERIRYGSNPEPLRLLAAWLIEHEVEEVVMESTAQYWKPVWGALERYSKPSCQKREGAGPMSGTLHLAQARSNRGRRGRKKDFPDAERLVKRLVADELVLSFVPDAEQRLWRTVTRRKYQLTRNKVRLQNQLEALLEEAHIKLSSLVSDLLGVSARRMLKAIADGGTDPAALADKKLRATPAQLCDALGACAELQPIYRRLLKMFLEELQLIEQQIGQLDQEMAALLSQHPDCVQRLSEIPGLGVDSAQQIIAEVGATAATFPSGKHLSCWVGACPGDEESAEVSRSHRSPKGNRHMRRILNQCANAAVKSKGTIFEIVYRRLVSRLGHNQTIGAIAHRLCHLIWIILHRGVRYEERGPSVNTKSRRQRTSRTIRELRNLGYRVEPLGTPA

SEQ ID NO: 84594 - protein, 369 aa, unidentified
MTDLTLFVGLDVHKKTISVALVDAAATADVRFYGTIANEPDALRSLCRRLSKDGRPLHFCYEAGPCGYGVQRHLTRLGHHCDVVAPALIPRKVGDKVKTDRRDAMMLAQTLRAGQLTAVWVPDEAHEAMRDLVRLRAQAMRDLRKTRQQLLSFLLRHGLSSPYGHWTKMHRRWLAELTFAHPAQHLAHEEMLQRIERAEALCDRLRQAIGDLVPQWSLAPVVLAIQALRGVSLVVAAVILAEVGSFGRFDNPRQLMAYLGLNPSEHSSGATIRRGPITKTGNALARTCLVEAAWTYRFPARVTQIIRDRMKDLPEPIRTVAWKAQIRLSARYRKLTAAGKPAPKVVVAIARELVGFIWAIARMVEPKFA

SEQ ID NO: 84595 - protein, 352 aa, unidentified
MQHFIGCDVHTRNQVVAWIEEETGELKKRRLEHEGREVKEFYAQFPRGTVVGIEATFPAHWFERLMGELGHELWVGDAARIRASEVRLQKTDARDAEHILDLLRTDRFPRIWVPSLEERDLRQLLVHRMKQVRARTQVKNQLHALAISQGVCRKGKLWSVKGRKELESLTLLPWAARRRKELLETLDRLDEQVRELDRAVEEAGRERAEVALLRTHPGVGMVVGLAFVLTVGPVERFRNSRKLVSYWGLNPRESSSGGRQRLGAISKQGNTMMRWLLVEAAQTAARLDPQLRRIYQRLKKQKTSAVAKVAVARRLAVRLFWMLRTRNNYAQMVHMSGSPSSAVVPQQAEPNT

SEQ ID NO: 84596 - protein, 344 aa, unidentified
MEHYAGLDVSLELTSLCVVDAQGQVVREAKVASEPEALIGFLRAQELEIGRIGLEAGPLSQWLHAGLVAADFEVVLLETRHVKAALSAMTVKTDRRDARGIAQLLRLGWYRPVHAKSASAQEVRSLLTARKLIQCKLLDIESGIRGVLRGFGLKVGTVSRGRFEARIRYLVDGHAMLETVVGSMLTARGALQAEFARLHRTLLALVRADPVCRQLMSVPGVGAVVAITFKSGVDDPTRFRRSRDVGPHFGLTPRKYQSGELDVTGSISKVGDRMVRTALYEAASVMLTRTVRMSPLKSWALGVARRRGGRKARVALARKLGVVLHRMWVDGTNFRWTNEASAMA

SEQ ID NO: 84597 - protein, 419 aa, unidentified
MEMIKPKIARRINEKTLLVSVDIGAYINYGYGRRPDRTEIKPFKFSNDRPGFEHFWKRIKESQAQHPLERIVVGFESTSVYGEPLVHFLKDRPVEVVQVNPMHTKRLKELEGNSPNKTDRKDPRVIADVIELGHFLTVVVPEGPAAELRRLSHSRERAIERKGRLENQLHGLIFLLFPEFWRIMKGLKSKSARYLLDRHPRPQDIVSLGVEALTAELKKVSQGKLGRTRAQALLEAAQHSAGLQEGQASILFEVQRLLREWETNEESIKQAEQKMSHYLKQVPYSPSLLSIKGIGEVTAAGLIGEVGDFRKFRTIAEVLKLAGLDLYEISSGQHQGQRHISKRGRAFLRKLLYFAAIGTVRKGGIFRVSYQQHVAAGMAKPKVLIAMARKLLGIIVALVRDHSQYQTDYVKEAALPLAA

SEQ ID NO: 84598 - protein, 341 aa, unidentified
MNVKTIGIDLAKNVFQIHGVDEHGKRLFNKQLRRAQMASFFANIPPCLIGMEACASAHFWANKLISMGHNVKLMAPQFVKPYVKTNKHDAADAEAICEAVTRPNMRFVPVKTAEQQAVLALHRSRQSFIKQRTAQANQIRGLLAEFGIVVPRGIQQLQRRLPELVEDADNPLPVLFRTQLSLLQHHMAYLFDVIATLDKQIEHCYRQNALCQRIGKIPGIGPVTASALIATIGKANNFENGRQLAAWLGLVPRQHSSGGKQVLLGISKRGDTYLRTLLIHGARAVLQSAKHKQDAVSSWANQLMARRNNNIASVALANKNARTVWALLAKEREYCAPIISA

SEQ ID NO: 84599 - protein, 440 aa, unidentified
MNNPLELPILNPHAAGIDVGSEKFFVSVGGNQPKVFLTVTEQIKALCEYLKAECVRTVAMEATGVYWINLYGALEEAGMRVVVVNGGHCKNFPGRKTDMKDCQWVAVLHAHGLLSSGFVPPENIRCLRDYVRLRGDLVSMAAQHVQHMQKALDRLNVKIHVVISDITGVSGMKIIEAILAGEREPQKLVKLCDPQILKTKKASMVEALKGIWRQEHLFALRLALESYKTYQRQMAQCDEQIAQVLKGMCAGKPTPELGKPKELRHNTLVIDGLHQQMAQIFGKDLTKLPCVNESTATVLLAEIGQDMSRWKDWRHFGSWLALAPCSAQSGNRRRREKRRLTRAGHILCRAVQCMALGKHSWLASFYRRIRAKRGAKVAIKATAYKLAKLIYLVLTKGWDYVEEGIAKYEERVRAIQLRALQNLAKSFDYILVPKALANAK

SEQ ID NO: 84600 - protein, 428 aa, unidentified
MSNQELIRRKQYCQIVQEIAGSDQYMVVGIDIGKDKHHAFIGTATGKSLFRKLIFENNRGGFSRLLKTADEIKLQNDFSKIVYGLEPTGNYHKPLARHLIRCGSNVVLVSGEAVKKNRSLLDGRWDKHDTKCAANIADLVSRGRCLYYDSPSPEIIELRSLLSLRKRLKREEHSLRMRIRNNLLTQYFPELDRFYSACESESLAIVKWCLDPDQIAGMAFEPFFQMVTQIRRGPAQLLRLRKIYQQASESIGCPMGSAAAFEAQLLVDKLKQVRQQLKDTEAAIKEDALKFEEYSCLLTIPGFGPYISAKVLASIGDPFRFRNRKQLIKMAGYDLCANRSGKTSDKAIPVISKKGNSELRYALYQAAKVASTKVDLFRTYFTELLRGRERERGIKTKMCVKLAAKMLIIAWTLMKKKEPFDPEYLTIG

SEQ ID NO: 84601 - protein, 332 aa, unidentified
MPIVGGLDIHRRQITFDYLDTVTGELQRGQVAPADRSHLAAWLARRFTGRRDVEFALEGCTGWRYVAEELACAGAVAHVAEPADTAALRGRKRHAKTDRTDSRHLRQTLADGRLPECWIPPAHVLECRALLGLYRDLRVEHTAWTQRIHAVLFHQGAQQLGEGGLRTEQGRTELAAIAAAQLSPVGQRQVATALAMLATLDERLDAVHRQLLHAARHLTGAKVLTARLYGVGPITALALTCWLGGAGRFSSARKAVRFTGLDVTVHSSDGKRAPGRLSRQGPRPRHGPDHGYYTQVKERIDGKRAAISEARKIVRQASHILAELGDAALTET

SEQ ID NO: 84602 - protein, 343 aa, unidentified
MEIITIGLDLAKNVFQVHAVSSTGEVVVRRALRSAQVLPFFSKLSPCLVGMEACGTSHHWARELARLGHEVRLMPPAYVKAYVKRGKTDAGDAEAICEAVRRPTMRFVAVKSVEQQAALSLHRTRDLLVRQRTQLVNMIRGLLAEFGIDIPKGITHALAFVRRVVAGEAREVPPLAARVISVLAEQALEGQARIRQLERDLLAWFRSSALARRIATVPGVGLLGATALAATVTDPTQFRSGRQFAAWLGLTPLQNSTGGKERLGRISKMGDQYLRRLLIIGMTSLVRRNLHRPDAADPRITALLARKPVRVATVAMANHAARAIWAIMVRGEVYRTPAPLAAA

SEQ ID NO: 84603 - protein, 337 aa, unidentified
MDYFAGLDVSMEETHICILDREGLLIREGKASSTPKAIAAFLAAGPTCTKVVFETGRMAPMLFHGLTELSVPVVCIESRQAYQALKSLAGHKTDRNDARGLAHLARTGFYKPTHVKSLSAHAIRSLIAARKKLVGQRVTIDNQIRGLVVVFGVRLPRALSPAFKDAALKVSDGVPGLHVALRGLFAAREAILTAVAAIDGDIKAMTRKSEVCTRLMTVPGVGPITALAFAAVIDDPARFKRSRDIGPYLGLVPKRHQSGEVDYTGSISKRGDVRVRTLLYEAANVMLTRYAAPLKLKSWALEIGRRSTMRKARVALARRLAIILHAMMRDQTDFQAV

SEQ ID NO: 84604 - protein, 330 aa, unidentified
MQKVQHIIGADLSKKTIDLFYWSTKSHLDIKNNLEGFKTLLRSIKQQRIDRSELMIVMEHTGLYSFCFEEFLHKHQIPFCKVSALMIKRSLGLIRGKSDKIDARRIASYGFEKRDTLLPERATSKELKRLQLLYSTRERLVKQRAGLINAVKEYRSIGLSTNDPILQSQQRLIKHFEKEIGKLEAEMDMIFDSDSCLQKNQRLLQSIKGVGKVVSTATIIKTKNFTRFTDPRKFACFCGTAPFEHTSGSSIRGRTRVSHLADKQMKTLMDLSAKSAIQYDKELRNYYLKRIENGKSKMSTINIVRNKILYRMFAVIKRQTPFIENYLQTA

SEQ ID NO: 84605 - protein, 421 aa, unidentified
MKVTYQICCGVDVHKSFLVATIVKTTGGIEPSYQKKRFSTFNNSILEFKQWLLDNGCHDICMESTGKYRVPVFNLLEDEINVVIANPKWVKAVKGNKDDAKDSKWIGDLFRLGLVKGSYIPCKKVRILREYTRYRYKLVSCRSSEKNRYQNALTVCNVALDSVVSDIFGKSSTSIIDYLLEQSGTSINHEEIASKLLRSLKSKEDAVIESVEGYQMTDAQKYRMRLVRAHMDYITAEINDVDKMIENMISSNPDFENAVQFLCTIPGVKRDSAITIISEIGIDMSQFSSSKRLCCWAGLTPGSNESAGKKKSVRITRAGIYLKPALVQCAHAAVKSDKSPYYKKKYESLVKRRGKKRAIIAIARMILTAIYQMLSTGEQWNPSDLYKIDIPVALVEKKRQKLSSRLRSCCNGKDYFLLMNH

SEQ ID NO: 84606 - protein, 333 aa, unidentified
MYYSGIDLHSDNCYITTIDDTGAVVKRQRLENNNELVLNYFHSLPGPHQAVVESTTGWYWLNDLLGDNNIELILAHAKYLKAISYAKVKTDKVDSQTLAILLRQNLIPRAHKISRELRGLRDTMRIRLRLVQQRTACLLRLYSIQAKFNGSVPDPYRFQLAVLEHMRDTLSNQILALEKSLHPVMIPNDDIQRLLYIPGIGKLSAFTIYLEIDGIERFDSDKRFVSYCRLVPAADNSNRTLHHRSSKDGNKYLKIAFSDAAVHAIQFYPEYKKLFQKLARRSGEPTARTVVAKELAKIVYYVLKNKTSYKGLKGQPISRHKSLQWPRLSSPLA

SEQ ID NO: 84607 - protein, 344 aa, unidentified
MSNLDTCGIEVSAKELVIQLRRRGELEPLRRFTNTPEGREMVLRHLREAGRVVRACMESSGLYGLDLALLLSAAKGIEVRVANPRAVRHFALALMKRSKSDPVDAGVLEQFAARMPFQAWQRPSPRALSLHALARRLHELVEIETAEKNRQHAAEISDATPAAVRRDLARSLRAQQRAIQRLTRHARQLIAQDPILSERFQLLDSIPGVGETSALQLLGELAVLAPDLDTRQWVAYAGLDPREYTSGSSVRKKPRISKAGNKHLRRSLYMPALVAVQHDPHLSAFYQHLLARGKFKMQALVAVMRKLLHAIHAMFKKHQLYDGSTLFRLPSTSTQEVPCAPVAA

SEQ ID NO: 84608 - protein, 316 aa, unidentified
MESPQTFVGIDVSAKRLDVAVLPAGTHFTVAHTDEGIASLVRRLLELRPHIVVLEATGGYEILVAYAMSEASLPVVIMNPKVLRHFAKSTGKLAKTDKLDARVLAHYAQAIQPPVRPLKDPEQAELATLMSRRRQLWDMIVMEGNRRRTSTPKVRGNIDQHLAYLRQLLKDLDREIHDAIRRTPLWHEKSEILQSFNGVGPKVSASLIADLAELGTAPRTQISALAGLAPMNRDSGQWRGKRTIQGGRPAVRQALYMAALVASRHNPVIREFYQRLRQAGKPAKVALTACMRKILVILNAMLKNRTYWNPQLPLAA

SEQ ID NO: 84609 - protein, 357 aa, unidentified
MQRKAISFKGQKIYAGIDVHKSTWTVTTIPEIGTLKTHSQKASAQELFDFLNRHYPEGNYFAVYEAGFSGYSTYYALSEYCIECIVVNAADVPTTQYEELMKSDPVDSVKLAKSLRAGQLNGIYIRERENLDDRSLVRIRKMIQRELARYKNRVKHMLYSNGITIPQQFDRPGYWPKAFIKWLREEVVLLSSTRTSLDILLDQVEVVRKGLLKATLKVRHLSKSERYAEKFDLIKSIPGIGLLTAMTILTEVYDVSRFRNEKQFASYLGLIPTSHSSGSRVIHGEKTYRGNKQIGPLLVESSWIAINNDDTLALAYSNYRKKGLTPPEAIVRVARKLSNIIFSVLKNGKKYEPFEGN

SEQ ID NO: 84610 - protein, 343 aa, unidentified
MQAVTTIGLDIAKSVFQIHGVDAEGNVVVRRKLKRRYIVAFFQKLPPCLVGIEACASSHHWSRELQTLGHTVRLMPPAYVRPYVKRHKNDAADAEAICEAATRANMRFVATKTPEQQSCLMLHRTRHLFIRQQTAVINAIRAHLAEFGIVAPVGRNGVETLLNIVADTSDNRIPEIARVCLVALGAQLRALKAQILEFDRLIMAWHRSSEASKRLDEIPGVGPALATALVASISDARAFRSGRDFSAWIGLVPKQSSSGGKEKLGNISKRGDRYLRSLFTAGALAVIRYAKLHGTKHRPWLTALLTRRPTKVAAIALANKLARMAWAMMAKGERYKEPVALAA

SEQ ID NO: 84611 - protein, 345 aa, unidentified
MQNSRPDNHIAISYVSSLNYVLTKTLFKHKHEEIEMKLYGGIDLHSNNSVIAIKDDNGKVLVCKKLPNDWELIQRFLEPYKEMLIGLVIESTYNWYWLVDALIGAKFCVHLANTAAIQQYSGLKYADDNSDAQWLAEMLRLNILPEGYIYPKEERAVRDLMRKRMNLVQQSTANLLSIQGIYMRHLSYRLSNNKIKQLTCEQIAQDHTANTAQAVTATLNVMNCLKNEIKQIESALLVQVKLRAEFKSLSSIDGIGNILALTIMLETGDIKRFNKPGNYASYCRCIGGARYSNGKKKGGSNSKNGNKYLAWAFVEAANFAIRHNKIVKSYYQRKAAKTNQIIAIK

SEQ ID NO: 84612 - protein, 412 aa, unidentified
MQVVYARCAGLDVHKKTVSACVSVCEPEAAKRQQTRVFGTFTCDLLALRDWLKQQRVTQIAMEATGVYWRPVWAVLEGHFEQMLVNPQHIKAVPGRKSDTQDCEWIADLLQHGLLKGSFVPPAPIQDLRDLTRYRAELRQSQARVANRIQKLLEQANLKLSSVATDALGVSGRQILRAIIAGQQNASELAQMARGKLKSKIPQLQQALAGRVRDHHRFLIAEYLDEWEALEERIGRMEAEIDKRIHPFETAVTLWQTIPGVERVTACNLVAELGVNMNQFPSAQNLASWAALCPGNHESAGKRKSGKTRDGNKWLRRSLCQAAWAVTRKKHCYLSAQFRRLAARRGSKRAVMAVAHTILIIAFHILKSGQGYHELGGNYLEQINKDQLQRYFMKRLERLGLKVTLEPATAVA

SEQ ID NO: 84613 - protein, 400 aa, unidentified
MLPKRSKRSAVESVKPASLSVSEKTQASRSPVDRSRLGLPQTAAEQDRRSSSGSSPNSRQNRDTIRDTSSHLQDRVNTIATPISDSPPVWIGIYIAKEKFDVHVRPLSKRFTFSNDIPGYEQLLVALKPFKTLRLIVVEASGGYERSLVSHLIDASQPVAVVNPRQARDFAKGLGHRAKTDPIDASDLAQFAEFVQPPLTPKTPQNQQELQDLVTRRRQLIQLRTMEKNRLQTTRGKIPLQSVQQTIQMCDQQLQIIEQAIAELFQADDDWNAKSQILTSVPGVGDATARQLLAEIPELGDANRAEIAALAGLAPYNHDSGKLKGRRCIAGGRANVRTALYMATLAARRFNPIIADFAKRLKDAGKPYLVIHVACMRKLLTILNALLKSKQHWNQKLEIA

SEQ ID NO: 84614 - protein, 339 aa, unidentified
MSKLLKNFIGIDISKTWFDVAVIKANQSIENVHNQFSQTPDGFKKMVTWLHKQDIILNDETLFCMEYTGIYNSGLVNFFVEQKAQLWVEMPLRIKRSTGFERGSDDKTCAIKIAGYAFRYQDKMQLWRPVDSSIEKIKNLISQRDRVINAITQLTVPIKELSECGCKSEAKELEKVQRSSLKALKKTKDSIEQLIVKTVQVDEVITKKVQQVQSIKGIGKVTAVALLVYTKGFTTFSNAKELACYCGIVPFTKKSGTSIRSKPTVSPHANKKLKKLLHLCALTSIKNDAEMQSYFNRKVQEGKNKMSVINAIRNKLIHRVFAVIRDDRFYEENYKRKCA

SEQ ID NO: 84615 - protein, 426 aa, unidentified
MNSTTKFAVTIGLDWADQKHDLWLQPADGSKAEHLQLEQTPEALHGWVAKLRERFGNRPVAMGIETSRGAVIAAFRPYDFIVLFPVNPKALKDYRSAFAVSGAKTDRSDADLLEELVRLHSDRLHPLEPDTELTRKLAGLVENRRHLVDERTRLVNQLHSTLKTYYPLAESLLGKQMNKPMAAELLARWPELRSLKNAQVKTLRAFFYKHNSRGAQLMEERLQAVQQAKDLTTDPAIIEPGRALVSALAAMLKPLHKAIASLDQQIEQAMDQHPDAAIFRSFPGAGPALAPRLLVAFGTHRQRFTSAAEVSQFYGLAPVVEQSGNSKTVRMRYRCPKFGRQSFHENAACALHQEPWAQSYYEQQKARHADKHHLACRALAFKLIRIYFACWRDRQTYDPAKYLRALQKNGSPLLAKLQASTTSVCE

SEQ ID NO: 84616 - protein, 413 aa, unidentified
MDRLIERCAGLDVHKATVTACVRMPGEAGGRHQEIRTFSTTTAGLLTLRDWLAGYGVTLVGMESTGIYWRAVYYLLEDDFTCWLLNAQHLRNVPGRKTDVADSAWIAQLVEHGLVRPSFVPPREIRELRDLTRYRKAMIQERTREAQRLEKTLQDAGIKLSSVASDILGVSGRAMVTALVEGTHDPAVLADLAKGALRKKLPALKEALEAHFRSHHAFIASEILTHIDYLDEAIERLSGEIEKVISPFAEQVALLDSIPGVNRRTAETLIAEIGADMGRFPTHRHLASWAGMCPGNNESAGKHRSGKTRKGSKWLRHALVESAGAAARTKGSYFSAQYARLKGRRGHKKAVIAVGHSILVVAYHVLERGQPYSELGEDYLLLRHSTEAYTNRLVRQLERLGHKVNLEPLPAIA

SEQ ID NO: 84617 - protein, 410 aa, unidentified
MERLIDRCCGLDVHKKTVTACVRVPGANGAREQHVRTFGTTTADLLSLRDWLEAFQVTRVAMESTGVYWKPVFYVLEETAICVLANAAQIAQVPGRKTDVKDCVWIAQLLEHGLIRESFVPPAPIRELRDLTRYRKAVIQERTREANRLHKVLEDAGIKLASVASRVLGVSGRTMLDALVAGTTDPAVLADLARGRLRKKLPALRQALVGRFRGHHAFLVAQILAHLDYLDEAIEAVSTQIDTVIVPFADDLTRLDTIPGVNKRTAEVLIAELGVDMRVFPTAGHLASWAGLCPGNNESAGKHRSGRTRKGNRWLRGALIEAALSAGTHSATGALAARYRRVMQHRGHKKAVVAVAHAILVTVYHLLARQTNYKNLGADYYDRRDAEHVRRRAIHTLERQGFRVTLEPAA

SEQ ID NO: 84618 - protein, 383 aa, unidentified
MESTIRYVGLDVHKDTIAIAVADEGRTEPDVLATIPHRWEVVRRYLKRVGRAETLLCCYEAGPTGYGLYRLLEAAGIACMVVAPALVPDAKGNRIKTDRRDAVKLARYLRSGDLVAVYVPDEVSEAVRDLTRARFDAKKAERAARQQLGHFLLRHGERYPGRSTWTAAHMDWIRFRRYPHEAQQRVLVDYLHTVEEAGERVHRLEADIAELVVSWSLFPLVQALQALRGVSVIAAATITAELGDISRFETPRQLMAYVGLVPSEHSSGQRRRQGCLTRTGNSNARWVVVEAAWSYRFSPKMSREIRERNEVVSTEVRRIAWKAQERLHRKYVRLLARGKCNQKAMAAVARELLGFMWAISREPRQLADSTTRRGDHESRSAMS

SEQ ID NO: 84619 - protein, 407 aa, unidentified
MRLFVGDDWAEDHHDVELMDSAGRVLARKRLPEGVAGIARLHELAGQHLGQDPDDAEVVIGIETDRGPWVAALVAAGYTVYGVNPLQASRYRERHGVSGAKSDRGDAHMLADMVRTDSHQLRAVAGDSAAAEAVKVVARTHKTLIWERTRQVQRLRHQLREYFPAALAAFEDLDAPDALELLGRAPDPGRAAALTRAQVSAALKRARRRDITGKATAILTALRSAQLGRPPAVTAAYAVTARSLIAVITVLNEQVKALESQVEADFGRHPDAEIYRSQPGLGSILGARVLGEFGDDPDRYVSGKARKNYAGTSPITRASGKKKTVAARFIRNDWLIDALMAQAISALRASPGARALYDAERARGTGHNPALRKVANRLVGILHGCLKTRTLYDEATAWPHYENTLAA

SEQ ID NO: 84620 - protein, 324 aa, unidentified
MIDGILGIDVSKNTLDVSISSCGKVRTKSFANTSDGWHHLLDWLVAQKIRRLHACLESTGRYSLGIACALYEAGHIVSIINPAQVRDFVRTKLGRNKTDGIDASRIREYCELFKPLPWAPPSEAHRRLGELQTIRSGIIAGLTEWKNRKNSGIVDAEAQALADATILHFTSQIGAVDKAIALAIENDSDLRSKRDLLLSISGVGETLAGVVLAELPGPDVLHSSGEVVAYAGLNPRQHQSGTSVDRATRISKIGNAVLRAALYMPALSAMRYNPAIVALVTRLKSRGRLKPKQIVVAAMRKLLVLCFGVLKTGKPFDPAIAMGR

SEQ ID NO: 84621 - protein, 317 aa, unidentified
MAKHVEKITLGIDVAKETCVVHVWETAETVPVPNQADAITAYLRSLAGPVQIALEPTSHYHRGWVEQALAHGFEVYLVNPRQLVHYREAVNQRNKTDPDDAWLLARFLTHEARQLRPYQPQDARAQALWALLKRRAKVVEARKQLQLSFREIQLSAQALFTQFKGLLARIDQRIQRAIQALGWYADYQRCLSIPGIGPLNAAALVAAYHRGAFASSDRFVAFIGLDVRQRESGSYKGKRKLTKRGEAEIRRLLYCATQPASGYPPFRAYYRKQVDKGLPKIAAKVILARKLARIAFALMQNQSTFRKIPEKTLAYTP

SEQ ID NO: 84622 - protein, 348 aa, unidentified
MIIIGVDFHPEFQQIASVDTDTGELQEKRLTHRDEAEKFYRALAGQKVRVGMEASGHARWFERLLAELQLELWIGDAAEIRTKRVRKQKTDRQDAQLILRLLLEDRFPQIWVPSWENRDLRQLLWHRHRMVQARTRIMNQLQAVALNEGLRCKKRLWRERGREQLESFLLAPWASRRRRDLLELMDQLNPTIAELTQAIEQQVEKCPEAQRLRTHPGVGALTALAFVLIIGKAERFHSGKQVASYLGLVPLEESSGNRRRLGHITKQGSSMLRFLLVEAAQVTVRSLPEWRSKYLHLMMRRGRKIAKVAMARRLAVRLYWMMRQGWDYQQRNKFGSHAGQPGHRHGVQ

SEQ ID NO: 84623 - protein, 362 aa, unidentified
MLKSTTIIAFDQHAATTVAAVLLPGHRTPALQALTSDVPTILRFVQRLRRQGTIRCCYEAGPCGFELQRALTARSIPCDIIAPALIPRRPGDRIKTDRRDAGQLAVLYRAGALTAIHIPTEQEEAARDLLRCREDVRADLLRARHRLSKFLLRHGRRFTATKKAWSKRHDAWLRAQTWPLAALDQTHRAYLRAVDEVLARLRDVEQDLRALLDLPALRPRVQHLRCFRGIDDLTALTIAAELGDPRRFPTAPSTMAFVGLVPSEHSSGTKRAQGGITKTGNAHLRRVLVESAWHYRHHPFVSASLRARQRGAPATVIARAWTAQQRLHRRYQRLAARGKPKQHIVTAVARELTGFVWAALTQ

SEQ ID NO: 84624 - protein, 367 aa, unidentified
MDQLWGVAGVDPHKRNFTVGVVDGRGGRRGVAAFDMTDAGCAELLAWLEGLEIELGRVGVEGSNGLGRQLCMFLAAAGFDVREVQSNRTAERRRRRRRQKTDQEDAEAIARETLAHDDLPPAGKQHQPDPAWDELVAVRNHRQSLVRQRVRLLNEVEAVLTGLPLAIRAALPATSRVRPRLRALVRGEAAELAASAADRVQLGRLADAAEDIARLDRRVRAIDAGIPVLLARLGSNLADEVGVGAVSAMDLLVEVGDPSRFRSDGQFARWCGAAPIAASSGEGRGDPIRHRLDLAGNRQVNSVLHTMHVTQVRCHQPAKEFIARKRAEGKTAKEARRAHKRQLANRIIRRMWDDHHRRHTHPLRDAA

SEQ ID NO: 84625 - protein, 350 aa, unidentified
MTIVGGFDVHRKQITFDYVETDTGLVRCGEIRPATRKTLRRWLGEHCPDGAAEMAVEGCTGWRYVVEELVAAGGTAHLADPAETAGLRGPKKRAKTDRADARLLRTLLLEGRLPESWIPPAHVLEVRTLGRLYCALMEERRAWRQRIHAQLFHQGCPPITALLTEAGREALTTAELSTTGRQYVDTALRRIDELTAEIDPVRTQLANFARRQAGCRALQARQYGVGWLCAAIMWAEIGDARRFARSDQLVRFAGMDVTVYSSDGKRSPGHLSRQGSPELRWATFEAAKCAARPGSPDYGYYHKVAARPDSGKIPTLAVERKILRRCYHTLRELGDAALAMPVPEAKGVAA

SEQ ID NO: 84626 - protein, 351 aa, unidentified
MTAYCGVDFHTRQQTIAYCDTRDGEIKLIQLRHDDRESLRRFYSQFEGPVMVGLEAGGYSDWFERFLEDAGIEAWFGNPTEIRRRARSRQKNDRRDAELLLDLLLKSEFPRVYRQKPEARAVLSTLRYRHKLIQLRTKATNSLHALAIREGLTLGSKLLTKAGLLQLRALPLTAVQAAQRDEWLGLIAQLSTNIRRIEHELLHLADEDQLVQLVRSHPGIGLMTGLALVHTLSPISRFPNSRKVAAYVGLEPREFSSDTKQRWGGVSKAGSPLLRFLLVEAAQQAARYDPELKNTYLHLSVRRGKARARVAVARKLLVRAYILLRDQIDYATYRRAVAVGKLGNSREQSPA

SEQ ID NO: 84627 - protein, 351 aa, unidentified
MPRTSTVHAVTTIGIDMGKNTLHMVGLDSRGAIVLREKVSRGRITSRLANLPPCLIGIEAGMATHYVARELAALGHDVKQVPPTYAKPFRQGHKNDFRDAHAVAEAVQRPTTRFVPAKTDEQLDLQALHRVRSRLVSERTAVINQIRSFLLERGIIVRQGLRFLRQMLPDILAKRTDVLSPRMIRIVADLASDWRQLDERIELVTDEIETLAKSDDSCRRVMTVPGIGPIISSAMVAAIGSGAAFAKGRDFSAWIGLVPKQLSTGDRTILGRITKRGNGYLRTLFMQAARVILLRPASWPKHGFGIWLARAAVRLHPNVLAAALANKLARIAWTVLAQERSYEARVTKVAA

SEQ ID NO: 84628 - protein, 404 aa, unidentified
MFFAGIDWSDAKHDVMVIDETGQKLGSMRVDHTPEGLATLNTFLEQISGPQQRENLACIIETTHGLLIAFLLEAGWPVYPVNPRTVDRRRSASGAKTDAIDAYLLAKTGRADFADLRRLQPDSELVQELKTLTRDQDALVQMQARLVNPLTACLKDYYPVALELFTKLQQHSTLIFLQTYPTLDKAIGASREQITQTLKQAGHTTAEKVAGHIFETLHRPSLKANAIVTRTKSRLMLALVAQLLPLVEDIAQYDKEIKRLFLSHADSELFLSLPRAGKRLAPRLLAEVGDDRERYADASSLQALAGTSPVLFQSGTYAKAHRRVGCVKPLRNALFQFAWQSTHQEEWAQAYYQRKRAEGKSHTVAVRALSNVWVRILFAIWNKKECYQTSTFETARRVHATRIA

SEQ ID NO: 84629 - protein, 343 aa, unidentified
MQAITTIGLDIAKSVFQVHGVDAGGQVVIRRQLKRRYVLAFFQKLPPCLVGIEACASSHHWSRELQALGHTVRLMPPAYVKPYVKRQKNDAADAEAICEAVTRANMRFVPTKTPEQQSGLMLHRTRHLFIRQQTAVINAIRAHLAEFGIVAPVGRKGVEDLLRVIADANDKRVPEVVRGCLAALGSQLLGLKSQILAFDRMILAWHRSNQTSKRLNCIPGVGPLLATALVANVADPKAFRSGRNFSAWIGLVPKQHSSGGRDRLGSISKQGDRYLRGLFVAGALAVIRQAKLHGTKYRPWVAALLARRPTKVAAIALANKLARMAWAMMATGERYNYPAALRV

SEQ ID NO: 84630 - protein, 423 aa, unidentified
MQNTAARKRKQVPEGCLVVGVDPHKKRHAAVAITQDFTIRDRFKFDNTREGLEFLLRRIRTGMVKPDCQRVMFAIETGGHYWRNIAYYLEERGIPYRFINQYTLKRRREGKDLNRRKNDYRDSEVAAQLLCTGEFTESKIPQGVHAELRAAHNGYRRLVKERTRITNLVKGLLDGLFPEFVQVFKDPGGLTALSVLLTCSVPRVIAGMTEEEFVATIEAQHRGRLMRKKLRALHCSARTSIGIEAGARSVSSEISFLVEKLELIRRHIRIIEGTLVRLVDETEEGKYLLSIRGLNYTAVAGLLAELGCFKSYRSAKQMIKMAGSNPTESESAGKKKTRTPMSKQGRPVLRYCAWTSVIPMLRFNPDFRAWAKQRRERPAHANPLCGREVVGAALNRLLRLAFALVKNQTYYQVSKLELTLVAV

SEQ ID NO: 84631 - protein, 359 aa, unidentified
MLKYSMGLDISAKTIHACISVIDAAQKVTVKSSCKIDNTLSGFKQLDEWVNKHHKQKDVPLVVTMEATGVYYENCALYLFKQGYSVSVLLPNKAKKWLQSEGLKSKNDKIDAQGLSKMGAEKALELWQPAAEYYYELRAMTRQRQSLQEFKTAVGNQLHAEEHGMYKNKLVIKQLKQQISFIEKQITDLEPVIEAHIAADKEVAEKVENICKIKGLGIQTVAVIIAETNGFILFKNGPQLVSYSGYDVIENQSGDHTGKTKISKKGNSRIRRCLFMPAFNMVKFKQTPFTDLYHRTFEKHGLKMKSYVAVQKKLLVLIYALWKNNTAYDIDYKNKYTRELEQALPLGLASIEATLTNAI

SEQ ID NO: 84632 - protein, 454 aa, unidentified
MRKPRVIPDEDHEVVYERVAAVDVAKASGVVCMRLPDPARPGRYSNQIWDNVPAARARITELGRELLRHQVQMVTLESTSDYWRIWYYVLESIGLAVQLVSASQARNLKGRPKTDKLDAMWLARLTQWGMLRPSFVPPAAIRQVRDFTRARTDLVHERTRVLQRLEKLLEDAMVKITSVVSDGMKAKSAVAMVAALVAGERDPRTIADLAKGSLRGKRDALAEALDGMFDSHHGVIAQALLDQVAFLDQRITQMEAGAIAALAQVEESWGVDADGETGPGRGTGPDSRVLAAVYRLAEIPGVSVWLAIVIIAEIGLNMTLFPTPAHLVSWMGLCRSAAQSGTRRGKGKPKKGNSYARAAAGQAAIGAAGTATFLGERYARIARRRGGAIAQVAVARSTMIIVWHLLADPAARYRDLGPDWHAAHVHRDKKIRNHIRGLQALGLTVTVTGDEHAA

SEQ ID NO: 84633 - protein, 333 aa, unidentified
MNEFNHFLGIDISKEYFDAVVIIDRDMAKSEHRRFNNDRKGITALLKWLGRHGSNADNTLVCLEHTGMYGKPVIKYLLAFKFSLWVEMSFRIIRSMGIQRGKNDKLDAYRIACYALKNVAAATIYRAPRTVVEKIRTLLSLRDKLLSTKVKLTRCEKELKTFDPVLSKLCKQSQARTLKGIDRDMADIDCRIKALIEEDSSLAKLFRQTTSVVGVGRVTALYLIVFTNEFSMYTDPRQLACYAGVVPFEHTSGKSVRGRPKVHHMANKRLKKQLHLCAMSAIMHDPEIKRYYHRKVAEGKSKMLVINNVRNKIVQRICSCIKNNKLYQVNLAI

SEQ ID NO: 84634 - protein, 385 aa, unidentified
MVYIGIDIAKFKHFASVVSSDGKVIVKPFPFENSRQGFMKLIEEIENFQDCLIGLESTGHYAENLIQFLYERNYSVALINPIQTDSLRDSNIRKTKTDKVDTMLIVQCLMLKKYSLVSSKNIDLIKLRRLSRFRLEMVQQQTRIKTQLTACLDIVFPELARFFKGNLHLKVAYALLEKYSSAKAIRSARIDGLTNLLYNNSRGKYNYEKALQLKALAKDSIGLDNPAIELQIQCLIKQLRLYQKQISDIDISIMTIMEIINSPILTIPGIGYTLGAMIISEIDDIKKFSNPSKLLAFAGLDPVVKQSGNFQSDSLKISKRGSTYLRYAIYRVAFLIIYNNETFHNYYFDKRSQGKNHRVALGHVCNKLVRVIFKILTDEIPFNLS

SEQ ID NO: 84635 - protein, 346 aa, unidentified
MKLIKKVIGVDISKDSFTVRFGTLDQDLQQKTSKPFTFKNNPAGFNQLLKTISKVHYFNCEDLSSKDIPVWFIMEATGVYYENLAYFLTENKFSVSVLLANKVKNFSKTLENKSKTDDIDAAIQTQYGLEKTLKAWTPPSGIFRELKELTREYRSIKESITIIKNQMHAKSCAYNANKETVKRLNQHKKFLQQQLKQINAQITALLKSDKELYEKIKTVSSIKGVGIMTVTKVVAETAGFALIKNKNQITSYSGYDIIHDQSGTHNGKTKISKKGNSQIRSALYMPALTAIRCNKELKKVYIRLCKTKINKKIAIIAVARKLLILIYCLWKKNEKYNDNYRNLKAA

SEQ ID NO: 84636 - protein, 432 aa, unidentified
MRSTKMAKQNEETIAAYIGLDWADSEHEVTMLVVETGEVESRKLKQESEALADWVQSLRERFSGRKVAIAIEQRKGALIYALMCYDFLILYPVNPKTLARFREAFYTSGAKSDPGDSGLLLDLIRLHRDKLRPWVPEDADTRLLQMLVEERRGLVDEVTRLTNRLKSTLKQYFPQALEWAGELDSRQALDFLTRWPMLESIRKAGAVAVEKFYRQHSMRNQDKLEQRVKAIKEARALTTDRAVLAASKMKALAIVRQLRALGKSIAEMEARIQELFEQHRDHEVFSSFPCAKKVLGPRLLAAFGGDRTRYESALDLQSFAGIAPVTRSSGKSKTIHKRMACPKFLRQTFHEYAAQSIKKAGWARVYYRGHRDKGVKHHAAVRALAYKWIRIMFRCWQEQEPYDEAKYIASLKRRSSPLVSGLPPAPGSLVEV

SEQ ID NO: 84637 - protein, 407 aa, unidentified
MEVLYPRCAGLDVHAGSVTACARVASGTQVTYEHCTMPTTTRGLLELDEWLTGHGCTHVAMEATGVYWKPVWHVLEAHFTLVLANAMHIRNVPGRKSDMNDATWIADLLAHGLIRSSFVPPAPIQELRDLTRTRRQLVHEIARHVLRIQKTLEDANLKLTQVMSDIVGVSGRAILNALVAGETDPDRLVDLTRGRLKASRADLLDALHGRVTDHHRFMIKLHLSQIDALETAVATIESRIGDALGPFRAAVSLLTTMPGLSETTARVLIAEIGTDMSRFPSVGHLISWAGFCPRLDESAGKRRSTRTRQTSPWLKPTLINAAWAATRKKDSYLRAQFLRIKSRRGAKKAILAVASSMLTAAYFMLRDGVEYHELGHQYFQQRDKEQLAKRLLQRLRDLGVAVEVNAA

SEQ ID NO: 84638 - protein, 345 aa, unidentified
MSEYDGKQFVGIDLHRHRSVIVRQTDTGEQLSVTRIDNDPMTLAQEIGKAGECPEVVLEATYGWYWAADVLAEAGAHVHLAHPLGIKGFTYRRVKNDVRDAADLADLLRMGRLPEAWIAPPPTRELRELVRHRAKLVALRSGVKASVHAVLAKQGLHLPVTDLFGVRGRVLLQQAPLDGPYRARVNSLCRVLEALDFEIDLAARLVAGRLAHHPGYHAIQAIPGIGPTLAAIFVAEIGDVGRFTSARHLCSWAGLTPRHRESDTTVHRGPITKQGSTLVRWAAVEAAQKTPAWAGWLSRARAGIAQRRGRNIATVAVARKLLILVYYGLRDGHIRALCQAGTDVA

SEQ ID NO: 84639 - protein, 348 aa, unidentified
MAMLAEVVEVVIGVDTHKQTHTAAVVTAATGQTMVTMTVAASPDGYQQLLELADQHGRQRVWAIEGTGGYGAGLTRFLSAHHEQVVELDRPKRAARRHGAKSDPLDATRAAREALGRDQLAQPRATGPRAALSVRLAARRSAVQAAGDAQRQLHALVIAAPQALRGRLQDCSTRQLVATCARLRVQASWDVETATTAATLRSLARRIRELTGEAADHRQAILVLVRAWRPDLLTRTGVGPIVAATVLCAWSHPGRCRSDAAFAMLGGAAPIPASSGQTVRVRLNRSGDRQLNQAMYTVVLTRLRTDPATRAYASRRRAQGKTNREIKRCLVRYVARQLYRLLEAQPSS

SEQ ID NO: 84640 - protein, 410 aa, unidentified
MEVLYQRCCGLDVHKETVVACLRIVSGGEVVREVRTFETTTASLMALSAWLAENGCTHVAMEATGVYWKPVWHILDDGDFQLILANAAHVKNVPGRKTDVNDATWLADLLAHGLIRASFVPDTQTQELRTLLRTRKQLVREKSSHILRVQKTLEDANIKLDSVITDVMGMSGRAMIEALIAGESNPAKLARLANYRLRAPQEKLREALRGRVTKHHRFLLRLHLNQIDALDAAIATVDQQVQAGIAPFRCAVELVTSIPGVSDIGAQVIVSEIGTDMSRFPSESHLISWAGMCPRNDESASKRRSNRVRKGAPWLKTTLVQCAWAAVRKKDSYLKAQFLRIKARRGPKKAIMAVAASILTATYHMLKDGTLYQDLGSNHFQTRSKGQQTKRLVQRLADLGYDVALTPLAS

SEQ ID NO: 84641 - protein, 356 aa, unidentified
MNLRRVQQFVVDGKEIFVGLEDSKKAWKLAVRSEGMLIHQASMEAKYSVLIRYLRNNFPNCTIHLPGEAGFKGFNLYDRLVDDGIDRVVLPPHVVTEPNVNRVKPDKRDAKRLALILENHDFRDACHVPDRERREDRQISRTLIAMQKDVIRTRNRIRKLLDFHGIEASFPDRWGRDEFRALKKLSLPEPLKISVDVLLTQLEELWNHQVTLRTALRKLCRKERYAKAYTIARSLPGIGWFTAIRLVLELGEDLSPFTSGKKIATFVGLTCSEYSSGQTEWKGHITGMGSRFIRATLIENSWAAIRKDPVLLAKFSRISRASGSKKKAIVAVARMLIVRLRACVILGTPYSLGVVR

SEQ ID NO: 84642 - protein, 444 aa, unidentified
MQIMYARCAGLDVHKKTVVACVRLVADDGSVSTQVRTFGTMTVDLLALLDWLVVLEVTHVAMESTGELWKPVYNLLESALTILVVNAQHIKHVPGRKTDVKDAEWIADLLAHGLLRASFVPPAPQRMLRDLTRQRTALIQERARVVQRMQKVLEWANLKLSAVVTDITGVSARAMLTALVGGQTDVSALVGLAKGSLRTKREALEQALRGTLQPHHTFMIARHLGHLDFLEEEIATFDAEIAQALEEQGKPPPAGSSMDVGQGAVALTGSGGAPERGRGEAAAQLVDSVPGIGRRVAEIILAEIGTDMRRFADAGHLASWARLSPGQHESAGKRQNSRIGSGNRYLRSALIQAAHAGVKQKGSSLAAFYQRVAARRGKKKAIVAVAHKLVRIIYHLLTTGEPYLERGAMALDERQKDRLLGRLQQRIVQLGYTVHLEPAAATAA

SEQ ID NO: 84643 - protein, 432 aa, unidentified
MITHRLQAGIDFSQKKADFCLLYPDGRPLEQHRSFDNSLPGYSLAKALMIDALETHQFDGLDVSGEATGFLWLPFFNQLAADPDLQAYDLNLFLLNPRWVKWFKKCFPQDDKTDQKDSFYIADRTRTRRPDTTWSPQLDTLPLRFYTRLRFHLVQNLAREKCYFSAFLFLKASSYRRLKPFSDVFGVTSRRVLSEYAILDELAAIPVEDLAQTLHEMSGHHLPDPFDNARKLHRVAVESFPLPDALALPVHRILDLTLEHIRFLEGQIALVENWITAEVQAHPAIMKLATIPGVGPVFSSGNGAEIGGTHRFLQAQKWDKKRKRYRPRNLRDAEDAVAKIAGLWWPRSNSGDFEAEDRRMAKTGNRYLRYYLIQAANLMRQSIPEYAEFYRRKYREASKHHHKRALVLTARKSVGLVVGLLHRNEAYRPREV

SEQ ID NO: 84644 - protein, 346 aa, unidentified
MVVIGIDPHKRSHTAVAVDAVGRKLSQLTVPSDDNGLLRLWAWAARFGPDRRWAVEDGRGIAARLVRTLIGQGAVVVWVPPKLMAQCRASARTRGKSDPIDALAIARAAVREPDLPTAHLDDDAADLRLLSDRREYLVKARTAAVNQLRWHLHDLAPHLDAPGRLTGPRQLDRLATALSGLTAGVRRDLALDLVTDIRRLGEQIRQLDKQLAALVTPLAPALLAIVGINVVTAAKILGEVAGVTRFRSAAAFAMHTGVAPIPVWSSNRPQYRLNRGGNRQLNACLHRIVITQLSHSAEAKAWRQRWIARRPNATGKAALRALKRHLADVVYRALHADHQHQLASAA

SEQ ID NO: 84645 - protein, 345 aa, unidentified
MELHTIGIDLGKTVFHLVGLNLRGEVVVRKKFSRKQLLHYTANLRAELIGMEACGGAHFLGRALREQGHEVRLMPAQYVKPYVKTNKSDFIDAEAIAEAVARPTMRFVPIKTDDQLDMQSLHRVRERWVMRRTAIINQIRGLLLERGITLRKGRKYVDEALPGILEDATAKLSGALRILLAQLKLELDQMAVRIDEADAVLNQTARENAACQRLIAIPGIGPVTSTALIAAIGNGAAFHKGREFAAWMGIVPREHSTGGKQKLLGISKRGNTYLRTLFIHGARAVLQQRVKQTSGLRAWLAQLSVRSHPNVTVVALANKLARIAWAVLAKNEVYRPLVFMGPAAV

SEQ ID NO: 84646 - protein, 338 aa, unidentified
MEVIHERCAGLDVHKETVVGCVRVSERGAVRHEVRRFATTTAGLLELGDWLRQAGCTHVAMEATGVYWKPVWHILEGEFELVLANPAHIRNVPGRKSDVNDATWIADLLAHGLIRASLVPPGPIQELRDLTRTRKQLMREVVQHKLRIQKVLEDANVKLASVVSDVFGQSGRRILKALIAGQTDARKLAALGSDQLSASRETLATALHGKVTAHHRFLLKQHLQMIEHLEQTAREFEAQIEAALEPFRAAVERLMTIPGVSATAASVIIAEIGLDMGRFATPGHLRSWAGLCPQLNESAGKVMSRRLRYGAPWLKTVLVQCVPGRRPATSTTIYTPSS

SEQ ID NO: 84647 - protein, 403 aa, unidentified
MTKCFAGLDWASRVHAVCVIDARASVVAQFEVNHDAAGLTELCHRLRALRVSAVAIERPSGLLVDSLLEAGLQVVPIHPNVVKATRPRYRSHGGKSDASDAYLLADLLRTDGHRFKPLAAECDEIRALRALVRGRDDLVATRVQLANQLRALLESFWPGAAEVFFEVDSPIALAFIQRYPTPESASRLGPKRMAAFCAQHAYCGRRSPEELLERLHEAPAVTLGELEMEAKGELALSLARVLTRVVEQVRLLTSRIEHAVQASDDGRILMSFPRAGRICAAQILSEMGSVRERFDDPERLAAQAGVTPVTYQSGKSKTVAFRWACNHRLRAALTCLADNSRHASAWAAAIYDRARGRGCDHPHAVRILARAWLRVIWRAWQDRQPYDVQRHTGAMLHLAAAGG

SEQ ID NO: 84648 - protein, 418 aa, unidentified
MKVVFPTCCGVDVHKSFLVATIIKTPKDSLQPSYQKKRFSTFNSDLNHFANWLHENNCLDVCMESTGKYWVPVYNILEKRGIRVIIANPKWVKAVKGNKDDTKDSKWIGDLFRIGLVKSSFIPAKDIRILRELTRYRYKLTSMKSSEKNRFQNAFTVCNVALDSVVSDMFGKSATAITDYLTSDENFDAKHCISLLHHSLKKKADDVFQAIEGYEMTAEQKTRIGIVRDHLHYIDALIERVDSCINTMVDKYEGYIALLCTTPGIDRSSAITILSEIGIDMTQFNSSKRLCCWAGLTPGNNESAGKKKSVRISRAGVYLKPALVQVAHAAVKDKHSPYYALKYERIAKRRGKKRAIIAIARMILTAVFVMLSNLEEWNPVDLYRVDMPEHLKEKQLAKAVKQAVRFLETQGLTVLDSA

SEQ ID NO: 84649 - protein, 315 aa, unidentified
MITSYQNFIGIDIGKFKNVAAVHNQKNIIKFDNNSAGWQQLFQEFSNILPNAFVTLENTGKYELGLAHFLVGKNVAIHRANTRKVKSFTLSHGTLAKSDQSDAKTLAQYGFERYSTLSLFVPMSKEQTTLVALCQRRDDITQMRVQEKCRLAAPENDYIKESCQKAVDFFNNQIDELNDSIQKIIDGNPELQKRQKIIRTVPGIGIKLSQDFVCLMPELGHLNKKEVASLAGVAPHPKESGKTIGYRRITGGRSNVRRKLFTAAMAAAKSKSALGAFYFKLVESGKKKMVAITALMRKIIVIANARLKEAINLHI

SEQ ID NO: 84650 - protein, 409 aa, unidentified
MQVVHEVCCGLDVHKKTVTACVVWATGRRRQTREFGTFTRELLELSDWLRASGVTHVALESTGVYWKPVWNLLEGQFEVLLVNAQHIKAVPGRKTDQKDSEWIADLLQHGLLRASFVPPTPTRELRDLTRYRASLTQEINRIANRIQKVLEDANIKLASVATDTLGASGRAMLEAIVNGEQDSQRLAEMSRGLLRNKIPQLQQALEGRVTAHHRFLLRELLDHHYFVESKMKRIEQEVAERLGPFQSEVARLCTIPGVDRVTAWGLLAEIGLNMKQFPDAQHLASWAGLCPGSHESAGKRKSGKIRKGSLWLRRCLCQGAWAVSTKKNNYLSALYRRLAARRGSKRATIAVAHKLLVIAYYILRDGTCYSDLGADYFDRLNPEGLRRRLTKRLEGLGFKVTLEPLAQVA

SEQ ID NO: 84651 - protein, 383 aa, unidentified
MAQVNDLSRSLTAFDPISTLVVVVEMSKASWLVSGAVPGVERQPLKKLEPDATALLRLIERWRSAGWPISRIALAYEAGRDGFWLARWLIARGIEAHVIHSASVAVSRDRKRAKTDRLDAAMLMRVFLGWLRGERGHCGMVVIPTMEEEAARRPSRERESLVNERSRITNRMKSALARLGIRGFKPHLRKAPERLADLRTAEGTGLPANVIEEFRRDMARLALVREQISSIEKTRAERLERAPDTGPHAMVRLLARVIGIGIETADMLVREILSRKLRDRRAVARYAGLTGSPDESGLKRREKGLAKAGNARVRRGLIQLAWRFLMFQKDSALARWYRTRTEGPSGARKTTMIVALARKLLIALWRLVTTGEVADGVELRPAT

SEQ ID NO: 84652 - protein, 414 aa, unidentified
MKAPTVEFEQLIGRGCGIDVHKSLLVATVRGTGLQEETRTFSAFTEDIEKLRDWLKSCEVTHIAMESTGVYWKPVFNILEADFEIILVNARHIKNVPGHKTDKKDSRWIAKLLLSGLLKGSFIPPLPIRELRDMTRYKRKLIEQKSSEKNRIHKILEDGNIKLSSVVSNMSGATAEKIVDALISGETDIDKLTSFRHGKMKSSVEDLAKSLLGKLTAHHRFMLQLVKESIKEKEMLIAKLDKQIDEHLKANELELSRELLATIPGVGEEGAEYIIAEIGNDMSAFANEQHLSSWAGMSPGNNESAGKKKSSRITHGDKHLRPLLVQFAWAASRTKGTYLRSKYDSLAGRRGKKRALIAVGHKILIASYFILRDKRPYKELGGEFLLNRKKDKKVNALLRQLNDLGVKVELSQAS

SEQ ID NO: 84653 - protein, 338 aa, unidentified
MKIATIGLDLAKNVFQLHGVDAAGRVVVRRRLRRSEVIKALTGAPPCLVGMEACAGAHHWARLLTSLGHEVRLMPPAYVKAYVRRQKNDMADAAAICEAVTRPSMRFVPIKSEEQQALLLVHRTRDLLVRQRTSLINALRAHLAEFGVVVPKGAPHGRRLASMLIDGEAFGLPASAAPALQMLARQCQALSGQIADLERELRQRSLQDEVTRRLLQVPGIGPITATALSATVVDPTSFKSAREFAAWIGLVPRQHSSGGHERLGGITKMGHAYLRRLLISGAQAVLLQAARNPAATSPWLARLLREKPRKVVAVALANKTARIVWALLARGEAYRLAA

SEQ ID NO: 84654 - protein, 313 aa, unidentified
MSKTFVGIDVSSQWFDVAVTPGRSCWRVDYTPQAVAGFVRQLLTLNVALVVVEACGRLERPLARALDEARIPVAVVNPRHIRDFAKSIGQLAKTDTLDARVLALYAATINPQPRPLPHVEEEFLQSLLARRRQLVGMLSAEKNRLRTSVPELRPGIERHLTWLQSEIDALSSEIAQRQEEHPLWRERKRILERVPGVGTTTSAMLTAYLPELGHLDRKKIAALVGVAPFNRDSGQRTGPRSIWGGRREVRAALYMCTMASIRWNPVIRDFYTQLRGRGKRPKVALVACMRKILVTLNAMVRDGTEWHPQPASP

SEQ ID NO: 84655 - protein, 336 aa, unidentified
MIIIGCDFHTRYQQIAMLNTETGELVERRLEHENGEARTFYAQWSKPIRVGIEATGYTQWFEQRLTELGQELWVGDAAEIRASVVRKQKTDTRDAAHILELLVQERFPRIWMPTPDERDVRQWVLPRVKLVQMRTKVMNQLHALAMGQGLCRKKKLWSTVGRRELEALRLGPWASRRRQELLQLLDQLQASVVEWDRAVQQQAAGNSAAVRLMTHPGVGPVTSLAFVLTLGPSSRFRRGKQVASYLGLNPQEKSSGDRQHTGAISKQGNSMMRWLLVEAGQTAARWDPELRRVYQRLKFRRGSSVAKVAIARKLAVRLYWMLRSQADYAHLVRPAG

SEQ ID NO: 84656 - protein, 392 aa, unidentified
MRFIGIDIGAEAHVVAVVEETGEVLMRPRRFEESAAGYERLFEELGPAEGSLVAMEATGHYWKNLFVVLAARGFEVALLNPLRTRRFAEEDLERTKTDAIDALGIARFAAQKRPAPTRLPDAATEELRELVRLRERLVQQLGDHVRQLHRLVDLGFPEFTGLVKTLDSELATALLRQFPTAAAFAHVKPSRVSRLRFDGRRRVGDQLASALVETAKVSVGQHHGEAYQVQVRYLCEDIDTLRGRLRTLGGDIERKLEAHEVGKLLTTIDGIGPLTAARLVAELGDPAEYRDGNAIAAYVGVVPGLKQSGKRTSMRAGLSRIGNARLRKALWMPTLTAVQKNPWLRAYYERLRARGKPAKVALTASMRKLLLAVHSVARTRQPFVPHIAEVPA

SEQ ID NO: 84657 - protein, 348 aa, unidentified
MALPIVESRAITGGVDTHADVHVAAALDPIGGLLGVREFPASPAGYARLLEWLDGFGTVCLVGIEGTGSYGAGLARHVTTAGVRIVEVDRSDRQDRRRQGKSDPLDAVSAARAAQSGRARGAPKGRDGTVEAIRALMVARRSAAAERTQTINQARALIVTGPDDLRARFTKHTVATLVAELASLRPRPGSTVGYATRIALRELGRRAEFLDAQLDRLDELILPLVTTHAPGLLALYGVGPHTAALLLIAAGDHPERLRSEAAWAHMCATAPIPASSGKTVRHRLNPGGNRQANHALWRIVFTRMGSDPATRAYVERRTAEGKSKAEIIRCLKRYVARETYPCLRAAAG

SEQ ID NO: 84658 - protein, 334 aa, unidentified
MSKGIIAQNEEIVIGVDVSDAKHNIAVVNTRGEIVEQIEMRGPTREKWAKYLERFPGCAVKVIYEAGPQGYTLYDTIREFGGDAVVIAPVKTIGIKTDRRDALRIVRDFVSGSARVITVPDRKKRVMRQLLRQRHQIKKDIVRIKNRMSALTRFHGLVGTFRAVFTRKRDVQVLTFCFEQQQEMCAFLEKKRDEIDALLEQVARDPEYRDDIGKLKEIKGIGTLTALEIALNVADITAFGDGASFASYCGLCPGEWSSGATRRLGHITRRGPGRLRGALVQCAWSAVRYDLEEKKKFNELKTRIGKKKAIVAIARRLSVRVWNKLNPREAAQAA

SEQ ID NO: 84659 - protein, 377 aa, unidentified
MSKSIAGVQRFVGLDVHAETIAVAVAEKDGEVRSLGIIPNRPESVRKLLSKLGPMGSWHACYEAGPTGYTLYWQLTKLGAPCVVIAPTLIPKKIGDRVKTDRRDAEHLARNFRAGELTPVWVPDAAHEALRDLVRAREAAVQDQLRARHRLGKFLLRHGRRPKQPMRAWSQTHLDWIRTLLSAEQGALRSTLEDLLAEVDHQGQRIVRLEKDLDEAIEEAPPTMREVVRALQALRGVRKMTAITVVAEVGQLSRFPKARQIMGYSGAVPCEHSSGQSTWRGGITRTGNAHLRRVLVEAAWSQRYAPTLSRALRLRQQGLSTEVVQIAAKARHRLSARYRRLMARGKPKQQVVTAIARELLGFIWAIGVQVEGSSPAA

SEQ ID NO: 84660 - protein, 427 aa, unidentified
MKKRIKIDHLSTLCVGLDIGSRSNYITALDFDSNRLINMKPVPNAASGVEQMESMILAVLEANAQFKYLLIAMESTSFYGVHVANYLSTSDRLKPYDVKVFCLNPKEVANYKKSFTGLGKNDGLDSFIVADYVRVGRVDIDPWRGAQYLALQRLTRQRRHVTEAITREKNYVLNNIFLKFSEFALLSGAESPLTNKFSATAEAILTEYKTTEDIANASLEDLVAFVSSSGHGRFSDPEQVAKLLQKAARDSYRLDKSLYEPITTSIACSFNCIRAFEHEQKVLNKAIAETVAGLNPVEYQILKSIPGIGPVYAAGILAEMGSIRCFPSNDSLAKYSGIVWRDNQSGEFDSDDTPMIKAGNRYLRYYLIEAAGSVATYCPEYTAFYEKKFAEVSKHQHKRALALTARKLIRLIFGLLDKNQLYSAAKG

SEQ ID NO: 84661 - protein, 315 aa, unidentified
MVTGIDCSKDYFDISVQSGEKEVFKGRFSNDQAGFVEALGHMHGSHIAMEATGPYYFRLARFLWERDERVSVINPLVIRRFSQMTLARTKTDRKDAQLIAKFTSMTEPTQWRLPEEHVLRIRNLEGYIKGQKECRNLLGNQLHAYEYAGTLDPSLRKTMEEGIKVFDENINEHERQIQQIIMENYGELNANLRSIPGIGPRSAALLIILTDGFSRFEGHRQLISYFGLAPRIFESGTSVKGKGHICKMGMGQVRKVLYMAAISAIRSNTACSELYGRLMEKGKPYKVAIIAVVNKLIKQAFAIAKSGKGYIAKAA

SEQ ID NO: 84662 - protein, 342 aa, unidentified
MTVLYAGLDVSLELTNVCIVDEHGRLVRESRVGSDPELIAAELQRIGDSFVRVGFEAGPLSQWMFFGLKEAGLPAVCIEARHAKAAMVAMNRNKNDRNDARSIAHLIRSGWFKAVHVKSVVSQELRSLLVAREFFVNKLRDHENEIRGLLRPFGLKVGRVSASGFDARVRDLVDGNPQLGLCIGALLDGRAAMMARLSVLHRELLRVTANDELCRRFMTIPGVGPVTALAFKTAIDDPARFRRSSDVGAHLGLTPRQYQSGETDVRGRISRSGDAFTRTALFTAAHVMLTRSCQWTSIKAWGVRIAKRSSLKKAKIAVARKLAVVMHRMWRDATPFRWGAPA

SEQ ID NO: 84663 - protein, 410 aa, unidentified
MLYVGIDWAEKTHRVCIRDDEKIHAELEVPNSAEGAADLLAKIATIEPDRRNVLFAIEANHGPFIDAILDAGYTIYPLNPKAVERYRDRFRLARTKSDWIDARVLADILRTDRQAYQPLKPDSEKTTMLRLLGRDCAELEKTQTMLRNQLRSALLCYFPLATELFSDLASPTALAFLKAYPTHQDARRATPEALEALLRAHRYPKAAKKARELYQALQRAPFAARPAMSAAKQMLVATLVAQLEVLNARISEYRKEIDALMQEHPDSAIFTSLPGAGTYLAARMLGELGDDRKRYPGVRVAQARAGTAPVTRQSGKSRVVVFRNACVKPFRETMYLFAFCSTKWCSWARDYYREKRAAGKTHSQALRALGNVWLKIIFAMWKNRTPYDEARLMAARLTAAQHRTPTRQVA

SEQ ID NO: 84664 - protein, 425 aa, unidentified
MNYKQNEKINQVKESTLVIGIDIGSTTQYARAFDWRGIELGKVFTFSNSREGFESFKAWMQHLQDKYRKSDVIVGIEPTGHYWFDLGAYLEDEGILLVMVNPYAVKQTKELDDNSQSKNDRKDPKVIAKLVTEGRYSAPYTPDGVYADLRIMVANRKRLIREMSQIKNRFARWFAIYFPEYTDVFGDYEAQSSMLLLKKVCTPEAIVELGAEKINQIWRDAKLRAVGMKRATTLCERAKRSIGLKKGSSAARYEMKLLLEDYEYKKAQLDAVMEEIEKLCRKIPESEQMLAIKGIGVITVAGFLAEVGDVRRFESPRQIQKLAGLSLRENSSGKHKGQTTISKRGRSKLRAVLFNAAIPLIAKNPEFKSLHEYYTTRANNPLKKKQSVIAISCKLIRVFYAILANGVTYDAQKMLSDIHRQPQAA

SEQ ID NO: 84665 - protein, 421 aa, unidentified
MAKAAVRDEVLYLRAAGVDVGKRFVVACVRTPAAKGGRWQLETERFDTHPAVMRELAVWLAERSVEVVVLEATGEYWRAVFYPLQDAGLNLMLVNPAHLKGVKGRKSDPSDAAFLARAGASGMVLASFVPPRAVRELRELTRRRTEVGADRGREIQRLEKALEDTGMKLTSVLTNVTGVSARRILSALIAGEHDPCELAELAVSHARAKIPDLVAALDGTFTDHHAYMCAHYLAQIDHLADVLAQLDDRIAELTRERGHDEDIERLDSIPGVGRTAAEVIIAETGGDMTVFATPAHLASWAGVCPGLNESAGVNKSGAIRPGNANLKRVLGTAAMAAVKAKDSYYGVYYRRIAARRGSRRALVAVMHKLVIAIWHVLHDKSAHRDLGADYFARKNPERALRAITRQANALGLTVTFNPIGA

SEQ ID NO: 84666 - protein, 412 aa, unidentified
MHEKQKHIYVGVDLHKQHHVAVIINCWQEKLDEIKIENKPSAFSTFLLDIDKLTEEGLTPVFGLEDVGGYGRALAQYLTDHGQVVKEVNPALSYAERKSHMTTQKSDSWDAECVARILLNKLNHLPDAKPHDLFWSIQQLVTRRNVLVKAQGALKNQLHIQLSHHYPSYKKFFSEVDGKTALAFWERYPSPSCLEGLSVKQLTTFLLEVSNNTCSSVKKANEILKLMKEDGNTTKEHQETRNFLVESIVRHILFGKQEIGKVERELKELMSLLDFQLNSMPGIDLVTASALIAEIGDVRRFPNANKLARFAGIAPVYFGSGGKGKEQKSKQGNRALHALFYNLAVQQVQVAKGSKLPRNPVFHAYYQRKLKEGKTKGQALVCIMRRLVNIIYGMMKYKTTYELPKMKEKEVV

SEQ ID NO: 84667 - protein, 392 aa, unidentified
MIYVGIDVAKDKHDCFAMNSDGEILIEKLTITNNSDGFETLYNSLISFSDSLDNIKVGLEATGHYSDNILNFLNKNGFNTYLINPLQTNLYIKGQTLRKTKTDKLDAHVIATMLISDNLKPYIPVSYHITELKSLTRHRFRLVKENSKFKTSLVRLVDIVFPEFPKIVSSVAQKSSLALLYELPNAKKIAECNLTHLTHLLSDSSYKHFGRDKAIEIRELARKSIGLNSDSISFELKQTISIIQFLQNQIDELDKRIKEILLEMDTPILSIPGISFKLAGTIIAEIGDISRFDSPAKLLAFAGLDPSIYQSGKFFSTHSVMVKRGSKYLRFALINAARMVCMNDSTFNNFKDKKLSEGKHYRVTLGHVAKKLVRVIYYLLKTNNKYEANKVA

SEQ ID NO: 84668 - protein, 337 aa, unidentified
MKYSGIDLHSTNSVVAVSDEADHVVCRRRVPNDLALILATLAPYREELVGVVVESTYNWYWLVDGLQAAGYRVYLANTAAMKRYEGLKYSDDDSDAAYLAHLLRLGILPTGYICPVKERALRDLARKRLQLTRSRTLHILSVEGNLARQTGSRISSRAVKKLTEETLTSFELPENVTEAMAANVAVIQTLNVQIEKLEARLRSQVRLHADFVLLTTAPGIGEILATTVMLETGSIERFAAVGNFASYARCVDSKRLSNGKKKGVGNVKNGNRYLAWAFVEAAHFARRYCPEAKRFYERKKAQTNNIVATKALAHKLARACYHMLKEKKPFDVKRCFS

SEQ ID NO: 84669 - protein, 317 aa, unidentified
MEKNQPENAKITYVGLDVSKDRLDYTVDGQSCGHVPNTESGLRKLSAELSAITPPARVVCEATGGYERAALSALLLAGVEVCVVNPGRVRAFAHAEGLLAKTDRLDALLLKRFGEKVQPRLHVPMDPSAAALRELLDYRRQASDQLVAVRNRLELAGKVLRPLLETQARFFEEKLAEADRLIGEHIEHDDTLRGKAERLRQLKGVGPVLAATLLAYVPELGHIQDKSLSALVGVAPFARDSGSSLRPRRVRGGRGVVRHVLYMASVAAIKHNRILGAFYQRLRFAGKPASLALVAVMRKMLGVLNRLLADPHFALAQ

SEQ ID NO: 84670 - protein, 348 aa, unidentified
MAVAHFVGLDVSVKETAVCVVDEAGKVVCEQKVLSEPDDIVTLLTSIGVDYGRVGIEAGPLSQWLVNGMAEAGLPVICVETRHMKSLLKAQQVNKSDRHDARGIAQMMRVGLFKPVHVKTLASQEKRMLLTARKLVQRKMLDLDADLRGTLRNFGLKVGVVSKLGFEARIRELVEGLPRLAAIVEPLLTIRRVMRQEFTRLHKMLLDVVRHDPVCRRLMTAPGVGAVVALTYRATVDQPQRFVHSRAVGAHVGLTPRRHQSGEIDYDGRISKSGDTMLRTMLYEAAQILLTQSRSWSWLKAWGMRVAQRRGQRRAIVAVARRLAVILHRMWTDGTDFRWGSEPAAEIA

SEQ ID NO: 84671 - protein, 390 aa, unidentified
MTQLFVGVDIAKETHYAAMTNQHGEILFQPFPFTNNLSGFSEFLGKIKSYIPENELFVGFESTAHYATNLIHFLDENQIPFCVINPLVTNSLRTSKIRKTKTDSVDSLLICKALQEQIDCSRNVRTEEMENLYALCCARRNILNLRSKAKIQFVSYMDRNFPELANFFKGNLHIKTCYELIKKYPTTEQIKKVRIDALTNLLISSSHGRYGKDKALELKELAKESVGINSASFALQAQLAIGQIELYTEQLKTIDKQIKEVVDASNSKLKSVPGLDVIAIAVIISATNNLTNFDSPSKVIAYAGLDPVVNQSGKFRAQSTRMSKRGNSLLRYVLVWSAWNVCRYNTTFMEYYNKKRNEGKSHYNALGHCAGKLVRILFKIVKEDIDFNLQ

SEQ ID NO: 84672 - protein, 519 aa, unidentified
MHQTKYRGIITEAGSLTTPPWEPAFRLVKPPIKSVSPFGGDLCFGWLGSPRLYLYKPLGCVSAFWKWIPARKDKTMQYQKVLKMLESIPYLSVGLDVGADFTWMSIMLPNGTLAGKPFKIVHSDPQSRELAVAKIKEAQEAYSLKSRCFLESTGIYHIPLLCFLRDKGFDCSVINPIITKNSTNMNVRKLHNDKFDSKKAAKVGLDASLKTSIIPDDAVIDLRNLVRDYYYFKDLQSAVVLKLTAELKVSFPAYRNVFCKATTQTSLKLLDAYPLAQDLLAAPKGTVVEMIRSTARFGEKYALAKYDALYAAAEDAAIFGRALPSNALRIRLYIKLYREYQEHLDGILEELHKAVDRLKGTPVHNRISLLQTLPGIGFLSAVVLLAEMGSFDLFSSPKKLYAYFGMDPGVNDSGKFHGDRVHMSKRGSSLARRILHMAAINNLKVDKAAKMPVNPVIYDYYVRKCAGKKKIVAVGAVMHKICNTIFAMLRDNKPFELITPEEHCQRYAAEHQGSVSTAA

SEQ ID NO: 84673 - protein, 317 aa, unidentified
MTAPEIFVGIDISQKRLDVAITPGDQALAYSNNENGIQKLVKRLRTLNPLIILLEATGGYEFFLVAALREAKLPACFINPKLVRNFARSAGIAAKTDHLDAQVLALFACRMRPQPRPLPQTQHQELQHLMTRRRQLLGMVQMEKNRLDPAPFPRVQQSIQRTIASLEAQLADLNRDIDDFFRQNSLWVDLEKTLSNQKGVGHVTLLGVVAYLPELGRLNRREVASLAGLAPFNRDSGQWRGQRHIEGGRNPLRQALYMATLSACRFHPVISAFYQRLLQKGKPFKVAMVACMRKLLTILNAMAKKLQLERSLAPSTP

SEQ ID NO: 84674 - protein, 339 aa, unidentified
MNITVFGLDLAKRVFQLHWVDIKTGEIYQRQLKRNQMVEFFVNREPSIVAMEACGSAHYWGRKLTDMGHEVRLIAGQFVRPFVKNNKTDVADALGIWEAAQRPGMKFVALKTEEQQSVLSLHRMREQLVKMRTMQTNQLRGLLYEFGVDLPQGRQKAMDKIVKELARLEDRMSAIFIDAIRQQLKRIEALSCDIYEIEKKLMLWKKKDKASKKLMDIPGVGLLTATAAVATIGDAKTFKNGREFSAFLGLVPRQSGTGGRVKLLGISKRGDVYLRTLLIHGARSVITHQKEHAPWLSKLLARRPLNAVVVALANKTARTIWALLAHDRTFNKDYAVNTA

SEQ ID NO: 84675 - protein, 456 aa, unidentified
MKNSMKRGGKSKRRLMPINVNAAGIDIGATFHVVAIPPGRSEQAVRSFRSFTGDLHALADWLQEVGVTTVAMESTGVYWIPVFEILEARGLEVLLVNARDAKNVPGRKTDVNDAQWLQQLHEHGLLRGSFRPRDQLVRLRAYLRHRERLVEYAASHIQHMQKALMQMNVQLHHVVTDITGVTGMKIIRAIVSGVQDPRLLAKHRDNRCKASAETIRQALSGNYRPEHVFALRQALELYEFHHLKMAECDVEVEAVLRALNEPRAVPKKPMPSVRHAGGKNEPSFDVRSALYTLLGADLSQIHGFGPYTVLRLIAECGDDMKKWPTAKHFTSWLSLAPGNKISGGRVLSSKTRRSSNRAAVLLRIAAVNLGRTQTALGAFYRRLAARVGKAKAVTATARKLAVLFYNALRHGLAYIDPGVSYYEDRYRQRVIHNLQRRAKQMGFSLVAAPEFAEGVS

SEQ ID NO: 84676 - protein, 357 aa, unidentified
MDGFKQLLQTIRNCTKKSGKIKVGLEATGHYSYNILGFLLDNGLPTYVINPLHTNLYRKSLSLRKTKTDRVDARTIATMLLSDVDLKSYTDIAYHNEELKSLTRYRFEKVRERAKLKQSVSRLVTILFPELEKLVPSLHGASVYALLSEYPGAKQISEVHLTKLTNLLVTASKGHYGKEKATLIRETARASIGSVMPAKSLELKHTIKLIQELTSEINEIEDSIQKIIDELNPPILSIPGMGVNSAAVILAEIGDFSNFSSPDKILAYAGCSPSTYQSGKLTNCYAHMEKRGSRYLRYALYNATKYVCHWNPVFAEYLAKKRAEGKHYNVALSHSMKKLVRLIYALQKSGKTYLAAA

SEQ ID NO: 84677 - protein, 384 aa, unidentified
MNKHSILFIGLDTHKEFNEVAYIEEHRGAQPVHLGRIPSSKVAVQKLVRQFESKYPGATLHFVYEAGPCGYWIYRLITSLGHCCYVVAPSLIPKKPGEKIKTDKRDALKLAKLLKSEDLTPIYVPEPEDEAVRDLSRAREVAMKDLKDAKYQLKALLLRNNINYKGTANWSQKHLRWLTELVLPHPAQHIVLQEFLHTITERISRLERLDNELTHHVHQWRYYPVVKAIQAMRGVRLLVATGVVAELGDLSRFDHPRKLMSYLGLVPSEHSSGGKRHIGAITKCGNGRARRLLVEGAHTYRYAANISTDMQKRQEGLPKDIIDIAWKAQLRLCKRYKKMIAKGKHYNLVVTAIAREMIAYIWAIAREVVLTPVNKKLRLARVPA

SEQ ID NO: 84678 - protein, 358 aa, unidentified
MQAQNYELNFAGQNIYVGLDTHLKSWKVTIMLEKLMLKTFVQNPEPEKLVEHLKQNYPGAKYYSAYEASYCGFWIHKKLVALGVNNIVVNPADIPTTDKEKKQKEDKRDSRKIARELQKGDLVGIYVPSDENLEDRALLRLRETMTGDLVRYKNRVKSTLHFYGIKIPEEFAKSSYWSKPFIKWLEDLKFKQESGNKKMEMLLNQVKSLRASLLTLTHEIKKLSKTEKYKTNVELLLSVPGIGLIFAMVLLTELDIIKRFDDFDHLCGYVGLVPSTGSTGDKEIVRGITPRENHSLRTMMIESAWVAIRVDPVLSLAYAKYSKQRHENKAIIKIARKLLNRIYYVLRTKNKYVLGVVK

SEQ ID NO: 84679 - protein, 422 aa, unidentified
MRAVALDVHRDFCEVAIVAEGRLRSAGRIQTRPETLELFAQSLDASDWVALEVTGNAWAISRILEPHVSRVIVVSPNDTGIRQARAKTDRLDARTLAKLLWAGELDGVWAPDERVRVMRRRLARRAQLVRARSRAKNEIHAVLMRCLKDRPPASDLFGVKGRQWLAEQQLAVCERETVDAGLRQVDFLDTEIAAVDQLIAADALGWPEVKRLMTVPGVNVIVAATFMAAVGDIRRFGDRRKLTAYLGLDPRVRQSGTGPANHGHISKQGSGSARHALVEACWSTVRQPGPIAAFYARIKAKRGHSIAIVASARKLACLFWCLLSRGEDYAFAQPSLTAKKMRRLELAAGAPRRQGRPRRLVDQTAMRTAERELALQAQRAYERTVADWQANKAGASATPGRASQSRHSGKQRGKASVPDPAL

SEQ ID NO: 84680 - protein, 437 aa, unidentified
MGKEDEETTMSGKETVQAEPEFVAFVGIDWADQKHVWCLQKANSTQREAGELEHRPEAVEAWVGELCRRFGYGPIAVAVEQVKGALVYMLRKYECLHLYPVPSTMSASMREALYPSGAKDDPRDADVLLELLVLHRDKLRRLTRDNEATRRVQNLVEERRKLVEEKTAQLNGLTGYLKVYFPQMLEWFAKLDSKLVCDFLERWPSLEELQKVPSAELKKFFRHRRGRHGELTEWRMHGIGQATPAIRDRAVIEAKQTVVQVIAQLLRTLLEGIATLERKIAEAAEVHPDFFIFQSLPGAGAALAPRLLAAFGSQRDRYSRAEEVQKYSGIAPVTERSGKKKWVHFRWACSKFLRQSFHEWAGHSIAQSVWARAYYQRQRERGKEHHAAVRALAFKWIRIVFRCWQDRVAYDETRYLTVLAKRGSHLTSAFADVAVSM

SEQ ID NO: 84681 - protein, 331 aa, unidentified
MDIKEVIGIDVSKNFNEARIHTNQKLIEFENNIKGFKALEKWVLNNVECPKNQIMFAFEHTGLYSHPMSVYFTEKGYSYIIIPGLELKRSMGITRGKDDKIDAKRIATYAYDKRSKLKPYELPQEEIIQIKRLLSLREKLVKQRAGYKGTLGEFKKFLKKKNNKMLFDVHEKMIKELSKQIEKIEKILDDIIKNDQQIKRMYKLITSIKGVGPQTALFLIVYTDKFTKFDNWRKFASYCGIAPFPNRSGISIRGKTKVSNLANKKIKSLLDLCAKTSIQYNPEMKLYYEKRVKIGKPKMSTINVIRNKILSRIFAVVKRGTPYVNTMGYIS

SEQ ID NO: 84682 - protein, 393 aa, unidentified
MSQTPNIAIAVIGIDIGKNSFHVVGHNARGAIVLRQKWSRGQVEARLANIPPCLIGMEACVGAHHLSRKLASLGHDARLMPAKYVRPYSKGQKNDFNDAEAIAEAVQRPTMKFVATKTAEQLDLQALHRVRERLVSQRTGIINQIRAFMLERGIAVRQGIGFLRTELPTILATRTDALSPRMLRIIEELAGDWRRLDQRIDGLSGEIEALARQDQACSRLMTVPGIGPIISSAMVAAIGTGDVFSKGRDFGAWLGLVPKQISTGDRTILGKISRRGNRYLDRSRQEAVAPQRAGDRARQQACPHRLGGAGQRTRLRADEDRRRRRRPTRVILAPCSARSRRSLATPEPAASQVRRAGLDRPCARRDRRSAGRDEATALGSNKATARYEEQAMT

SEQ ID NO: 84683 - protein, 426 aa, unidentified
MQKEDILSTLFVGIDVSSKSNVVRAIDFFSKKHLAFEAPNNQSGAMAIVEKVAECLYSGKFKKAIIAMEATSVYSTHIACFLSTAKELLVFNTEVYVLNPKMTANYKKSFIDIGKTDPAEAFAIADFARVGRINSKPWRGTQFLALQRLTRHRLHLADNIAREKSYMLTNIFLKFSEMALNTENRPFSDIFGATAEAVLKEFLSTEDIINRSPQELVEFINEKGRSHFADPERTAGLLKQAAKNSYRLDKCLYEPLTISIASSFNCVSAFEKEIKIIDKAIMNAVKGLNTAEYQCLTSIPGIGHVYASGILAEIGTMQNFKGENSLAKYAGLVWHRPQSGDFEADDARMSKAGNSYLRYYLVEAANSVRQHVPEYKAFYAKKYSEATTHHHTRAIALTARKLIRMIFGLLDKNQLYSPDKAGGKIE

SEQ ID NO: 84684 - protein, 487 aa, unidentified
MAKQKKSTFERLSSGAMNRQQRRNLGRRLASNDPGLTIVHPHAGGIDVGNESHFVAVPPDRDANPVQEFGCWTAELKRMAAWLKACRIDTVAMQATGVYSIPLYDILTGHGIRVVLANAHHTKNVPGRKSDVQECQWLMKLHTYGLLRDSFRLEERMESVRTIWRLRDRHVKDASRAVQHMQKALTKMNIQLANVLSDITGVSGQAIIAAILKGERDPDKLADLKHEMVRASRDEVARSLEGNWRDDLLFELQQAVDSFHFAHQQMRDCDRQLGSLLPSLAARTIERPNQPGEAPAAPTPPEKKAKKKSKARRNEPAIDLKGELKRICGVDLTSIDGIDVITAQTILSEVGTDMSGFQTENHFTSWLGLAPSKDISGGKTIGPGKRKVHNRVAMAFRMAATTLLNSKSYLGSRYRHLRKQLPSHAAAIKAMARYLAVLVFRLLTHGEAWVDRGAARFEQKRTEWEMASLNAKARAKGFKLVPLPQEN

SEQ ID NO: 84685 - protein, 462 aa, unidentified
MARTKRAPEEILDEEYEQVFERVCAIDVAKEFGQVCVRTPRADGKRSSKVFAVDATTGEILKLGESLLEQGIEMVTLESTSDYWRIFYYLLEACGVPVQLVNARDVKNLPGRPKSDKHDCVWLAKLTERGMLRPSFVPPHEVRVLRDYTRTRIDLTRDRTRHWQRLEKLLEDALIKVTTVASKITTMSVRDMINALVRGERNPEKLADLARGIMRHKRRELVRALDGRFDDHHAELARILLGQIDSLTAEIDRLTARIEQLVDKLPAPEQPVDPDSDQPASQAPTGQDTTSTNPVPAQRRPPIQRLADIPGINLDAAEVILAEIGLDMSRFPTANHLVAWARLTPQLIQSGNKRRGGKTSKGNPYLKGVLGSAAASASRTNTFLGERYRRIVKRRGKGKALVAVARSILVIVWHLLANPTATYRDLGADFYAGRIDKERRKRHLVQQLEALGLQVTLTPAAA

SEQ ID NO: 84686 - protein, 341 aa, unidentified
MKLYAGIDLHSNNSYVTVIDKTEKIVYQKRIENDLKLLLKELAPYQERLEDVVVESTYNWYWLVDGLQEAGYRVRLAHTLGNQQYSGKKYTDDKSDAEWLARLSCLKILKEGHIYPKEKRGLRELLRRRLLLVRQQTRNVLGIQALITRYENVRISASQIKNCQEAEEKKMLSYIKDNDVRLATQSQLKVLRVIIEQISILEKAILSKIKKDAVFKLLKTVPGVGDILAMTILLETGSINRFKSAGCYSSYCRCVGSKRISNEKKKGKNNSKNGNAYLAWAFIEAANCAVRAYEPIKCYYQRKMQKTHRVLALKVVASKLAKACYFMLRDGVNFNMAKLFF

SEQ ID NO: 84687 - protein, 341 aa, unidentified
MQKSNYFIGLDIACDDFVASIYESPEKPAITKEAIENNPDGFSMLVSWLKEQGITISNSVVCMEATGVYSEACAHYLAANGFKVSVEPPLKVKRAFDPVGHKTDAVDSRQIAEYAYRYSDELRFWQPKQEIVEKIKQLLTAREQFTKQSTAIQNSIKAYERHVIKVPLIINAHQETLKELKKHIKAIDKELDRLIRQNPTISQITGQLKSIPGVGLLLASDLIAITGAFNDISSHKTLAAFLGICPYQHQSGKSVYRQPHMRNFGPNYARKLLMLAARSCATHNIEFRKYYMRKLAEGKAKQLVLNNISNKIIKIACALIKNNAQYNETYRSVNPLCFNLA

SEQ ID NO: 84688 - protein, 371 aa, unidentified
MKSILSVGMDVHKNSFSLCAYDGYTGEIVSESTFASDVKLVIKFIETLKSRYENDVEIKCGYEAGCLGYSLYKSLTARGVDCVILAPTTMQVSAKNKMVKNDRMDALNIAKNLASGSYKAVYVPDEEDVEIKEYIRMIHDFKKELKRVKQEICAFVLRHGYQYDGKSKWTIRYMNWIRELEMSEIQRETLNEYIAEMENLNDKINRFMNRIDEMYQSERYHEKVSKLRCFKGIETFAAMTIQVETANFERFPNAKAYASYTGLTTGEHSSGDKNNRIGITKQGNTVIRKTLVECAQSLVKGNVYAKKSQGLKSRQKGMDVNIIAYADKATERLKKKYQKLIERNVPRNKAIVAIARELACFIWGMETGNIH

SEQ ID NO: 84689 - protein, 477 aa, unidentified
MPKASIKKASSCHPARAKTTPNHPQIHPHAAGIDIGATALHVAVPFDCDPQPVRTFATFTEDLQALADWLAHCGVQTVAMESTGVYWIPIFQILEARGLEVCLVNARHVKNVPGRKTDVSDCQWLQYLHSVGLLQASFRPPAHVCAVRSLWRHRGNLVRYASSHVLHMQKALTQMNLQLHNVISDLTGKTGSAIVEAIIDGVRDVEKLAALRDPRIKADAQTIAKSLVGDWKEEHLFTLRQAWASYIHYRQLVAECDLELARHLSGFETRTEVPAAAAEESSATKESSATSALPRKPGRPRALRSEADFVLRSELHRILGVDLTLVPGVHTTVVQTFVSEVGVSVERFSDAKHFASWLALCPDNRITGGKVLSAATRQVKSRTAHALRLAAATLHRSKSTLGDYFRRMKARLGSPEAITATAHKLARIIYHLVKNRCPYDASIFAAEEERQRLRREKNLHRQAAAMGLRLVPLAEGI

SEQ ID NO: 84690 - protein, 338 aa, unidentified
MEITTIGLDLAKSVFQLHAVDTDGAVVWRKKLRRSTLLEELAKVPPCLVGIEACATAHYWAREISALGHQVRLMPPAYVKAYLRRQKNDAADAEAICEAVRRPSMRFVAVKSGERQAVLVLHRTRELLVRQRTMLINAIRGHCAEFGLITAQGVRHIGDLLKQAMPAGPSTLPDLAKAAMALMAEQLEGVEMQIQALNRRLLAWHRQDKTSQRLATIPGVGVISATALAASVSDPGQFRSGREFSASLGLVPRQNSSGGKDRLGRISKMGDRYLRKLLVVGATSVVRRARTAKSTPWASRLLERKPARLVTVAMANKTARIVWAVLARGEAYRPPAAA

SEQ ID NO: 84691 - protein, 346 aa, unidentified
MKIVGCDFHPSFQQVAIFDSTTGEVEERRLVHATGDAERFYRELDAPALVGMEAVGNSLWFEQLVERLGHELWIGDAAQIRASYVRKQKTDKRDAGHILRLLIEQRFPRIWIPSHQQRDQRQLLVHRHRLVEMRTRIKTELQHVAMNQGMQKKRSLWSVRGRADLKNLSLQGWTGRRREDLLALLTVLEKQIEELDQAVAEAAFLDPQARLLMTQPGVGPNTALAFVVTIGEVSRFRRSKQMASYLGLIPSEHSSGSKRRLGAISKQGNVFLRTLLVEAAQSAVRHDADFRKEYRHRCHHKPTGVAKVAAARKLAVRLYWMLRTRTPYAQIVHNEGSPSHSVVGVS

SEQ ID NO: 84692 - protein, 452 aa, unidentified
MSRRRKNNRTTGAPVLHCLNPHAAGVDVGATEIYIAVPVDRDPRPVRRFSTFTEDLRAAADWLKSCHIETVAMESTGVYWIPFFQILEARGFRVFLVNARHVKNVPGRKSDVSDCQWLQYLHAVGLLRGSFRPEQAVCTVRSILRHRNDLVQMASSHVQHMQKALDQMNLQLHHVISDITGMTGVAILEAILAGERNPQTLAALRDRRIKASEDTIAKSMVGDYRHEHLFTLRQSLVAFRHYQELIGACDTEIAQYLEAFESKVAPHEGPLAKSPEQQESNSEQPHFDLRSHLHRIFGVDLARVPGINVLTAQTLLTEVGPDFSHFAQGAAFTSWLGLCPDNRISGGKVLSVKTRKVKNRAATALRMAALSLHHSQSYLGHFYRRMRAKLGAPKAITATAHKLARIIYHMVTEGQEYHETICAQNEMQHRQRLEARLRKQARELGLQLIAAS

SEQ ID NO: 84693 - protein, 344 aa, unidentified
MGEVSTIGLDIGKSVFQVHGVDDAGAVVIRKRVSRARVLECFGELPPCLIGIEACPSAHHWGRELQLLGHMVRLVPPSYVKAYLKRSKNDANDAAAICEAVTRPSMRFVPIKTREQQAALMLHRTRQLLVRQRTMLSNALRGHLAELGIVSAKGRNGTAELLRIITNGADSRVSPAVRDILDVLARQYSAIGIEIASIDRSIMALHRGCEASRRLAEIPGIGPIAATALVAEIGDWKTFSSGRSLAAWIGLVPKQYTTGGKDRLGSITKQGNRYLRWLLIVGAMAVIRYARKHGTEKRPWLGRLMERRPTKVAAVALANKIARMAWAIMVRGERYKEPKLLLAA

SEQ ID NO: 84694 - protein, 344 aa, unidentified
MNQIIRIGMDTSKHIFQLHGVDAAEQVVLRRKLRRSQMLAFFAKLPPTVIGMEACGAAHYWARELRKLGHEVKLIAPQHVKAYVKRNKNDGRDAEGLCEAMSRPTMQFVPVKTEEQQAVLMLAGVRQQLIARRTQLGNAIRGYAAEFGLITAKGLDKIEPLLARIAQDNTAPAMARELLAFQGRDYARLQTELKAIEARLMAWHRANATSRRLAQIPGVGPIGATALVMKAPNPRLFRSGRHFAAWIGLTPKDHSTAGKTRLGKITRAGDEMLRSVLVAGATAMIKQAKHGRGSPWLLALLKRKPPKLAAVALANKIARIAWKLMVTGESYDGTRLPGASALAA

SEQ ID NO: 84695 - protein, 342 aa, unidentified
MKEVSIIGLDLAKRAFQIHGACADGGVAFRRRLTREKLLAFLAEQPSCVVAMEACGSAHHWGRAIHGLGHEVRLIPPAYVKPFVKRQKNDAADAEAIAEAASRPTMRFVAVKTEDQQARAMLFRSRDLLVRQRAQLINALRGHLSEHGVVAPQGPANLKTLVQAVENPETSLPLLVVELARVYFDQIEGLSKKVAELEKATAFEAERGETTRRLKTAPGIGPITALAIETFAPPMEVFKRGRDFAAWLGLVPRQHSTGGKQVLGKTSKMGQRDIRRLLIIGAMTVVRWACRKGAPEGTWLHRLLARKPRMLVAIALANKMARAIWAMLTMAEDYRVPVAAAA

SEQ ID NO: 84696 - protein, 350 aa, unidentified
MATSYIGADVDSKMTDLAVERGKKIVERYRVPTTIPALREVLGGLGGRRELTFEEGPLAHWLWRNLRQEVDQLVVCDARRNAYIAKDGDKDDPIDAGKLAELLRGGFLREVYHSPNDRQTLLKRWVGMYHDRVGEVTRQINKLRGYCRHYGVRPTSAVLKDSVSRVEWARELEADLQEQLEVFWPGLDVAQGQVGACRRRMAALAKAYPIIQYWQALPGVGPIRATTLYAYLDTPWRFRTPEKLWKYCGVGLERTSSGKDRYGRPKVGLLQLAWQVNKRLKDAVMGAAVSAIEQGANPFAARYELLLAKGLTPANARHTVARKLLTVMWGMWKTNRPYDPALLERTGPNG

SEQ ID NO: 84697 - protein, 339 aa, unidentified
MKLYSGMDLHSNNTYCGITNESGKRLIGHRLPNEPKVILGFLEPYQPDLEGIVIESTYNWYWLVDLLQENGYRVHLSHPSGNEQYRGLKHTDDRHDAFWLADLLRLGCLREGYIYPKQRRPLRDLLRKRAHLVRLRTSLLLSAQNSVQRNRSLHVSNEDLKKLTVDLLSVHLEGDEALWLAAKASKELIDAFTHRILRIESWILKHLEPQVGFGYLLTLPGVGEILGMTILFETGPIQRFPDVGNYVSYSRLVASQRISNDKVKGKGNQNNGNPYLAWAFSEAAEHARRHYPKCRAFYNRKLQQKNATVAHCALAHKLARAAYYILRDQVVFDETKLFA

SEQ ID NO: 84698 - protein, 357 aa, unidentified
MKEYIAFDCHKRYTLMEREQIKTGQRKQVRVEHCPGAIRQCLRGREPGTPVAVEATGNWYWIADEIEQAGLEPKLVHPRKAKLMMGMINKTDKLDVHGLNRLQRNGTLPTVWIPPRELRDQREITRARMVMTAHRTRLKNRILATLSKYGWAGTEASDAFGKKARKQLNEAVKQLPAETARVTEALLQQLDFVQDQIEDFEQRMRELVRDTPEMNQLKTLPGIGRILSAVIGLEIGVIGRFASAERYASYSGTTPRVHASGDKIRYGRLRPDVNHYLKWAYVEAAHSVCMHRRTYPERHVSQLYERICKKKGHPKAIGAVARHLAEASFHVLTRKEPYRDPGLKQGQSREVSARNTS

SEQ ID NO: 84699 - protein, 357 aa, unidentified
MRRVIGIDIHRTFGEVVIWENGLTRHEGRVDMTRTALEGFGRHLLKTDEVVIEATGNCMAVSRVLSPHVKRVVIANPLQVKAIAHAHVKTDKVDAATLASLYAAGYLPEIWTPDAVTERMRRLVARRYQVVRHRTRIKNEVHAILHAHLIPKCPHADLFNRRGRDWLTHQPVPDDERNAIARHVRELDRLAEDLAVLDRDIAADALNDEAIGRLLTITGVNLTVAAGLMAAIGSIDRFDSPQKLVSYFGLNPRVRQSGLGPAHHGRISKAGRSHARAMLVEAAWAAAKAPGPLPCVLHPHPRSPWPPDRRCRRGAQAGRPVLAHADQGRGLPLGPPQPRRPQASRHATGCRTTTEEG

SEQ ID NO: 84700 - protein, 362 aa, unidentified
MYIGVDTHKTAHVLVALDEQGHVGETRSIPNTSEGWASALRWACAAAGERIWGIENSGALGKGLAQFLVGQGEMRVHEVSPHRTAQYRRRGRTQDKTDETDALAIARLLLAEGEALPCVHADDASTELRLLSDYRDNLVAERTRLINQLHAQMVQINTRYQEQSGRLTQQRGIMYCRDLTLANASAIVQTRLLIVHQLAAQILRLATDIAATTTALRTRVQASQTPLLRLCGVGDLVAARIIGEVGSAPRIASAAAFAALAGAAPVAVSSGRQRSYRLNRGGNRQLNRALHMIALSQRRCDPRGQTYYAKKRAEGETERAAMRCLKRQLANVVYRLLREGHRAETHDDADFVALGAIVRTAA

SEQ ID NO: 84701 - protein, 387 aa, unidentified
MTVCTVNHLPAATHGETARCLFAIELSKQSWVIGFITPLSAKINRRILSGGDWRGLLELIEEMRARVSRETGWAVEVISCYEAGYDGFWLHRQLEAHGIRNYVIDPASLQVDRRVRRVKTDRIDTERLLRSLMAYLRGEPKVWSVVRVPSVAEEDARRLHRERDRLVSERVQHVNRIKGLCALQGIYDYHPLRPQAMARLEQLRTAQGVALPPRLKSEIKRELHRLELVVEMIASLEAERDIIAEDKASTHVNAEKIQALHKLKAIGPEFAAVLVGEIFHRDFNNRRQLASYVGYAPSPFQSGNVAHDQGISKAGNRKGRTTGIELAWLWLRYQPDSDLSVWFRARVGTVKGRIRRIAIVALARKLLVALWRYLETGLVPRGAVLKG

SEQ ID NO: 84702 - protein, 422 aa, unidentified
MKSASNNPNITLPEFAANDVTAGIDWARDDHAVAIVDGRGREVHRCTVAHAAGGLRQLITVLGKHGVGEVAIERPGGPVVDALLEAGLTVVVISPNRVKNLRGRYGSAGNKDDRFDAYVLADTLRTDRTRLRPLVPDSEATVALRRICRARKDLVRHRVAVANQLRAHLRNVLPAVVGLFAAIDSPITLAFLSRFDTQDKVDWLSAKRMADWLARQGYSGKVDPAVLHQRILDAPRGVADVHAASQAHITASYVALLRTLLAQIKELEIQIDQQLDAHADAHIFTSLPRAGRVRAARLLTEIGDCRARFPTPEALTGLAGVAPSTRQSGRLRTVSFRWSCDKQLRDAVNDFAADSRLANPWAAELYDRARARGHDHAHAVRILAPAWLHVIWHCWQDGHAYNPANHRALQHVITTPAQGGLT

SEQ ID NO: 84703 - protein, 409 aa, unidentified
MERLIERGAGLDVHKKSVTACVRVPGPAGSRRQEVQTFGTTAAALLTLRDWLQAHGVTHVAMESTGVYWKPVYYVLEELLTCLLVNAAHVSKVPGRKTDVRDCEWLAQLLEHGLLRGSFVPPVAIRELRDLTRYRTVLVQDRTREANRLHKVLTDAGIQLASVASNVLGKSGRAMLAALVEGTHDPEVLADLAQGKLRSKLPALREALAGHFRGHHAFLVSQLLAHLDYLDEALDVLTAQIQEALGPFASEAARLDAIPGVGARTAEVLIAELGVDMRQFPTARHLASWAGLCPGTHESAGKRRAVRTGKGNRWLRGALIEAALAAINVRDGALASRYHRLRPRCGHKKAIVAVAHKILTTAYVLLADGRTYHELGAGYYDAQRKDRDIRRALHALERHGYRVSLEPAA

SEQ ID NO: 84704 - protein, 318 aa, unidentified
MPESIVIGIDIAKQTFDAALGVSGSIKTFANDDAGFDTLLANLAGQAVDLIVMEATGGLESNLACALQAAGFAVAVINPRQARDFAKAMGYLAKTDRIDAKALAELAQVLARSPERDRFVTALPTPEQQALQALVARRRQLVAMQVAERQRLSVSHAAARKSIEGMIMAIRTQLDEVETELAKHIETHHADLALRLSSVRGIGPTTVATLIAEVPELGQLSRREISALIGLAPFNRDSGQMRGKRALFGGRGQVRRGLYMAALAAIRFNAVIKQFYDRLVAAGKPKKVAIVACMRKLLTILNAMVRTGKAWDDSLHTA

SEQ ID NO: 84705 - protein, 352 aa, unidentified
MKYYIGCDAHKKYSVFVTVNETGKVSTPERVDHDKDLYRKYLCCLPEGSPIAIESVGNWYWMIEEMEKAGHQPILVNPRKAKLLMGHINKTDKLDAKGLALLNLNGSLPSVWIPPSELRDQRELSRMRMSLVSVRTKLKNRIHAVLAKYAIVIDEVSDIYGQRGQELLREAIEYLPQETRHSVEVQLQVLDQVSAEITQIEQHIREIIKDTPVMQLIKTLPGVGDILAIVIALEIGTVERFGSGQHLASYSGTVPRVNSSGGKTYYGRVKPDVNHYLKWAYIEAANCIALQRNKMEHRHVGQLLKRIQKQKGYPKAAVAVARHLAEATYGMLKKNEPYKEPGLKKAVSCSQG

SEQ ID NO: 84706 - protein, 388 aa, unidentified
MSKPFDLSKSLAALDPDSTLIVVIEMSQSSWLVAARAPGLARDPLKKLAPDPEKLFTLIDRWREESRRAGRVVRRVCVAFEAGRDGFWLARLLRQHDIEAYVIHPTSIPVKRDHRRAKTDRLDTELLMRAFLGWLRGEADHCSMAAIPTLAEEDAKRPTRERESRVNERSRIVNRMKGALARLGIRGFNPKLRKAAEKLEELRTGAGEPLPPNTLAELRRDMAQLRFVADQIKQIEKAREARLEKAPREGAHPMVLMLASIKGVGLETAEMLVAEVLSRKLRDRRAVARYGGLTGSPDESGSRSREKGLARSGNARVRRGMIQLAWRFLMFQKESALAKWFEARTANGPRGVRKTMIVALARKLLIDLWRFVEDGTVPVGVELFDSRA

SEQ ID NO: 84707 - protein, 310 aa, unidentified
MADPMFVGIDVSKMRLDVAVRPTDEVWTSSNDDVGVATLVRRLVALAPQLVVLEATGGLEGHLVAQLATSNLPVAVVNPRQVRDFAKATGKLAKTDAIDASVLAHFAQAVGPTPRPLPSEEAEVLKAILVRRRQLSEMLVAERNRMSTSAPSVRRGIQAHVIWLKAQIKSTDGDLDGRLRESAVWREKDNLLQSVPGIGPVVSLTLIALLPELGTLNRKQVAALVGVAPLNRDSGTLRGKRSIWGGRATVRAALYMGALVASRHNPILKAFYARLLAAGKLKKVALVACMRKLLTILNAMLRHRCVWKPV

SEQ ID NO: 84708 - protein, 365 aa, unidentified
MKHQPKRKELATKHLVGLDLHSNNVCGIIADPNDRWVLKRKFPTCLKTILSALGPYKGKIGGVVVEATATWYWLVDGLEESGYKVHLANPAALDGSKGKKRTNDFDDAFKLIQLLRDGKLREGYIYPKDQRPIRDLMRKRSFLVRSRTKHMLNFMNMVSRNKGFRLSSNQVKQLSEKNIEDLFEHKFLKLSASSSVSVINHFANEIKRLEKPILKEGRLKPEFKRLLDFPGIGDTIGLTIAFEAGTLSRFPSTGDYLSYCRCVDSKRLTNGKKKGENNRKNGNAYLCWAYVEAANFAKRYCPYAGAYFNHKLKQTGMYVIAIKALASKIARATFYMMTKEVDYDPQKVFGSYKAQAKALIKKQKP

SEQ ID NO: 84709 - protein, 415 aa, unidentified
MGYKVAGIDIHKKVLMVVVMLLQAGGLVEKIERRRFGTTTPELAQLAAWLQALSVQEAVMESTAQYWKPVWGALEGKIPTLNLAQAFSNRARRGRKDDFRDAERLVRRLVAGELVLSFVPDPEQRNLRTMTRMQVHLTYDRGRLHNQVECLLEEMRIKLSSVLSDLFGVTGRHILGAMAKGETDPRKLAAWAGNRLQCTAKELVAALTGHVQPMHQRLLGLYLERLKLIDQQIDELQHMIAEALQSEQDAVQRLAEVPGFGADSAQQMIAEVGPQAATFPSAGEMSSWVGTCPGQNQSAEENHSSRSAKGNRYARRVLTEAANAAVKTKGSHWQVVFRRLLPRLGYQQAAWAVAHRLCRVVWKILHDKVRYVEQGVNRDPKARAHRARTLARALRQLGYNVELTPLTPAPAPTSP

SEQ ID NO: 84710 - protein, 453 aa, unidentified
MSKKRKNKAQPAPAINTQLHPNAAGIDVGAEEFVVAVPADHHPESVRTFPSFTTGVETLCEWLQACGITTAAMGSTGNYWITLYDRLTARGIDVYLVNARHVKGVPGKKTDVCDAQWLQQLHAAGLLKKSYRPALEIVPLRFLMRHRCEMIGDSARQLQLMQKTLTEMNIKIQHVFSDIDGVSAQAIITAILKGERNPAKLADLRDGRCRSSVSVIMEALKGDYREEYLFVLRQSQSAWHQLSKAIGECDKQIAALMAKVHTKECPPLPPAPGQQHRMTKNCPDLPIFEEAWRFFGVDLSAVPGVGGGLLSTLMSELGTREQILKQFGSGPALASWLGLNPDNRISGGKVLKAKTRKVASRLAKALRMGVFGLQKSHTKLGDYVRRMKARLGKAEGIVAGAHKLLRIIYGMIKNQMPYNEIEAFKTTPQTAARRRRNLEKQAAALGLQLVAAV

SEQ ID NO: 84711 - protein, 339 aa, unidentified
MRLYAAFDLHGNNNFLALIDSNGRRIFGKRLLNDRERILEVLRPYQKDLMGIVVESTYNWYWMVDALKEEGYSVHLANPSAIQQYEGLKHTDDEHDSFWLAELLRLGILPEGYIYPKEERPIRDLLRKRGHLVKLRTSLIISLQNIISRNCGMKLNANEVKGLKEDRVHPLLRDNEDLALAGKVSKEAIDFLTRQIRTIERVVEGRIELKSSYGYLLTLPGVGKILALTIMLETGPVSRFAKAGNYVSYCRKVSSHWTSNEKLKGSGNKKNGNRYLAWAFSEAAELARRYYPEPRAYYQRKMQKTNFMVAHSALAHKLARAAYYVMRDQVPFRPEKLFS

SEQ ID NO: 84712 - protein, 355 aa, unidentified
MSTMPHLDGEVILGVDTHEREHVAALIDPVGRLIGTRAFPATVRGYRQLLAWARRHGELRRAGVEGTGSFGAGLTRLLTLEGVDVVEVTRPNRKARRHLGKSDPIDAEAAARMVLSGEASATPKPRDGIVESIRVLQLTRRSAIKARTNAGQQIRSLLVTAPAELNQLLELPTKQQIARCLRFRLNGRWDARTTTKRALRSLARRWEQLDREIAVVEQELELLTRAAAPRLLAEAGVGPDTAAKLLVLASDSPDRLRSDAALAALCGASPVEASSGKTRRHRLNRGGDRQGNNALWTIANNRMIHHPETRAYAARRASEGLTRKEILRCLKRHLARRLYPLLIADLTDAAALDLT

SEQ ID NO: 84713 - protein, 411 aa, unidentified
MHNRQNYLYVGVDLHKEHHTAVIINCWQEKLGEIQFDNKPSAFSKFLLEVETYVSDGLSVVFGLEDVGGYGRALAKYLVDHEQVVKEVNPALSFLERKSQVMIQKNDSWDAECVARILVNKFNQLPDVKPNDLFWSIQQLVSRRNALVKAQSALKNQLHIQLNHHYPSYKKFFSELDGKTALAFWQQYPSPSCLEGTNIKRLTAFLLDVSNNTCSIKKASDILKLVKEDGHTMKEYQETRDFLVRSIVRDIEFKKTEMKYIERELKQLVNLLDYQLETMPGIELVTASALIAEIGDVRRFSNANKLARFAGIAPVYFGSGGKGKTHKSKQGNRALHALFYNLAVQQVQVAKGSKLPRNPVFHAYYQKKLKEGKTKGQALVCIMRRLVNIIYGMMKYKTAYELPIVEEKEVV

SEQ ID NO: 84714 - protein, 372 aa, unidentified
MGLDVHKETITVAVAEGEGLVVEMGKIPNRPEAVRRLIKRLGRVEKLRVCYEAGPCGYVLYWQLAGLNVECEVVAPSRIPREPGDRVKTDRRDAKKLAVMYRAGMLTAVWVPDAAHEALRDLVRAREAAKKDELRARHRLGKFLLRSGRRAPDGVKAWGKAHSRWLEGVGFEHPEQEVVFLDYRHEVDHAVERVLRLERALEEAVERVPASQRAVIEGLQALRGVSKVTAVTVYCEIGEFSRFDRPRLLMGYSGLVSSEDSSGDRIRRGWITRTGNAHFRRVTIQAAWAYCRRPKLSPALKKRQAGVSEEIKEISWKAQHRLYGRYRHLISKGKLPQKAITAVGRELVGFFWDIGVRVENQMRRQKQGHAAA

SEQ ID NO: 84715 - protein, 340 aa, unidentified
MDSQAELNEVILGVDTHLDAHVRVVLNHVGKVLGTLVTPTNQAGHITLLNWARAFGNVQRAGVEETGTYGAGLTRVLRKQGIEVWEVNRPDRSTRRLQGKSDPTDAESAARAVLSGQANAIPKSQSGVVEATRIVSVARRSAVKARTQTINQLRSLLVSAPDTIREKRWKTKTEQCIQGCARLRTLGGTPLLQTLAGTLRLLAKRWLHLSSELKELDATLEQLTVQTAKRLRSQFGVGPQTAATLLSVAGDNPERLRNESALVALCGANPLPASSGKTVRHRLNRGGNRAANNALWTIAMVRMRSEPRTRAYVTRRTSEGLSAKEIHRCLNATLFESCIL

SEQ ID NO: 84716 - protein, 525 aa, unidentified
MLLATIAGRGKQYTDAPLVLNMFVSPSVSMVPGRVRKSLVRPRRFSRLMAIPLRRVPALSHDRGRLPAMAFPLTKETAMPRGRRRTTRVATLPILTPHAAGIDIGATEIYACVPLDRDPQPIRRFGTFTEELRALASWLAQCRVTSVAMESTGVYWIPLYQILESQGFEVCLVNARHVKNVPGRKTDVQDCQWLQYLHTVGLLRGSFRPPETICAIRALLRHRDSLVRLAACHTQHMQKALNQMNLQLHHVLSDITGVTGLAILDAILAGERDPHVLAQQRDRRIKASRETIAKALVGDDRSEHLFTLRQSLASYRHYQARLAAFDSAIDPAVHPLPPATTSHRKPQGNAPRFDLRAELYRILGIDLTQVDGLNTSTVYSLFSELGADLAPFPSSKHFASWLGLCPDNRISGGKILSVQTRHVKHRVAQALRLAAQSLYRSHSALGAYFRRMRAKLGAPKAITATAHKLARILYHLLTTREPYAESRLAQAEVEHRRRMEIRLRTQARALGFQLVPTPQPVGEVS

SEQ ID NO: 84717 - protein, 333 aa, unidentified
MNTIGIDVGCKELVVVVMVNGKARKAKSFDNTPSGHQSIIQSLTKLKGETKVCIEATGVYHFDLAVALSRADDIEVMVINPKAAHNFAKALMTRSKTDEIDAENLAIYAERMPFEAWDRPADESISLRATARRIAALSKQKTQTKNQLHALKSTVETPALVIEQTEQLIDILDVQIKTLRDSAINIIHQNKGLEQAYTLITGIKGIAQSSAIQILSELMILPKDMTARQWVAHAGLDPRIFDSGSSVSKKPRISKVGNKYIRQALYMPALVASRFEPNIKGYYHHLIDDNGLKKVQAVCAVMRKLLHAIHGMLRTNKEFDGTRFYTLPIATDS

SEQ ID NO: 84718 - protein, 310 aa, unidentified
MRTICGVDVSKAWLDAWIRKVGHRRFPNTPEGVAALASWALEHGAELVVMEASGGYEQPAYLALWQHGCPCAIANPKAVRHFAKAMGKIEKTDRIDAEVIAGYADAKRLKPMPPPSPEQQKLTALAARLRQLTVDLGVQKQRLHTTREPLALASLKETIAFFDCQIKKLAQEIAKLIQADPLWQALDTTLRSVKGVADRTVTRILADLPEIGTVSNRAIAKLAGLAPIANDSGQRSGPRPVRGGRPDVRSILFLVADIARKYDPSLTDFRDRLLAKGKPKMAVRIALARKLLVRLNAKARDARAQFAYGL

SEQ ID NO: 84719 - protein, 404 aa, unidentified
MLISVGVDVSKEKSTICILKPYGEVIMSPKDYEHTQSDLKKLVDQLEDFEEEIHVTMEATGNYHFPIAAYLKKKDYDVRIINPLEMKRYRCQGIRNPKTDSIDAVMIAQYGIDFWFRPSQDYADDNERIELKALGMQYFKTMKTRQDRYLVLESVIDRTLPGIGGILNDYDKHTGKDKKSDFVYDFYHADKITVYSEKRFCDKYASWSKKKGYRYSEKEARQLYSIAKDSIPTLPSSENTKLIVQDAVKILREVDASLYDILTRMNEIAKCMPEYATVMEMKGVGVSIGPRLIAEIGDPRRFHSAKALIAYAGIDAPPYQSGKFTGTERHMSKRGSRIMRKIGFELMDTINKHQKLYAGDPVCDYFLAKRSEGKKYRVAMFAAYNKFLRIYHARVSSVLNESVE

SEQ ID NO: 84720 - protein, 434 aa, unidentified
MRLLYERCCGLDIHKASIAACVVITRDGKTEEETRRFGTMTADLLELAAWLKARGIEHVAMESTGVYWKPVWNILEAEGFDRLLANAQEVKIVPGRKTDQKDSQWIADLHQHGLLRKSFVPPRQVRDLRDLTRTRATLAQEHSSTCNRIQKVLEDANIKLGAVASDVFGASGRAMLLAMMKGESDAESLAELSKGRLRSKIPELRRALEGRVTGHHRFLIERQWQQMESLENQMRQFEEEMAERMKPTAEEIARLGESLPSDSTLPTPPREEAILLWMELPGIGLTTACSMVAELGVNMEQFPTSAHVASWAALCPGNNESAGKRMSGKTRKGNVWLRRTMCEAAWAAAHSKNTYFAAQFGRIAARRGNKRALLAVAHSLLVAAYEMLKHKEHYREFGADFFDGLNKDQVKRRLVQRLAKLGFQVTVTPTPTAE

SEQ ID NO: 84721 - protein, 330 aa, unidentified
MSIIGIDVSKLKLDCVILLDAAGRKARRKAVPNDPAGFAILVAFACKQAACVPGELHAVLEATSVYHEACATFLADQGLTVSVVNPARVRDFAKSLAVQSKTDAADARVLAHFGRLTQPAPWTAPPREYRELKALLARLAAIEAQIRREQNRQEKMQASPGPQAVTDSLTASLAFLDAERQRLTREIDDHIDRHPRLKDDKILLESIPAVGNKTARMALALLYDGKRFTHAREAAAYLGLNPVEYRSGTSVARKPRLSKRGDGKLRAQLYMAAVVAIRHNPDVRSLYLRLLAKGKSKMSALGAAMRKLVHIMFGVLKHQTPYRSQVVLAS

SEQ ID NO: 84722 - protein, 320 aa, unidentified
MSQPDLQCIGIDVAKATLDVSGTENLASFTVSNDGAGFTEIADRLSGRNISLILMEATGGLEAPVAGYLQSEGYDVVIINPRQARDFARAMGHLAKTDRLDAAMLAQLARVIDGHPDRSRYIRLMPDAARQALTALVVRRRQLNQMLVAERNRLYPSRAGGRESIGRIMAVLEAELALVTRQMNRQLRQHFREQARLLTSVKGVADITAATLLAELPELGTLTRREISALVGVAPVNRDSGKMRGRRTIFGGRAGVRGTLYMAVITAIQFNPAIRTFYIRLVAAGKAKKVALVACMRKLLTILNAMVRSGSYWEDHSAPS

SEQ ID NO: 84723 - protein, 422 aa, unidentified
MLEQTQDEQEIIARVAALDIGKAELVCCVRVPDPGGGSRRVQEVTTYSTMTRSLQVMADRLMDLGVTRIVMEATSDYWKPPFYLLEAHGFDVWLVNARDVKNLPGRPKTDRLDAVWLCKVAERQMLRPSFIPPVPIRRLRDLTRYRIGLVSDQTREKNRVEKLLEDAQIKLSVVASDIFGVSGRQMLAALISGQRNPQVLAQMARTRMRTKIPQLEEAFVGHFTDHHAFLLAKMLARIDALDKDIADLDTKIEAHLAPFAGAVARLDQIPGVGATAAAVIIAEVGLDMTRFPTPAHLSSWARFAPGVKESAGRKKGTGSTGHGDRYLARVLGEAAAGASKTDTFLGERYRRIARRRGNKKAIVAVGRSILVIVWYLLSDPEVGFHDLGSGYYDSRINPERRKRNHIRQLEALGYKVTLEPAA

SEQ ID NO: 84724 - protein, 349 aa, unidentified
MRIIGCDFHPGYQQIAMLDQGTGEVTERRLSHSHEGEEAKRFYSGLTGEVRVGLEASGQSQWFERLLGELGHEMWIGDAAKIRASAERRQKTDRRDARLLLQLLEEQRFPRIWVPTPAERDTRQLLLHRAKLVGVRTQVKNQLQALALNQGVQRKRKLWSAAGRKQLESLPLLPWAGRRREELLKLLDELDGSITALDGAVCQEAHRRPAVRRLMTHPGVGPVTALAFALTVGPAERFRRGKQVASYFGLIPQEHSSGGKQRLGHISKQGSSFVRGLLVEAAQSAVRHEPQMRREYQRLSQRRCGALAKVAIARKLAVRLYWMLREDVDYAQLLQGSYAGRPESSRGRG

SEQ ID NO: 84725 - protein, 328 aa, unidentified
MENKLHFIGIDVAKTKLDVDMLRPDGRHRSKKFANTPKGHNELVSWLCGHQVSNAHVCMEATGTYMEDVAAHLSDAGYRVSVINPLLSKAFVQSQGIRSKTDTVDARQLAYFCREKRPVIWEAPHPVERALRALVLRHQALTEMHVQEQNRRESAREVQLPSIDMHLLWLETELKRIEKQIKDLTDDDPDMKHRRKLLDSIPGIGAKTSAVLLAYVGLKNRFLEARQFAAFAGLTPKQHESGSSIRRVSRMSKMGHMSLRRALYMPAMVTLYKTEWGRIFRERLEKSGKNAKLIIGAMMRKLAQVAYGVLKSGRPFDATQHTENACMA

SEQ ID NO: 84726 - protein, 355 aa, unidentified
MHDITPDAVVIGIDTHKDVHVAVAINGLGARLATASFPVTSKGYRQVAAWATEHGTVHAFGIEGTGSYGAGLARALAAKGLRVIEVGRINRQLRRRYGKTDTVDAESAARAVLAGDADGEPKVGDGTVEMIRHLKIARDTALKARTQAMVTLKTMLVNAPQALRERFIGITGKMTLIRAIAALRPGALVSTTASTKMALRALANRWLMLDAEIKEHEAVLEQLVRAHAPALMDAPGVSTGTIADMLIVLGDNPQRIRSEAAFAKLCGVCPVPASSGKTNRHRLNRGGNRRANAALYRVALVRMRHHPPTREYIQRRTAEGKSPREIRRCLKRYIAREIYQHLCTEKPLPAAAKGS

SEQ ID NO: 84727 - protein, 388 aa, unidentified
MIKQNLEESNGGRTVVGIDPCSEFLQLAILAPNKETEFKKLPLSPNITDEIAKSTDPATTQIAIESYGSYGKLFVYDLLKKGYDIREINPHISKKLSSLYSEEHSDQKDAESLAKALLLIPDLPKISITDKKQWLAKLTRTRKKLVKDLNGYLNRLHKALTESYGVVYKSLFKTLFAKKALTFFEDNPTINDSISDTDAKKRLGEEKWDLLIQSGKWEDDYYLETLRTEIRGLIGIIRSINSTKLALEEDIQGIAEQVEEMKILKTFPGIGGIAGATLLSEIGDIDRFEKDSYLSAYCGVSPVIWQSGTGRIRTKRRKRYSRRLKGILYFIALSQIRINPESRAYYDRKIKEGKTHWQAMNALSRQLIKIIYYMLKNMEPYRRPMLVN

SEQ ID NO: 84728 - protein, 339 aa, unidentified
MWYSGIDQHKQSSVITTYGPEGPVVKQARLPSTPLALQLYFAQFPGPHQAVVESTGGWYWLADVLTALGVGLVLAHATRLKAISAAKVKTDQVDSDTMALLLRAGLIPEAHMIRPDQRGPRDLMRTRLRLVEKCVSAQNSIARLLEKFNVPDVSQLTALYQVQAGCHTAQIELLEAQIATLERALYPSLIPNADVQRLLWIPGLGKVNAFTLYTEIDGISRFPSDRQFFSYCRLVPGAANSGGRTRHRSGSKAGNRYLKLAFSHAATRAMQYNPEIRAFYKAKARKKPIRIARTLVALELARIVYHVLTKQEDFNGQFKHQPLSHRKHAQWPRRASPPA

SEQ ID NO: 84729 - protein, 385 aa, unidentified
MDRTSWCAASRHTLHCALELSKSSWLLAIQFPDREQPSVYSIEGGNTEKLMAKLTAARDCWAKVSGSLPVITLCYEVGYDAFWLARFLNAQGIACHVIDPGSVQVNRRGRRVKTDRVDVKMLLRTLIAWCRGERHVWSVVRIPSIDEEDLRRSHRERSRLVRERTAHINRIKGLLFAQGIRGIKVKSQCKTLAVDKLLTGDGHRLPPRLACEITRELQRLAMVQEQIAEIEHERDTAPTPCEATERKRQLLLQLKSIGPAISALLSREVYYRQFVNRRQVGSFLGLTPSPYNSGEEERCQGISRAGSGHVRAIMIETAWLWIRHQPKSALTRWFVERTAGQSTRMRKIMIVAVARKLAIALWRYVEHGLVPQGAILNPPTTGKAR

SEQ ID NO: 84730 - protein, 363 aa, unidentified
MIVIGADTHKHSHTVGAIDAMSGRVIADRTVKAKRRSFDDLLLWARGLDGERVWAIEDCRHVSGALERFLLRRGERVVRVAPKLMAETRRSARERGKSDVIDAVAIARAATREGLDTLPVARLAGRELDIRLLVDHRERLVAQRTALINDLRWHLHDLWPGFEIPARVLTSGCWQDRVAGRLARAEQTPRVRIARDELRRIRELTRSIDALQRELAVLVAQLAPRLLAEPGCGVLTAAKLIGEIAGIERFASDAKLARLAGSAPIPASSGRTTRHRLDRGGNRQLNCALHRLAVTKGRLDPDTAAYLARKQADGKSRREALRCLKRHLARRVWRLLQSTASPLKASLPVPAMIHCNVPYSRFS

SEQ ID NO: 84731 - protein, 371 aa, unidentified
MKSIIYIGMDVHKKTYSLCALLKETGEIIGETKIPADVSLIIKFIENAKKSVDSDDVQIKTGYEAGCLGYSLYWQLAEKGIECDILAPSTMHRSAKNKVVKNDRRDAKNIATNLANGTYKSVYVPTDEDVEIKEYIRMMHDFKIELKKVKQHINAFLLRFGHQYPGKSKWIPAHIKWLKELELSDMYREILDEYLSQLEILTEKIERFKYRLEELSQKETYNEKIGQLRCIKGIDTTAAMTMHAETSDFDRFPTANAFASYCGLTPGEDSSGESYHRLGITKQGNSMIRTTLVEAAQVLVRGTIGKKGKKVKSKQKDQDVKVIDYADKAVIRLQKKYHRMIFRGVKRNVAITAVARELACFVWGIETGHIS

SEQ ID NO: 84732 - protein, 370 aa, unidentified
MKKRTIFVGLDVHKNSIDVAIAEDGRDAEVRSYGTIGGDLASVARLASKLRAKGATLHVVYEAGPCGYGIYRTLTDMGVDCIVVAPSMIPKRSGQRVKTDRRDALTLARLHRAGELSPVYVPQQEDEAMRDLVRAREDAKEAERKAKQRLGSFLLRHARRYSGKKTWTRAHRRWLSEQRFAHPAQQIVFEEYVGAVEHGQCRVERLTDQIRALVSEWRLAPVVEAFQAMRGVSLIVAATVAAEVGDLSRFDHPGQLMAHLGLIPSEHSSGDKVRRGSITKAGNSHARRVLVEGGWSYRHPARVSRAILQRVEKVPEAVAQIAWKAQLRLCGRYRRLAAAGKPSQVIVTAIAREMAGFLWAIAREVPIRAG

SEQ ID NO: 84733 - protein, 451 aa, unidentified
MLDTTTFVGLDVHARSIKAVSLDVMTGEVRAATFGYDAGAVAGWVRSVDPKARCVYESGVTGFDLQKRLSGLGVDCVVGAVSKMIKPSADRRRKNDRNDAEFLARMLSVGNVVEVWVPDDECEAARDLTRALEDARDDLSRSKQRLSKFLLRHGLVFDERTPTGRRKGNWTRAHWSWIESIRFAERADEEVLAYYVDAVRRAAEEKARLEGLVEAEARKPRWRKRVDSLRCLKGVDTATAADLVFEAGEFSRFGNARSFAAWVGLTPSEHSSGESDRRGAITKAGNKHLRKTLVEAARHYLTCSGRPKDLARGQAPDRGARRHAAKGVRRPVERREALLARGVHGRTSPRRASSPAGYGRSASWPRGHRGRSPPHISRSPRKRLDPKPLRRTSGPFSASAQGATRVHRLSVRRRSLSRSNGLPSERSPRADIKLQRRASGRHAEVAADGLI

SEQ ID NO: 84734 - protein, 319 aa, unidentified
MAQNDLVVAGIDVAKDKVDVCVRSLSLKRTFASTAEGRRELTSWLRRRKVGKAVMEASGGYERDWAKALRNAKIEVRIVDPKRVRSFAQSAGRLAKNDTIDAEMIAWFAETFDEARGQAYDATREQLHQMVNARQAMKDMQTKLESQGEHALPATVQRMHARIMKTIAVELVKIEAAISAMVQATPHFTELAEIIESVPGIGRTTSAALIAAMPELGQANNKIVAALLGVAPYDDDSGRRRGERHIKGGRRRTRNVFYMACLGAATQHNPVLKAFYDRLVAKGKEKKVALVACMRKLISILNIMIERRQKWDANRYAVS

SEQ ID NO: 84735 - protein, 376 aa, unidentified
MERGSLMLNTTTFVGLDVHARSIKAVALDAMTGEVRSATFAYDAAAVAEWVRSLDPAAKCVYESGVTGFDLQKRLAALGVDCVVGAVSKMIKPPADRKRKNDRNDAEFLARMLSVGNVVEVWVPDDGCEAARDLSRALDDAREDLKRCKQRLSKFLLRHGYVFSETTPTGRRKGSWTAAHWAWIKSISFPEKADGDALAYYVDAVRQAMEDKARLEKLVEAEASKPRWKRRVDSVRCLKGIDVTSAADLVFEAGEFSRFKNARSFAAWLGLTPSEHSSGESVRQGGITKAGNKHLRRVLVESAWHYLGCSPHSKDLAKGQVPDPAARRHAAKGVRRLVERRRAMLERGVHKNKANVATARELACWCWAVGCMVEGA

SEQ ID NO: 84736 - protein, 355 aa, unidentified
MQKYKVSFKGQNIYVGIDVHLKTWHVTTLTESGCKYSFAQHADAKELFDRLNKKFHEAHFKSAYEAGFCGFSVHYALTELGVENIVVHAADIPTTGKEKALKTDAVDSEKIAWALKRDELTGIYIKDRRYMDDTNLMRLRQRFIMDLSRQKNRTKHLLYTQGVTYPERFRNNRTHWSRNFMKWLREEVELLSEQKLSLMLLCEQVENTRKAILKVTREIRRLSTTDRYKENFNLLMTVPGLGLITSMSMLTELDNDIMRFPNERSFVSMLGLIPTCHDSGDKKVNGEKINRGNKHLGPLIVEACWVAIQRDIELSAYYSNCCLSMKPHKAIIKVARKLACRAYAVLKTKTRYALP

SEQ ID NO: 84737 - protein, 391 aa, unidentified
MTIVGIDVAKDKHDCYIVNSDGEVLAEVFTIPNDQIGFNLLFQKLQSVAPDLSKVKVGLEATGHYSYNLLGFLLDKGLHTYVINPLHTNLYRKADSLRRTKTDPIDAHTIAGMIMSNVDLTSYTAKSYHNEKLKSLTRYRFDKVQERAKLKTSVARLVNILFPELEKLVPTLHLNSVYAMLSKFPGAKQIASCHLTCLVHLLSGSSQGHYNRTKAVEIREAARSSIGSVLPAKSLELKHTIHLIEVLSEEIDEIETLIREIMDESPSPILSIPGISYRMGAMILAEIGDFTRFSSPDQILAYAGLSPSTYQSGKLANAYPHMEKRGSRYLRYALFNATKYVCYWDPAFAAYLAKKRAEGKHYNVAISHAAKKLVRVICAIQKSGKPYCPAT

SEQ ID NO: 84738 - protein, 384 aa, unidentified
MKLFVGIDVSSEKLDTCFLTDDDSLTVLAEMSLGNDVVGATTIKEKILVCHEAWHFTQIVIGMESTSMYSFHPAMFFNEDEALRALPTVVTVENPFRIKQFSRMFDEDKTDKNDALRIADFLRIQRFTTSPIKEEKYMALQRLTRARYQMIGQLVEAKQHFLENLTYKCNTLTRELKASDSSTSVFSATLLSLFTEDYSLDDLAEMPLEDFASLLQEKGRGRFKQPEALAKTIKKAIRGSYRLGSVAQESIDAVLSAIAAQIRGLENSIQALDKSIEQLVVAIPEYQCLTSIPGVGKVYAAGLIAEIGQIDRFEDQTKLAKYAGLSWKVKQSGNYQSEHTPLTKQGNRYFRYYLVEATNSVRRHLPEYGEFYAKKIPRNTQTST

SEQ ID NO: 84739 - protein, 342 aa, unidentified
MQITTIGIDIAKNVFQVHGIDAKEKVVARKQLRRSRVITFFKALPPCLIGMEACATAHYWARELTKLGHEVRLMPAKDVKAYVKRNKNDAADAEAICEAVRRPTMRFVRIKSAEQQGQLMQHRTRDVLIRQRTQIINALRAHLAELGIVAAQGNAGVNELRAIVTDEQDTRLPIDARASVIVLAAQLEALESVIGAIEKRIKMQHRSSEASQRVETIPGIGVIGATAIVATVADPTIFRSGRDFAAWIGLVPRQDSTGGKPKLGPICKQGDRYLRRILVVGAIAVLRRAQENPGKYPWLTQLLARRPFKVVAVALANKMARMAWALLAHGGTYRAPELAETA

SEQ ID NO: 84740 - protein, 462 aa, unidentified
MTKSRSRKSSGRRRRSRSQRPERRILHPNAAGIDIGSRSHYVAIPPDRDAESVRSFGCLTPDLQEMARWLKVQRIDTVAMESTGVYWIPVMQVLEEHGLEVYLVDARQSKNVPGRKTDVKDCQWLQELHTYGLLSRAFRPPDAICVLRSFWRHRKGLVEMASMQIQQMQKSLEQMNLQLHKVLSDISGVTGMRILRAVVAGERDPVVLAQMKHPSVQSSEETIAKALTGDWRVEHLFTLRQAVELYDTYHEKIAACDQEIATCMKTLERRGDPKALPPTRTGRRRKNQVHFDLRQQLYEWTGVDLTTLPAIDAMTAQTVLSESGIDMTRFATEKHYSSWLGLCPNHEVTGGKVRKRRTRKVHNRAAHALRLAAQSLHRSKTALGAYYRRMRGRLGPAKAITATAHKLAILIYRMLKYGMTYVEQGQQAYEQQYQERTRKMFIKRARKMGYAMVDLRSGEVVS

SEQ ID NO: 84741 - protein, 365 aa, unidentified
MDSERIAVAVAEASGEVRSLGMIPYTAESVRRLVKKLGPARRLRVCYEAGPHGYGLYWQLMGLGVHCDVVAPTLVPVKAGDRVKTNRRDAEKLARCYRSGDLTPVWVPDAAHEALRDLVRAREAAKKDQLRARHRLGKFLLRRGLRAAGGVKNWTLKHLLWVRTLRFEQPAQEATFLDYLHEVEHAAERVARLEKAIDQAVAGLPEEMRAVVAGLQALRGIKQITAVTIVAEVGPLSRFARPKPLMGYSGMVSSEDSTGNSVRRYGITKTGNAHLRRVVGEAAWAYQYRPAMSAALKKRQEGLSEEVKEIAWKAQHRLCTRYRRLLTKGKVKPQVITAVGRELLGFIWAIGVQVEKEEQLRRRAA

SEQ ID NO: 84742 - protein, 365 aa, unidentified
MKKIAYVGIDYHLNSLTIAVLIEDETDFYNVMKTPNTDSVIHKHMKKLSKSFEIKACYEASFSGYSFQRKMTSWGYHCDVIAPSLVPKKKGDRRKNDKRDAKTLAKSYRMGDLAIVHVPTEEEESVRNLIRCRLSFKDLEKRTKTQINSLLHTQSIVWPEKKWNAKHLSWLSKLEMPQKHLQTILDEQVGLLRYAQSRLEFLDNEIEDIAKSDIYSPSVKKLRAFKGVGTLTAMILIAEITDFRRFPNARALMAFLGLIPSEDSSGDKHRPGAITKTGNSRVRKHLVEAVQHCAKNPKVSSLMEKNLSQVDACSANIAVECMKRLHKRYWHLMFKNKLRQVALTATAREFVGFIWAMMQSDPETA

SEQ ID NO: 84743 - protein, 355 aa, unidentified
MTSTKYIGLDVHKESISIAVLNSAGKAVMECVIETKASTILQFIHGLGGDVHLTFEEGTWAGWLYDLLKAHVTELVVCNPRKNALLKEGSKSDRIDARKLAELLYMSKLSSVYHGEHGLRMLKELSRSYLTITKDLGRVMNRLKALYRGWAIPCAGTQVYAPHYRSEWLAKIHEAGVRRRAELYYQQLDALRLVRQQARKELLAEARKHHATKLLRQIPGIGPLRAAHLVALMQTPHRFRTKRQLWTYSGLGLETHDSAQYRVVEGQLHRSQKPVTLRGLNDNHNHDLKDIFKGAAMRVSTAAGPLRDFYEALLAKGRKPTMARLTLARKIAAITLIVWKKEVRFDANYLKQQAA

SEQ ID NO: 84744 - protein, 344 aa, unidentified
MENYAGIDVSLELSSVCVVDAQGKILKEAKVASEPDALVDFFETLGFAVKRIGLEAGPLSQWLHAGLRKAGFETILLETRHVKAALSAMTVKTDRKDARGIAQLIRMGWFQPVRAKSVGAQEIRALLIARKQLLGRLIDVELSIRGILRGFGLKVGPVTRRNFEARIRELVAGQATLERIASAMLSARSALKAEYGRIHKAVLVIVRDDAVCRRLMTVPGVGPLVAITYKSAIDDPHRIAKSKAAGALFGLTPKKYQSGEKDVTGGITLAGGETVRTVLYEAANVLLSRITRFSKLKRWGIDVAKRRGSKRAKVALARKLAVILHRIWVDGTTYRWAEAAPMTA

SEQ ID NO: 84745 - protein, 337 aa, unidentified
MQATTIGFDIAKSSFQVHGADERGKTVLRKKLARGRVLEFFANLPPCVIGMEACGSAHYWARELIELGHEVRLMPPQYVKPYVKTNKHDPADAEACCEAVQRPGMRFVPVKSEQQQSCLMLHRIRDRLIAERTGTINAIRGHMAEFGIVAAQRRAGLKDLLAIVSDLGDERLPPLARELLVDQAEHLRAIEARIADLDGRLVRQTRDDEACRRLTEAPGVGPVIATAVVATFGDASLFNSGRGFAASLGLTPRQHATGGKERLLGISKRGNGYLRRQLMHGARSLVRVAKGRNGQPWAWINELLARRPFNVVVAAVANKLARIIWAMLSRGEGYGTA

SEQ ID NO: 84746 - protein, 340 aa, unidentified
MRYVGIDLHKQSITVCVVDQDRNVLQTRRFACVEVDRIVAFFAGLGPFEAVVEATAGYQWLLERIEPLARRVVLAHPGKMRIIAESTKKSDKLDARTLAEFLALDMVPQAYRPTPRQREHRALVRHRQFLQKQRTQLRVKVRRVVSDYNADRRDLFSRRGLESLQAVPLSDSDRFILGQMLAQLRGIEEQSAAVRRQLRAFAAAASEAEARGRRVLRSVIGVGEVTAEVVLAETGDVGRFRSARQVVAYAGLAPGRRESAGKVRDLGITKRGSPLLRWVLVEASWQAVRRSAYWRGVYTALKKRRGSRRAIVAVARRLLGVLVALLRSGQEYREPAATAA

SEQ ID NO: 84747 - protein, 344 aa, unidentified
MNNTIVGVDLAKEVIQVCIYTNKRVRSNKEMTTSDFLTFLANLKSATVVFEACSTSNYWKQKASSLEHDARIICPKLVHSVRQNQKTDKNDALAVVQAALLPDVNFISGKNIEQQQLQSIMRFRELAIKQRTALGNQLKGLLLELNIRVSNRGGGLKGVIQSTLEDGENDLSFEFRSALKMTWLQYKGLLKSITHYEQLLTTISTKHSECKKLLKLEGVSTINAVNLYIALGCQPEMFSKGKDASACIGLTPIQYSSGGKVKLGSIGRYVKNSMLRSNLVVGAMSAINRIVTREAKTKKEVWIQALVARRGKRCAAVALANKTVRTAFAMLSQGTEYKAELITA

SEQ ID NO: 84748 - protein, 319 aa, unidentified
MARTFIGVDVSQEHLDVHVRPATLRRRFANTAAGIAELVAWVRPHAAERIVFESTGPYQKAAVGALLAEGLPAVVVNARQVRDFAKALSYLAKTDKIDAGVIAHFAEVAITTVRPLESQEIQDLRELHDRRGQLVHMLAMEKNQRHSATVARASARVLGSIDKHVAYLEAQIRELERRMDQLIEGSAAFRARHEILRTITGIGPHVSRTLLAYLPELGTTSRQRIAALVGVAPFNDDSGSHVGPRRTRGGRSKVRVSLYQAAVAAIRHCPRMKAVYAGLKARGKASRSALIAVARKILVLANAMVRDMVPYKAPANSVC

SEQ ID NO: 84749 - protein, 371 aa, unidentified
MKKSSMFIGLDVHKDSIEIAIAEADCDGEVRSYGGIDGTLDALDKVIRKLVSKGCNLHFVYEAGPCGYDVYRHLTAQGFDCVVVAPSKIPRQSGNRIKNDRRDAQMLARLHRAGELTAVYVPFAEDEAMRDLTRAREDAKAVEKKAKQRILAFLLRHGHRYSGKSSWSRAHFRWISILKMPHPAQQIVLQESLDALAECTRRVDRLTEQIQTLSPQWRLFPVTQALQSMRGVSLIVATTTIAEIGDLTRFGRPAELMSYLGLVPSEHSSGQKTRRGSITKTGNGHVRRVLVEAAWAYRLPARVSRKLLIRQEGLSQEVCAISWKAQLRLCARYKRFTANGKSHQLVVTAIARELCAFMWAIAHEVQGPVKM

SEQ ID NO: 84750 - protein, 318 aa, unidentified
MSVFIGIDVSKASLDVVSLPDNQHLQVANTADGHQQLLDWIDRFKPVTQIALEASGRYGELVAQILVEHHYAVSYLNPKQIHAFARMQLHYHKTDLQDAKLIARYCQLFQPELYQPTAALQRRLQQLSRRIDTLKKMRQQELNRLSSGIQDPFVRQQLQTHIELLERMIADTQQTVRDLIQSDDNLAQQAQLLTSIKGISDTTAQLILAEIDINNFASARQLAAYIGITPLHFQSGTSVNKHAAISKQGNSRLRAGLYMPSIVAMQHNLPCRKRAQSLRERHKPGKLIVIAIMRKLIHQIYGILKSRIPFDPHFENSA

SEQ ID NO: 84751 - protein, 358 aa, unidentified
MQSNKINFKGQNIFIGIDVHLNSWSVTTITPSGYKRQTSHRADAVELYAYLTKNFPGGIYHAVYESGFCGYSCCYELRELGIDCVIVHAADVPSTQKSRLSKTDSNDSMRLAMSLRNGELNTIYIPPKEVLGDRDILRYRTIVQKGMSRTRSRIKHLLHTNGVSYPREFREPYKHWTRRFIKWLREDVRLLSGKRLELDFLLEDLEHQRSQLLKATGKVRELSRTSRYAEDYGNLISIPGIGLITAMTMLTEVTDIHRFSSQKKFMSYVGLIPVMKDSGETIRQNEITPRGNQRIRRMLIESAWSAVRYDAQMAAAFGAFCRRMKKNRAIVRIARILASRTYHILKTRTKYDTALCTA

SEQ ID NO: 84752 - protein, 337 aa, unidentified
MKYSGIDLHSNNSVVVVTDESDRTLVSRRVPNSLGAVLAVLEPYRGEIVGVVVEATYNWYWIVDGLQAAGYRMHLANPAAIKRYEGLKRSGDEADAVYLAHLLRLGLLPEGYICPKQQRAVRDLARKRMQLVRSRTQHILAVENIQARESGARMKAEQIKRLDAQSVQTMPLVQEVKLALQANLAVIGTLTQQIDKLERCLHERVRLREEFGLLKSAPGIGETLATTIMLETGAVARFARVGNFSSYCRCVDSERISNGKKKGEGNVKNGNAYLAWAFIEAANFARRYCPEAKRFYERKRAKTNTIVATKALAHKLARACYHVLREQKPFDVQRCFG

SEQ ID NO: 84753 - protein, 381 aa, unidentified
MDQKQATQEKELTSKFPLLFVAFELGHSTWRMACSDGRKVRQVTVTARDLDQVERALLRAQDHFAMAEGCSTVSCYEAGRDGFWLHRYLQDRGIDNVVVDSASLEVDRRLRRAKTDRIDAGKLLRMLIRYHGGEKQLWRVVRVPSREDEDARHLHRELEGLKRERTRQRNRIHGILMQQGLCLPNPSKKRFLKDLEALRTWDGQKLPAGMKARLVRSYKQLRLVEDQISALATEKREQLKQVDNAKMRQVAQLLRLPGIGPVSSWAFVMEFFGWRQFRNRREVAALAGLTPTPYDSGGKLREQGISKAGNRRIRTLAIEIAWAWLRYQPRSKLSQWFSERFAGGGTRMRRIGIVALARRLLVDLWRFLEYGVAPEGALLTT

SEQ ID NO: 84754 - protein, 393 aa, unidentified
MRYAGIDIGSERHVVAIVDERTEVVVAPTGFGEDATGYASLLARLGESVDVLIAMEATGHYWQNLFAVLTGRGFAVALLNPLSTRRFAQVGLERTKTDAIDALSIAKLAALKRPVPAKLTDELTRELREQVRLRDRLQQDLGDRVRELHRVVDLAFPEFTRHVKDLGCLTTTAVLSVFPTAKSLAITSVRSVAQIVYDGRHRVGEELARALIAAAKQSVGQHHGPIYAREVKYFCEDIRILRERLREIDDDLRSQVDQHEVATLLTTIEGIGTNTAARLVAELGDPAHWKSAAALAAHVGVVPQIHHSGKHTPLRAGIGPLGDRRLRSALWMPVLGAVRRNPWLRHHYRRLRANGKLAKVALIACMRKLLAAIYSVAKHRRAFEPRLPTATPA

SEQ ID NO: 84755 - protein, 353 aa, unidentified
MEKITTVGLDLAKQVMAVHAVGADGQRVMRKVLRRDQLLRWTATLPRCVVAMEACGGAHHWARELTRQGHTVRIIAGEFVQAFRKSGKNDANDAEAICTAVRQANMRFVAMKSVEQQAALCVHRLRQGLIEERTALINRLRGLLTEFGVVAPLSPEKLRRELACCQDPEDLRLPATVRQLVGDQLTALDQLEERLAAYAEQIAAQAAQSEVAQRLQTIAGVGPTTAAALVATVGQPQEFCNGRQFAAWLGLTPKQHSTGGKTRLGRITKRGDAYLRTLLILGAKSALQAALRKPPEGRHRLQRWIVVVYSRIGYHKTLVAIANKHARIIWALLVRGEAFDPRRLAPATEVAAT

SEQ ID NO: 84756 - protein, 382 aa, unidentified
MQTIDTINPTILLAIELSASTWLVAARVPGWEKPHLHRIDGGDTAALLALISSLQARAARGLDATIGVVCCFEAGRDGFWLHRLLTAHGVVCHVLEPTSILVNRRARRAKTDRLDAEGMLRVLAAYLRGDHQACSMVRVPTPEEEDAKRTHREREKLVQERLRIENRIEALLFTQGIRKRPSLRSWERDLAVLRTGDGREIPRHLRAELDRLRRRLVMTLELIREVEAERDQAAKTKPQDQTCHKIAALCRIRGIGENFAAVLTREVFYRSFDNRRQIASYVGITPMPYQSGGMDRDRRISRAGNPRARTTMIQLAWLWLRYQPGSELAEWFRERVGTLAGRTRRIAIVAMARKLLIALWRYAETGVIPAGAEIRAETAVAA

SEQ ID NO: 84757 - protein, 356 aa, unidentified
MKYYTSTTEYNCGIDLHARQMYVCVMDRQGKKLVHCNVKDNDFEYFLKLIKPYRHDITICSECMFGWYWLADACQEQGLTFVLAHALYLHLIHGGKNKNDRIDSEKIAHLLRSNLIPPSYVYPSAKRPLRALLRQRIFYVWRRSELLARIHSHQLAYNRTPAKQTRRVRDSWEEQLLKAENHPLRQLALKNDMAMIRHFDEQIFQLEEELQRQTKRVASREFTLLKTIPGIGEVLGLTILYEIGDIERFPTVKDFLSYCRLVKGTVASAGKIKGLRGAKLGNPYLRWAFGEAAVIAKRDHYQLKPLADRLEARMNGNKFKANTILAIKLARAAYFMLKNKTVFDPERLTAVLAKAA

SEQ ID NO: 84758 - protein, 329 aa, unidentified
MKKMHIIGVDISRNTIDFHCYGHSVTADPVANNLKGFGQFQKWIRQQVSKTKEEVMIVMEHTGIYTYNIERFLHAKGWSYVKRPALDIKRSVGIQRGKSDRTDARMISKYGWMNKESLAPMEPVNDNRVNLQQLMSYREKLVTDRTAHQVRIKELQGQMGNKLCDQIRRSTQRMIKLLTIEIEKMEEAVKACLAKEASLQKNYELLITVSGIGFVTAVSLLITTENFTRFDNHRKFACYCGVAPFTHRSGTSIRGKTRISQLANKPIKSLLTMSALSAVRNDTELKAKYEQKCKEGKAKMSVLNIIRAKLIERVFSVINRQTPYLKAAA

SEQ ID NO: 84759 - protein, 337 aa, unidentified
MNHSVIGMDIAKQVFQLHLVDAKGKVERIKLKRVEVLPFFAQRLACTVAMEACGSGHWWARQLQSLGHTVRLLAPRSVRPFVLRNKTDAADARAIWTAAQQPEARWVAIKTEAQQAVLALHRMRAQLLKFRIMQTNALRGLLYEFGEALPEGHAALMQALPQALARCAERLPAMLIETLREQWARVRSLETEIATIEQRLRDAVKESQASRMLTEILGVGFLTASASVATMGDPKSFRSGREFAAWLGLVPRQTGTGGRVRQLGLSKRGDTYLRTLLMHGARAIVARGQRSAWIEGLLVRRPYNVVIAAIANKLARTIWAILAKGQPFDREQWSAVA

SEQ ID NO: 84760 - protein, 344 aa, unidentified
MEHFAGIDVSLEQSSVCVVDGAGRIVRETKVASEPEALIRFFGGLEIEVTRIGLEAGPLSQWLHAGLVAAGFEVVLLETRHVKAALSAMVNKTDRKDARGIAQLLRMGWFRPVHAKSPGAQEVRALLVARKLLQSKMLDVEFSIRGILRGFGLKMGKTSKGQFVARVRELAVGHPMLELITEPMLRAREALRTEYARLHGEMLAIAKPDPVCRRLMTAPGVGALVAVTFKSTVDDPGRFTRSRVLGAYFGLTPKKYQSGERDVTGAISRVGDPMVRVALYEAANIMLSRVTRFSSLKRWALDVAKRRGLKRAKVALARKLATVLHRMWIDGTTFHWGKQAVAAV

SEQ ID NO: 84761 - protein, 338 aa, unidentified
MRLYAAIDLHSNNSVLCVLDETDRIVFSKRLPNDLTAIVKALQACPGEVVGVAVESTYNWYWLVDGLQDACFSVHLVNTTAVKQYDGLKHSGDFDDARHLAHLLRLGILPTGYIYPKQERALRDLLRKRSQLVRQRTSQILSMQNLTARNLGAHASGNAIKQWQDEDIDAMPLLPEQRLALKANLAVMGCMEAQVRLLERAILAQARPRADYQALHTVPGIGKALALTIALESGDMSRFASAGNFASYARTVDSRRESNGKKKGSGNARCGNKHLAWAFIEAAHFAVRYDETIRRWFQKKCAKTLQVVAIKAVAHKLARACFHVMKSGEPFDAARAFG

SEQ ID NO: 84762 - protein, 339 aa, unidentified
MSKRSIQVQETMYCGIDVSAKSLTVAIQRMHQPVEQRSFPNTLVGHKALIVWMRKTKSPVRVSLEATGIYSLDLAFALDAAEGIEVAVLNPRIANRFAQTIRRSKTDAADAEVLAEYARRMPFTAWVAPSPGSMRLRSIVRHVESLSVQSAQNQNRLHAAQGSTSTPGCILQDLKRSVASLELRIHKLRREAMTLVRQDDLLRRRFELLVSIPGIAQVSAMQLLAELSTLPSDLTVREWVAHSGLDPAHEISGSSVRKASRISRAGNRHLRRALYMPALVASRCDPHAKAFFENLLARKKARLQALIAVARKLLHAIYGIFRSDLKYEGTKLFPKITLS

SEQ ID NO: 84763 - protein, 535 aa, unidentified
MVTTTRKRKATGSKKRFIGKPTGQIQQRVQEVGPEGFGIVAVDCAKRRSKWMLCNFYGKVLIEPTVVEHTNGGLRAMTQLVAAACHAEGLTDSIVAVEMTGIYHKPVYRAFRKAKFDTRIVHPFASNHYRQPLHPDEKTDDNDLEAIFHAAVKGYGLATLPVGEVYQSLQAVSRHRHNLVKQRARLMVQIRRLLHQTMPGYADLWEDDKLYHKSIAMPVALKFASAEAIREVGVSGIAQHLRDTKVRFQTRTIERIMAWANTAVEPSELAGMHTRQWQQLNELRQLLNAQVLAAEQEMAGFLAKTPYLLLLSVTGINVVSAARLAGEAGPIEHYASARAINGRAGLFPSRYQSDEVDHADGSLVRQCNRKLRGAAMLVAENLIKCHPYYRGLSELWKQQKIDPRDRRCRIANRAMRMVFQLVSGRQVWRGRGVDREYLLAKLQEFHRVHKTPIEQVLRDMNEAFVWLPKSVYEAEAKPLAEWARKKHRGVKRIGDLMLPLLLRLGVSPEDASLEDDGVAITEDVESMMSEARSSD

SEQ ID NO: 84764 - protein, 337 aa, unidentified
MNYCGIDLHSNNSVVTVIDETDRVVAEKRLPNDLTKILAFLGPWQTELAGVVVESTFNWYWLVDGLQAAGFTVHLAHTPAIRQYDGLKHSGDETDARYLAHLLRLGILPTGTILPPEVRTVRDLARKRMQLVRSRTSHLLAIENITARQHGMRISTTQVLRLTAEAINQMGLPSEVALAMQANLAVVTTLSTQIELLEKRLAEKVGPRIEYALLTSVPGIGRILASVILLESGSIERFASAGNFASYARCVDSRHTSNGRKKGEGNTRNGNRYLSWAFIEAANFAQRYCAEAKRFYERKKARTNPIVARNALAHKLARACFHILKEHKPFDVTRCFT

SEQ ID NO: 84765 - protein, 441 aa, unidentified
MALGKGKRRTGVSVMDRDTVNWNERTAFVGFDWASDHHDVIIVNERGTIVEDFRFDDASEGWELFRTKLGSYANPAVAIETSSGATVERLLEAGCAVYPINPKAAKRYRERKAPSGTKTDRFDAWSLADALRLDGHTWRALKPDDPLTVELRLLCRDEIGLIRQRTALVCQLRAALGEYYPVALKAFDDWTSPSSWAFVEAFPTPEALHQARKRRWEKFLHVHKLYRPETYEKRLALFAEARAFCGSKPAAQAKSLLALALTAQLRTLQSHLDKYRARIQELFAQHPDHELFGSLPGAGEKLAPRLLAELGDDRERFDSPQALQCHAGTAPVSYQSGQINKARFRIACQKLLRHTVHLWANLSREKCPWAEAYYRTKRAEGQSHACALRCLGQRWLKILWKMWQTRTAYDAELHQRNQLQHGSWVLQLMNPKTTGLAAGEA

SEQ ID NO: 84766 - protein, 393 aa, unidentified
MPAAGLTACKGGHFMYRILKIGMDVHTKNFTLCALESKFGEEDQILAIITVGPDHTNVLDFIDRIKKKMDPKDQDEIDVECGYEAGCLGYSLFHTLTACKLKCRILAPTTMLSEQGPRIKTDRRDARLIAQCLSNGGYHAVYIPTAEDNAVKEYVRMRDDHKLALKKVKQQTNALCIRFGFIYDGTHWTGMHLKWLRALKLPDLIRETLDEYLTTYDELTSKIDRYDKRIQEIASQDEYQEKVRKLVCFLGIKTHTALSLIVETGDFIRFRKGNVYAAYLGLAPGEHSSAESGGRLGITKAGNTHLRRLLIEAAGGICKGHIGKKSKDLLLRQKGNPADVIAYADKANVRLRSKYYRLTRHGKKRNVAVAAVARELACFVWGMMTGNIYGNAA

SEQ ID NO: 84767 - protein, 411 aa, unidentified
MNANPVFLRYLALDAHKHYVVIGGVNATCETVVPPRRLEMAELEDWLRTHLQPTDKVVIEATTNTWTLYDQVARYAGAVVVAHPPHIKLIGAALVKTDKRDVFVLAKLLALNLIPEVWMPPQPVRELRELVAHRLRLTRARTQTTNCLHSMWQRHNLAALDGDPFAAQHRPWWTSLDLSPTEKLHVRQDLATLDLLNAQIAEVEQELERLSTVAPWAAQTPFLMQLPGIGLITAMIILAAVGDITHFAHAKHLVGYAGLGPYVHDSGKTQRHGGITKHGRADLRYAMVEAAWVAVRTHPRWQAEFARLAKRMPDNQAIVAIARKLLVVVWHVLHDHAADHHALPDKVAAKFFVWSARLGQTYRGRFTPRQFVRWQLMQLGLGDDLTHVRFGGQLRSLPSAEELAALTATVT

SEQ ID NO: 84768 - protein, 422 aa, unidentified
MIDITNNSKNLTLVAIDIAKKSHDALIQFANGHSVQMKIENSLQGYQRLWVECCKHASVVRIGFEPTADYHRNVAYWFQQQGAQCHLVSSLSCARAREMLYQTWDKNDRKDTSVIMYLLNQGMSRPFFDPLVHQTMDIQELSNTYHQVTIARTRCLNSLVNHNLTLYFPEAEQFFHNSRSEWFCDFLLKFPTPASITRYRKATFVKRAWDVIGRKQYKLQFLEHLYDIAETSIALPVDIKSVAVETYRIQLQRYIDLTRQRLALERKSEQFLSQRSDYKRLKTIPGVGAIIALIIIAESGDLCRFNHYRQYLNYCGFNLSALQSEQKKGSYKLSKRGNARLRYGYWLAANAAIRMRENSFRYKYERYIKINGRSADTKRKAYTAVAVKLARVAHSIVKNDVDYHGYHEVFRGDVNHVAVEAH

SEQ ID NO: 84769 - protein, 351 aa, unidentified
MRTYYVGMDVHQASIVIAVLNGAGKVVMESIIHTGAETVRGFLKQLRGKVYVTFEEGTQATWLYDLVRPLVTEVLVCDPRHNKVVGNKSDRVDARQLAEWLRNGSLRAVYHGDKGVRTLKELVRNYDCLVRDTTRVMNQLKAIFRGRAIDCAGHDVYRHERRAHWLTKLSEPGAQQRASFLYQQLAALKPLRHEAKRLMLKEARRHAAYQLLLSMPLLGPISVAQLIAIVGTPFRFRSKRQFWSYGGLAVVTRTSAEYVLVNGVVRRSSRPVATRGLNRNHNHLLKRVFKSAASSARLSGPFKAAYDARVAQGMDASLARLTIARKLAATTLAIWKRGEQFAAERMKQQVA

SEQ ID NO: 84770 - protein, 317 aa, unidentified
MTNVTFPQLIQRGCGIDVHLKVVVATIDGVGIQKETRSFNTFTSCLTEMKEWLLANGITHVAMESTGVYWKPVMRVLETDIPNVWIVNARHIKNVPGHKTDKMDSEWICKLLLAGLLKPSYIPPKEQRQLRDLTRYRNKLIQTMAAEKNRMMRVLEDCNIKLSSVVANTSGVTATALIDMLCEGRKLTMTDIESVYHKKLSASPQELLEACTGFVEEHHVYMLQMIRKSIAQTQVLVDELSKRIKDILIKYDNVLELLKEIPGFNTKIVEDLVSEIGLDMSAFPSEKHLASWAGICPGNNESAGKKKAEESLTVTNK

SEQ ID NO: 84771 - protein, 446 aa, unidentified
MSNGSGLSRGDRNRNARLARLRELVPLSNAIVGIDLADDTQAVVVTDHDSRVIARRRVSVRAWELGDLLDWALTRASEAGFASVTVACEPTGHRWRVLDQLAAGRGLALVCVQPLLVYRAREGEDLTRDKSDPEDAVLIARLASELRCYEPERADAVWARLRHLGARRSQLTTGATAAVNQIRDLLECAWPAVLSASGSPFRSVTWCASLAVVLDRCAGDLRRVRRLGLDRFTAAVRRELPRWGGIRPRLRIIRAVFAALADPAGVTAHRPGALERAHLALGDWRDTRARLADTETRMAAVLDDLGLTELVTTIAGLTVTGAAAILAETGDPARFATARALVKHAGLCPRDNSSGAAQGRTSISGRGRPGLRVAAWRAVWAAMPNNPVMAARFAHLTTRQDNRLARQQARTACAAALLRWIHVVVTRRVTWDPAIAAGGTPLRQAA

SEQ ID NO: 84772 - protein, 312 aa, unidentified
MITIGLDPHPDSHTVAALDENGTMLASLTVVNDVEGLALLHQFTLPFPEHRWAVEGAANRFILPFVSELLERGETVHHIPPNLTSQYRARLSRKKNDVVDASNAARALLANPELPAFRPGEGQQEFQDLTRTQRRLSEQLKANRMALQALGTGSSARSALTQVIQVLKEQLADLSKQMKTMVTTVAPTLLELLGVGPVVASVILGEVGDIGRFTNEGQFCSYCGAAPVERGSGKNSRMQLNHGGNRRLNWALHIVALTRSRCDERTRTLLAKLKARGKTQRASLRILKTYIARELFRHLRQAVTLKTAVAAT

SEQ ID NO: 84773 - protein, 340 aa, unidentified
MKATKKNYLGIDVSKLWFDVSLLVVIDHVKQPMLTERFDNSVTGMKAFKTWLKSQGVSYDQNSLLVIENTGVYHRLIWSFCSKHNLQLHIGNAAHIKWSLGITRGKNDVIDSQRLCLYCCKQSDELKTTPVLNPVFMKLKDLMTSRSRLVVQLHSTKNYLKEIQCTDDKALLSLLDKAHKAAIEGIKKSIVQIEMMIEQIIQQDPGIYSNYELIKSVPGIGHLTAVYIICCTNNFASKISGKQLGSYAGVVPFANTSGTSIKGKNRVHKMANKELKRMLHLCALTAIKYYPEFRQYFDRKKAEGKNGMLVLNAIKNKLVLRVVAVVNKQQPYVDNTKIAA

SEQ ID NO: 84774 - protein, 437 aa, unidentified
MDEVTDEPLYRDRVCGIDIGKAGMVATIRVPSDKNPARRAAETRSFGTTRREVLALADWLRSWQVPAVVMEATGDYWKGPFYRLEAEGLDCVLADARQVKHLPGRPKHDPGDSRWLAACFERGAVTPCFVATPEFRVIRLHTRYRRDLTDERSREKQRAEKLLESAAIKLSSVITDLHGRTGRDIMDHLIAGERNPKVLAQLARTRARRKIAELEAALEGAEFFTAGHAALLAAMLGRIDRVNEDIDRLTEVIERLLAPHEEQLQQAESMPGWGRRAAQDAVAETGADMTRFRTGAHLASRAGRTPLDNSSGKHTGRAKAKKGNRYLGGLLGETAVAAGKTQTREGARYRRLSRRRGKAKALVAVGNTQLKVYHALLSSPGTRYEDLGPDYYERQASMRRQIAHHVGKLGALGFEVTLCRLPEPDPGPGQANNTQAA

SEQ ID NO: 84775 - protein, 403 aa, unidentified
MIFVGVDWAEAHHEVCVLDQAGAVLGRRRVPDGVAGIAQLHALVGDHGTEPSTVVVGVELDRGLLVGALAAAGYQVVAVNPLAASRYRERHGTSGAKSDRGDAKVLADLVRTDRHNHRPIAGDSELAEAIRVLARAHQSAIWSRQRQLNSLRSALRAFYPAVLEAFGTDLACGDALAVLRLAPTPELGRQLSRAKIASALGRGGRQRNLRQRAAQIQAALRSPQLAAPPPISHAYGVVAHAAVGLLTSLNQQIATLEEALDEGFNTHPDAKTIRSLPGLGMVLGARVLGEFGDDPTRFATAQCRKNYAGSAPITKASGRSLVVLARHARNRRLADALDQWAFCSLTRSPRPPLLRPAPGPEQDPPTSPTPACQPMVGILHTCLERGIVYDEHLAWSHLQPTAA

SEQ ID NO: 84776 - protein, 339 aa, unidentified
MATHSITKEVDHAMQIIGTDISKGKLHSSLLVDPQRKKAKNKAAQNTPAGFRSLLEWACRHGKCEASQLHFVMEATGIYHENLAEFLVEAGCKVSVVNPFQAKKFAQSHGFRSKNDRHDGLVLALYGHERQLPAWTPPPVEVRHLEALLARLNALETDINREQNRLEKSQVGKAPSEVITSLDNSIAFLNEQKDRLQKEIDDHLNKHPHLREKKDLLRSIPGIGDKLALKFLALFTSKSFCKAPQAAAFIGLIPVEYESGTTVYRRPRMSKAGDATLRAALYLPAVTATRCNPDIRAFYQRLLRAGKTKMAAIGAAMRKLVHIAFGVFKNRVPYQPQNA

SEQ ID NO: 84777 - protein, 387 aa, unidentified
MSQTIVAPIPAAVDYERTLVLAIEVSNKSWVLAAQVPGLPHTKAKRTIDPEAEALLAAITGYRTRAAATGRNIERVIAVYEAGWSGFWLARWLMRRGVEVHVVQPSSVPVDRRMRRAKSDGIDAELLLRTLLAWLRGEPRVCSMVPVPDEADEDARRCVRERTELISERIGLTNRIGAVLATLGVSDYNPLLRNRCRRLAELRTGLGEPLPANAHAKIKRLLARLELVLAQIAELERERDAVVETEAPDKASKMIQQLTGLRGIGVQSATVLVREAFVRRFANGKALGSYAGLASSPYSSGGTDREQGIGKAGNRRVRTVMVELAWLWTRYQPDAAQVCWFRERVGSTGPRVRKIMVVALARKLLIALWRFVTDGLVPEGAVLKPAA

SEQ ID NO: 84778 - protein, 409 aa, unidentified
MEVVYARCCGLDVHKETIAACAVWIESGQKQKQVRRFGTMTADLLALGDWLRGLGIRQVAMESTGVYWKPVWNVLEAEFELLLVNARHMRQVPGRKTDIKDCEWIADLLQHGLLRGSFVPEQGQRDLRELTRYRARLSDDRGRVASRVEKVLEDANIKLAAVATDVLGASGRAMLAAMVAGEQEGEKLAELAQRGLRKKLPELRAALSGRLREHHRFLLAELLDELRYLDGKVATVERRIEEQMRPFERAVTLWDSIPGINRVTAWSLVAEMGADLKAFASAEQLASWAGMCPGNHESAGQVKSGKTRRGNRWLRRVLSQAAWGAARTKNSYLAARFRRLAARRGRKRAVVAVGHTLLRIAYWLLKHDQPYRDLGGDYFDRLRPETLTRSLVRRLQRLGYQVNLSPAAA

SEQ ID NO: 84779 - protein, 310 aa, unidentified
MDAIVVGIDVSKDRLDVHVHPSGETFGVARNAEGLEALNARLLPLGPWAVAVEATGGFESVVAASLGGAGLPVIVVNPAQVRAYATALGKRAKTDPIDAEVIARFVEATKPEIRPLPDADTRLLAELVARRRQIIQMIVAERQREKQMVNRRLKKSMARLTLALTKELNELDAGIDEAVRGSPAWREKEDLLKSVPGVGPIVARTLIAEMPELGQLDRRQVASLAGLAPWTRQSGKWRGRSFTGGGRRTVRTVIFMAALVGKRCNPVLKAFHQRLIEAGKPKMVAIIAVARKLLTILNAILRDKTPWQTA

SEQ ID NO: 84780 - protein, 345 aa, unidentified
MPIVGGLDIHRKQITFDYLDTVTGEVRRGQIAPADRQHLRAWLARFAGCGEVAFAVEGCCGWRYVAEELAAAGIAAHLGEPADTAALRGRKRHAKTDKTDARHLRSLLAEGRLPECWIPPAQILEYRALLETYHDLRRAHTAWVQRIHAVFFHQGAPPLAEGALRTEPGLEALRAAAAAHLTGAGQLQVATALDMLAATEAQLGPLRRQLADAARHLTGARVLAERLYGVGPLTGLALTCWLGGADRFSSSRKAVRFTGLDITVHSSDRKGPPGRLSRQGPPVLRWAVYEAGKTHARTSAPDHGYYAAVADRKNTKRAALSEARKIVRQACHILTELGDDALTAA

SEQ ID NO: 84781 - protein, 404 aa, unidentified
MIFVGVDWAEAHHDICVLDEAGDVLARKRIPDTLAGVRALHELLGEHAEEPEVVIVGIEKDRGLIVASMLGANYRVYAINPMSAARYRERHVTSGSKSDPGDAKVLADLVRTDRHNHREAAGDTEGAEALKILARAHQSAIWARQREANALRNALKDYYPGALVSFGTDLDDRDAVAILELAPTPALGRQLSRSRIVAALKRAGRTRNLERRAAEIQSALRDEQLAQGPVLELAYGHTTKAHVAMIRAYNAEIAELEEALTSGFEQHPDASIVLSLPGMGTVLGARVLGEFGDDPNRYANAKSRRNYAGTSPITRASGKSHVVLARHMRNRRLADALDQWAFCSITRSLGARAYYDELRGRGKTHRQAIRQLANRWVGILHACLEQRVHYDENIAWKHRIDLAA

SEQ ID NO: 84782 - protein, 334 aa, unidentified
MKKDHYIGVDISKKTIDVAIYVKNALKSSSFPHETFQNSEVGFKDMKRWMRKQNVVLAKSLFCMEATGSYTYELCLFLERNDVSYSVQSPLHLKRSFGLTHGKNDKVDASRIAYYAHLHRDDIKLSRLAPESVRRLKSLIAERKSLVVEIARCKMQLKEVGEHAPSPGTIKRTESLQKFLEEQVVSIEEEMEQTIETDERMNKNYHLLLSVDGIGVVNAINTIIATHNFEMFDNARQYASYIGVAPFEHTSGTSVRGRTHVEPGAKMLKADMTGAVRTCINHDKEIKHYYERKMAEGKPYGVVANAIKFKLLLRMFAVIKRQTPFVKKPDFIFN

SEQ ID NO: 84783 - protein, 359 aa, unidentified
MKATNTASLITFINTCNDQNIWIGVDVHKKSWAVALYREDGEIFTFSTVSNLRNFIEQLTPWKDRLQKIVYEAGPCGFVLARALLAAGIKVGVVAPSRVPRPVSHGAKTDRLDCIKLAEYAAKGQFRRYIAIPSESEEALRSLERHRFQLVDRLRQIKSRIKGLLLQFGINEPDGLSHWSNSSIEYLLSLELTDGLRETLHSHLRELEWVANEKKKIEKQMKETFQRAGLQKRLNSLQSIPGVGQIVALAFTAEVYRPERFQRAEELTSYLGLAPIIVQSGLSKPHGYIRQVGQSRLRSLLVEASWVWKQRDAKADEFYRLILSRTGCASKAICALARKLAVIMWRIAIELRPFKFVSS

SEQ ID NO: 84784 - protein, 354 aa, unidentified
MDLKETLVILGVDTHADEHVVVALDDFGRRLGHKSVPSTEAGYAALVAWAEEFGTLLRAGVEGSGSFGVGLVRFLRARGVEILEVNRPNRQHRRRFGKHDTADAEAAARALQADTAIGEPKSADGPAEMVRALHVARRSALKARTQAANQLHALLVTAPEELRAELRGLSTAKLVAVAARFRPGSLSKDLRAATKLAMRSVARRHRRLSEEIAELEEQIAQLVSEAVPALVALPGVGTDTAASLLVAVGDNPERLKSEASFALLCGVAPVPASSGKTVRHRLNRGGNRDANRALHMLALGRMSWDERTREYVARRTAEGKSKREILRCLKRYVAREVYRILTAPGALPSYVPVP

SEQ ID NO: 84785 - protein, 437 aa, unidentified
MIPAVLTHCAGIDIGKRALAVCLMVGPADTEPNVEVREFCTFTADLEAMKTWLLQAGCTHVVMESTGPYWKPVFNVLEGCMVVCLANAEDVKGRKGHKTDRVDARWLAHLLRHNMIRTSFVPPRPIRELRDLTRRRKQLLSDATSERNRVQKTLEDANVKLGSVLSDVFGVSGQRILEALLNGRGNPQELAEMARQKARQKIPQIIDSLSGHRLNEHHRFMIRMSLEHLRTLEGQILDLDEELLKRIDALGLDRLLKLLETIPGLGHDSAVAVLAEIGPDITQFPTAKQLSSWAGVCPGNKKSAGKDFRGHTTRGNRWLRSTLTECAWAVSRSKKSPLREKFWRWAVAGKKKAVIAVAHALLLQVYQVLETQQPWDQAVAPPLDEKRRQRIVRHHLRCLGRLGISTGPKRIYVDGVAPRRGRPPRKAQNSPAGGADR

SEQ ID NO: 84786 - protein, 304 aa, unidentified
MNGIGIDVSKRQLDIGTTDGETLQVGNNRSGFSELDVWLKKRPTRQIVLEATGGYEQPVLDFLHKAGHPVVRANALRARKLAQGLGQIAKTDRLDAYALAQMAALVKLPPYQPLQSWQQKMREFVRARRQAMDALTIARQQQEMVLDRELRRLLQGNITRLQTLVERLGKQIVEQVGQQPQLKMLKSIKGVGPVLQAVLASYLPELGRITGKRIASLVGVAPMSHDNGTMRGKRSIHGGRAEIRQVLYMAAMSAMRHEPRLRDFYQSLRARGKEGKVAIVAVMRKMLVILNARVRDAKSGVVPA

SEQ ID NO: 84787 - protein, 343 aa, unidentified
MDHFAGLDVSVKETSICIVDDTGRIVREVKVASEPEALLQVLGNPIYRFKRIGLEAGPLSQWLFSALAEAGLPVICVETRHMRAVLQAQINKTDRNDARGMAQMMRAGLYRPVHVKTLRSQKLRMLLTHRKLLQSKAIAIDNDLRGTLRNFGLKVGVVGTVKFEARIKELVENLPDLAVLVEPLLMVRRVLREQFSILHRRLLAIVRDDEVCRRLMTVPGVGPVVALTYRATVDVPARFRNSKAVGAVFGLTPSKYQSGQINRTGAISKCGDEMMRVMLYEAAQIMLVRLAKWSWLKAWAMKIARHRGMKKAIVALARRLAVIMHRIWLDGTEFHWTREVAAA

SEQ ID NO: 84788 - protein, 323 aa, unidentified
MAKRNTICAGIDTSKDKLDVALDGSSEALQVKNTAEGHQELVEWLKRHKVKRVGIEASGGSEQAAVAELRRQRFVVIVFQPIQVRAYATFHLQRAKNDKMDAALIAACTAAVKKIHPAPDPRLQPFAVHLTMIDQIKEDIAKLKNRLESCPDERIQKFWKEQIALLAKHRRAEFKALVAAIRKHRDLAARLDLIYSVGGSGLPTAVAILIRMPEIGQITREQAAALTGLAPYDDDSGKHVGARRIDGGRQRLRQALYTAALPASFRWNPQLMALYSRLIAAGKGHKRALVACARKLIVIINAVVARGTPWVAEPPRTASVSVT

SEQ ID NO: 84789 - protein, 405 aa, unidentified
MEIIVEKGCGLDVHKETVVGCIMGTGIKKEIKTYTTMTNDLLKLKGWLQESGITHVAMESTGVYWKPVFNILEDHFEVILVNARHVKNVPGRKTDVQDSEWLCKLLRSGLVSGSFIPPRDIRELRDLTRHKRKLIQAIVSEKQRVEKVLEDANIKLSSIASDTFGASGKKIIEELIRGELQAEAMAELSKGRLRQKRGDLKEALVGQVREHHKFMIKVSLKHIRAIEKILSDIERKIQEKINRHYKEEYELLQTIPGVKGEASTLIAEMGVDMGRFPSEGHLSSWAGMSPGNNESAGKKKPGSTTYGNKCIKTMLTEFGWVASKTKDTYLRSKYHSLVGRRGKKKALVALGHKILVMCYYILKDRVAYKELGVDYLDKRRKDKIARSCIKRLNHLGYEVTLKEAA

SEQ ID NO: 84790 - protein, 338 aa, unidentified
MIHVGVDLHQRFCYMTALEARGKILQAGPVTNEKLALRKYFRQFRGQEVQVAVEACGFWPAFREVVEPEVQRLVLVHPQRVKAIASAKLKNDRVDSATLAHLLRCDLLPESWKADRETQARRQQVRLRATLVRHRTRLKNQVHAVLHQQGLHSPVTDLFGKRGRLWLAGVKLPVQARESVNVCLRLLDGYSQEIQKQNLQLSEKAKHDKRAEWLMTIPGIGECSAMMLLAEIGEIGRFQDKEALCSYAGLVPRVRESAGKAARGGITRQGSPWMRWIMVEAAQVATRCSPAAKRYYERLLRKKHKHVARVALARKLLIAVYALLHDGVVFDEEKFAAV

SEQ ID NO: 84791 - protein, 387 aa, unidentified
MAKQNDLSRSLVTLEQDATVIAVIEIGQSSWLVAGIVPGLERNPLKKLSPDPDGLLQLLHRWRKEGARAGRTIKRIAIAYEAGRDGFWLARWLRAREIEAYVIHPSSVPVSREHRRAKTDRLDTELLKRAFLGWLRGEPKHCSMAAIPTLADEDAKRPGRERQSLVGERTRIINRLKANLARLGIRGFRPNLAQASSRLEALRTPEGAAVPANTLAELRRDMEHLRFVKQQIKEIETTRAKRLAAAPNEQRHAMVRVLARVVGVGIETADMLVQEVFSRDIRDRKALARYAGLTGAPDESGKRRRERGLAKAGNARVRRGMIELAWGHLVHQKASALTAWYRKRTSDARGGTRKTMIVALARKLLIALWRLVTTGETPAGLLLRPAA

SEQ ID NO: 84792 - protein, 455 aa, unidentified
MKDQAKKKEVVSNDEFRLAIIQQQSGAIDVGCTMMMVSYADQNGEHHLFETSAYTDDLEELAMKMQKAGVQKVAMEATGVYWMALYELLEHYAIEVTLVNPHHFKNVAGQKTDVKDCQWLHQLHAHGLLRASHIAPEVYRELKDYIHERNILQKQKSDTLNRIQKLLTQMNIKFQHLISDIEGVSGLLLLRGIADGINDAEQLLSLIDVKKLKADKIDLIRSLKGNYKKQYICILKNTLKYYDFLKTQMREYEELIEEVLIKMLPNDGQSKGSKIKGKTSHVRKNQYSINIKEYLRLITGIDLTKIDGLDEISVLIIISITGIDMNKWPTGNHFASWLNLSPRPKKSGGKVIGYQQRFTKNEATQCFRLAAQSLWQNKGPLGQLFRRLSYQKGSKKAIKALARKLAVIFYSMLKNKREYEVNKLQIDSEKQTEIKIARLKKEASKYGLILEKSVA

SEQ ID NO: 84793 - protein, 333 aa, unidentified
METVYFLGIDISKKTFNAALTCDGQNMPEMEVTNRAQEIRAFFSGLKTKVSLSQLIVCMEHTGIYCLPILDYLVKHNIKVCVEPGLQIKQSQGITRGKNDKIDARRIAQYAFKNRNELAYWTPQRPILQKLKALLILRERLIKTKNQLEVPISESKSYVQEELRKSVAKRCTSSIAAINKDIKSVDQDIKTLIKVDQQVHQQMKWATSVPGVGNVTALNVILATDEFKRISIVKKFACYSGIAPFEHRSGSSIRGKTRVSKMANMRIKTLLTLGSMSVVQRDQELKLYFERKMSQGKNYWSVINAVRNKLISRIFACVQQQKVYQKNYANALA

SEQ ID NO: 84794 - protein, 355 aa, unidentified
MSDVKFIGLDVHKTSMSAAVLDESGKLVMQAVWMTKGDAVLGCLQGLRGTVRVTLEEGTHAAWLYQLLRSQVADVMVCNPRKNALRKSGNKSDPIDAHKLAELLRANMLTAVYHDDSHTLTVKELGRTNRSWTDDTTRVLRRLKALYRSLALDSGGKKLYPRCHREQWLNRLKQPGQRYRAERMFEQFDQLKALRRQVGCDLIQEGQKHAATAVLSSIPFAGSIRSALLIARVQTRFRFRTKRQFWAYCGLALETRSSADHQVIDGELRRKSKPVFIRGLNLNHNHDLKNIFKSAATTASATPGPFRDFYENLLTKGMKPEMARLTLARKIAAITLSVWKKGEGFTPEHLKTQAA

SEQ ID NO: 84795 - protein, 358 aa, unidentified
MSKHSENQEVKVMGIDLAKRQFHVHGVDVGGRKVLSKKFSRQKLKEYLVTLLPCTVAMEACAGAHYWGRLLRSYGHEVRLIAPQFVKPFVKSNKNDAADAEAICEAAQRPTMRFVAVKEVEQQDIQSFHRMRSLAVERRTAQINQIRGLVLEYGIEIPTGRFNLLKRLPEILEDAENGLTELFRKELFGLYEELRHLDARIEHYDEKLKQIAQADERLQRLQTIPGIGPVIATALLAAIGDIQAFKNGRELAAWLGLVPRQHSTGGKATLLGISKRGDVYLRQLIIHGARAVLRWADRKTDRTSRWAAVLTVRRHKNIAIVAMANKMVRVAFALLKKGENYRVQPLVAHNTPLGSIEA

SEQ ID NO: 84796 - protein, 393 aa, unidentified
MICVGIDVAKDKHDCFILNSEGEVLADVFTIPNNAEGFDRLLQTIRRCARPEDKMKVGLEATGHYSYNILGFLLNEGLPTYLINPLHTNLYRKSLSLRKTKTDRIDARTIAAMLMSDVDLKPYTDTAYHNEELKSLTRYRFDKVCERAKLKQSVSRLVTILFPELEKLVPTLHMASVYALLSEFPGAKQVAGAHLTHLKAVLYDASRGRYGRDMATTLRKAARCSVGSVMPAKSLELQHTIRLIRELDAEIEDIETAIQSMMDEIQSPITTIPGIGVRMGAMILAEIGDFSRFDSPDKILAYAGMSPSTYQSGQLSLSGTYSHMEKRGSRYLRYALYNATKYVCLWNPTFAAYLAKKRAEGKHYNVALSHAAKKLVRLIYAIEKSQKPYCSAA

SEQ ID NO: 84797 - protein, 345 aa, unidentified
MERYIGIDVHRDSTTICVVSATGKRVRREIVETNGQVLVRYLMLLRGTLHVCIEESSWSEWLHEVLSPHVAKLVVYQSQWTPGAKSDAIDAHGLAEKLRLGQVGPGVFKSPHRYRKLREWARVYQALTQDVARAKNRLKSQLQRRGVRCVGTSVYDPRQRDSWLRQLPVSMRPTTQLLGLELDGLVELRTQAEAALLEESHRHRVTKILETAPGLGPIRTALLIATVITPHRFRSKRQFWSYCGFGVVTRSSADWIQTESGWIKARAVQTRGLNRNHNPTLKGIFKGAAITVIHQTQADHPLKEAYARLLDGGTRPPLARLTIARKIAAAVLAMWKTEEVYRAGS

SEQ ID NO: 84798 - protein, 420 aa, unidentified
MKVVYQTCCGVDVHKSFLVATIIKTTSEVQPSYQKKRFSTFNNSILEFKQWLLDNSCRDVCMESTGKYWVPVFNLLEDELNVTIANPKWVKAVKGNKDDTKDSKWIGDLFRLGLVPGSYIPCKPIRILREFTRYRYKLTSCRSSEKNRFQNALTVCNVALDSVVSDIFGKSATSVIDYLLEQSDNSINHEEISSRLLRSLKKKSESVIESIEGYQMTDTQKYRMRLVHAHMDYITSTISDIDSMIDSLVEPYENAVQLLCTIPGVDRNSAITIISEIGTDMTQFSNSKRLCCWAGLTPGNNESAGKKKSVRITRAGVYLKPTLVQVAHAAVKSNKSPYYKAKYERIMKRRGKKRAIIAVARMLLTAIYHMLSTGEAWNPTDLYKIDMPEPLKNKQKEKAVKQAMKLLIAEGIIKEPLPAS

SEQ ID NO: 84799 - protein, 359 aa, unidentified
MSTQSKPFSFKGQKIFVGLDVHLRSWSVTVLSEQAVLKKFTQDPSPAALNKFLTNTYPDAEYYSVYEAGFCGFWIHWELHNLGINSIVVNPADVPTMAGERLRKTDAIDSGKLARSLRSGELKGIYVPDSLATEIRSLIRLRDSLTKDQTRHKNRIKAHLRYLGIDIPEEFQRPGCTWTNKFVLWLKRLDLETDYGRKTLDLLIAQYEDLRAQQLKMMKELRLLSRTERFEEPLRYLMSVPGIGQLAGLTIISEVDDIARFKDAAHFASYVGIVPMCYSSGEHDGTGNITVRRHAKLRWLIVEAAWVASRKDPVLSSAFVEYCRKMKPSKAIIKIARRLVNRIYFVMKHQQPYVNCYVS

SEQ ID NO: 84800 - protein, 423 aa, unidentified
MMKLKYSICCGLDVHKNVIVATIVTTNKDGISEYLQKSFSTINSDIQRFHNWLIENNCYHVCMESTGKYWIPIFNYLENDIDVCLTHPKYVKAIKGKKTDKKDSKWIADLYKFDLVRCSFIPPKDFRQLRELSRYRFKLVCMKFSEKNRIQNCMTISNVGIASVLSDPFGKTATEIISYLLEHTADSMDEKAVRKLIKKGAKSKSDEIIEAIKGYTIETDQAKKLELARGHLEYLDDMITQTEVELYVRIKPYYEFVEFVSTMPGMTELSSTIVLAETGVDMDIFDDAKHLCSWCGLSPANNESAGKKKSVRIAKAGDYLKPMMVQCALAAIKSKKQPYFAIKYGRIKKRRGHKKAIIAIARMMMVCIYHMVSEKKPFTPTDYEELMDPQNHVESVVLNENNVFAYLESLGYDSSKLVKRNDN

SEQ ID NO: 84801 - protein, 341 aa, unidentified
MTDVHVVGLDIAKSVFQLHGLDEAGTIVLQKRLTRARLLPFFEKLSPCLVGIEACATSHYWAREIAKFGHEVRLMPAQYVKPYVKRQKNDMADAEAIAEAVTRPTMRFVAPKAPQEQSAMMLHKVRLMLNRQLVMLTNAIRAHMAEFGIAAPVGRIGVDRLLKVIEDGTDERLPAAARQCLQMLVAQLSLVKQQILENDRQVLGLARSTELGRRLMEVPGIGPLVASALIACIPDPSVFRCGRNMAAWMGLVPRQNSSGGKERLGSITKAGNRYLRQMLFTGAMAVIRRAMQSTRRTWLVRLLERRKRKVAAIALANKNARIAWAMMMRGDRYREPMAIAA

SEQ ID NO: 84802 - protein, 312 aa, unidentified
MIVGIDVSKDKLDVFVSETNQHHTIKNTKAAIGSFFKSKLKNLSVDLVVFEATGGYERLLQLYVSDNGIAYHKAHALRVKRFGQATGFFAKTDKQDASLLARYGSQEQVKADKPISQKQLECHRSARLVESIKKQLQSAKNQVTMACTKEERQYHKSHIRFLERELVKAREAFDLRIDQQPELREKRELLQTMKGVGREISAMLIACLPELGEISREAVSCLVGVAPKNNDSGIRQGRRQISHGRFHVRKALYMAALVSIRHNPKMKAFYEKLLAKGRAKKVAIIAVARKVLITLNAMVRTGTPWRPNFNEI

SEQ ID NO: 84803 - protein, 323 aa, unidentified
MNKDIKYFGLDISHLVFDVTDSEGNYYQFKNSISGFKKYVKLLDINSHSVMEATGYYHYQLAYYLFENGHKVSVENPLSVKRFIQMRLSKIKTDKSDSKLICDYAQHVELTLWKGSSKEVQECLQITRPLTVYTKQCTMLKNKLHGEAVLGEPSKAVVRSLKRSLKHTEKELENLEARLLHLVKETHKDLFTRIKTIPGIGRKTAIMLIVLTGGFERFSSASELCSYAGLTPVIRQSGSSVKGRPRISKMGNQKLRNLLFMCSFSACKYNKACKAIYERLVAKGKSKKLALIAVCNKLLKQAFAIAKSGLIFDKEYKSTLVKN

SEQ ID NO: 84804 - protein, 341 aa, unidentified
MKQYVGLDVSQKETAVCVVDEIGRLIFEGRAKSDPGALAALLAKKAPHVERVGFETGAMSSWLWHELKRIRVPVVCIDARHAHAVLSVRMNKSDENDARGLAELVRIGWYREVAVKSEASQQVRSLLIARSRLVTMRRDLENQVRSMLKECGLIFPRAITGQFQRRVTELTGEGHVLWPVLLPLLSVHGHVCRELEGLDRQVRQMARSDETTQRLMTVPGIGVVTALTFRHTIDDPSRFRSATSVGAYLGLTPRRKQSGETDTVGHVSRWGDRLLRTYLFEAASVLLHRTRRWCALKAWGLRLAKRNGMKKAQVAVARKLAVILHCIWIDGTSFQWGKEPA

SEQ ID NO: 84805 - protein, 344 aa, unidentified
MNIMHYIGFDIHKKVISFCEKKMDGTIVDQGTIRATRASLSKWAEERTAEWIGAMEATLFTGWIYDHLLPHSLDLRVAHPAMLKAITAAKKKNDAADSEMIVDLLRCNLLPECYMAPEEHRNLRRILRYRNFLVREAAKMKIKTSGLLMEVGAEYSKKRLHGTRYFQELLGNLDYVPESVLQLLQMSRTSMESFDKMQKSLIRALRADPQISHRVELLMSIPGVGEVTALTWVLEIGEVDRFDRISQAVSYCGLCSAQKQSAGKNYRGPISKQRNKHLQTVLIEAAKLAPRWNLQLAEVHERESAKGNRNRATLAVARKLVAYLLAVDKNQKQFVPKEVLLKVA

SEQ ID NO: 84806 - protein, 426 aa, unidentified
MKSSTILNETVGNLKCAIFAYDVSKDSLNFYSRIGTKTYERCFNNRSDIVETQLGMMVELAKKAGMEKILVVAESTGRYHEVLMRTARRLGLETAWVSGEAVAKMRVIETNDTGKTDIKDPHVIHTLAAIGKTLLHRVLAEPYNLLREWDGTYDAADGKLVAVKGELHNQLLVLFPDFGLSKDFFYGPSGQALVEKFGANPYSIVAKGQTEFAEMMRQMVPRIRKSSLEKLYRQAQSSVRHGLSERLVTLMEQRLRQLRDEYLLYEERKGEARRAMEQLYQEARQQDPNLPQEQKGVITTFYLARIIAETGPLSDFSSWRKLIRVAGLNLRERQSGTSRGNTKIYKKGRRGLRKVLSQAVLPLITHDGLYGQYYHHKKAATNMPGTKAMTIVMRKFLKMLFGWYRSGKEFDRKRVFTCADKYLKAA

SEQ ID NO: 84807 - protein, 263 aa, unidentified
MRSLGLIPNRPEALRRLVRRLGPAKDLVCACEAGPCGYALYRSLTRLGVRCVVVGPSLIPTKPGDRVKTDRRDAAKLARLLRSGELVPIWVPDEEHEALRDLTRAREDARVDLLRARHRLSKFLLRLGIVPPAGVKPWGPSTGSGSRASSWGGRASRWFCGRWRQAQERLRRLEAELAEAARTSRHAGVIAALQALRGVGLVTAVTLVAELGDLQRFRTPREGMAYAGLVPREASSGPRQYRGGDHQDGECARAPRDGGSGLA

SEQ ID NO: 84808 - protein, 368 aa, unidentified
MKTIAYVGIDYHINVLAIAIVVNGQKGLYETIRISNDDKTIKRYMKKLSNNFKIKACYEASSSGYAFQRKMASWGYDCVVIAPSLIPKKPGNRRKNDFRDAKDLAQNYANGTLTKVHLPSEKEEALRSLIRCRLSFKESAKRVKHQINSLLLSQGFRWPKSKWTQQHRKWISQIELPVEHLQQAMDEYFNLLQYLESRLDYLEQQIEQIASASMYASSVNKLKAFKGISTLTAMVLIAEITDFRRFANPRALMAFLGLIPSEHSSGDKQRGGPITKTGNSRCRKLLIESVQHYSKRPYISNKMRQELSPVDSHSANIATKSLKRLHKRYWSLTMKGKIRPVVITAIARELAGFIWSMMQPVAVEANEI

SEQ ID NO: 84809 - protein, 344 aa, unidentified
MTYYAALDVSLRLTHICVIDDDGEIVAEGKTDSEAADIVAFLDELKLEIARVGLEAGTLTQYLTYGLQFAGFDVVCMEARQVKNALSAMRNKTDKNDARGIAQLLRSGWYRKVHIKSMDSHHIRALLSSRKAVLDKCVDLENEIRGLFKVFGIKLPPRLGHGSFDAKVRPLIEADGAFRESLRPVLDARLVLYRTFRELDNRTRKAAHADPVCERLMTAPGVGFVTALTFKAAVDDPTRFKRSRTVAAHFGLTPRRFQSGELDLDGHISKCGDAGVRSTLYVAANAMMTRSSRWSPLKAWGMRLAKTRGHRRAVIAVARKLAVILHRMWIDDAQFRWGTEPARS

SEQ ID NO: 84810 - protein, 358 aa, unidentified
MNYIGCDCHISSLDFAVVNERGKTTKKQRVDTGVKGLMEFVKSIPKPRKLIIEEGTLASWLLEICTDYGEKFIITDPKMNRWIGRAGQKNDAIDATKLAHLARGGYIKEIHHPIGDRRRFRELVMSYHDTVKSQTRIKNKLKAKFRQNGIRCSGETVYFTKHRKEWKKKLPKNKVVQVIVEGLWQQLDQVHEVQEELLGHIRKQGRQYSEIKRFKQIPGIGTVHATTISAIVETPHRFANKKKLWMYAGFGLAEKASGGKVYSRNLTRDYNRLLKNALKQATEAAIIAKDNQFRRQYLRLTIEKNIPSHRAKLTVARSMLATMFGIWKSGEDYDPDIDKRRLESDKTQVSAYHLVRSG

SEQ ID NO: 84811 - protein, 347 aa, unidentified
MFAGIDSHKDTLAVAVIDTAGRVVTARQIANEPDGFTVLAHLVAEHAVVRVGIEGSTNFGWAAAMHLVAAGATVVEVPPLMTSRERLSRPGQGKTDPVDAVAIARITAREPFLPPVRPMDGLPADLRVLMDYREQLINERTALANRIHADLGWLRPGYQHKLPRLTQPAHLQSGLALLENDSSIRAAVTRRRLQRMVEINAELAGLRSQIAELVQQSGTTLTGIYGVGVFVAARFLAEVVDVRRYPTRHAFAAANGSAPIPASSGRTVRHRLNRGGNRQLNRALYTIAITEIRADTEGRSYYERKRAEGKTSREALRCLKRRLSDVVYRTLRADQAADRPLPLAAAA

SEQ ID NO: 84812 - protein, 427 aa, unidentified
MKNSTARKLEQIPADKLIVGIDAHKKKHAAVIKTPDAFTRAKFKVENSRAGFEELLMRVQLQGTNTGCKGAIFAIEAGSRYWRTLAYYLEEREMPFRLISPFTLKRRREGDDIDRKKNDYRDADMAAELLRTGKFTETRLPQGHYADLRAAYHAYNSLGRQRTRTTNLLGALLDSSFPEFHTVFKDISCKTALAILAIYPCPDTITEVTMEKFIDMMLTKYKGKHILRKKLSEAYQAAQCSVGIQAGAGVISFEISLLVEQIRLLTEHRQKVEDLIVALAEWIPESKYLLSVPGLGHLTIAGIISELGPLAHYRNAKQLIKMAGINPTQSDSADKKGRRTPMSKKGRPLLRHCLWEASLNILHHNDEFRVWAKRLQERPLHQNPLKKREARGAVCRRLLCLVFALCSKRSFYRKNYKTQKEVELVTV

SEQ ID NO: 84813 - protein, 365 aa, unidentified
MKKSSTVKRTSKQVKKSGQLTVGLDLGDRNSRYCVLNERGEVVLEDRVVTAQKAFQEAFGEMSRARIALETGTHSPWVSRCLEELGHEVIVANARRVRLITESSSKDDRLDAKKLARLARIDPDLLSPVRHRSKEAQTDLMMIRARAALVSARTKLINTARGITKSYGERMRKCGGHQMGEELAASLSPELRFALQPLLAEIEALTQRIKEYNRRIERLAKERYPETALLTQIKGVGPLIALTYVLTIEDPHRFQRSRDAGAFVGLRPKRRDSGSTSPQLRISKEGDSYLRTMMIQGAQFILGPFGEDSDLRRWGLGLAEHGGKNGKKRAIVAVARKLAVLLHKLWVSGEVYVPLHAKTRQEVAA

SEQ ID NO: 84814 - protein, 328 aa, unidentified
MFYLGIDVAKAKLDCCLLLDPDKAKRKSKSVANTKAGLANLLEWLRTKKVSPNNLHVVMEGTGVYHEQAALVLVETGVTVSIVNPAQVKNFGRGLAVRTKTDGVDSFVLARYGALLKPAAWQPPALEARVLRALLARREAVTLDLQRELNRLEKANVTEIPIFIRQSIDDSIEFLRTQLAKLQQEIDDHIDHHPDLRRDMELLTSIPAVGPQTGSNLLAIVHSYRFDSAEQLAAYLGLVPVERQSGSSIQGRARLSKAGPARIRAVLYMAAVVATKYNPHVKAVYDRLLAKGKAKMAAIGAAMRKLVHLCFGVLKTRTHYQADYAKIS

SEQ ID NO: 84815 - protein, 387 aa, unidentified
MKNLLCQNLGVDVSKDSLDVVFSTLDMERQVRVKASRKFANTPAGIRQLQRWMESKRAAEVELRILMEATGVYYEQLAWFLHQQGYQVSVILPTKAKRYLQALGHRSKNDSIDAKGLARMGLEQLLPLWQPLSQNIYQLRLLTRQLEDFSNQRTVFLNQLHALHHSAFAVKQVEKSLKKMVRTLEKSIQELEEAIQELICQDPLLAERVEKLLAIKGVGLKTVAVLLAETNGFATFEKQGQLVSYSGYDVVENQSGKRSGKTRMSKKGNAHIRRAMHLPAFSVVRYKEPVFAALHERLLAKGKTKMQAYVAVQRKLLILIWTLWRKNQVYDPLHDQRHQKQKEAILSLEAGASLSGVSAADVNKVAPQGRATQDEHPAPIGQELSFR

SEQ ID NO: 84816 - protein, 379 aa, unidentified
MRDHSEAFVAFDTSKLRNAVAIAEAGRSGEVRFLGEIDNTAGATANLVKKLAAKYDRLSFCYEAGPTGYGLYRQIRQLGHDCIVVAPSLIPKKAGDRVKTNRRDALGMVTQFRAGELTAVWVPDARHEAMRDLTRAREAAVDDLRSKRQQVSSFLLRLGLHYAGKKTWTRMHMNWLAKQKLDHAEQRIAFEEMLLAVRQAQERIARLEEAIRVAVPDWSLAEVVAAAMAMRGIDMISATAFLAEIGDLSRFRSPRELMAYLGLVPSEHSTGDTVRRGAITKSGNRRARRILVECSWSYRHPPRVGKKKQDKVAAAPRAVREIAWKAQHRLYGRYRALTRNGKHKSVAITAIARELSGFIWAINREITTAGVAASSSGIR

SEQ ID NO: 84817 - protein, 422 aa, unidentified
MACVRTMSGGKTQRESRTFDTTTDGLLALLAWLTSYRCDLAAMEATGVFWMPVWKILSDGAFHLVVVNAAHIKAVPGRKTDMNDATWLADLAAFGLIKASFVPDEDQHELRGLMRTRKQLVREQTRHVQRIQKTLTEANIRLDSVISDVMGRNGRRMIEAIIAGMRDPRKLAALADHRLKATPKQLYDALHGRLTEHHRFLLQLHLGQWDALDTTIKAVDREVETRISRMNTEVKADQATFSDLIDLAVSVPGVSRLSAVTILSEIGTDMSRFETAGHLIAWAGLCPGQNESAGKRKRSRLRKGAPWLKTMLVQCAWAAKRTTAITGRSFSGCKPGAARKRQFAPSRPLFSPPSTICSRTEPVTAISALDTSTSVSPRSGSSAWSARSPSSASRSPCNRSPRPLELQKRKERKSMPYAFVSF

SEQ ID NO: 84818 - protein, 366 aa, unidentified
MNKISTVQRVSNEIFKEQKLTIGLDLGDRWSSYCVLDEAGQVLLEQKVPTTPEAMQQTFGKIPRSLIALETGTHSPWVSRLLTELGHEVLVAHAQKVQLITKSNRKDDRHDARTLARLARIDPALLGPVRHRSAKAQIHLAVIRARAELVSARTALVNAARGLVKSYGERLPKCGTQQVSRELAAEWSTELREVLEPLRREIESLNERIQEYDERMEQIAKEVYPEVSLLQQVKGVGTQIALTYVLTIEDPYRFPKSREVGCFLGLRPGRRNSGESEPQKKISKEGDRYLRTMMVQGAHYILGPFGEDSDLRRWGLKLAERGGKNAKKRAVVAVARKLAILLHRLWVSGEVYEPLRNSQRTMQAVA

SEQ ID NO: 84819 - protein, 315 aa, unidentified
MKTMKTYIGVDIGKRQLDVSHGSNHFCVDNTKAGIKKLMAFLDKQPQSKTSDFIVVFEATGGYERDLKMRLLEKKYDYHMAHPNKVRAFAKAKGLLAKTDKIDAHLIQNYAQAMSLSPDASEVNHSVKELLKRREQCIAVRIQENNRTDKGYSAFVQSSMEKHCEWLNKEIVAIEKQLKLAIVEANLQQDIELLTSIPGIGELTAAYLLAYMPEIKSANQGQLAALAGIAPVNRDSGKFRGKRFIQGGRAPLRKALYMSAVPSVRFNPELKRFYEHLKNKGKSSKVALVAVMRKLLLLAASILKRQVQWERRIPT

SEQ ID NO: 84820 - protein, 364 aa, unidentified
MKKISTAKIKSQAGSKKVTIGMDLGDRSSRYCLLDEEGVVIGEASTPTTKAGIAKVFGALARCRVALEVGGHSPWVSRQLEAFGHDVIVANPRNVRLIGESTRKDDRLDARTLARLARIDPMLLSPVRHRGAEAQADLAVIRARRVLVRARTMLINAARGLTKSFGERLQKCGAGQVGSTLAAELSPQIRAAILPLLAEVEALNQRIAAYDRQIEQLVKEHYPEVDRLTQVKGIGTLIALTFVLTVDDPNRFQRSREVGCYMGLRPGRRNSGKSEPQLHISKEGDCYMRSLLVQGAHYILGPFGIDCDLRRWGLKMSERGGKNAKKRAVVAVARKLAVLLHKLWVSGEAYDPLRNSRPLVACAA

SEQ ID NO: 84821 - protein, 333 aa, unidentified
MYYSGIDLHSDNCYMTTIDDTGAVIKQQRVENISELVLDYFHSLPGPHQAVVESTTGWYWLNDLLQDNGIELVLAHAKYLKAISYAKVKTDKVDSQILAILLRQDLIPRAHKISRELRGLRDTMRIRLRLVQQRTACLLRLNSIHAKFNGSIPDPYRFQLAVLEHTRDTFTSQILALEKSLHPVLIPNDDIQRLLYIPGIGKLSAFTIYLEIDGIERFISDKHFASYCRLVPAADNSNRSVHHRSSKDGNKYLKIVFSDAAVHAIQYYPEYKRFYQKLARRSSDATARTVVAKELAKVVYYVLKNKTQYKGLKGQPISRQKSQQWPRLASPLP

SEQ ID NO: 84822 - protein, 376 aa, unidentified
MRSVTRFIGLDVHADTIAVAVAERGGEVRSLGTIPNRPEAVRRLMKKLGDAKQLRACYEAGPCGYVLYWQLTELGVACDVIAPTLVPVKAGDRVKTDRRDAEKLARCHRAGDLTAVWVPDAAHEALRDLVRARLAAKQDQLRARNRLGKLLLRHGLRPPEKARRWGRAHMAWVHAIRFEHAPLNAAFADYLSEVEHARDRLQRLEGAIDEAVAVAPPKMRAVIEALQSLRGVAKITAATIATEVGELSRFATAPQFMSYSGAVSSEYSSGPNTHRGAITKTGNVHLRRVIVEAAWAYRHLPRIGSTLRARQQGQTGKVLDIAWKAQHRLHTKYVRLTMKGKHKNIVVTAVARELLGFVWAIGKEVEEHFAATTAAA

SEQ ID NO: 84823 - protein, 336 aa, unidentified
MDTICAAVGIDVSKKKLDIALLVNGKTKTKVLENSTEGHRALVDWLNKSKIPLSVMHVCMEATGVYSEPVALALHQAGLVVSVVNPACIKGFGHSENIRNKNDAIDAGLIARYCAAMKPSPWNPPPLEQRQLRAWSLRIQALKDIRQQEENRLEALAISGMDEVAQHVRQHIVWLTAEIEKLEGDIDDHIDRHPDLKHDADLLATIPGIGMTTVARILGQLGDIRRFDSAKAFAAFLGVTPRQRTSGSSVKGRTTISRTGSTSLRAALYMPSLVARRHNPILHQFAERLTATGMAKKAVIGAVMHKLAHLIYGVIRNDKPFDPNYLSKGLVIQDGI

SEQ ID NO: 84824 - protein, 391 aa, unidentified
MISIGIDVGKVKHCASVINDLTGEVLLKPFFFTNDEEGFNLFYEKTKVYTRRKHAVGMEDTGHYMNNLINFLSEKKYITKLINPRTTSLRRKELGISAKNDRKDSLLIGQMLSEKQFWRTITKHSLQMNKIKEVTRLYHQLKETQNEDMNRLQRALDIVFPEVNSLSWTRYSKAYMQFLERYPGACLIAKEDIRNLRKALKAEGRGRQCAVTAEEIKELAKKSVGDDNIGAQLEVRSLIAIINTREKQIQILNKKIEESARQLNSPILSIPGISHITGMTILAEIGDITNFKEAARLISFAGMEPLVRQSGNYDAAHLPISKHGSRYLRKALYQAVFTVCKYCPVFQDYYTKKKNQGKSHRCAQGHCARKLLRVIYKLLSENITYSSEQLH

SEQ ID NO: 84825 - protein, 407 aa, unidentified
MNYRLLVGIDWANEQHQVCVLDATGNPLAEFSVEHSAAGMDRLAHRLLELGHEASRCAVAIELTRGPVVEGLIERGFHVFAINPKQLDRFRDRHSPSGAKDDRRDAYVLAGSLRTDPASFRRLEFDEALITQLRELSRTHEELRDDLGSLASRLREQLHRYFPQLLKFSGAANEPWLWALLLKAPTPHKARRLRKAQLAKLLKDHRIRRFSADELHQALAQPPLRLAPGSVEAASDHALSLIARLRPTHEQLRLCDRRLSQTFDQLAATQKERGEHRDAAILLSLPGVGKLNGAAMLAEASQPLRDKDYTTMCHLSGVVPVTRQSGKRRIVLMRRACNKRLRNALYTWANCSIQNDEASLNFYRAARQRGLDHAPALRSLGNRWLRILFAMLRDRTLYHPNHAVRVA

SEQ ID NO: 84826 - protein, 387 aa, unidentified
MPQPNDLSRSLVALDQNSTIIAVIEMSQSSWLVAGMLPGIERQPRKKLEPSPERLLALLQRWRDEAVRAGSTITRIALAFEAGRDGFWLARWLEARGVEAHVIHASSIAVSREHRRAKTDRLDTALLQRGFLGWLRGERGHCSMARVPTIAEEDAKRPNRERDCLVGERTRIVNRIKSTLARLGIRNFKPTLRKAAERLAAVHTPEGVPLPPNTLAELQRDMARLGFVVSQIQEIEKARQKRLEQHPETGPDAMVRRLVCIVGIGVETADMLVHEVLSRPMRDRRAVARYAGLTGSPDESGARRREQGLARAGNARVRRGMIQLAWRFLMFQNESALALWYRARTADSRSGTRKTMIVALARKLVIALWRFVTTGEPLEGVVLRPAS

SEQ ID NO: 84827 - protein, 330 aa, unidentified
MYLGIDTHKRYSQVAVVDDDGNLQDEIRLPNDRLSELAEEYAGGEAAIEASGNYRPVYEMLDEHLSVTLVNPSKNRIIADATVKTDRVDAKRLAQMLRADMLAESYVPPDEIRVLRDLVRTRKSLVEERTAEKNRVRAVLTRTDNTYDSELFGPTGREFLAELSLSDADRAILEAHLSVIDAYNEQIEKIKEKIERKVLESPAAQRLLTIPGVGQYTAAVIVAEVGEIERFDKDKQLVSYAGLDPVVHQSGDKEVRGSISKEGSAPLRWALVQCANISVRCDEYLGNFYTRLKQRKNHQIAIVATARKMLVSIFHMLTRKEPYDPPEVSG

SEQ ID NO: 84828 - protein, 363 aa, unidentified
MAVKAMSLVGLDVHARQTHAAVLDLDTGEIGVSRLRMDPIEVVSFLEGVGPDVRAVYEAGPTGFGLARAGRERGIDVRVIAPGSIPKGSGDRIKTDRRDAIRLVRLLAAGELSFAFVPTVEDEQFRDLVRVIEDVRGDLMRGRHRLGKFLLRRGERYPGPGSAWTTKHMAWLRALRFQDACSQATFVDYLAAVELLIGRRKTLIATLEQQIPEVSHAPVIARLRCFRGIDTLSAAGVCAEIGQFHRFPRPALLSGFLGIVPSERTSDTKRRQGSITKAGPPHARRLLVEAAHHYRHPPTIGYTLARRQAGQDPRVIEIAWRAQQRLYARWQHLHHHRRKPAGVVAIACARELASFLWEAATLD

SEQ ID NO: 84829 - protein, 447 aa, unidentified
MTLDVVSKTGKTPVLGRMLSKYVGHKMSSIENEITKTRNHSRQRGNMMRTVFGIDVSKASSEVAIVINGEKIHGYTMPNDAIGFTRLLDDLKTVQKPEIIFEATGVYSHRLQAFLEENGYAYTQLNPLEAKKQLDSLRVRKTDKIDAETLAISQFVLNRKPTYIQEEVYQELRDLSRFYQNLTEDIVRTKNRLHKVLQVTFPEMENILSTPTREQYWNLVMTFPYKDFVLELSKDELLEGIRQSTSKRISDKRVAYLAQKLAALANQSYCAVKKNSPILEEVRYYAKELLRLSEQRQAVLEQMVELAQPLPEYEILLSIPGIAETTATSMIGELGDIRRFQSANQINAFIGIDLRHYESGNFLVKEHITKRGNPYARKILFKCIHNIAAASHTNPCHIEDFYEKRKRQSQTTSTKPHTIASIHRLIRTMYYLITHNKLYDYTSTQNR

SEQ ID NO: 84830 - protein, 498 aa, unidentified
MARKPKHSKKKIGAPVLHCLNPNAAGVDVGATEIYVAVPVDRDPQPVRHFSTFTEDLHAVAAWLKACKIETVAMELTGVYWIPLFQVLEARGFTVLLVNARHVKHVPGRKSDVSDCQWLQYLHTVGLLRGSFRPEQAVCTVRSILRHRDSLVQMASTHVQHMQKALDQMNLQLHHVISDISGLTGITIIQAILGGERNPHTLAALRDRRVKATEATIAKSLVGDYRREHLFTLSQSLKTFRHYQELIRACDHEIEQYLEGFESKVDPREDSLPESNNEQEPRDGMPRFGLGNHLHRIFGVDLTRVPGINILTTQILLAEIGPDLSRFGSAPAFTSWLGLCPDNRVSGGKVLSVKTRKVKNRAATALRMAAQSLHRSQSYLGHFYRRMRAKLGAPKAITATAHKLARIIYHMLTMGQAYDETVCAQNEILNRLRLEARLRKQARNLGFQLVLAKTTVVERLNAVRVRATEAVLDNAAELCRDSLPTCRCVAIRSTGGLP

SEQ ID NO: 84831 - protein, 330 aa, unidentified
MKQYDHVFGVDVSKKTVDITHVINQQFNHQQFTNDDAGMEQLMQWFREITPEFDKTLFCMEATGLYCFTLTHFLASRSIDTWIEHAAQIKKATALARGKNDKVDSQRIAAYAIKNLDRLRLWKPVSATLEKIRHLASLRERLVDTKKRLATPIKEFEDVGNLAMAKLLTKTIKSSLAAIDKDLKNIETKITDVINEDDNLKLLYKLITSVVGIGFVTAVNLIVHTNGFTVLKDTRKLACYCGVAPFEYSSGSSIRGRTKVHYMANKKLKCNLHMASLTAVKLDGDLKAYYERKVGEGKSKLSVLNAVKNKLLARIIAVVNKQELYVKKVA

SEQ ID NO: 84832 - protein, 353 aa, unidentified
MSKQMISTSKPSVPTDKFANPRQGRVFCGIDVSAETLAVAVIEPDRQLQQREFANSPSGHKALVTWLRKRKAQVRVSLEATGIYSMDLALALDAAEGVEVAVLNPKQVHDFARSLRRSKTDSADAQVLAEFSLRMEFKAWQRPSRSALALRAISRHIEALGAEHTRATNRLHAAQGSMGTPRCVVEDLKRSMAGLQRRMMKLRREARAQVDSNEQMREQFRLLIGMPGIAQISALQILGELVLLAPDLKARQWVARSGLDPVHRDSGTSVHKPARISRAGSRHLRRALYMPALAAVRWDPHLKAFYEALLARHKRKLQALMAVARKLLHAIYGIFKNRTPYDGSKLFPQLGAA

SEQ ID NO: 84833 - protein, 354 aa, unidentified
MVIVGTDVHKRTHTFVAVDEVGRKLGEKVVPATTAGHQKALGWAREQFGSDLLWGIEDCRNLSARLERDLLTAGQKVVRVAPKLMFQTRASARTRGKSDPIDALAVAQAVLRYPDLPVASHDEVSRELKLLTDRREDLVAQRTSTINRLRQRVHELDPAAEPKPASLHRAKPCAVLADWLDTQSGILAELARDELADIIHLTEAIDELAARIGERVREVAAALLALPGCGELTAAKIIGETATISRFRSEAAFARHSGTAPIPVWSGNTAGRVRLNRSGNRQLNAALHRIAITQIRLTDSAGQRYYRKRLADGKATKEALRCLKRHLARSVYRRLHTDDHTRRAHQNSDMRTAA

SEQ ID NO: 84834 - protein, 463 aa, unidentified
MPHPPRRPVRRRPVRLPQELRSVNLHAAGIDIGATRHFVAVPEGRDADGRTVREFGTFTADLYALASWLTACGIETVAMESTGIYWIPLFEVLSARGFDVKLVDPRQLKHVPGRKTDVLDCQWLQQLHTFGLLAAAFRPDDAICVLRSYLRQRAMLVTSAAQHIQHMQKALEQMNVKLPEVVTDVTGVTGMAIIRAILAGERHPETLATLRDPRCHHDQATIARALEGTWREEHLFALRQAVELFDVYQRKIADCDRTIERCLHGFADHRGGDTLPPVPRSSKRARNAPAFDARTHLHRLTGVDLTRLDGIDAHSALKIVAEIGLDMSRWPTDKHFASWLSVSPGNKISGGKILSSRTKRSANRVAAVLRMAASTLHHSRSALGAFFRRLKARLGAPKAITATAHKLACLIYNMLKHGTAYVDQGQHYYDQRYQQRVLSNLSRRAQDLGYQLVKSPDPAASPA

SEQ ID NO: 84835 - protein, 304 aa, unidentified
MEHYVGLDVSLKLTAICIVDRTGKIEREGVVASDPETIVAFIKSHAPHVARVGLETGATSTWLWTELNKVGLPVICIDARHAKAALKLQINKSDRNDAVGIARIMQCGWYKEVRVKDLDSHAIKALLVSRALLVKIKRDIENQVRGLLKNLGLVIGQAKMNVFAVRAAELADARPELAAAVEPLLRAREAIERQIVDLDHKVMRLARSVAQVRQFMTAPGVGPITALCFLATIDDPTRFRRSRSVGAYVGLTTRRYASGEIDWTGRISKCGDKMLRTYLYEAANVLLTRVAKWSALKEAANQAA

SEQ ID NO: 84836 - protein, 311 aa, unidentified
MASIICGVDVSSGTLDGRIDGSGLELSVRRDPEGIAALGRFCAEHGVELVVMEASGGYEKLPFGLLWAAGVPCAVANARSVRRFAEAMGVLEKTDRIDARIIADYARAKGLVAQAPESQAQEGLRALVTRLRQLTDLKVAQSNQRRLVRDPEVLAGFDEMLAMIARQSRGLESRIAELLGSDPLWRALDQAFREIKGVAGRTVARLAAEMPEIGTVSNKAIAKLAGLAPIANDSGKRQGKRSVRGGRAQVRSILVVVAGVVARHDPDLAAFHHRLTQAGKPKLAIRIAVARKLLVRLNAKARDARNAMANA

SEQ ID NO: 84837 - protein, 351 aa, unidentified
MVRYIGLDVHAASTTFAVLGESGKRLGAHIVETNGQALVEQLKSIPGKRHVCLEEGTQSAWLYEILSPHAEEIVVAMVPESRGQKSDESDAFHLAEQLRTGAIKTRVFKEAGAYKTLRELGRTHTMVVQDVVRVQNWIKALYRSRGVAVSGKSVYAEKGREAFLEKLPDASRGAAKTLYAQYDAVEEIRRQAEKELVKEAHRHPISRVLESCPGLGPIRVAQLIPIVVSPMRFRTKRQFWSYCGLGIVMRSSSDWIRTKDGRWARAEVQKTRGLNLNHNHTLKNIFKGAATTVITQLETEPLRQDYQRLITAGTKPNLAKLTIARKLAAIALSMWKGKEKYDPTKHRKQSS

SEQ ID NO: 84838 - protein, 343 aa, unidentified
MHTTEASELYCGADLHGNNVVLSLCDASGKRVFKRRVKANLNAVNEALDSYWLRIRTVAVESTYNWYWFVDGLRAQGRDVRLANPAKMEQYEGLKNTDDRSDAAWLAEQTRLGILPESYVYPKDTRSVRDALRRRQLFVRQRTKILLSLDSLFSRYGFESPCSEQLKKWGYPDIESLDLDDFSRLQVTTLLESVRNSDALAKQIEAEVLARVKPTVQYQRLQQLPGIGQTLSMVIALESGEFSRFASAGQYASYCRAVKSIRSSNGKKKGRNNGKNGNPYLAWAFIEAATFAVRYYPRIKSWYERKKQRRNVAVAKKALACKLAKATWHVMNGKDFDETMLFG

SEQ ID NO: 84839 - protein, 312 aa, unidentified
MLKKYELEVGVDVAKLKLCAYIGTKITSFPNTPAGIRALLAAIKKLSANARITCEATGSYQDLLVRTCLLKGIPISQCDPSQIKYFIKSFGQRAKTDPIDARYIAKFAEDRSPVVLNKEWIKQLDMRELKRRLDFIIRECAKMKTSLDSYQTKGIKAEIRREIKAKEKTIKKYELQLTALVEADSALKKKREIMQGVIGVGARTSLALLLFLPELGTLNRGEIASLAGLAPMHKKSGNVDGARTVKGGGRSNVRTALYMAAVSAIRHNPHIRAFYLGLKKRGKKGKAIVIAIARKMLIHLNGLLEKEAQKAM

SEQ ID NO: 84840 - protein, 343 aa, unidentified
MQTVSTIGLDIAKSVFQVHGIDAEGKVVIRRQLKRRYVLAFFEKLPPCLIGIEACASSHHWSRELQALGHTVRLMPPAYVKPYVKRQKNDATDAEAICEAVTRANMRFVATKTPEQQSGLVLHRTRHLFIRQQTAVINAIRAHLAEFGIVASVGRNGVEELLGVVVDPSDKRLPEVARACLTALGAQLRMLKAQILEFDRMIRAWHRSSETSRRLDHCPGVGPVLATALVATVADPKSFRSGRNFSAWIGLVPKQHSSGGKNRLGSISKQGDRYLRGLFVAGALAVIRYAKIHGTKHRPWLTALLARRPTKVAAIALANKIARMAWVIMAKGERYKEPVALAA

SEQ ID NO: 84841 - protein, 351 aa, unidentified
MLIIGCDFHTRYQQIAMADDSTGEFILERRLDHENGEAHAFYRNLQAPVRVGIESSGPIHWFERLLAELGHELWIGDAAKIRASEVRKQKTDERDARLLLELLLAGRFPKIWVPTPAERDLRQLLWHRHKLVCLRTMLGNQLHALALSQGLCRKRKLFTKKGRAELQQLELAPWASRRREELLRLLDQLATPIQELDRAAWQEAQRRADAVRLMTHPGIGPITSLAFVLAIGPITRFKRSKKIASYLGLNPSEASSGGRRRMGAISKQGNTMVRWLLIEAVYPAVRKDLALRQDYQRLKFRRGHAVAKVAIARKLAVRMYWMLRSGAEYAQLVRRQGSPGATLVDASSSLG

SEQ ID NO: 84842 - protein, 344 aa, unidentified
MSNLDTCGIEVSAKELVVTLRRQEDLEPLRNFTNTPEGHEMVLRHLRRAGRVVRVCMESTGLYGLDLALALSGQEGIEVMVANPRAVRHFAHALMQRSKNDPIDAGVLEEFAARMPFQPWQRPSPIALALHALARRLRELVEMQTAEKNRQHAAGLSQAIPAVVRRDLARSLRAQQRAIQRLTLQARKLIAQDPQLTERFELLDSVPGIGETSAVQLLAELGVLAPDLEARQWVAYAGLDPRQYSSGTSVHKKPRISKAGNKHLRHALFMPALVAVQHDPHLGAFYQHLLAKGKFKMQALVAVMRKLLHALHAMFKAHQLYDGSKLFRLSSAPAEEVTHALVAS

SEQ ID NO: 84843 - protein, 347 aa, unidentified
MEKLIRIGMDTSKQVFQLHGVNAAEEPVLRRKLRRKEMVAFFQGLEPTVVGIEACGAAHHWARVLQEFGHQVKLLPPKYAKAYVKRGKNDAADAEALCEAMSRPTMRFVAAKTAEQQAAQMLAGTRDRLIRRRTQLTNAIRGYAAEFGLIAARGVDKIAPLLARLHSEPTLPALARELFAGHAKEYAQLQAQLEAIDAQLMAWHRQNEPSRRLVKIPGIGPIGATLLVMKVAQPEALQSGRHFSAWIGLTPKDHSTAGKTRLGGITRAGDEALRSVLVVGATAVIQQVRRGKGHPSPWLVELLKRKPPKLAAVALANKMARIAWKLMVSGQHFNPAHGIATAMDEAA

SEQ ID NO: 84844 - protein, 339 aa, unidentified
MMIAVGVDTHKHQHLAVAVDALGQLLAEITITATLAGYRELLAWLAALEGEIRVGIEGAGSYGAGLCEYLQDNDITVFEVERPRRRERRTGKSDRLDALLAAKKVLADDGLSTPRGHGKRLALQMLLVAYRSVISERSRLYNQLQALHVGAPATLRERVGPAKNGAKLAQRLTGMRTRPNASLQENTTLQVLRDLANRTRALDQQAQDYTRQIDALTRELAPALMDEPGVGPICAAKLIAFNPARFKSEAAFARANGTAPQPASSGKTIRHRLSRGGDRQINTAIYTIALSRSVHHAPSRAYIQRRIDEGKTKREAIRSLKRYLSRDLYQHFSKTPLTT

SEQ ID NO: 84845 - protein, 419 aa, unidentified
MESSRSKVCGIDVHKRFLVATILERNGPKETKKFPNDLEHLLKLKDWIVTEHCQAVAFESTGEYWVSLYDVLEGYIEIIVANAYHIKWIPGKKTDTIDSAWIAELALNDLISPSRILPKDKRDIRALTRLREKLVNERTDHKNRVHKILDSACIRLSAYFTDLFGASGLKVLKCILSGVPPEEIVQKLPRRFQGRSDAILDAIRNKLSAHQLLQLQTSVTMIELLTGKIKELERTILNEMKKDRRKLEILMSIPGIGYVGSTTILAEIGDVNDFPSPDQLTKWAGLTPRVYQSANKLHTGSITKQGSKHLRWILVEVAHFCIRVKNTPLRMFFDRIFNRSGYKKAIVALARKILKLVWHLLTNDELYEEKNAPLSKSSRLQIAVETEPVSVSAAIDLLIKAGFQVIDGNDQFDKRVMGT

SEQ ID NO: 84846 - protein, 419 aa, unidentified
MEQEVVAVLFVGDDWAEDHHDVELVDDEGAVLARRRLPEGIIGVTALHALIAEHLPEDWADLEAGQAQSRVKVGIETESGSWVAALVAAGYEVFAINPMSVARYRERHSTSGAKSDTADAHLLAEIVRLDRAHHRPLAGDSEDAEAIKLVARTHQSMIWDRTRQVLRLRSALRDFFPGALKAFPDLDARDALELLGKAPDPDRAARLTRAQLRAALRRANRRDVEAKAAQLQDLLRADQLRRSIVVQSAYAAIVSGQVAILQTLNAQIEELGAVVAAHFGRHPDAEIYASQPGLGVILGARVLGEFGDDPHRYADAKARKNYAGTSPITRASGTKKIVLARYARNRRLGDALQQWALCSMRGSAGARTYYRTLRDRGTGHQAALRQLANRLVGILHGCLKTRTVYDERTAWAHHAISAA

SEQ ID NO: 84847 - protein, 349 aa, unidentified
MVVLGIDAHKRTHTVVAVDEVGRQLGVRVTQATSTAAHLELVAWADRFGSERVWAVEDCRHLSRRLERDLLGAGERIVRVPPKLMAHARDAARTYGKSDPIDALAVARAALREPGLPTARLEGPERELRLLADHREDLVAERTRATGRLRWHLHELDPSWDPKPRSLSRRTHITAVEARLAGLEGMVARLAADLTARIAALTQDANALEREITIRVRALAPALLALPGVAALTAAKIAAETAGADRFKSKDAYARHNGTAPLPAWSANPNRHRLSRTGNRQLNCAIHRIAVTQKRRHPDAQAYLKNRLSAGDTGTEALRALKRRISDAVYRMLLADAKGSETTPASQAA

SEQ ID NO: 84848 - protein, 412 aa, unidentified
MGLYCGIDWATQHHDVAVIDDDGRVIARGRVSNDAAGFAALLTLLAEAGDSAAHPIPVGIETDRGLWVGALRETGRVIYPINPLTASRYRARYAVSGAKSDATDAVLLANIIRTDPDAHRPLPADTELAQAIAVLARAQQDAVWDRTTAHNRLRSHLREYFPAFLAAFADARGGITRPEARAVLAAAPTPADAAKLTVTQLRGILKKAGRSRGLDTEAARLHEAFRAGQMRQLPLVEQAMGRQALALPGQLDAACAAADDLEHAVTQSFNLHPDAGIITSFPGLGALTGARVLAEIGDDRSRFQDAKGLKAYAGAAPITRASGKTRSVTRRKVKNNRLNAAGYNWAFSALTASPGARAHYDRRKDTGDRHAAAQRNLFGRLLGCLHHCLTTGQHYDEATAFPAATKKISQAA

SEQ ID NO: 84849 - protein, 378 aa, unidentified
MKNNTTTLHDEIKFNDREPGSKAVKEPEVWKLGLDVDLRHVVVGMQCSRSTIGPAWKFRREQLVEWVKQKRAQGEVVHAVYESCGFGYTLHEQLIEAGAHCIVTTPMRLNLERRRKNDRMDARELCVRLSRYLDGYRDELKPIRIPSRSEQQRRELGRQREFWKKEVRRLENHGRALRIEHEHESLSAGWAGPRKWKIIGPQCSEFVRAQLEPLVKQIRATKVQLDRLTQEIEALVGEEKIPVGLGALTVSLLDGEVCDWTRFAHRKAVGSYTGCCPSEYSSGGVQRFGAIDRHGNKHVRVLLVEAVWRLLRWQPNWHARKKYLEKLRVGASLKKKMAVALARQLAIDLWRWRTGRATAAELGWIAASGTRSMSGTDH

SEQ ID NO: 84850 - protein, 383 aa, unidentified
MKNLPELLRQNVGVDVSKDSLDVVFSTINLQQQIQVKASRKFANTAAGFEQLHRWVESKRDNTIELRILMEATGIYYEQLAWFVYEKRYAVSVVLPTKAKRYLQAIGQKSKNDKIDARGLAQMGLEQRLPLWQPLSSNIYRLRLLTRQLEDFNNQRTMCLNQLHALSHSAYGVKEVEKSLKRVLHGLEKGINQLEKAIAQLIEKDEVLQVKVQKILAIKGVGLKTVAVLLAETNGFATFENQGQLVSYAGYDIVENQSGKSAGKTRMSKKGNAHIRRAMHLPAFGVVRYKEAAFVNVYQRLIGRGKTKMQAYVAVQRKLLILIWALWRKDEGYNPRFGQKEEATSSNQEPKPLFSLGSEGDIKKVAPTLVRATLDELPCNQVA

SEQ ID NO: 84851 - protein, 464 aa, unidentified
MKPKRRRRNKGMCLEDRPVLEPNAAGIDVGAREMFVAVPPGRDENPVRVFATFTEDLECLTDWLEQCGVTTVALESTGVYWIPLFEILEQRGIRPCLVNARHMKNVPGRRTDWHECQWLQFLHSVGLLRAAFRPGQDICAVRTVLRHRNELVSAASEHVQHMHKALTQMNLQIHHVISDITGLTGRAIVDAILAGQRDGAELAKLRDPHIQADADTIRKSLEGNWRPEHLFTLGQSRDLYRIYQQQIVNCDLEIEKMLQEFEPRTDPAERPLPPDRKRNRAGSKRRKKSGHPHPEFDLRTETYKLFGVDVTQIPGLEENALQLFSEVGRDMSNWPSAAHFISWLALCPDNDISGGKLLWRGARRVKNRAGHLFRLAAFSLHHSLTPLGNYLRRMKAKLGPQAATMATAHKIAVIFYTMVKNQVEYDETLWATRDAQREKRLEAKLKRQAKRLGYELVSIEPKAA

SEQ ID NO: 84852 - protein, 503 aa, unidentified
MERVVSESRLGRAAPDVDRKAAAKMENNTSTAGKAERLNRKQGKELGRRIWSESSGLDVVHRDAAGIDIGSREHYVAVGPDRDAEPVRSFGCFTTDLQRLAEFLKKCRIKTVVMQSTGVYWIPVYDVLEQAGLEVWLVNARDTKNLPGRKSDVQESQWLLKLHTYGLLRKSFRPTPEIRALRTCWRERAEYVQQAGTCIQRMHKALTEMNVQLGTVLSDLSGTTGMSILRSIVAGERDGRKLAQFRDPHVKASAETIAQSLQGTWRPEQLAILKRQLADLDHVQQQMAACDRDLQAMMKQMPNAAAAPPPPVPGNPPQKRRRKKNNKSSRNAPEFDLESELKRMTGVDLTRIDGVKANTIQTVITEAGLDMSKWPSEQHFVSWIGLSPRNDLSGGKVLNRKTRKVVSRLATALRVAASTLRRSDSYLGAQFRRFRSRLGPPKAITAMAAKLARLIYRMLRYGQEYVDRGTAQYEEKHREQQIQLLAKKAAQHGFALVDAGTSA

SEQ ID NO: 84853 - protein, 351 aa, unidentified
MNNSAKAIPVTIGLDIAKNFFQVHAVDGAGQVVLRRKLSRGEVLRFFETQPTTLVGIEACGTGHYWAREITALGHEVKLLPPTYVKAYVKRGKTDAADAEAICEAVSRPNMHFVPIKTPEQQAALMMHRSRDLLVGQRTALANALRGHLAELGIVAAKGLHRVADLLAELVGLENTKIPPLARSSLRCLASQIEAVEKQIDELEALIIEWHKGNAASQRLVKIPGVGPITASAVVATIGDASNFASARHLAAALGLTPRQNSSGGKARQGGISKAGNTYLRRLLYIGATSVIRSKRAREADGWMAGLLERRPAKVVAIAMANKTARVIWAMLRRGEAYRAPKLPITATAMA

SEQ ID NO: 84854 - protein, 411 aa, unidentified
MHNRQNYLYVGVDLHKEHHTAVMINCWQEKLGEIQFENKPSAFSKFLLEVETYVSDGLSVVFGLEDVGGYGRALAKYLVDHEQVVKEVNPALSFLERKSQVMIQKNDSWDAECVARILINKFNQLPDAKPNDLFWSIQQLVSRRNALVKAQSALKNQLHIQLNHHYPSYKKFFSELDGKTALAFWEQYPSPSCLEGVNIKRLTAFLLDVSNNTCSVRKASEILRLVKEDGQTMKEYQEMRNFLVRSIVREIEFKKKEMKYIERELKQLVNLLDYQLETMPGIELVTASALIAEIGDVRRFPNANKLARFAGIAPVYFGSGGKGKTHKSKQGNRALHALFYNLAVQQVQVAKGSKLPRNPVFHAYYQKKLKEGKTKGQALVCIMRRLVNIVYGMMKYKTAYELPVVEEKEVV

SEQ ID NO: 84855 - protein, 344 aa, unidentified
MDHFGGLDVSVKETSICIVDDTGRIVKEVKVASEPAALLKVLGNPTYRFKRIGLEAGPLSQWLFSALAEAELPVICVETRHMQAVLKAQINKTDRNDARGIAQMIRVGLYRPVHVKTLRSQKLRMLLTHRKLLQSKAIAIENDLRGTLRNFGLKVGMVGKVRFEARIQELVENIPDLAVLVEPLLIVRRVLREQIVILHRRLLAIVREDEVCRRLMTTPGVGPVVALTYRATVDVPARFRKSKSVGAVFGLTCSRYQSGELDWSGKISRCGDEMMRTMLYEAAQSMMHSKKWSWLKAWAMQIARRRGMKKAIVALARRLAVIMHRIWVDGTEFCWTREQATAAA

SEQ ID NO: 84856 - protein, 315 aa, unidentified
MTPTLLFVGIDVAKAECVVAVRPTGATWTIPQTEAGWDRLATRLHTLAPTLVLLEATGGLELPLTGVLAAAGLPVAVVNPRQVRDFAKATGTLAKTDALDAAVLAHFAEALRPVPRPVPDATTQTLAALVTRRRQLVEMVTAEENRLGSAPSVLRPSLQAHLRWLRRQLAQLDIDLDQTIRSHPGWRVQDDLLQSAPGVGPILAATLLGGLPELGTLSRGPIAALVGVAPWNRDSGRHRGSRHCWGGRADVRAVLYMATLAAVRCTPVLRAFYHRLLAAGKLKKVALVACMRKLLTILNAMVKTQTPWTPRIPGV

SEQ ID NO: 84857 - protein, 339 aa, unidentified
METYAGIDLHSSTNYLAVINEKDQRLFGKRLPNRMDAVLSALEPFKETLKGIVVESTFNWYWLVDGLQEQGYTVHLANPSAIKQYEGLKHTDDTWDSFWLAHMLRLNILPEGYIYPKEHRPVRDLLRRRLLFVRHRTAHILSLQSMISRNLGTRMSSRAINRLGKTDAPILFDQPHLALALTMSSAAIQFLSRRIADIETVVTDYIALKDEFRCLLSIPGIGKILALTIMLEVGDINRFPKVGNYSSYCRCVKAERLSNGKKKDTNNRKNGNKYLSWAYVEAANFAIRYCPHAQGFYQKKRAKTNGVVAIKALSNKLARASYYLMRDRVPYDPERLFHA

SEQ ID NO: 84858 - protein, 346 aa, unidentified
MEITTIGLDLAKNVFQVHAVNGASEVVVKKALRRVQMRRFFEQLAPCLVGIEACGTSHYWAREITKFGHEVRLMPPAYVKPYVKRGKTDASDAEAICEAVTRPTMRYVAIKSPEQQAALALHRTRDLFVKQRTQLVNMIRGLLAEFGIEIPRGIEQALTLAKRIAAGDVPDIPPLAAKVIAGLAGQVLDLQARLREIELELLAWLRSNDIAKRLATIPGIGTVCATALAASVTDPHQFRSGRQFAAWLGLTPLQHSSGGKERLGRISKMGDKYLRRLLVVGMTSLIRRAKYKPEAVDPWLADLLSRKPARLVTVALANKAARVVWAIMVRGGVYRMPAGISVTTSV

SEQ ID NO: 84859 - protein, 412 aa, unidentified
MNDILERSCGLDIHKEKIVANVLSGPIGATPLSETREFSTLIPDLIALRKWIVSCGCHDVAMESTGIYWIPVYETLETAFDGDIHLLVVNPRHMKNVPGKKTDIRDAEWISSLLRAGLLNASFIPDKEIREFRDLNRYRKSIIEDITRQKNRIEKFLQASGFRLSSFLSNIFGASGRNIIHHLMEHGSITRKEMDICLKTQTRHRLDEILMSVNGTLSEHQRSFLKTLMEHYETLNKHLAEIESTLQKDMEPFKSHVEQLSSIYGVSTVAACAIIAEIGTDMSHFKTAEHICSWAGLSPGNNESAGKRKNAHTTKGNPYVKSMLCEISWVIAGKRNTYLSGWYWRLKQKKGAKKAIIALARKLLVIIYTMLKKGTMYDESNFASRRITQENRLVNHYRKELEKRGYHVEATA

SEQ ID NO: 84860 - protein, 342 aa, unidentified
MEITTVGIDLAKSIFQVHAVDAVGHVVVRKALRRAQVVPFFAKLPRCLVGMEACGTAHHWARELMSLGHDVRLMPPAYVKPYVKRGKTDANDAAAICEAVTRPSMRFVPVKSTEQQAALALHRTRDLLVKQRTQLVNMIRGLLAEFGIEMARGLRHALELAARLSAGDAAEVPPLAQRVVTGLADQIGAVQIQLTRLEKELLAWHRDSDLSQRLATIPGVGIVSATALAASVSEPERFRSGRQFAASLGLTPLQNCSGGKERLGRISRMGDRYLRRLLVVGMTSLIRRAKTTPTSVDPRLPALLQRKPVRVVTVAAANRTARVAWAIMTRGGTYRAPAATAA

SEQ ID NO: 84861 - protein, 503 aa, unidentified
MTTATARGKPASSPAPSAQRIQAQAQRQAYHRRKTRAKGKSEALRHKEAAQVQALPVLRPHAAGIDIGSWSHWVCVGFTAEADSGLIQEFPAHTDGLKAIAAFLREHQVKTIALESTGIYWIPLYELLQAEGFEVLLVDPSYSQQLRGRPKTDRRDCQWIYRLHSVGLLAAAFRPDEKTCQLRAYLRQRANAVRQASRHVQHMQKALEQMNLKLTEILSDITGVTGRSIIRAILRGTRAPEKLAKYRDKQCKASEAQIAQALTGSYREEHLFALKLAYEAWQFSLGQIEKVGGQIALQLGRMKCDRALPPLKPKARPKRRVNSPGFDVRAALYYVVGLDLTEIEGISELTALTLISEIGPGVSQFATVKKFCSWLGLCPNWRKSGGRVKSSRTRRGVNRAAQALRLSAQSLHHSQGALGGFLRRMKGRLGVQAALTATAHKLARIVYLALKHGMTYVRQSQEDYEAQMRQKQIKALRRKARQLGLEIVEKPSEGVAESASVQG

SEQ ID NO: 84862 - protein, 400 aa, unidentified
MSTAHGRIWVGIDAGKGHHWAVAVNTDGETVFSTKVVNDESQILTLIAAAREKAGEVRWAVDISGRASALLLALLVAHGQQVVYVPGRTVNRMTGAYRGEGKTDAKDALVIADQARVRRDFAPIETPPELVSTLQLLTGYRRDLIADRVRLINRLRDLLVGICPALERAFDYSAVKGPVVMLTEYQTPAALRRIGVKRLTTWLERRKVRGADTIAAKAVEAAQSQMTALPGESRAAKLVRDLAHQLLALDERIKDNDREIHETFRTDDRAEIIESMPGMGPILGAEFVAIVGDLSGYRDADRLASHAGLTPVPRDSGRRTGNYHRPKHYSRRLRWLFYMSAQSAMMRPGPSRDYYLKKRAEGMVHTQAILSLARRRVNVLWAMPRDKRLFTPVPPVTQAA

SEQ ID NO: 84863 - protein, 343 aa, unidentified
MQAVTTIGLDIAKSVFQVHGIDATGSVIIRRQLKRRHVLAFFEKLPPCLIGIEACATSHHWSRELRASGHTVRLMPPAYVKPYVKRQKNDAADAEAICEAVTRANMRFVGTKTPEQQGCLMLHRTRHLFIRQQTAVINAIRAHLGEFGVVAPVGRRGVEELLDVVADSGDERVPEVARACVGALGVQLRMLKAQILAFDRQIMAWHRSNETSKRLDEIPGVGPALATALVASVADPGAFRSGRNFSAWVGLVPRQHSSGGKDRLGSISKQGDRYLRSLFTAGALAVIRYAKIHGTKHRPWLTALLARRPTKVAAIALANKIARMAWAMMARGERYKEPAALAA

SEQ ID NO: 84864 - protein, 381 aa, unidentified
MKKATRFVGLDAHAESIAVAVAESGRNGEVRSLGTIPNRLEAIRKLIQKLGGPKGLQVCYEAGPTGYALYWQLAKLGVECEVIAPTLIPTKAGDRVKTDRRDAIKLARCYRAGELTAVWVPDRDHEALRDLVRAREAAKKDQLRARHRLGKFLLRAGEHLPMKMDAWSSAYMQWVRGLKFDHMAKQATMVDYLGEIDHLAARIERLEQAIDDAVKLAPPTMRAVIDGLQALRGLAKLSATTIAVEVGYFSRFAKPSKLMAYAGATPSEYSTGGSRRQGAITKTGNAHLRRVLYEVSWSYRHRPALGHALKQRQRALPAHLNEIGWKAQHRLHRRYQVLVAKGKPHCKVITAIGRELLGFIWAIATRVERDHEASQPKKLAS

SEQ ID NO: 84865 - protein, 366 aa, unidentified
MEARRFVGIDLGKRHYEACVLHAEEKIVRWSGTTDAPGREELAGKLEAGDVVALEAGALSFTLARRLAQVDGVTVKVLHSAKLAVIYSSMRKTDKEDALKLARVLQGTAEECLPVVSLPSQEEEDARRLANHQIFLNRERTGVINRFHAACVEHGMTEVTKKDLATEKGRMAILERMTGIYRMLAEHYCVILAAIESQRALAKEQVRQALLTQEREAEILLSIPGVGPTAALAYLGFVGSEERFENPAQVSYYVGMVPRVELSGSSIHHMGHITKQGSPALRRALVQAAWAAVRSPMGAHFRLVYDRISERRGKRIAIVAVARHMLELMYTLMTKHELYRFCSEEERSRKLKFYKLGSLGTEETLT

SEQ ID NO: 84866 - protein, 431 aa, unidentified
MPESTVSRQPQEPQFAAFVGIDWADQKHVWCLQAAGSTQRESGELEHKVETVEAWVAQLCQRFGERPIAIAVEQLKGALVYMLAKYECLHLFPVPSTMAASMRKALYASGAKDDPRDANLLLDFLLQHRDRLHRLAPDNEATRRVQNLVEERRKLVDEKTAQLNRLTSNLKIYFPQILDWFKDLDTELVCALLEHWPTLEELQQPSPVELRKFFHQHHCRNGELIEHRIQEIGHARPAIHDRAVIEAKRVVVKVTVQLIRSLREAIAELDGKIAEAAAAHPDFFIFDSLPGAGAVMAPRLLAVFGSQRDRYGSAEEVQIYSGIAPVLERSGKMKWVHFRWACPKFVRQSFHEWAGHSMVKSAWARAYYQQRRNQGQDHHAAVRALAFKWIRILFRCWKDRVAYDEEKYLAALAKRGSPLSALLVVPTRATM

SEQ ID NO: 84867 - protein, 425 aa, unidentified
MSVMVQVETTNQKKEGNKMISIGIDIAKEKFTVCALEQGSKIIWKPFDIHLNKTKVEKFLKKIDSLNEEVKIVMEATGKYHLPILYELKDKGYFVTLVNPLKMKQFCRVLNFRKAKNDNIDAIQIAEYGLMYWKELQEYKVDSESFRVLKELNRSYQHYMDLRINQMNFIDQTISQTFPGIKKLIPHASGDFSKDKLLDFLEIWWHKDLVLEKPEEKFIEDFKNWAKEKRYHPNADKAKSIYKLAEESISIQPSNSSYIKTSIEEGIELIKHINQILHTILSQMIEISEPLEEYQEAKKFSGISDKLAVQITAEFGDLSKFKNKKSLISFVGIDSPPYESGNFKADQRKITKRGNAILRKVGYQAMKCMMSAKNPENEIYLYMVKKEKDGKAKKICKFAGLNKFLRTYYAKVMASKQEKKLLKVA

SEQ ID NO: 84868 - protein, 346 aa, unidentified
MNLFIGLDVSLASTAICVLNSHGKVVKEETVASEPEALVAFLRSLCSDIAVIGLEAGPLSQWLHRHLTEAQFEAVLMETRQVKGALKAMPIKTDRRDALGIARLLQMGWFRPVHCKSVSAQEMRAVLTARKSIQQACINLELSVRGVLRNFGLKIGKVSRGNFDFRVRELTDGNSMLMAAADPILKARTALRNELAALEKLTRDHAKSDPVCRLMMTMPGVGAVVALTVKSAIDDPGRFRSSKDVGPWVGLTPRRDQSGERDITGQITRAGDQILRTALYQAATIMLHRGRPSWLTAWALRVAQRRGKKRATVGLARRIGVVLHRMWRDGTEFRFTKQPIDTAGMA

SEQ ID NO: 84869 - protein, 325 aa, unidentified
MKFIGIDISKSNFVAAFPTASGYQAKTYPNTTTGVRKFISAISPAQHHCVMEATGNYGFLLLYLLDQSGIAVSMVNPKQIKHFARVMMTVTKTDAKDACLIAMYGEKMNPPIYKMPSEAIIMLKQKKTVIRQLKKQLIAMSNLRGSLSVLPHRDHVSMQALNKTISFLTRQIESLESELANIAVSEFEKQIKALTSIKGIGITLATTLIVSTGGFTYFDNAKQLSRFIGICPTYYQSGSSVNIRGGINRNGDACLRGLLYMASWSAIRYNSACKECYLRLKANGKPSKVALIAVANKLLRQAFAIATSDSTYVDGFCSSLKNKNL

SEQ ID NO: 84870 - protein, 351 aa, unidentified
MQNDHKSSESVILGVDTHLDIHVGAVISQAGKLLGTHIIQTNQTGYLELLDWARSFGCLERAGIEGTGTYGAALTRYLIKNGIYVVEVNRPDRSKRRLEGKSDPLDAENAARSVLSGSSKAIPKMQSGACEALRIISVARRSAVKARTQAINQLRALLVSAPQDVRDKLWKSKPHECVTACINSEVSEYSPLRIALCNTLRSLAKRWMALTEELNELDESLDKLTRKYASHLRSQFGVGPQTAVAGDNPERLKNEAALASLCGVNPLPASSGKTVRHRLNRGGSREANNALWTIALVRMRSDPRTRIYVDRRTGEGLSTKEILRCLKRYIVRELYPLILSDLAYANRPLLT

SEQ ID NO: 84871 - protein, 356 aa, unidentified
MTIVAYSHPFVVGVDTHARKHVYAIIAAAGGELLETREFPTTGAGINRAIAWVARRTGADLATLWVIEGAASYGAVLAGAVAAAGYQVAEAARMAAMPRRGVGKSDPLDAHRIASAVLPLEEQQLRRPRLNEGVRAALRVLVSARHSMTTDRTRTVNALTALLRINDLGLDARKSLTGTQILEVSRWRAREEPLAVSVARSEAVRLAKRLGDLDAEIKANGSRITELVEVSEAAPLLQETGFGPVTAAICLTAWSHRGRVRSEAAYACLAGVNPIPASSGNTIRHRLNRGGDRTLNKALHLVALNRMAFDPETIEYVEKRQAEGRTKKEIRRCVKRYLARRIYRILNANSPQPLLR

SEQ ID NO: 84872 - protein, 365 aa, unidentified
MVIIHWIGIDDHADKWTIAHFRVAEEKPAREFELVPNEAGYRNLIRYVKSLKGEVRIAYEAGPCGYELQRRLIKAGLKCEVAAPSLTPRKPGERVKTNRRDAAKIARCFRSGDLTMIAVPDEQRESLRDLVRARGSVQADLVSIRNQITKLVLRYGHRYRDGKAWTGRFWVWLRQIRLVGHSQTVLEEMIITHEHRLDQLARHDEEIKRAAKQPDYAPYVAGLSVLRGINTLSAMTLLSELGDLRRFPSAPQLMAAVGLVPSESSTGDKTNRYSITKTGNAHVRHIAVEAAWHYQRRVTSGARIKARRRGQSQALVDIAEKCDVRLNRKFFRMTSRGKRSTVAAVAVARELVGFIWAIGQKLTYP

SEQ ID NO: 84873 - protein, 332 aa, unidentified
MTIVSTVGIDLAKNVFSIHAVSAEGTVILRRTVSRTKLSELIAQFPPCLIGLEACSGAHEWARRFSAFGHTVKLMAPKFVVPYRKSGKNDGNDAEAICEAVRRPNMRFVPVKSLEQQSDLTLHRVRQGFIEERTATLNRLRGLLAEFGHVIPLRAIEVRRRVPELLDDLPARVATCARDLLEHAANCEAKALQYEREIKSHVRTHELARRAQTRQGVGPITASAVVATVGNGHDFKNGRQFAAWLGLVPRQYSTGGKSRLGHITKRGDPYLRTLLIMGARSVLQRAARLTDPFSRWALAVQARRGYHRACVAIAAKNARVVWAMLSKEPVAG

SEQ ID NO: 84874 - protein, 423 aa, unidentified
MNHDYDGQYSAFVGIDWADSKHDICLQAADSDQREFDCIAHQVDHIEQWALGLRKRFGGPIAIALELSKGPIVYALQKHDFLVLFPINPSTLAKYREAFTPSRAKDDPTDAELALDLLLRHPHRFQPLQPQSVEIRALSTLVEQRRGLVNDRVRITNRLRSALKQYYPQTLEWFERIDTPLFCDFISRWPTLEQVKRARKSTLERFFHQHSMRFSHVLDSRLKAIKAATPLTRDAAVVAPYRLQALVLAEQLRVILQSIRRYDNEIAQRAPTHPDYELFSALPGAGPSLAPRLLVAFGEQRQRFTCAAEMQKYAGIAPVTERSGHKHWVHWRWQCPTFLRQTFVEWAAQTVNKSFWAGAYYRQQKTRGSSHQAAVRALAFKWIRILYRCWQTRIPYDELKYLEALRRRGSPLLEHLGAVAENT

SEQ ID NO: 84875 - protein, 422 aa, unidentified
MLEQTQDEQEIIARVAALDIGKAELMCCVRVPDPKGGSRRVQEVKSYSTMTRSLQVMADRLMDLGVTRIVMEATSDYWKPPFYLLEAHGFDVWLVNARDVKNLPGWPKTDRLDAVWLCKVAERQMLRPSFIPPVPIRRLRDLTRYRIGLVSDQTREKNRVEKLLEDSQIKLSVVASDIFGVSGRQMLAALIDGQRNPQVLAQMARTRMRTKIPQLEEAFVGHFTDHHRFLLTKMLARIDALDADIADLDTQIDAHLAPFADAVARLDQIPGVGATAAAVIIAEVGLDMTRFPTPAHLSSWARFAPGIKESAGRKKGTGSTGHGDRYLARVLGEAAAGASNTNTFLGERYRRITRRRGKKKAIVAVGRSILVIVWYLLSDPNVDFHDLGSGYYDSRINPERKKHNHIRQLEALGYKVTLEPAA

SEQ ID NO: 84876 - protein, 315 aa, unidentified
MTSLICAGIDAGQRSLDIGLAPSGRTFRLPNTAAALGPLLERLQRDGVQRVVLEAAGTYAQPVAHALDAAGFAVGVVNPRRIKAFREAEGKRAKTDRLDAGLIARFALVMTDAIRPLPSAEQRTLKALATRRRQLTEMIAMEKTRLKQALEPAVAESHRAAIADLSRACAKVEALIEDGLAKDPRRAEDRRILTSIPGIGPRIAQVLLTEMPELGRCDRKAIASLAGLAPHISQSGKAPPRAAIAGGRPCIRAALYMSALVAVRRDPKMKLAYHALRDSGKPAKVALVAIARRILITANAMIKAQTPYKPDLNHT

SEQ ID NO: 84877 - protein, 345 aa, unidentified
MEQISRIGMDTSKHFFQLHGVNAAEKVVLRKKLRRKEMVIFFEALAPTVIGIEACGASHHWARILRSFGHEVKLIAPQLVKPYVKRGKNDTADAEALCEAMSRPTMRFVPVKTAEQQAALMMVGLRDRLIRNRTQLSNAIRGYAAEFGFTSARGMAHIDPLLDRIQADESVPVLARELFAAQAEEYAQLQAQIVEADAKLMAWHKADECSRRLANIPGIGPIGATLLLLKTPAPEMFRSGRQFAAWIGLTPKDHSTAGKVRLGVITRAGDEALRSVLVVGATAVIQHVRRGGRGSPWIVGLLKRKPPKLAAVALANKMARIAWKLMVTGNGYAAKSAPAALTGAA

SEQ ID NO: 84878 - protein, 411 aa, unidentified
MHNRQNYMYVGVDLHKEHHTAVIINCWQEKLGEIQFDNKPSAFSEFLLEVETYVSNDLSVVFGLEDVGGYGRALAKYLVDHEQVVKEVNPALSFLERKSQVMIQKNDSWDAECVARILVNKFNQLPDAKPNDLFWSIQQLVSRRNALVKAQSALKNQLHIQLNHHYPSYKKFFSELDGKTALAFWQQYPSPSCLEGTNIKRLTAFLLDVSNNTCSVKKASDILKLVKEDGQTMKEYQEMRNFLVRSIVREIEFKKKEMKYIERELKQLVKLLDYQLETMPGIELVTASALIAEIGDVRRFPNANKLARFAGIAPVYFGSGGKGKTHKSKQGNRALHALFYNLAVQQVQVAKGSKLPRNPVFHAYYQKKLKEGKTKGQALVCIMRRLVNIVYGMMKYKTAYELPIVEEKEVV

SEQ ID NO: 84879 - protein, 431 aa, unidentified
MTKQLMAGMDLHSNNLFCGIVDGEGKRVFEKKLPCALPQVLQGLAPFKERLDTIAVESTYNWYWLVDGLQEAGYRVVLANPAGMEQYSGLKHTDDKSDAFWLAEMLRLKILPTGYICERPLRSVRDLLRRRMMLVRKRTALILSLQSLHARTLGCALSLGEAKFISVEAVRKSFAHPADKLISGLDVQLIEHLNKAIKQIEKTVLAMTKPLPCYRVLHSLPGVGRILALTITLETAEVKRFATAGDYASYCRCVDTRRMSNGKKKGENNGKCGNKYLAWAYVEAANFAKRYDLQCRQFHDRKSARANKIVATKALACKLSKAAWHMMSEQRAYEPTRMFPTAQHATATATVALDLSHQSRSRRQAGQDGEQLPVPACGLRAEGGARVASQQSPILRFGKTKSSRSKGSEKDQFMDGDREPCERVGAKPPDP

SEQ ID NO: 84880 - protein, 456 aa, unidentified
MTRKRKSKAKLELPVLNPDAAGIDVGATEMYVAVPPGRDPESVRSFGTFTEDLNALADWLQTCRIRAVAMESTGVYGIPIMQILEARGLEVCLVNARYAKNVPGRRTDVADCQWLQYLHSVGLVRASFRPAPEVCAVRSLLRHRDSLVGLATCHLQHRQKALDQMNLQIHHVISDISGTAGLAIVDSILAGERDVRKLARLRDPRVRASEETIAKSLVGDYRPEHLFTLRQSVPLYRQYEKQIAACETELQRFLKKLASKADPEKQPLPPAKESVRKCKVMPPAKALALREEVYRVLGVDLTTIPGIGVLHAQVVVAEVGPDLSKFRRAAAFSSWMALCPDNDVSGGKVLWPGTRKTKNRLASALRMAAQSLQHSESALAAFYRRMRTKLGAPKAITATAHKLARIIHHMLRTHEAYDDTVFARLEQTHRAWTQNRLKTQAHALGFSLVQTPSQAQ

SEQ ID NO: 84881 - protein, 343 aa, unidentified
MSIVRVSGGVDTHADVHVAAAIDHNGGVLGIESFLTDEAGYESLAGWLAGFGPVNRVGVEGTGSYGVGLARFLASAGIEVVEVDRPNRQVRRKKGKSDPTDAVAAARAALSGEASVVPKQRNGPVEQMRVLLVARRSARQQRIQSLNQLRQLVFTAPEPIRIRFKDRHKAGLVTEAANMRPRAGSDPVLFTTNVVIRDLARRIKALTTEMRNIDRILTALIADTAPSLLALYGLGPDTAASLLVTAGDNPERLHSERAWAHLCGVTPIPASSGKVTRYRLNRGGDRNANAALYRIVLTRMSSHEQTRSYVTRRRAEGLNTAEIMRCLKRYVARQVYKHLPVAA

SEQ ID NO: 84882 - protein, 412 aa, unidentified
MYNHPKMKYSYCGIDSHKDTHCAVIINCFYEKLGEITFNNVPSDFEKFIRDVEKFKMEGTELAFGMEDISAYGRALTVFLTEKKFVVKHANAGLVAHERKSRNFLNKTDSEDAECASRVLLNRFDQLPQAIPNDKYWILKNFVTRRRFIAKMNAGLKNHAQSFILSHYPYYDRFFSIFDCKSSLAFFEKYPSPSALKGVTVYELDMFFRMVTDNKQWKGKAEKILNFVKKAGDTSTTYQDSRDLIVKSAINQILMNQKEIDKLDKVIDDFLKNFDFNLKSMKGIETVMASNLIAEIGDITRFKTPAKLARYAGVAPVTYASGKMDVQFSNQRGNRILNSIFFHLAVLVTIKVRSNHIVINPFFNTYYKKKMKEGKTKKQALKCVERRLVNIIWKMMTHKVDYINPPTEVEKK

SEQ ID NO: 84883 - protein, 343 aa, unidentified
MQAITTLGLDIAKSVFQVHGIDAAGNVIIRRQLKRRNVLAFFQKLPPCLVGIEACASSHHWSRELQALGHTVRLMPPAYVKPYVKRHKNDATHAEAICEAVTRPNMRFVATKAPEQQRCLTLHRTRHLFIRQQTSVINAIRAHLAEFGIVAPVGRLGVEQLLGIVSDASDKRLPDVARACVAALGAHLQRLKVQILEFDRMIRAWHRSSEASRRLDDIPGIGPALATALVASVADPKMFRSGRDFSAWIGLVPKQNSSGGKVRLGNISKRGDRYLRSLFTTGALAVIRYAKIHGTKHRPWLTALLTRRPTKVAAIALANKIARMAWAMMARGERYKEPAALAA

SEQ ID NO: 84884 - protein, 378 aa, unidentified
MSKIRFVGLDVHAETIAVAVAEPNGEVRSLGLIPNRPESIRRLVRKLEPVEQLRFCYEAGPTGYVLYWQLTALGAKCEVVAPSLVPRKPGERVKTDRRDALKLARCYRAGDLTPVWVPDAAHEALRDLVRAREAARGDLLRARHRLSKFLLRHGWQRPESIKSPWTNAHWEWIKAKVHFEQPAQEIALSDYVHQVEHLVARIERLDQAVLEAARSVPPQMRAVIEALQALRGVAQVTAVSIVAELGQISRFAKARQLMGYSGLVPSEDSSGERKRRGAITKTGNAHLRRVIVEAAWAYQFRPWLGGSLLKRQVGLSEDVKEIAWKAQHRLHARYRKLLAQRKNKPQIVTAVGRELLGFVWAIGVNVETKMREMKQVAA

SEQ ID NO: 84885 - protein, 447 aa, unidentified
MEKKNVKMEVINPNAAGIDIGSRSHFVAVGQGTDDVREFGVYNEDLKAIADWLKENEIETVAMESTGTYWQSLFAVLQAEGLQVILCNGKFTKNIKGKKSDVQDCQWIQKLHTMGLLSGSFLPDEATEQLRTYCRHRSNLLEQAADTTRKMQKYLRLLNLRLDVVVNDICGLTGMKIIDAICKGEVNPETLASFRNGNCKKSEEEIAKALQTNGRNDYLFTLKHEYQMYLNLQSKITECDAEIAKMLNQQINNDDNKKQHHIDKKAHKRINKNTPKNMDINLLSYQYFEGVDLLAIEGVSYSTVLTLMSEVGHGIHKFESAKQFASWLRLSPNNKISGGKVLSNKIPKGSNRLKIALRNAANAIGNLKDTALSNFFARISHRKGRVSAISATARKLAVIIWNMVVKGTAYIPLTEYQFVDQKRKKITAMKRLITKFEITTDDLNLQL

SEQ ID NO: 84886 - protein, 428 aa, unidentified
MDVKESNRLKEFRQLRKEIRGSKEHLIVGIDVAKEKHHAFFGTATGKTLLRRLIFENNIDGFEKLHAHMEAKEVQHSLCKVVFGLEPTANYHKPLAEYLIKCGHTVVLVSGVAVSNNRELLDGRWDKNDDKDAANVADLISQGKCLYYDYPSKPMRDLRNLLSLKRRLKKQEHGTKVRIRNHLLAQYFPEFDRYFGKGCSESLPIVKWCLNPSIIAGMEYDEFVHLIAPRVKTIGQEKRLKAIWDLAINSIGCKAGDALGFEARLMVEDLQQVKDSIRAIDDNIKHICLGFPEYSYLLTIPGFGPDISSKVLGAIGNPFRFDNGKQVLKLAGYDLSANRSGKTSDSAVPVISKRGKAYLRYALYQAAFIASTRNRHFIIYYTNKLRGREKEKGIKTKMKVKLAAKMLIIAWTLMKKKEPFDPEYLNIE

SEQ ID NO: 84887 - protein, 367 aa, unidentified
MKKISTVTTKKVEKNASQKLTIGLDLGDRFSWYCVLDEAGEVVLEQKVATTPKAMKEVFGAMPRSRMALETGTHSPWVSRLLSELGHEVIVAHARNVRLIGESRKKDDRLDARTLARLVRIDPQLLAPVKHRSTQAQAHLMVIRARAGLVRARTSLINTARGVTKSYGERLRGCNPRNMNAEKAQELSPELQAALGPLLGEIESLSERIREYSERIEEIAKRSYPEVGRLKQVKGVGTLIALTYVLTLEDAHRFGKSRDVGCYVGLQPGRRNSGQSEPQLHISKEGDPYLRTLLVQGAHHILGPFGADSDLRRWGLKLAERGGKNGKKRAVIAVARKLAVLLHRLWVSGEAYEPLRNQREVALPAAA

SEQ ID NO: 84888 - protein, 351 aa, unidentified
MPRTTALHAVTAIGIDMGKNTLHLIGLDARGAIMLREKVARGRIALRLANLPPCLIGIEAGMATHYVARELAALGHDVKQVPATYAKPFRQGQKNDFRDAHAVAEAVQRPTTRFVPAKTNEQLDLQALHRVRSRLVSERTAVINQIRGFLLERGIVVRQGLRFLRQQLPDILAKRTDVLSPRMARIVADLASDWRRLDERIETVTDEIGTLAKSDDSCRRVMTVPGIGPIISSAMVAAIGNGAAFARGRDFSAWLGLVPKQMSTGDRTILGRISKRGNGYLRTLFMQAARVILLRSANWPKHGFGLWLVRAAQRLHPNVLAAALANKLARIAWTVLAQERSYEARVTKAAA

SEQ ID NO: 84889 - protein, 344 aa, unidentified
MLSLGGARGVKKLNSTGTLIQTTTTEAPQGHMYYIGLDVHKKTISFCVKDASGQVHQEGKVGATRWELDDWMRTLPQPWTVAMEATIFTGWIYDHLLPHAQQVKVAHPLMLRAIAAAKKKNDRIDAGKIADCLRCDFLPECHMASTAIRDRRRTLRYRHLLVRQMVQMKNRISGLLMETGVSHNKRRLHKVGYFRELLASNEEVNESIRPLLRVSRDSIVRLQKTEYALVSSLQRDPLLSERIRRLRTVPGVGPITALTWALEMGEVSRFPSIREAISYCGLCGDEKSSADKVTRTPLSKQRNKHIQRVLVEAAKLAPIAGLFHFPLRKTGPRIKVARVEERRI

SEQ ID NO: 84890 - protein, 370 aa, unidentified
MFVPMQTSSVFVRERTLFVGIDVHKDTHTAVGINPFGEKVFELTIGNQQEDFQSLSDRVKASEQETTLSPHFGLEDCHGYGERLADFLVGVGYPVVHVPPILVDHARKRNTHPEKNDALDAYGVAEVMIHKIDTLPIYTVTEDSKKAKDIKGISLDREYLVQERTRIKNHLHTILHRIHNTEYRTQFKDPFSKKALTYWMRSCPKNTPPFLKRMMQRKVKRLMSIREEIKELETELDQLITDSGHTLTTASGCGTVIAAELIGEIGDINRFHSPASLAKYAGCAPREHSSGKTFRHRKTKAGNRRLNRAFHRMALSQISRSGNEKAQAYFKRKITEGKSKSQALVCLRRQLINIVWMMMKHKTEYRRTEN

SEQ ID NO: 84891 - protein, 383 aa, unidentified
MSRLRFVGLDVHAESITVAVAEASGEVRSLGKIVNREESIRKLIKKLGAVEQLRCCYEAGPTGYVLYWQLAKLGVECAVIAPSLVPKKPGDRVKTDRRDAEKLARSHRSGDLTAVWVPDQEHEALRDLVRAREAAKKDQTRARHRLSKFLLRHGRRPGEGVRAWTQKHWQWVQSQVQFAPVAQQVVLVDYRHEVEHCGARLQRLEKAIQQAVQEAPAAMRAVIEGLQSLRGVGEITAATIVSEVGQLSRFDSARQLMGYSGVVSSEESSGERVRQGGITKTGNSHLRRVVVEAAWAYRHGPAIGSTLRQRQKKLSAEVIEMAWKAQHRLHGRYRKLMGRGKNQQQTIVALARELLGFIWAIGVQVEAKMQAWPSPPALLQTGN

SEQ ID NO: 84892 - protein, 311 aa, unidentified
MNISPGYVGIDVSKATLDVFDAALGRGERIENASAAIAALLKRWRSKDVFVLFEATGTYDRLLRKALSRTDIAFARVNPLRARDFARAAGFLAKTDALDARMLAAMAARMRPRATAPVDPGREQLRLLHRRRDQLVLMRQQERTRFSEAQGAEERDDLTRHIAWLSGEIKSLERRTQALLASLRSLKDAWTRLRSAPGIGPVAATTLLALMPELGSCSPKSIAALAGLAPFNRDSGKERGKRTIAGGRKRVRDALYMAALSAKRTSPRFAHIYRTMIAAGKAPKLALIAIARRLLIALNAMIRDNAQFKAT

SEQ ID NO: 84893 - protein, 360 aa, unidentified
MTRVSKKARRGKYLFCAIDLHQEKMLVGFAVDKGKAKFKEFSTTEAGFHSLVRRLNRLQAQHGCDEVWVAYEASGCGFVLADFLEEAGLRIFVLAPTHLPHTVKSRSNKTDKRDVVRIQEVLRGHVLAGNSLPTVWSPPRELRDDRELVRRRLSLKEELARAKNRVHGLLRRYGIKKPEGVKTNWTKRHRAWLASLGKVLNPGAARALGSLLRELSYYESECCLIEKDMVSLAGEDRYRSRVSKLTEIPGVGLLTAMVFLTELGDMDRFPNRKTVGSYLGLVPRTWESGEQDDRKGRISRMGPSRVRKVLNQAAWSMIRWSPYWKAWFKRRTPGGKRRKKMIVAVMRHLGIMMWRQARAA

SEQ ID NO: 84894 - protein, 356 aa, unidentified
MSHDVKYIGMDVHKEAIVIAVLNESGKQVIESVIETKASSILQFLHSLRGELHVTWEEGTWAAWLYDLLQPQVQHIVVCNPRRNALLKEGSKSDKVDARKLADLLRTGMLRPVYHGENGLRTLRELGRSYQTISKDLTRVMNRLKALYRGWGIPCAGTQVYAARTREEWLSKLPQAGVRRRAELLYQQLDGLQALRREVRPEFLTESRKHKAAKLLRQIPCIGPIRAARLIGLMQTPHRFRSKRQLWTYSGLGIETHDSAQYRYVGGQVQRSKKPQQIRGLNQNHNHEMKEIFKSAATRASCGRGPFYDFYAALLAKGMKPEMARLTLARKIAAITLTLWKKEERFDAEQLKTQAA

SEQ ID NO: 84895 - protein, 377 aa, unidentified
MKRIKFVGLDVHAETIAVAVAEQEGEIRSLGVIPNREESVRKLVKKLGPVEQLRFCYEAGPTGYALYWQLSRMGAKCEVVAPTLVPVKAGDRVKTDRRDALKLARNYRAGELTAVWVPDAEHEALRDLVRAREAAKKDQLRARHRLSKFLLRHGRRPPVGATPWTVKYLEWVKRDVHFAVKAQEATLLDYLHEVEHMAARIVRLDSAIEEAVKVAPAKMRAVIEGLQALRGIAQISAVTIVAELGEVTRFSKARELMGYGGIVASENSSGERQRRGGITKTGNAHLRRVVVEAAWAYRHRPAIGFTLRKRQENLSEEVKEMAWKAQHRLHARYGKLMAKGKNKGVVVTAVGRELLGFIWAIGVQVEAQQKESLRQAA

SEQ ID NO: 84896 - protein, 451 aa, unidentified
MPKSKKQAQQLPVLHPDAAGVDIGASEIFVAVSQDRDPKPVRSFSTFTRDLNALADWLQRCGIRTVAMESTSVYWIPLYQVLEERGLEVCLVNAQYVRNVPGRKTDVSDCQWIQYLHSVGLLRASFRPPAEICVVRSLWRHRASLIQMAAEHVLHLQKALDQMNLQLHRVLSDITGESGLRILDAILAGQRDPMLLARLCNGRVRSSHDTIAKSLEGDYRGEHVFALRQSLTAYRYYQQLIIEVDREIGSYVADLPTGPASDCKIPPQTKKTKHRRQHHEPVVFDLRSELYRIFGVDLTDVPGISSVTAHTILCEVGTDLTRFRNASAFASWLGLCPERRISGGKVLYTKSRRVKSRLAIALRIGANSLHHAKNFLGEFFRRIVRKLGKAQAITATAHKLSRIVYHMLVTKEPYREEVFQRSEEEEFRRAASRLQRQAAQLGFTVTPTVTA

SEQ ID NO: 84897 - protein, 390 aa, unidentified
MILVGIDVAKDKHDCCIINSDGKFPEEVFSILNNREGYETLYKRICSLAVDFTKVKVGLESTGHYSSNLLAFLLDKHLTAYVINPLRVNLFRKGQSLRRTKTDKIDSRNIAHLLMADSSLKPYSLSSYHMEELKSLTRYRGTKVRERTKLKTSIARLVTILFPELEQLVSSIHIHSIYAMLEKFPGSAYIAAAHLTRLTALLLKASRGRFGRETAIRIRDTARRSIGAVSPAKSMELQHTIAHLRVYDQEIGEVESEIEKIMDDVNSPITSVPGIGMQMGAVILAEIGSFRRFDSPDKILAYAGMSPSMYQSGKLTGSYSRMEKRGSRYLRYALFNVTRYVCHYDPGFTAYLSKKRKEGKHYYVAISHAVKRLVRVLYAMEISGNRYQTA

SEQ ID NO: 84898 - protein, 338 aa, unidentified
MTCIGFDHHKKWTQAAAVDDQGKIIREMRVLNDNSSLKGFLKGLPQPLKGVVEAGPTWGWIYDTLTELGVKMIVANPSAVRAIAEAKIKTDKIDARMLATLLRVGLIPEVYVPTEEVRSQKMLWRERIWLVRMHVRLKNRIHRLLNHYHLEVPEFSDLFGAAGRRFLEELKLPEPGNRILNAQLKLLQSYRLQIEEVQRWAVKATQGHPNRAYLESLPGFGKVFAPIVALEIDDPKRFASPGKLASYCGLVPSLYSSGGKSWQGGIGKEGNHWLKWAFIEAAWAAIRSSAYFRVVYQRLRQRKTALLSIIACARRLCEIAYHLLKERRCYEERPYRCA

SEQ ID NO: 84899 - protein, 400 aa, unidentified
MDDIDDVGVFLGLDVGKSAHHGHGLTPAGKKVFDKQLPNSEPKLRAVFDKLAAKFGTVLVIVDQPASIGALPLTVARDTGCKVAYLPGLAMRRIADLYPGEAKTDAKDAAVIADAARTMPHTLRSLELTDEVTSELTVLVGFDQDLAAEATRTSNRIRGLLTQFHPSLERVLGPRLDHPAVTWLLERYGSPAALRKAGRRKLVEVIRPKAPRMVQRLIDDVFDALDEQTVVVPGTGTLDIVIPSLARSLGAVHEQRRATEAQISTLLEQHPLSKVLTSIPGVAVRTAAVLLVTVGDGTSFPTAAHLASYAGLAPTTKSSGTSIHGEHAPRGGNRQLKRAMFLSAFAALHDPASRTYYDKCRARGKTHTQALLRLARQRINVLFAMLRDATFYEPRTPRLA

SEQ ID NO: 84900 - protein, 404 aa, unidentified
MKGPIVSIDVSKGKSDYQAFKNLNVKYTGSRSIKHTKEGFDEIVNLVREMEKKLKTEVCVVYEATGVYHRVLKKVLEDNNIKQFIINPLLSAKTRKNDSLRSPKTDKLDPKSIAKTYYSHSLHNSHKPETIYHELRELSRYYEDILVHIRKDKVAFIAQLDIVFPGYDTLYDDLYGPVALAVIEKYPHPEMLQKKKINTVSKVIQSKTCHRQAASDTMADKAIEYSKTIYSGCDKDDIEVLILQRLIKKLKEDMAEAERTISEMIKLAQELPDFSIIKSIPGIGDNLAARIIAELGDMTKFKKKNELVAFAGLDPRISESGKNDGDHMHITKKGNKRLRCLLYLAVTCSIRLKRDDNSIKDFYIKKKQQSNPMCSKAAKTACASKLVRIIYSMCKTGELYQYNK

SEQ ID NO: 84901 - protein, 370 aa, unidentified
MSRWGNRGIGSPAGGRLPFILRWICHRESAQGPLPLSRTTEQSQDISVALTREVTVTRVICGVDVSSESLAARIGRDGAAASFANTPQGIAALAAFCRTHQVELVVMEATGGYQQRALQLLWAEQLPVAIVNPRAVRRFAQAMGLVEKTDAIDAGAIAWFAQTRRTVAQPPASSAQQHLRALVTRLRQLTLVRSAQRNQRRLVTDAAVLAMTDQLLALLQQQIGELETAIAALLASDPLWQALDQAFRSIRGVASRTVARLMAEMPEIGTLSAKSISKLAGLAPLARDSGKHQGRRMIRGGRAPVREILFVVASVAARYEPDFTAFHQRLRLAGKPPKVVRIALAHKLLVRLNAKAREVRNRITPALVAA

SEQ ID NO: 84902 - protein, 341 aa, unidentified
MQVTTIGIDLAKNVFQVHGVDANERVVFNKPLRRSQVLPFFAKLAPCLIGMEACASAHYWARELKKLGHNVRLMPAKDVMAYVKRGKNDAIDAAAGCEAVRRPTVRTVPVKTPEQQARLMQHRVRDLLIRQRTQAINALRSHLAELGIVAAQGYEGLRVLLAIVADASDTRLPEDARASLSALVAQIASCQAEIGTIDKRLLAQHRKNVDSKRLETIPGIGFLGASAIVATVPDATIFKKGRHFAAWIGIVSREDSTGGKQRLGPISKQGDRYLRRILIVGAFAVLRRARAHPEKYPWVTQLLARKPAKVVAVAIANKTARIAWAVLTKKEIYRVQTNAAA

SEQ ID NO: 84903 - protein, 416 aa, unidentified
MGFDCGEDEHQAVLLDGEGQEAFRVAMTNRRDRIEEGFALILLRVPTGAKLVVAVESTRSHGRLVTEVAKGLGCEVWQVNTVALNHFRAVEGQPRKDDVRDAYLCARMVYLRMQGARMKVEISDEERVLSRLTRAYSRIMEARTRALQALHAILLELAPEVLHRHWAGPKVNSKAMLYLLERWPGFRGLERAQLRSIEKILHSCRYGDRAADVAKWLRDVARRIEMSNEERRIVTLEMQNAVEQIRSCDAALGQLKQEISERVQRHPVGVRLLEMPGIGVIVAGVLIGELLPVARTSREAQSATYAGVTPLGRKSGKSLNTSRLTRGVNKWVLHALYTSAVAAKKCSAIDRAYYEKKLLGYAGHKKPHVAAFIALGRQRHKVIFKILTTGARYDKETLISSHLERIKNQQQHEAAA

SEQ ID NO: 84904 - protein, 348 aa, unidentified
MSEQYAGWQFVGIDLHRRRSVLVRMTETGERLETVRISNDPEYLRQVMARAGERPEVVLEATYGWFWAVDCLTELGATVHLAHPLGVKMFSLRRVKNDERDAADLADLLRMGRLPEAWIAPPATRELRGWVRHRAKLVGLRSNLKCQVHAVLAGAGVQVPMSDLFGAGGRQLLATASLAPESRARIESVLRLIENLDFEVDLFAKLVAGRLRSHPGYTAVQQIPGVGPVLAAVFVAEIGDITRFDRPARLASWAGLTPKHHESDTTVHRGRITKQGSRLVRWAAVEAVQRVGAHTRCGQVRDRVADRRGRNIGVVAAARELIRLVFYGLRDGHVRALAAPPAARSAAA

SEQ ID NO: 84905 - protein, 413 aa, unidentified
MDLLYTSCAGLDVHKDTVVACVRRLDSKGKVRQQTRTFGTMTGQLLELADWLAEHAVTHVAMESTGVYWKPIWNLLEGLFEILLVNARHIKQVPGRKTDVKDAEWIAQLLQHGLLRGSFVPATPQRKLRELTRRRRQLIQAKASVANGIQKVLEDANIKLGSVASDVLGVSGRDMLRAIIAGEDDPQVLAERARGKLRDKIPQLRLALHGRVTEHHRFLLQLLLEEVEQHEAWVARLSERIAQVLPAPFAEAVQRLATIPGIDVRAAENILAETGTDMSQFPSDGHLSSWTGICAGNHESAGKRQSGRTAKGNRWLRATLVQVAWAASHTKGTYLAAQYRRLAGRRGKKRALVALAHTLLVIIYHVLKNRTTYHELGPDYFDHLDTERLTRTLVRRLERLGHKVTLQPQEPAA

SEQ ID NO: 84906 - protein, 414 aa, unidentified
MHDPTVPAASTGPVFAGVDWASADHAVCVIDAGGAVLWRHTVTHSRAGLARLTARLVQLRISRVGIERPDGPVVEALLDAGLPVAVVPPRQVKSLRSRYRGAGKDDRFDAYLLADAMRTDGHRYPDLTRDAAETTGLRALVRARQDLVEIRVGLVNQLRHTLELAFPGAVGLFFDLHSPIARAFLRRFPTAAESAALDEEAMAAWLAAEGYCGRTPAAVFIDRLRTAPAGLAGTEAAARRHITLALLAAIDAIEDQAAELSRRIKEALALHPDAPIFTSLPRAGQLRAAALLAEIGDARGRYPGPDALAAAAGVCPVTFESGKHRAVGFRYIADLKLRRALTDFADDSRHANPWAADIYTRARARGMRHPHAVRVLARAWTTVIWRCWQDGVPYDPARHGALNRYLNQDAAAAA

SEQ ID NO: 84907 - protein, 401 aa, unidentified
MPTMRDNATRVKRFRELKATLRTNRARLLVGLDIAQAEHLVHVRHAHTRVVTAELVIPNTTRGFAQLWARIQQAQRATGCREVVCGLEPTGTYHEAVATFLETQGADVVLVSSAVAYWNRRTQDGTWDKHDRKDAANCADLLEQGKVLFYSRPDGPLAELRRLVKCLRRARAELAACKARWRTTLRPALGPMGEPLPNRLRAELPAVLQSWERAAPGRPAVPKGRLALGLATACADLGAQVTAVQARIAALEAACTPVAERLPAYTLLRTIPGIGPTVGAILLAEIGDIAWYTKFSQLRKLAGLDIVRVQSGQFAGQARISKCGRGLLRWALYHAAMGMARTTAGRARFAALKAKRHGDRFAGFKAIVELAAKVLRIVWGVWRSGTSYDPLRTGGLRRQPR

SEQ ID NO: 84908 - protein, 465 aa, unidentified
MCPGPVVHRARPVGSCVSNASTGEIAHDGRTTTPRGRIVETEFDRWVGIDWGSVRHAVCVLDAVGQVVEETTVANTGEGLSQLGQHLAALSAEEPQRMAVAIEMPEGAVVETLLVRGLVVFSLNPKQLDRFRDRHRPAGSKDDRLDARVLADSLRTDGPAFRQVALLPEDTLRLRELVRIEGELNGDLRRLANQLRAQLLGYFPQLLELSGAADEPWIWALLKRAPLPAKARGLRESTLKQLLRQHRIRRLSAEEVRAVLRTPALYRAPGAAEAASEHALLLVERLEITHRQLQHTRKRVSQLLEAAAAPHPTPTNASAEPAQEREHRDAEILQSMPGVGRFVAATMLTEAHQAIKDRDYHRLRAEAGQAPITKASGKYRHVQMRRAHNLRLTNACYNMASVAAMHDPAAREHYQTLRKRGCRHASALRSVADRLLRILMAMLRDGTLYDPAISHRRTPVSAMAA

SEQ ID NO: 84909 - protein, 385 aa, unidentified
MEDVLRSCCAGLDIHQKVIVACIIRSTEGKKRPEKFFGSFDTTTRGLFDLSDWLTSYEVTHISMESTGVYWKCVWRILQNHFELQLANPRHVKNIPGKKTDMKDAEWIARLTRLGVVPTSFVPPEPIQELRDLTRYRKHLVEDLNREKNRGHMVLQNAGIKLASVIKDIYGKSGRGLLYALIKNEQITETLILKCVYTTLRRKVPQLLESLEGFMTPHYRKMLSLHLTQIECLEKQLVEVEETINDSLVPYEEYVERLEEIPGINRRTAAVVLAEVGIDMSVFPSAGHLASWAGASPGNNQSAGKTRSKRVGKGNSYLKKVLAQGALAVSQGKPNRIQAFFFRVRRNAGHKKSVVATVHLFLRIIYRMFSDQSRYNELGESYLQK

SEQ ID NO: 84910 - protein, 344 aa, unidentified
MKITTVGLDLAKNVFQIHGIDEGGEVVVRKALRRRQMIPFFSKLEPCQIGMEACGTSHYWARELSRLGHRVKLMPPAYVKPYVKRGKTDAGDAEAICEAVTRPTMRFVAIKSPEQQSILALHRTRNLLIRQRTQLVNMIRAQLAEFGIVVAKGIQHALRLAGQLVEGVAPDIPALALKVIVALAEQLGDLQVRIGGLDKDLMAWSRDNEVVKRLQTIPGIGIVTASALAASVADPHQFTSGRQFAAWLGLTPRANSSGGKERMGGISKMGDRYLRRLLVNGMTSRSQSVRRNPEAHPWVTSLLRRKPAKLVAVAMANKAARIAWAVMTRDEVYRPPEPAIKQAA

SEQ ID NO: 84911 - protein, 459 aa, unidentified
MRKTAKKQSRAVKRAQKSGFPMINTNAAGIDVGAREHYVAVPADRDSQPVRCFGAFTQELHRLAQWLKQCGIKTVAMESTGVYWIPLYQMLESYGLTVKLVNARHVKHVPGRKTDVQDCQWLQQLESFGLLSGSFRPEAKICVLRSYMRQREMLIRAAGRYIQQMQKALTQMNLKLHHVISDLSGQTGLRIVRAIVAGERDGLKLAALKDRRIKSDVSTIAKALEGDYRAEHLFALKQGLELYDCYQQKIAECDAEIRKELERLESRGSAGAVLKRKPRSRHATGFDSQAELYRVLGVDLTSIDGVNESTAQLIVSELGLDICQKWPTEAQFTSWLGLCPNNEITGGKLLKRGTRKVVNRVANALRMCAQSLLKSKSALGAYARRMRSRKDTPVAITATAHKLARLIYRTLKYGQDYVDVGADLYEAKYKAAIVKSLQRRAKSLGYQLVSYQTLDAVVP

SEQ ID NO: 84912 - protein, 333 aa, unidentified
MYYSGIDLHSDNCYITTIDDTGALVKQQRVENNDTLVLSYFHSLPGHHQAVVESTTGWYWLNDLLGDHGIDLVLAHAKYLKAISYAKVKTDKVDSQTLAILLRQGLIPRAHKISRELRGLRDTMRIRLRLVQQRSACLRRLKSIHTKFNGSVPDPYRFQTAVLEHTRDTFTAQILALEKSLHPVLIPNDDIQRLLNIPGIGKLSAFTLYLEIDGIERFASDKHFVSYCRLVPAADNSNRSVHHRSSKDGNKYLKIAFSDAAVHAIQYYPEYQRLFQKRAKRSGEAVARTVVAKELARIVYYVLTNKTTYKGLKGQPISRQKSQQWPRLSSPLA

SEQ ID NO: 84913 - protein, 407 aa, unidentified
MEVIYPRCAGLDVHKQKVVACMRIAGNGSALQEVRTFATSTSGLLALADWLDSFGVEYVGMEATGVYWKPVWHVLEGHFELVLANAAHVKNVPGRKTDVNDAMWLADLLAHGLIRASFVPPVTVQELRTLTRTRKQFVRERTAHVQRIEKVLEDANLKLSVVLTDILGKSGRAVLQAIVDGHTDPEHLASFIITRVKASRAERLEALRGHISAHHRFMLKLHLGHIDALDKAITDIEKEVGLGLQPFQQAAKLLSSMPGLSEVSAHVIVAEVGIDMSRFATPGHLLSWACLCPRNDESAGKRRSTRLRPGGKWLKTTLVQAAWAAVRVKGGYLQAQFHRLRARRGAKKAIIGVAASMLTAAWHMLRNGTEWHDLGAAHFDRTDAHKTATRLVRRLQQIGYAVQLTPA

SEQ ID NO: 84914 - protein, 455 aa, unidentified
MPRSRRRPTRAATPPVVHPHAAGIDVGATELYVCVPVERDPRPIRRFGTFTADLLALAAWLGEVGVTTVAMESTGVYWIPLFQILETRGFAVCLVNARHVKNVPGRKSDVQDCQWLQYLHSVGLLRGSFRPPDAVCAVRTVLRHRERLVQLAAVHTQHMQKALNQMNLQLHHVLSDLTGVTGLAILDAILAGERDPAVLAQHRDPRLKASRETLAKALVGDYRPEHLFTLRQALESFRHYQRLLAECDRQVQALLDGFPARVDPAAAPLPRETRSHRRRSAAGLALRTELYRILGVDLTQVEGFATLPLALFAELGPTLAAFPSSKHFASWLGLCPDNRISGGKVLAVHTRHVKHRVAQALRTAAQSLHRSHSALGAYFRRMRAKLGAPKAITATAHKLARILYHLLTTRQPYEETQVAAAEERFHRRTEARLRAHARALGYQLVPAVPSAAGVS

SEQ ID NO: 84915 - protein, 414 aa, unidentified
MPSSYRVAGIDVHKKMLAVVVSDVAAAGEWEWERRTFGTLDSELRQLAEWLAEREVGEAVMESTAQYWIPVWRALEARCRLHLAHAQSNRAPKGRKRDFADAERLVRRLVAGELVLSFVPDGQQRLWRTATRARHQLTCERVRLQNQLEALLEDAQIKLSSCVSDLLGLSSRRMIEALAQGERDPAVLATLAAPGLRATAEQLRDALHSAPSMSAVHRQLLGLLLERLQLVDRQREILNQTIAQALLDHSEAVARLVDIPGFGVNSAQQVIAEVGPQAATFASAAQLASWAGVCPGRNESAGVSTSDRCPKGNRTLRRVLTEVALAAVKTKGCIFQTLYRRLVVRLGHAKAIWAVAHRLCRLVWKILYQGISYEERGTSPNTLVARQRTRRLIRQLQALGYQVQLTPITPEQAS

SEQ ID NO: 84916 - protein, 358 aa, unidentified
MTQFIACDAHKRYSVFVARDEEGHFSRPATVPHDREQFRRFLATLPPHSPIAVETIGYWYWMFDEMEAAGHIPLLTDAKKAKYMMGGIHKTDRRDTRGLSTLLANGTLPVVWAADATTRDQRELTRLRASLVGVQTKLRNRVHACFDRYNIEHPQNAWDPAACSALAQAVEQLPAETRFSLAEQLGALAELQARIQQIEQRLRQVIRRTPEMQLLDTLPGVGEILSPVIALEIGTIERFGSPGQLTCYAGLVGRVRSSGGKTRVGKVPNEVNHTLRWAFIEAANCALRSRNNPRSAHLLRMYDRIAGPHPTAERSGKAKVAVARELAQAAFFMLKKKEEYKIPGHTAPVLAPVSARCP

SEQ ID NO: 84917 - protein, 401 aa, unidentified
MPQQRKPNDLGRSLISLAMDTTLIAVVELSLSSWLVAGIVPGVERQPLKKLKTDENALLALLNRWRDEAVRSGHKISRIAVAFEAGRDGFWLARWLKARDIEAHVIHASSIAVSREHRRAKTDRLDTELLKRAFVGWLRGERDHCKTAAIPSLREEDAKRPSRERESLVGEQSRLVNRMKATLIRLGIRGFNPKPRHAEQRLETLRTPEGEPIPPNTLAELKRDMQRRRFICDQIQSIEQDRLERLERTPHTEPHAMVRLLARITGIGIETADLLVHELLLRNMRDRRAVARYGGLTGSPDRSGGTNREKGMARSGNARVRRGMIQLAWRFLLFQKNSALAQWYRRRTEHAPKARKTMIVALARKLLIALWRWCGRAWFQRVSRCARRDEHGLLNVRRPIA

SEQ ID NO: 84918 - protein, 366 aa, unidentified
MEVTTIGIDLAKSVFAVSGGDRRGKVVLRRQLRRAQVLEFMSKLGPCVVGLEACGGAHHWARALTRLGHQVRLMSPALVVPYRKGHKHDRNDADAVLEAVSRPSMRFVAVKTIAQQDLLALHRVRARLLKQRIALSNQIRALLHERGVTARLGAAGLRAAVAAALAADHHELSAELRQVIAELMDELRQLELRIKAFDQRLERAAQSDERCRRLREVPGVGPKIATALVATVGDAREFRSGRELSAYLGLTPRQHSSGGKTVMLGISKRGDRYLRTLLIHGARSLLYRNRRATHPRARWAARLSAARGPNVAAVALANHHARVLWALLNRGDHYRPDRQPGSLPAPPSATGERARAGKLLLHKARS

SEQ ID NO: 84919 - protein, 312 aa, unidentified
MTTREVFVGIDVCKRHLEVRVHGREQGWQFPNDAEGVSQLLTKLRRLRPTLIVVEATGGYEKLAVAEVCAAGLPIAVVNPTRVRRFAESLGQLAKTDRIDAAVIAHFGSVVRPAAQALASEEEQHLRALLDRRRQIMAMLTAEKNRWHTSPACLRADVQQHVEWLQGKLKEIEAEIDDLIRNSPVWQEKTALLRSVPGIGPVSAATLVADLPELGTLNRQKIAALVGLAPFNQDSGPKRGKRRIFGGRASVRRTLYMSTLVAIRFNPVIKSFYEKLIRRGKPTKVAITACMRKLLVILNAMMRKGEAWRCAA

SEQ ID NO: 84920 - protein, 404 aa, unidentified
MLFVGVDWAEDHHDVCVMDQDGAVLGKRRVPDSVAGIGELHGLIADHVHDDEAVVVGIEIDRGLVVWSLLESGYEVYAINPMASARYRDRHSTSGAKSDPGDAKVLADLVRTDRHNHRPIADDSDLAEGVKLLARAHQNAIWGRQRQVNALRSSLREYYPGALVAFGTELASTDALAVLAIAPTPELGRALSRSKIASALRKGGRQRNIERRAEEIQSALRAEQLEAPELITRAHGVITRSATALISTFNTEIAELEAALSEHFEQHPDAKVVLSLPGLGTVLGARVLGEFGDDRTRFSTPKSRKNYAGTSPVTKASGRSKVVLARFARNKRLGDACDQWAFCALSTSPGARSYYDQLRARGKTHRQALRQLANRLVGVLHICLDRGVLYDELVAWPQESEIAA

SEQ ID NO: 84921 - protein, 340 aa, unidentified
MGQVVTIGLDIAKSVFQVHGVDAEGAVVIRQKLPRARLLSFFAKLEPCLVGIEACGASHHWARELIGLGHEVRLMPPSYVKAYLKRQKNDMADAEAICEAVTRPTMRFVPVKSPDQQSVMVLHRTRLALTRQRTQFSNAIRGHMAEFGLAAAIGREGLGKLVEVILDSADDRAPREARVCLTMLVDQIRLLNLQIQETDRLIRTSARATEAGRRLMEIPGVGPLLASAMVAAVADPATFKTGRNLAAWIGLVPRQNSSGGKERLGGITKQGDRYLRQMLVVGALAVVRYAQRNGKRRPWLLQLLARRTPKVAAVALANKNARMIWAIMTSGERYREPQPV

SEQ ID NO: 84922 - protein, 345 aa, unidentified
MKIIGCDFHPSFQQIAMCDSETGEFQERKLSHADGQAERFYLELGGPALIGIEATGNSQWFLDLVGRLGYEIRVGDAAKIRASYVRKQSTDKRDARHLLTLLLEKRFPQLWTPSASMRDQRQLLRHRDKLVEIRTKVKNSLQHLAMNRGMQKKSRLWTRLGMEQFQQLAMPGWAGVRREDLSHLLKQLNCQIETLDRAVEQAACQHPQAQLLMSQPGVGPVTALAFVLTIGDVTRFAGSKQLSSYWGLVPSEHSSGSKRRLGAITKQGNRFLRKLLVEAAQTAVRKDEGFRKEYQHRCRRRPKGVAKVAAARKLAVRLYWMLRSNVSYPEIVRVESNPRVPLGDV

SEQ ID NO: 84923 - protein, 392 aa, unidentified
MIYVGIDVAKDKHDCFITNSDGKVLFRPFTISNNRDGFETLFQKIQSVSDDLSKIKVGLEATGHYSYNLLGFLLDKGLPTYVINPLHTNLYRKSLSLRKTKTDKVDSRTIATMMMSDVNLKSYSDTSYHNEALKSLTRYRFDKVKERAKLKSSVSRLVCILFPELEKLVPTLHMASVYALLAEFPSAAAVANAHLTRLSNLLSESSKGRYGKDTAILFRDAARSSIGSHMPAKSLELKHTIKLIQELTAEIDEIEAAIKQIMDEEIQSPILTIPGISYRMGAMIIAEIGDFCRFDSADKILAYAGMSPSTYQSGQLDNCYSHMEKRGSRYLRYALYNATKYVCHWDKSFGAYLEKKRSEGKHYNVALSHATKKLVRLIFAMEKSRKAYLPTA

SEQ ID NO: 84924 - protein, 381 aa, unidentified
MKKTSTIATRQIRNFVPAAQLGNFAQPQPVQQKLTIGLDLGDRHSWYCVLEEAGQIQVEQRVRTQAKELRAVFGAMPRSRIALETGTHSPWISRLLSELGHEVIVANARKLRLIGESRKKDDRLDPQTLARLARIDPALLSPVKHRSRQAQADLMMIRARAGLVRARTGLVNTARGLAKSHGERLRGCNVRNMNPEKADGLSPELQRALEPLLSAIEELSGRIAECNERIEKMAAQSYPQVAVLKQIKGVGTLIALTFMLTLEDPRRFRKSRDVGCYLGLQPGRRNSGQSEPQLHISKEGDPYLRTLLVQGAQHILGPFGIDRDLRRWGLRLAERGGKSGKKRAIVATARKLAVLLHHLWVSGEVYEPLHNSGRDAVSAAA

SEQ ID NO: 84925 - protein, 420 aa, unidentified
MRSIALDVHRDFCEVAIKDESGLRLAGRVKTAPEELELFARSLAPDDQVALEASEPAGSIARILEPHVGRVLIANTRKLRAIAESKVKTDELDARTLCELLAAGFLPAVWSPDEFTRALRRRLQRRAKLVRARTRAKNECHAVLARNLKGKPPMSDVFGKKGRRWLAALQLPADESETVACCLREVDFLDSEIALVERELAARALSCQEIRRLMSVPGVSLVSAATFVAVVGDARRFSSPKKLVSYVGLDPRVRQSGEAPARHGRISKQGSPEARHMLCEAAWVAIRTPGPLRAFYERVRSRRGTQIALVASARKLSVLFWHLLTREEDYAFERPTLTRRKLRGLELKVKDGRRSWPSGHAVGTKEEREREREFAEQVETAYRRLVADWQPKARRSGAGATRGRASSSHLLDEETAARQG

SEQ ID NO: 84926 - protein, 463 aa, unidentified
MRAIGLDIHRDFCEVAIAEGGRVRAAGRVGTAPAEIEAFAGGLGPGDTVTLEATGNALAIARLIEPHARVVLANPKATRAATRLRAKTDRIDARTLAQLLASGFLPEVWTGDEATHALRRRVGRRVHLVRQRTKAKNQVHAVLLRTLAGRPPVSDVFGTRGRAWLERLVLPDDERETLEACLRTVDFLDTEVAALDRALAPLVLASPDMRRLLTLPGVSATTAATLLGVIGDIARFPTPGRLVAYVGLDPRVSQSGNDPAHHGRISKQGASEARHVLVEAAWVATRTAGPLRAFAQRLAARRGWNIAIVAVARKLTVIAWHMLTRGEDYAFARPVLVRAKLREIELRAGAPRARGRSIGVAPTVAERELERELAVAAEVAYERLVKDWVPSRKQVREPQAGRASHDAERQPARQGSAPTLRFGPASLPQQDDHAPDPGPPQDGDLNFIHPSVSTKVGYAHSFS

SEQ ID NO: 84927 - protein, 392 aa, unidentified
MVVSVGIDVSKDKHDCFILSSEGAVLADVFTIPNNMDGFNCLLQRIRNCTTYQDKIKVGLEATGHYSYNILGFLLDNGLATYVLNPLRTNLYRKSLSLRKTKTDRVDARTIAAMLLSDVGLKPYTDTAYHNEELKSLTRYRFDKVKERAKPKSSVSRLVCILFPELEKLVPTLHGASVYALLDEFPGAAQIAEAHLTRQKALLSSASRGRYGRDMAVEIRDAARNSIGSRMPAKSLELQHTIRLIRELDAEIEEIEVEIQSIMDEVHSPITTIPGIGYRMGAMILAEVGDFSRFESPDKLLAYAGLSPSTYQSGQLKNCYPHMEKRGSRYLRYAIYNATKYVCLWDPVFASYLARKRAEGKHYNVAISHAAKKLVRLIFALEKAGQPYRLAV

SEQ ID NO: 84928 - protein, 473 aa, unidentified
MPIAGLDVHKRVVQAFVLDDDGSVRLRARFDCDRESLEYFALNHLGPRCRVALEATTNTWAIVSVLEPLVGEVVVSNPLRTRAIAEARIKTDKVDAEVLARLLAADFLPTVWKPDPATKTLRSLCSRRSSLVSDRTTVKNRIQSVLHQRMIAVSYKDLFGRKGRDWLEKLSLDPLGREAIDSELRLLDRVGEEIFTMEKTIATIAQPDPRARLLMTLPGVSVAVAQTLLAALGDITRFRDGDHAASYLGLVPSTRQSADHTYHGRITKQGNGHARWMLVQAAQHLASHPGPLGNFFRKLSKKKNRNVAVVAVARKLVVIAWHMLTKNEPYRYAIPRTTETKLAKLRVLAGGEKRRTGPRKGLPRPASYGTFAGTRALPSLEQVCEREELPAPKPLADGEKRIVKAAGAEKFVREIHSVRREPRNKGVRAAAAAAAATGAGVGRGVQNAVRATDPERTQTHNSPTPQSANEIQQ

SEQ ID NO: 84929 - protein, 406 aa, unidentified
MSTLNSAEEQKPVYAARIGLDWADQKHFWTMLTAEGKRTRGELKHTPEAIEIWAVELARAFDGRPIALALEQKRGALVAILSKYAHVHLFPLHPTNLSHYRSSVCASGAKSDPSDADLILDYLVKHPEWLRSLMPDTVETRSLQFLVEERRKLVNQHTSQLQILIYWLKQIFPQMLVWFDDMSTPLVGDLLLRWPQLPALKKASKKTLDKFFRQHNCRSEGRIQERLDEIGKAVPATTDAALLNTADLCIRLAVQVLAAQRAGIAEFDRQIEAIYETHPDRFIMASLPGAGPALEPRLIAALGTNRERFESASGMACCFGIAPVTESSGKSRWVHGGGRVPNLCGRRCMSGRTARFGVASGRGSTMISSGGGAKGIMPAFVQWRSSGFGFCFVAGGIEWPTAKSGI

SEQ ID NO: 84930 - protein, 344 aa, unidentified
MNKTIVGVDLAKKVIQVCIYRNKKVQSNTEMTPDEFLSWLVTSKPVLIIFEACGMSNYWKQRATEAGHDARLISAKLVSAVRQNQKTDKNDALAIVQASLLPEVRFISGKSVKQQQLQSIKRLRELAIKHRDALKKQIVALLLELNIRVPNGSARLIDKIDDILEDAENDLSAEFRQALQVAQQQLSAAIKSVLIYDDCSEKSIQTHPDCKKLLKLEGVGPINAINLYIALGCADLGAFNKGKDASACIGLTPAQHSSGGKVKIGTIGKLKNSTLRSQLISGAMSVIKQIVKREARTKKEVWLKSLIERRGNKCAAVALANKTVRTAFAMLTQGTEYKAELLAA

SEQ ID NO: 84931 - protein, 353 aa, unidentified
MTTITQEWTIGMDLGDKSNQICVLNREGEITTECSVGNTEVQLSKFFKDHLSALIIIEAGTHSSWIERLLKNLQHEVIVANPRKVSAIWMNKLKTDKRDAQMLARMGRFDIDLLCPVKHRGLKSQVALCSIRARDIMVRARQKLILHVRSSVKGFGYRISKCSTESFHKKSIEDIPDFMYPVLRPLIRSIALMSQEIKEYDKQIDQLCDEHFPETKKIGAIAGVGSLTALAFVLTIDDPKRFRKSRDIAPYLGLVPGRDQSGSSDKPMPITKSGNCYIRRLLVGSANYIMGPFGPDCDLRRFGEKLGSSPTAKKKAKVAVARKLAVLMHRLWVHDETYDPFFNHLKKAEKKSA

SEQ ID NO: 84932 - protein, 335 aa, unidentified
MHYLYYVGLDVSKETFDASLVAFEDANEMAHRKFANSRKGICSCLHWVEKRHGILLDDVIFCAEDMGSYISEMAVCASDRTLTFNFSLISPLVIKYSMGIARGKTDRVDARRIAEYAITHYRKIALYLPAEKELCQLRTWLILRAHLAKQRVAKLVLLEKLNYKEKFADVSIQRSMLQEEIAYAETHMKTIEREMKELIAADSNICRNYKLLTSIKGVGPITAIVMLCSTLNFTKITDHRKFACYCGLAPFEHSSGTSVRGGCHTSSMANRDIKVQLNRSALIAIRCDPQLKAYYERKVAEGKHKFSVLNAVRAKIAARCFAVVRRGTPYVALQI

SEQ ID NO: 84933 - protein, 343 aa, unidentified
MGEVSTIGLDIAKSVFQIHGVDAGGAVVIRKRITRAKLLEFFATLPTCLVGIEACPSAHYWSRRLQGLGHTVRLMPPSYVKAYLKRSKNDANDAAAICEAVTRPSMRFVATKSEEQQCGLMLHRSRQLLVCQRTMLSNAIRGHMAELGVVFAKGRNGTAELLKIIADEQDDRIPAAARFSLNVLARQYAAIREETVAIEKRIHAWHRSSEESRRLEEIPGVGPIVATALVAEVGDWNEFTSGRSLAAWIGLVPRQHSTGGKERLGRISKQGNRHLRWLLVAGAMAVIRYARQHGTKRPWLARLMDRRPIKVAAVALANKIARMAWAMMVHGERFKEPKLLPAG

SEQ ID NO: 84934 - protein, 342 aa, unidentified
MFYIGDDVSDKSSYLYVTDRGGKKIEGQEIPTDKDGYRQYFKKWVGKQVKVAVEAGGHSRWIYDILKKMGISVYIVNPNKVKLIAKNKKKTDKVDAKFLAKLLRVDELPERVFVAEGESRELRDLLGSRHQLVTSTTCIMNHLRGMLRQEGIKLKAKAFNDESTFSRLLMNKSVPKHLHPIIASYETIITEFRKQRRALDDVIAEYGNKDIELLKSVPGIGEVASKTTYAAISTIKRFKRAKQLTSYCGLVPSVFSSGERAAYGHITREGRSEVRHVAVQSVRAILRSTNSESKPLRKWYERLAKRRGSKTAVVALARKLIEIIFYVLRDRRPYDAQLLHVN

SEQ ID NO: 84935 - protein, 423 aa, unidentified
MTPQTDAAKAAEDYAAFVAIDWADKKHVWALAKAGSPERQNGEVDASPEAVEGWVRDLMMRFPGRKIAVALEQKRGPLLCLLSKYEGLVLYPVHPATVSRMRTALYPSYSKDDPLDAGLLLDILLHHRERLRRLDADTVETRKLQMLVEDRRKLVDEGTAYGNQLRAKLKLYFPQALRWLPELDSPLACDFLKRWPTLPQLHQAKLETIRRFFHRHNCRSEELMRQRLEEIPKAVVATQDAAVVDAGTAMVAALLDLIAVLRVQIAEFDRLIAATASVHPELPIIASLPAAGRAMAPRLLAAMGTQRERFDSASELQAMSGIAPVLRRSGQSKQIHFRWACPKFIRQSFHEWAGHSIAQCQWAKAYYDQQIAKQKGHHAAVRALAFKWQRILYRCWKDRKPYDEQKYLEALRRRGSPLAEALK

SEQ ID NO: 84936 - protein, 417 aa, unidentified
MGKIMERCAGIDVGKRFLLCCVLTGAAQDEPHSKTLRFDTTVPALERLRDWLNREAVTHVVMESTGSYWIPIFNILEGQFAVVLANPEEVRNRKGHKTDRKDAEHLADLLRHDHVRSSYIPAKPIRELRDLTRRRVQLIQDGTRERNRVQKMLEQTNVKIASVLSDLFGVSGQHMLLALLEGKATPEEMAGLARGSAKQKTPQLIEAMQGHRMTDHERFLIRSCLRHLACLEEEIEDLDTEILRRMQTPPFQEAFGLLQTLPGIGQLSAATILAETGTDLASFPSAEQMSSWAGLCPGNRESAGIQKGRHTTHGNPYLRTALVQCAWSASRKQGSVFEMRFQQLVKRCGPKRAIVAVAHQMLIILYCMLNGKVPFRGAESAPQQRRRKNRAHHHLRCLRRLGIQVQIIAAPDTPEGP

SEQ ID NO: 84937 - protein, 418 aa, unidentified
MKRVIGMDIHRTFAEVMIWEAGQLRPAGRVDMSRAGLEGFGRTLSKEEDEVVIEATGNAMAVVRALEPHVARVIVANPMQVKAIAYAQVKTDKIDAGVLASLRAANFLPEVWLPDTDTERMRRQVARRNQVVRHRTRIKNEVHAILHAHLVPCCPHDLFARVGRDWLGRQTLPDDERAAVARHLRELDRLGEDLDVLDRDIAQAAINDPVVKRLLTITGVNLIVAAGLVAAIGDVRRFASSEKLVSYVGLNPRVRQSGLGLAQHGRISKQGRSHARAMLVEAAWAAAKAPGPLRSFFLRIRARRGHQVAAVAVARKLAVLCWHLLTKEVDYQWARPALVANKIRAMELQAGQPARKGNKRGSTYVYNVKELRDREIDVARHAEQVYEQFVRGWQRRAPTKRRTGAAHEGATMKAARPS

SEQ ID NO: 84938 - protein, 382 aa, unidentified
MEFYHKEHRYYCGIDLHEKTMYVCIVDQQGKIRYHRNIKTSREEFLAAVAPYREDLIVGVESTYAWYWLADLCEDEGIHFLLGHALYLKAVHGGKTKNDKIDSKTLAFILRGGNFPVAFVYPRKMRSTRDLLRRRMYLVRKRAAVMAHMQNTNSQYNLGPFEKRLKYKSNRLGIVDRFTDPSVHKTIEVDLNLLNFYDEILRDLELYILKTARLDDPVSLHLLQTAPGIGMILSLVMMYEIEDIGRFKRVQDFLSYCRLVKCPRESGGKKYSSKNSKIGNAYLKWAFSEAAVLFLRGNQRIEKKHNRRVSKHGKAKALSILARDLGTAVYFMLKRKEPFDLNKFLGAGDASLSPNWTDHGETLNKAARTKCIEECQPVAVGH

SEQ ID NO: 84939 - protein, 338 aa, unidentified
MVYGAIDLHTRHSEIRIIDGDGRVIREGRIATTRERLIASVADVGHIRILLEAGTESEWVAGALEGAGHEVIVADPNYAPMYGDRRRRIKTDRRDVAALAEANRHGWFRRAYRRSAAQRTIQQQLTSRTALVQMRTKTISVIRSLVRQEGYRIPSGRAALIPARLDALAFPVALQQRLAPLCRTVAQLTAEILGIETALEATADADPIVQQLQTVPGVGLIVALMFRAFIDTIARFGTAAQVSAALGLVPREDSSAERRLRGHITKAGPSALRSILVQAAWACWRSKRSGTLHAWVEGVAHRRGRRIAVVALARRLSRILFAIWRDGTVFQPAVLAAA

SEQ ID NO: 84940 - protein, 313 aa, unidentified
MDNISRVVIGMDPHKRSATIEAMGPDEQVLGGGRFGTGPAGFEAMLARAAGWQDRVWAVEGCEGIGKHLVLRLLDAGEQVVDVPAKLSARMRVYATGQGRKTDGTDAHSIALVGVRMTGLREVVNAQTLEVLRLLADRRRRIGEDHTRMVCQLHQLLLELLPGGAKKDLSAAQARRLLAGVRPKDVAGKTRKRVALELVVDLERLYRRKKEANKELIGLVRATGTGLPGLHGIGLSGAARLLVEVADITRFPTKGHFASWTGTAPIDASSGDNVRHRLSRGENRQVNKALHMMAVVQQLPASCCDLPGPRGLR

SEQ ID NO: 84941 - protein, 454 aa, unidentified
MGKPRVVPDEDHEVVYERAAAVDVAKASGVVCVRTPDPARPGRHVNRIWDHVPATRAQIAGLGRELLEHRVQVVTLESTSDYWRIWYYVLESLGLTVQLVSASQAKNLKGRPKTDRLDAMWLARLTQHGMLRPSFVPPAAVRRVRDFTRARTDLVAERTRCLQRLEKLLEDAMIKITSVASDGMKAKSVVAMVAALIAGERDPRVLADLAKGPLRGKRDQLAEALDGLFDSHHGVIAQMLLDQAAFLDQRIADMEDQAIAALAEVEQSWGVDADGQTGPQAGTSPGSPVLAAAHRLAEIPGISVWLAIVIIAEIGLNMAAFPTPAHLVSWMGLCRSAAQSGTRTGKGKPKKGNSYARAAAGQAAIGAARTATFLGERYSRIARRRGKPIAQAAVARSIMIIVWHLLNDPAARYRDLGPDWHASRVNRDKKIRTHLRGLQALGVTVAITDDEQAA

SEQ ID NO: 84942 - protein, 397 aa, unidentified
MYIVGIDIAKRKHEAAVIDGEGAVIIKPFSFTNNCSGYNRLLAMLTKAKLPLDEVSFAMEATGHYWLALFTRLQKEGFRVQVINPVQTNSIRSFYIRQAKTDPRDALLIAEVIRFGHFSESTLHPENIYELRELCRGRHAIVSMQADVKRKVVALLDQVFPEYETAFTNMFGDTSMAILQTCPTPKELSEMPLEELCHLIEVSSHKRFRMAKARELQELARGSFGFAMAGDVFSTMIRLYAKHLDFLKQQVREMDRKIAEIMDTLDTPITTITGIGPTLGAYILSEIGDISRFSSAAKLAAYAGIDPTMRQSGEYNGVRNRMSKRGSPYLRHAIWLAASSAVLHDPALKLYFQKKRDEGKPYMASVGHACRKMVSIIYAVMRDNKAYTPCIPNEISA

SEQ ID NO: 84943 - protein, 358 aa, unidentified
MDGNKQQPKMTAGLDLGDNYSYLCLIDQRSGEVVEEGRLRTTPEAFGRRFASERPMRIAIETGTHSPWVSRLLEGCGHEVLVANARKLRLIYANKSKTDEVDAENLARLARLDPKLLYPLKHRGEESQAHMALIRSRQALVGSRTQLVNHVRGAVKSFGGRLPKCPARSFHKRASEHIPEALWPALGPILETIGSLTERIRDYDRRLETISLERYPETELLRQVEGIGPLTALTFVLTLEDPYRFEKSRSVGAYLGLVPATDQSGERDPQRRISKEGDEMLRRLLVGSAHYVLGPFGSDSDLRRHGEKIASRGGKNAKKRAVVAVARKLCVLLHHLWVTGELYDPLHEAHRRQRKEAA

SEQ ID NO: 84944 - protein, 494 aa, unidentified
MKAKGCKAKGQHSNSSKRNAKMAARGQPEGMEIVNPHAGGIDCGAQEHYVAVPPQSVEPGKPSVRCFSAFTKGLDALVEWLKACGVTTVAIESTGVYWIALCQKLEAAGIEVYLVNARHVHHVPGRKTDVKDCQWLQRLHSFGLLSASFRPVDAICRLRSLQRHRLNLIWTAGAEIQHMQKALQQMNLHLHHVVSDITGLSGLRIIDAILAGQRDAVQLAKLRDYRVNKSTVAQMEAALVGDYRPEHLFVLSQSLQAYRFYQARIQECDPQIESHLQQLAQRFESSSALAAELPEPEVLNGAQSHNPQPAKRKVKRKPQANEPKIDLADYLRRICGVDLTQVIGLNVLSVLLIVSEIGVDMSKWRSAKAFCAWLGLCPRNKISGRKVLDTRTCKVISRVATTLRLAAQSVGRTNTALGIFYRRKKAHLGPAKATTATARKLACLVYHLLKYKEQYREPDPATYQLKVQKTILAKIQKQAAALGYKLLPTALLPA

SEQ ID NO: 84945 - protein, 416 aa, unidentified
MEVVVARIAGLDVHKETVMACVRAPGVAGKRQQVVREFSTYTAELAQLRDWLAAEGVTQVVMEATGVYWRPVWHVLEDHGGWELMLVNARHVKNLPGRKTDVSDAAWLAQLGECGLLRGSFVPPPVIARLRDLTRYRKKLVEDRAKEVQRVQKVLEDAGIKLESVVTDVMGKASRRMLDALIAGERDPDVLADMALTRMRPRIPELRHALLGRFDEHHALMISMHLAHVDHLSAGIDRLDAEVDRVVVPFSDQVRRLMTIPGVGKRTAEVVIAEIGADMGQFPTAAHLASWAGLCPGNHESAGKSSSGRARKGNGHLRVALCEAAWAGVRKNDSYLGAQFRRFQRRFGKRAEGKAIFACAHTLVVMIWHVLAEPDAVYEDLGPDWFSRRGDSAAHTRRLVRQLERLGHQVTLTPAA

SEQ ID NO: 84946 - protein, 421 aa, unidentified
MEEITEESAELVARVAALDIGKASLVACVRVPHEGKPGRRRQEVRTFATTVRSLLELRDWLVCQGVTLCVMEATSTYWKPPFYLFGDAIECWVVNARDVKNVPGRPKTDRLDAVWLCKLAERGMLRPSFVPQPWQRELRDLCRYRRTLIRERTREKQRAEKLLEDTQIKLSAVISDIFGKSGRDMLEALIAGQRDPYVLAELARGSMRGKKSVLQEALTGHFRDHHGYLLRMMLDRVDALTAQIEALAQRIEGAMAPFAAQVAQLDEIPGIGKTAAQELIAEIGVDMTRFPTAGHLVSWAKYAPKARQSAGKSKPGVTGKGNPWIASTLGEAGIGAARTKTFLGSRYHRLARRRGKQRALVAVGNSILVIAWHLLSDPQAQFTDLGPGWHERLAPVRRKRQLIAELERLSGMKVTLQEAAA

SEQ ID NO: 84947 - protein, 335 aa, unidentified
MFHCGIDLASKTTALCVVDDHERVILERELPTDFGQIREVLAPYPGVSCVVESAPLAEHCRRELARADIECTIVDARAAKALFDARKKTDRRDAVTLARMRCSGWYQAVHPKSDEARNLRFQLGVRAAVVRTQVAVQNTVLGLLRSMGIRVTRGAGLEARLRQALDEAPTLETILRPLLEQRALLKRQLQDLNRSLGQQLRRHPVARRLAAVPGVGTITALAFVATIDDPTRFGSAKQVGDYVGLAPGVYQSGEVERIGRITRQGDVLLRSLLVEAANAVLYRCKQDWAWKDWALRLKERKGAGKARVALARRLAGLLWKLWKDNVPFNPQPVAA

SEQ ID NO: 84948 - protein, 375 aa, unidentified
MGDHSEAFVAFDTSKLRNAVAIADGGRAGEVRFLGEIENTGAATAKLVRKLAAKHQRLTFCYEAGPTGYGLYRLIKSLGHECIVVAPSLIPKRPGDRVKTNRRDALSLVKLLRAGELTAVWVPDRHHEAIRDLTRARGTAALDLRRKRQQMSAFLLRQGLHYPENRHTWTKAHMSWLASQKLAHAEQRLVFEEMMLAMRQAQERIERLEQAIRAAVPDWSLAEVVTALMAMRGMDLVSATTFLAEIGDLSRFQTPRELMAYLGLVPSEESTGDKVIRGPITKAGNGRARRMLVECAWSYQHPPRVGKDKQEKVAAAPRAVREIAWKAQCRLNRRYRALVRRGKPKTVAITAVAREFAGFIWAVARAANAARAEAK

SEQ ID NO: 84949 - protein, 315 aa, unidentified
MERLLYVGIDVAKAHLDGAVLPTGERWRSPNDEVGIADVVTRLRDPLPTLVVVEATGGLEFPMVAALAAAGVPVAVVNPRQVRDFAKATGKLAKTDSIDAQVLAHFAQAVRPEPRPLPDAQARALEALLVRRRQVVAMLTAEKNRLSRALAPVRQRVQAHITYLEQELGHLDADLGNALHSSPLWREQDTLLQSVPGVGPVLSLTLLAALPELGTLDRRRISSLVGVAPLNRDSGTFRGKRRVWGGRATVRAVLYMGALVASRWNPVLRTFYRRLCAAGKPKKVALTACMRKLLTILNAILKHRTPWQPNHVLNS

SEQ ID NO: 84950 - protein, 329 aa, unidentified
MRFYTNQHPFYCGIDLHARSMYVCIVNHEGEILLHRNMKAAPEPFLKAVAPYRDRLVVAVECIFTWYWLADLCAAEGISFVLGHALYMKAIHGGKAKNDKIDSQKIAALLRGGLLPQAYVYPADMRATRDLLRRRTHLMRKRAELLAHVQNTNSQYNLPEIGKKIAYKANREGVAERFDDAAVQKTIEVDLALITYYDELLRDLELSILTTAKQHDANTLYLLQTVPGIGKILSLVLHYEIHDIDRFPRVQDFASYCRLVKCAKESAGKRLGTSGKKIGNAHLKWAFSEAAVLFLRNNPQGQKYLARLEKKHDKGKALTILAHKLARAV

SEQ ID NO: 84951 - protein, 371 aa, unidentified
MKNVTTYVGIDAHKKDLFVAMLVGDQSTPVTWTVPNEPAAVRRLVRKLEREAPGPVRAFYEAGPCGYALQRQLTTPQVSCEVVAPALIPRKPGERVKTNLRDSRKLVELGRAGLLTAVRPPTPAEEAVRDLARARDDAREDLQRCRHRLGKLLLRRGLHYPGRNWTRGHRQWIDALTWPHAAERAVVDDYLLAIDHTEARLRELDVRLAEIAETDPYRDPVAWLRCFRGIDTLTAMLILAELHDFRRFPSPRMLMAYLGLVPGEDSSGEKHRRGRITRTGNALVRRVLVETAWHYQHRPAIGAALTRRRKGQPGRVIAIADKAQQRLCRRFRKLAAEHKPAPKIAVAIARELAGFLWAALQPAPVIVTSRG

SEQ ID NO: 84952 - protein, 349 aa, unidentified
MHSTTVAVDLAKNVFELAVADSEGKIGERLRLNRARFSSFFVHRAPCRVLMEACGSAHYWARRIGAHGHAVQLLPAQYVRQYVRRNKTDRADAAALIEAARCADIRTVAAKSLEQQQVLVLHRLRSQWMSTRQRYLNTLRGLLREFGIAVPLGARVARTRIAHYLAQPPQELPAAIRPLLAQMLSEVKELEHRIEQIERDLTALTRADPVVQQLRQIPGVGLLSSTAIRAAVGDVQRFPDGRCFASWLGLTPREYSSGERRRLGGISKRGDVYLRTLLVHGARSALLAAHRQQRTGRPLDHLRQWALQCERERGHNVATVALANRLARIVWATWKHKRAFDGNWACVAQ

SEQ ID NO: 84953 - protein, 308 aa, unidentified
MKRDDYCLVAIDVAKETLCVLIAGRLFTVANTATGLAALLKHLRSLKCPWVFCEATGGYERALVAMLHQHAILVTVINPALVRHFARSEGIKAKNDPIDTHMILRFAQQKDLAPSVPPKRPELTALMDRRTHLSDELTRERTRLQNSSKLIHASIRRMIGLLEREVKRIEQAISRLIEKDDTAHYAVDVMQKTQGVGPVTAWAILAYLPEITQLSRNRIVAMAGLAPFDKDSGKSKGPRHICGGRHKVRNVLYMAAMAACRHNPVIKPYTQRCSDRGKDKKWIFTAVMRKLLIHLQRNLKKHQICLVS

SEQ ID NO: 84954 - protein, 343 aa, unidentified
MSLLYAGLDVSLETTSICVVDTDGRIVLEVKEVSEPEAIIARLAELSGAFERVGLEAGPLAQWLYFGLADAGYPVVCIETRHSKAAIAAMSMNKTDRNDARSIVQLIRSGWFKSVHVKSVESQELRALLGSREFLVNELRDHVNEIRGQLTTFGLKVGQISALGFAGRIRELGEDRPRLKPCMEALLAAREMVMKQLSVLHGELLRITKNDELCVRFMGIPGVGPVTAFAFKTAVDRPDRVRRSSDVGAHLGLAPRQYQSGEVDRRGRIAKCGDGLTRTALFAAANVMLSRSTQWTALKHWGVSIAKRSSLKKAKVAVARKLAVIMHRMWRDGSSFRWTAKEA

SEQ ID NO: 84955 - protein, 376 aa, unidentified
MAILVNGEKVHGYTIPNDAIGFNRLLGDLKTVHQPEIVFEATGVYSRRLQAFFEDNSYTYTRLNPLESKKQLDSLRVRKTDKIDAEKLAMSQFILNRKPSYVQEALYQELRDLSRFYQNLTEDIVCAKNRLHKVLQITFPELENILSAPTGEQYWNLVITFPCNSFVLESDDATLTAIIRQSTAKRISEKRVTYLVDKLTKLANQSYCAVKKTSPVIEEVKYYAGELLRLSEHRQGVVEEMVTLAQSLPEYEILLSIPGIAETTATSIIGELGDIRRFHSANQINAFIGIDLRHYESGNFLAKEHITKRGNPYARKILFKCIHNIASASHTNPCHIADFYEKRKRQSQVTSTKPHTIASIHRLIRTMYYLITHNKL

SEQ ID NO: 84956 - protein, 344 aa, unidentified
MYFIGVDHHKQVSVMTVLDEDGRELKNGRVANLRSHVDRFLEGCRPFTAVLEAGRASYVMADLLRELGGEVKMANPLQVKAIAHARIKTDKRDSRTLAQLLRADLIPEVYQRDEWNRRAQRVMRMRAYWVRKQTEIRNKIRVLLAQQREEIRLEVERREGKLFSLSGQEFLSRLALEGQDKLILDDLLQGHLEVQAHVQLSDGLVKALYGELEEAARIDTIPGFATTLSVLVAVEIADVRRFPRPADLHSYAGVIPSTYSSGDRTTHGHITKQGSVWLRWAVVEAVHPAVRKDLALGALYKRLARRKGPNVAKIAVARRLLTIIYRVLTERRDYIPGIMKTSAA

SEQ ID NO: 84957 - protein, 394 aa, unidentified
MKLVGIDVGKNSHHFCVMDKETGEFNVTPSSFSNNKEGFDFLINSLKPYSKKSILLGMEDTGHYHVALLKFLLSNGYTVALINPKTTDLTRKMEGAITKNDKLDTITICDVLDTPERKKQYRITKVDRFDLYEQRQLTRHHHNLKEELNIYCNRLQKSIDLVFPEFNTLFGSKYGVVYMNLLKTFGSAEAIASTDIRTIRKCFEIKGKGNRISLTPEKLKECAKNSIGISSEVETIQIKHLVSQIMLIKEQIAEIDKKIEELSITNNSPILSIPGISHFSSTSILAELGDIGNYSKPSQIIKFAGVAPYHYESSQYNAQHTAITKKGSKYLRKTLYQIILPVINNNPVFKKYYRLKISQGKGHRCAQGHCIRKLLRVIYHLLETGQSFDPALLR

SEQ ID NO: 84958 - protein, 387 aa, unidentified
MPQPNDLSRSLVALDQDSTIIAVVEMSQSSWLVAGMLPGIERQPRKKLEPSAERLLGLLHRWRDEAVKAGRQITRIALAFEAGRDGFWLARWLRARGVEAHVIHPSSVAVSREHRRAKTDRLDTELLKRGFLGWLRGERGHCTMARIPTIAEEDAKRPNRERECLVGERTRIVNRMKGTLARLGIRNFKPTLRKAAERLATLHTPEGSALPPNVSAELQRNMARLGVVVSQIKEIEGARQKRLEQEPETEPHAMVRHLARVVGIGIETADMLVNEVLSRPMRDHKAVARYAGLTGSPDESGAKRREQGLAKAGNARVRRGMIQLAWRFLRFQKESALALWYRARTADSRVGTRKTMIVALARKLLIALWRFVTTGETLEGVVLRPAG

SEQ ID NO: 84959 - protein, 345 aa, unidentified
MNIASVGIDPGKTTFHLVALGERNKVLIRKKFSRAQLLAYTANLPASLIGLEACAGAHFLGAALQGQGHQVRLIPAQFVKPYRKSNKNDFLDAEAIAEAVTKQNMRFAQLKTQEQLDWQALHRVRDRLVQRRTALINEIRGFLLERGITFAAQPIHLRKNLAAVIEDAEQNLSPRLRWLLDRMWQEWKQIETDIEAITEEIERISNEDARCRQLRQIPGFGPLVSTATVAAIGNGSAFRRGRDFAAWVGVVPRQYSTGGKQKLYGISKRGNIYLRRMLIHGARSVLFRVKYDTGGFGPWVHRLAQRALRNKVVVAIANKLARIAWAVLSSGQDYRHQPLLQPAAA

SEQ ID NO: 84960 - protein, 367 aa, unidentified
MNTLRYVGLDVHKDSIVMSVADSGAADAKVLAKLPNDTVKLLKQLRKLSPDISMLRVCYEAGPTGYGLCRRLRKDGINCIVVAPSLVPQMSGLRIKTDRRDSKKLAHFLRSGDLTEVWVPDEQTEALRDLERARDDAKNAERRARHQLSKLLLRNDRIYRDGKEWTVKHMRWIRQQKFEDACRQCVLEDNIKAVDDATVRVKDLMKNIEKFVEGHALRPLVKALMAFRGIDTLSATVIAAEIGDLRRFRTASQFMAFLGLVPSERSSGGSVKRGSLTKTGNGHARRILVEAAQHYRHRPVHSKALRKRQMGVSPEVIEISWAAQQRLCSRLTHFTNSGKPRNKAIVALARELAGFIWSVGQLPELLT

SEQ ID NO: 84961 - protein, 463 aa, unidentified
MMKKRKLASKAEKPRREKVDWKTLEIVHPDAAGIDIGGREHWVAISPDRDEDPVRRFDCFTADLEQMAKWLVEKGVCSVAMQSTGVYWMPVYEVLEQSGLEVYLVNARHTKNLPGRKSDVQGCQWLLKLHTFGLLNNSFQPTDEIRVARTMWRHRSSLVAQAGGAIQRMQKTLTEMNVQIHNVLSDLSGVSGMAILKAILKGERDPWQLAAFANPAVKASPADIAKSLHGNWREELLLVLRHEMELYQTYQDKIAECDHQLRKHLQSLASRVDLQAQPLGARPKGKKAPRGNTPKFDLRSELYRITGIDWSQVNGIDVQIAQTVITEVGVDLSSFPSERHFASWLGLCPMNEQSGGKILNRRTPKVVNRATVAFRLAAQGLLRSQSYLGAQYRRLRTRLGAPKAITAMARKLACLFYRLLRHGQPYVDKGAQYYESRYREQQIRSLTKRAHKLGLELVEPKPA

SEQ ID NO: 84962 - protein, 351 aa, unidentified
MEARTVNNLPPAGTHDDAICCVLAIELSKKSWIVAVNTPLLDKISRHTLKPGDGKELLDLCERIRTRVARETKKRVEMVSCYEAGYDGFWLHRLLEAHDVRNHVIDPASLQVDRRARRAKTDRVDAERLLRSLMAYLRGEPKVWSVVRVPSVAEEDDRRLHRERGRLINERIQHVNRIKGLLAIHGIYDYQPLRRDRTQRLERLRTADGRTLPPRLEAEILRELQRLELVIGMIKTIEAERDAIASANTETERRGAKKVQHLAKIKSIGPEFATTLVGEVFYRSFDNRKQLASYVGLTPAHFQSGAMCRDQGISKAGNAKARTVMIELAWLWLRHQPDRAGGRFNRLLWLI

SEQ ID NO: 84963 - protein, 402 aa, unidentified
MKKVCGLDVHKDSIFCAIYNGENYSQVKEFSTMTPNIYSMGEYLQSEDVEDVALESTGIYWIAVWDLLYEMGFNLTLVNPYFIKQMPGRKSDVKDAQWIATLLHKGMMRGSFVPPPVIQELRVYSRKQGKLKQQVTRVLTIMDGILVKSGIRASSCLSSISSKSFLCIVEALIAGWSDPGYLVSLVYGNRKNKQSGKLKEALTGNLKAYHRQELSWAKQEYEMYQVQISECLSEMRRICDEHFSVMVKLLQTIPGISQVAAMTIIAETGGDMSVFESSDKIVGWAGLRPRNDESAGKYKSTATTKGNKYLRSILVQVSWAASRMKGSFFKDKFQRLAMRKPRKKALIAIARKLLVVIWNVLQYAKEYNPRLVPVQDPVKMKARLAYHKKEYEKAANLLNITV

SEQ ID NO: 84964 - protein, 421 aa, unidentified
MSNVTEFGKKVKDQEKKLMENVSWVVGIDIGKEKLSCALMDIKKALICRFDVEGSLAGYNELLNRVKKETKGSGKIIFALEPTGHYWMVLGQFFEDHNQSYVLIHPLVAARSREVHRLNKGKTDSLDARLIGELACDRSITRTQIPEDYWATIRFFAREYMDREKEIAREKNRIVSYLETTLPGFVEIFPKPLCMSGRACLRFLANFREASKGDMEHFEMQIRKHFPGKRLMTSRVRRLYDMLQRGDVLGLRAGRQAMFFRIIHSLNRLEMYEGQEEAAKQAMLDMYKKSEYKEYLDSIWGTTPSVNALILGFMGDPALYDSPASLVKLAGCDPVPNESGKFKGRASISHRGRSLLRKAGDRVSFLLEKRNSVFRAFFNHLMSRQKNKFTKRQARVACINKYFRIVWVLCHYRVPFNPALA

SEQ ID NO: 84965 - protein, 339 aa, unidentified
MELYAGLDLHSRNTYIGIMDKAFNRVFKKRVPNHLELILQTLDPFRDQIKGFVVESTYNWYWLVDGLMDAGYSSAHLANPSAIKQYEGLKHSDDQHDAFFLAQLLILGILPQGYIYPKKERPVRDLARKRLFLVRHKTAHILSLQSLIQRCCAVKVRANDMRHLTVKELEAWLEEEYLVLSAQANLDSINFLKQKIQGLEKAIRKKVRLDKAFHNLKTVPGIGDILALTIMLEVGDINRFPKVGNFTSYCRCVPSRRLSDGKSKGSGNRKNGNRYLSWAFTEAVHLGRRHNERFRRYYNRKVAQANTSLATKALGNKLARICYYIMRDQVPFRKELFCQ

SEQ ID NO: 84966 - protein, 344 aa, unidentified
MALADLRKLAPGESPACSWRTETIMAKQVEQRIIGVDVAKSWLDICDAEQGEATRIDNTGKGIDAWLRGLSGPVWIAVEATNRYHERFIEQADAQGHWIYVIDAFRLSRYRDAVGHRAKTDRCDAELLARYLQQEQGHLQRWKPRDPRQARLWRLLKRRATLVQTKTRLRLSLADIGALDDAAQDLISHCQRLIGKVDRELQLQARQLGWQPDLQRSRDVPGLGPTTSLALVAAFYRHDFRSADAFVAFLGLDVRVRDSGRFRGRRKLTKKGDPEIRRLLYNAAMAGCRDPHWNPYYQSLRDRGISGTAALMILARKMVRVCYALLQQQVSFDPGIRKTPCPAT

SEQ ID NO: 84967 - protein, 332 aa, unidentified
MNYELFVGIDISKLTIDAVAFTQETLKNPIHSVFNNSYEGFTEMLEWLTTYDISLERVLFCCEHTGIYICPITAFMDINGLSLWVENGLHIKRSVGIKRGKSDKADALAIAHYAFSNRYMARIYRFPSETTSKLKRLLAHREQLVRHQTSLKCTCSELNGFDRENALYCIADSLDLLAIYAERIKKVDAELSTVIQTDPELDTQFNLVQSVHGIGKQTAFFILIHTEAFTAFSDYRKFASYCGVAPFPYASGTSIRGRNRVSSLANKKLKALLTMCALNTIKKDNEFKRYYDRKKAEGKNSMCVLNVIKNKLLSRAFAAVKRGTPYVAELAA

SEQ ID NO: 84968 - protein, 416 aa, unidentified
MNTTTLFVGIDVSKHDNTVRFMDGGGDTLLLFSVPNNADGAAKIQDKLRYTLLHTDYSKVTVGMESTSVYADHLATYLRHDEFLRKWECTVYVINAKNISRFKESYTELPKTDNIDTLIIADYLRFGRLPKSVCHDEKYLALRNLTRARFQAAQNLSREKARFLETLFQKFSSLESAKVFSNTFGATALAAACEFLTVDEIIYKPIDELADFVNRSGKGKFADPEAVAKALQAAARSSYRVSRTVNDSLNQLLAVRLVGIRSIEAQIKSLDKAIESYMAAFQNVLTSVPGIGPVYSAGLMAEIGDIKRFEGHAALAKYGGLAWKRHQSGGFEAANTKLNTTGNRYLKYYLLEAANTVRLHDAEFARFYRVKFREVPKHQHKRALALTARKLVRLVYSLLSTNRLYTPPLTGVYESL

SEQ ID NO: 84969 - protein, 432 aa, unidentified
MTQPLTATTANVELAAIVGIDWADQKHAVCLRSADASRCEHSTLEHTPEALTEWVAQLRARFGGRPVGICLEQTRGALLYALMVHDFLVLYPIHPTSAKRYRDTFAPCGAKDDPVDAHLLADFLCKHREQLRPWHPDEAPTRQLALLCEHRRQMVNERTKLVQQLTAALKAYFPQALDWAGESLATPMACDFLQRWPTLAHLQKAKPHTLRKFYYAHHCRRLDRISEWLAQIPTAQSLTTDPAVVNAYALLAVTLARQLRSLLPSIAAYDQQIQALFATHPDAPLFLSFPGAGDCLAPRLAAAFGTDRTRFANAAAIQQLSGVAPVTRRSGKSCRVSRRLACAKFLLQTFHEFAGCSIKLCAWAQAYDESRRAAGKGHHAAVRALAFKWIRILWRCWQDRTPYDEQRYLGSLHRHGSPLTSKLPQPILATHV

SEQ ID NO: 84970 - protein, 319 aa, unidentified
MKIYVGVDVGKFNLDIYYLNKHFQITNDSTGIASLLEDFKNNIPTSDNIVVICEATGGYEQLLIKTLLKHAISFHIAHPNKVRAFAKTQGILAKTDRIDAIILRDYGELIHPQPSKNLLSESANTIRSLIKRRDQLLDDQRREQARLDKLTLPDVKNSVQSHITWITQEINNINAKIEKASMEDTIKQQVELLTSVPSVGNFTALMLISYLPELGNANGAQISALVGVAPFNKDSGRYKGKRFIQGGRSMIRKSLYMSAVSSIRWNPDMKSFYTRLRKSGKPAKVALVAVMRKLLILLNNIIKRQTPWEINNPKKLFMA

SEQ ID NO: 84971 - protein, 340 aa, unidentified
MEHVAGADLHKRVTQLALLRDGRPPLQARFPNDRTSVEGALSRLPAGTTIAVESTGSWWWFVDTARRLGHDVVLSHPKLTKAIAAARLKSDKVDAVMLARLLKADLLPLVWIPRERDRHIRELLAHRGRIVRTRTAVINELHAVYGKRNLEVPRARWHRHQPAPWRPDELGGYGSRIVDEDVALLTAVNEQLSGLDKALKELAQEDLEATRLMTHPGVGALTAVAIKAWVGDIQRFASAKHLVSYFGLAPRVRQSAATERHGHITKEGNRMVRTLVLQAALSAVRHTSGPVRGHYLGVLKRRGKKIARIAAANKLLGVLFQMMKQRLTYAELHQRGDSPR

SEQ ID NO: 84972 - protein, 341 aa, unidentified
MKRLSVGVDVSKKTLDVAYWAQDESESVFVGKFANNHKGFQAIQQRIEERSETIGATVIHLVMEPSGGYEQPFAHFAHQAEWKVSLPNPLHPKRWAESQGKRGKTDQQDAKNLAHFAFVNDPLTWKPLPPEVEQLSHLLDRLDNLKKMLSQDKNRAQSAEYHVNGDKAVLDDMKEVIAFLEQQIQKLQEVIKEHLKAHPHLKKQRKLLLTVSGVGDKNVLYILVMMHRWGVLTDGGGDNKGLVAYLGLDPKHHESGTSVRKRSGISRQGNKDMRSRLYMSALGGIKAKNSPLTTFYKRLVVEKGKPKKVALVAASRKILVWSWAVFKSETFFDTARLEHNQ

SEQ ID NO: 84973 - protein, 337 aa, unidentified
MYYTGIDLHKKTSFLTTIDSSGQIVKRSNLANQEPMILEYFLELDDDTQVVIESTANWYWLYDLLTEHGMPVVISNPVKTKAIASARIKNDKLDSHMLAQLLRADLLATVHVSSHQTRQLKELLRHRSKLVRDSVRLKNRIHSIMAKNNFTVPASDLFGKKGLVFLSQAELPLYQRQQVDTYLELYHQLKGHTEALTKEVKRYAKDDPMAQLLMTIPGVGAITAMFMVAEIEDISRFKSYRHLSSYAGLVPRLDASADKQRIGRITKQGSPYLRTALIEAAQAAARTSSRLNVFFRRRIVRSGYQKATVATAHKIVQYAFYILRDQRAYQDRIDALA

SEQ ID NO: 84974 - protein, 423 aa, unidentified
MMRLIYPICCGLDVHKNVIVATIVTTNGSGISEYNQKSFSTINSDIQKFHDWLMENNCKHVCMESTGKYWIPIFNYLEQDMDICLTHPKYVKSIKGKKTDKKDSKWIADLYKFDLVRCSFIPPKDFRGLRELARYRFKLVCMKSSEKNRIQNCMTISNIGIASILSDPFCKTATEIMTYLLSNTSETIDDKAVRKLIKKKANAKSDEIIEAIKGYNIETDQAKKLELARAHLDYLDDMITQTEVELYVRIKPYYEYVELISALPGITELSATIVLAEIGVRMDIFDNAKHLCSWCGLSPANNESAGKKKSVRIAKAGAYLKPLMVQCALAAIKSKKQPYFAIKYGRIRKRRGHKKAIIAIARMMMVCIYHMVSEKQPFNPTDYEELMDPHYNQPKVTLNDANVFEYLKSQGYDTSLLVKCNDN

SEQ ID NO: 84975 - protein, 385 aa, unidentified
MRSELFIPAQYEVFAGLDVAKRSISVTFTNHQGFIRSLRMPYSVEHLLNHVRKHFPEQKVAFAYKAGPTGYGLYDGLVAQAYPCLIAAPSMLPKAPGQRVKTNRLDSRGLSENLRGGQLKSIHVPSPLYRELRHLTQLRATFVSEVVAMKLRLKSLLLLEGSPFPPAPPGSQGSFRVKKTLRELPCAMTVRFKLEQLLDSLEFNEQQILKTTKESRRFCQQDPELSQCIRYVMSVSGIGWIVASQLLARIGDWRELKNIRQLAGLLGLVPTENSTGERTERGSITHTAEGRLRSQLIQASWSAIRQDGELREFFRSVCKTPARHLASRVAIVAVARKRRGRISVVLMKHRPYVVRQQIHSAPLTQEETGPQGTTRRPAEPGEKNS

SEQ ID NO: 84976 - protein, 481 aa, unidentified
MGEKKSAPRGKSGHGGKRRGRGVPKTLQVVNPDAAGIDIGAESHYVSVPEDRSTEPVRQFGCYTPQLEEMAEWLLECGVKTVVMEATGVYWIPVFRVLESRGLEVLLVNPKHVKHVPGRKSDVADCQWLRQLHTFGLLRGAFVPPQDVAAMRTYWRQRRTLVEAASREILHMQKALTQMNLHLHVVLSDVTGVSGMKILRAIVAGEHDPVQLASLAGTQVRASREEIAQALSGHYTGEHLFVLGQALELFDVFQAKIRDCDGQLAIHLSRFEGKAGAGAPPSNPKRSRRVSRRKNEPYFDLRAELWRLTGVDFSRIDGIDSLTAFTVLSETGFDVSAFATEHHYASWMGLCPNNSITGGRVKRRHTRRVINRAADALRVAAQSLWRSKSYLGAYYRRLAARMGAPKAITATAHKLACIMYRAVKYGQQYVDKGEQYLEDQHRKRNLKSLVHRAKELGYMLVHSETGECLPLTNQPLTPCVS

SEQ ID NO: 84977 - protein, 420 aa, unidentified
MKAWKDIMYYGGFDWARDHHAVVIVNTQGTIVADFEFKHSPEGWKSFGAKMAAYPALAIAIETTQGAAVDHLLQRGYTVYPVQPTASKSYRLRKVPSGTKTDHFDGWGLADALRVDGHGWKALQPVDPLVQRLRLLCKDQVALISQRTLLVNQLQQALMEYYPAALEAFGDWTKPSTWDFILQFPTPQTLTDAGRRRWEKFLHTHRLWRSKTVENRLTIFAQAQAFQGSEPITLAKSHLAVALCKMLRTLHEQLQQYRLVIEKLFQEHPDHHLFGSLPGAAAVLAPRLLAAIGSDPDRYTSAQVLQCFAGTAPVSYQSGQLDKTKFRRACDKFMRHTVHLWADCFRHASAWGQAYYQKKRDEGMTHACALRCLGQRLLKILFRIIKDKQPYNAELHARNQVKHGSWVISLVQKDAHPACA

SEQ ID NO: 84978 - protein, 324 aa, unidentified
MPTCYVGIDIAKASFTMASAQPNGRFLDFQLPNSPAGFAQTLALLPLGAQLVMEASGPYYLPLASYLHQAGWALSVVNPLIVRRFAQMRLRRTKTDKADARLLSEFGANQRPQRWQAPSQLMSQLTQLQTLLEQYIKQRTALRNQQESFTHSGVPNPILEQSLQKSLEHLDEQIQTLEQQLDQLATSEYASLHANLRSIPGVGPKTALCLLVLTRGFSRFSSAKQLVSFVGLAPRIFESGSSVRGKAHICKLGSGRIRQLLYMASMQAKKANPACLALYERLVASGTPKLVALIAVAHKLVRQCFAVASQGVKFDPKAALPLVS

SEQ ID NO: 84979 - protein, 412 aa, unidentified
MEVVHPRCCGLDVHKRSISACVVIREHGRIEKLERRFGTFTRDLEDLAEWLAQHQVTHLAMEATGVYWKPVWNVLEGRVDLMLVNPQHIKALTGKKYDRRDAAHLADLLQHGLLQGSFIPTAEIRQLRDLTRNRARTVQEAARIKSRIQKVLEEANIKLGSVATDVLGVSGRLMLNGLCAGEQDGAKLADLAIGVLRKKHDQLVQALSGRVHDHHRLMLHKLLRALQTREAEIAEDDADIRRQIEPFGKAMLAWMQVPGIDEVTAWSLVAEMGPDMEPFETPEQAASWSCVCPGNHESGGKQGNGRTRKGNPWLRSAICEAAWGASRTKKSYFHAQYARICARRGPKRALMAVAHSMVVVGFFLVKHNLKFNDLGADFFDRRNRERATRRAVKRLNALGYNVCLEQAGSAPP

SEQ ID NO: 84980 - protein, 421 aa, unidentified
MTPSISPTVERHLAVDLHKHYLVIGGVNARQEVVLSPRRVELDEWLTWATAHLKPSDVLVVEATTNTWWFYDQTHAFVGQVLVADPRKIAWIAQTKVKTDAHDVMKLARLSAAGLIPLVWVPPLAVRELRALLAHRRRLVRTQTVLKNRLHSLLHRLQIAPPEGDPFCAKHRAWWQDLAVSPTEKLHVKHDLATLDQVVEQLGEIDDELRRLSCAEPWSDVAPYLLHLPGVGLIVAMTILAAIGDITRFPTSKKLVGYSGLAAGVHDSGQTHRTGHITKEGRKELRYVLVEAAWHAVETNDFWKAEFERLCRRMEKNKAIVAIARQLLVVIWHVLTERAADQHADPDMVAFKLMTWSWKLTNEQRGGLTTRQFVRYQLLRLGLGHDLTHVLRGGGKYLIAPPDEVLKLKPELSHHLNVAHR

SEQ ID NO: 84981 - protein, 403 aa, unidentified
MGEIAGIDWASEEHRLSLVDSEGRRLLERRVSHDEEGLNGLCRLLGERGVGRVAIERPDGLLVERLLEAGLAVVPVHPNALAAARARYQVGGGKSDGFDAYVLAELARTDMHRLRVIEPDCDETKALRALTRARQELVRARVSLANQLRAELERFWPGAARIFADVDSPIGLAFCERYPSPEDARGLGEKRLQRFLARQRYSGRRSPVELLERLRRAPHGCNGELELEARRTVVLRLVCSLRPLVEGIQQLDSEIAHAVRAHPDGAIFLSLFRDPKTSLTAAELVAEIGDSRARYPGSAALEADAGMCAVAVESGKRRSASFRRACDHRLRDAVATLADASRHHHPWAADVYRRARARGCDHPHAIRILGRAWLRVIWRMWQDHTPYDPARHGGLQRLVAQGG

SEQ ID NO: 84982 - protein, 332 aa, unidentified
MSIVSTVGIDLAKNVFSVHAVDAQGTTLVRRSLSRAKLSELVAQLPPCLIGMEACSGAHEWARRFTAFGHTVKLMAPKFVTPYRKSGKNDGNDAEAICEAVARPNMRFVPVKTVEQQSDLSLHRVRQGFVEERTATFNRLRGLLAEFGHVLPVRTSELCRRVPQLLDKLPSRLAGCVRDLLEHAEQLQAKALEYEREIKAHVHSNALACRAQTRLGIGPITASALVATVGNGRDFKNGRQFAAWLGLVPRQYSTGGRTRLGHITKRGDSYLRTLLVMGARAVLQRAATLTDPLSRWALAVRERRGYHRACVAIAAKNARVAWALLSKEPMPA

SEQ ID NO: 84983 - protein, 316 aa, unidentified
MSDAQVFVGIDVSKAQLDVALRPTDDCWHVSNDELGIAGLVERLRTVQPTLVVLEATGGLEVPVTGALADAGLPVVVVNPRHARDVAKATGRLAKTDTLDARGLAHFAEAVRPTPRPLPEAQAQALSALLTRRRQLVQMLTAERRRLQTAPQPIRADIQAHITWLACRLARTDDDVAAAIRSSPLWRAKDEILQSTPGVGPILSRTLVAEVPELGVLNRQEIAALIGVAPFNRDSGTLRGKRAVWGGRAHVRAVLYMSTLAAVRHNPVLKAFYERLRSVGKAPKVALTACMRKLLTILNAMLKHRTPWQENYANHS

SEQ ID NO: 84984 - protein, 360 aa, unidentified
MGEITRVGVDLAKRVIQVHAVDETGRVVVAKQLQRDGFTAWCAQLPPGCLVAMEACSGSHHWGRRLQAMGLQVKLIAPHFVSPYRLSGKTGKNDAADAAAICEAASRPSMRFVPVKSVEQQSTVALHRLREGYKEERTACINRIRGLLAEFGLVFAQRPEVLRAALPEVIEDASNELGAVARTALQRAHLHWIELECHIAWCDERIAMHVRSDEQAKAASKLCGIGPITASALVATVDDFKQFKNGRQFSAWMGLVPRQSSSGGKSVLGEITKRGDEYLRTLLIQGAKSAVFTAHRRSDRLSRWIVQLRERVGWQKAAVALANKHARILWSMLVNGQSFDPEHVPTKHPVRSLAALPAAS

SEQ ID NO: 84985 - protein, 373 aa, unidentified
MKKRSSSQPSQKRTMKAKRTQESVTIGVDLGDRSSRYCMLSSDGEILREGQVPTTKAGMMATFGSWGRVRIAIEVGTHSPWVSRLLAGLGHEVIVANPRQVKLITESTRKDDRLDAQTLARLARIDPQLLRPIQHRSEKAQTALMVIRVRAALIAVRTSLVNTARGLAKAMGERLPKCDADQMGVLKAESVPAKLRQLLEPLLKEVESLTEKIKDSDREIEQIAREDYPETELLQQVGGVGPLIALSFVLTVDDKNRFQKSRDIGCYVGLRPRRSDSGQRQPQLRITKEGDPYLRTMLVQGAHYILSRRGPDTDLKRWGLRLAERGGKRGKKKAIVAVARKLGILLHRLWVTGEVYEPLRNQNLRELQKKVAA

SEQ ID NO: 84986 - protein, 329 aa, unidentified
MYVIGVDVSKAKLDCALIVQVEPMKRRQKVVSNDPQGWAKLLEWACQNAHCEPGELKLVLEPTSSYHEAVAHYGHDRGARVWIINPKQLRDFAKGLGVRSKTDALDCSVLAQFGLKAQAVDWMPAPLPLRELHALLRRLEDLQQTLQAELNRVEAAQARQAPALVMDSLQSSVWFLEQQIKRLNAQIDQHIDAHPQLKADYELLRSVPAVGPSSARVMLVKLRGRAFDSAAQASGFLGLRPVHWESGSSVRKLPRLGAHGDRLARRILYMAALTAKRTNPDARALYERLVAAGKKPMLALCAVMRKLVHICFGVLKHQRPYTSQIASSD

SEQ ID NO: 84987 - protein, 394 aa, unidentified
MEAVTSQPHTPAAIRTDLAAIFVSLELSRSTWLITSLSPGNGEKMSKHSVAGGDVAALLHRFAQLQEKVRSRTGDQVPIVSIQEAGLDGFWIDRVLKANGIESYVVDPASIAISRRRRRAKTDKLDGEALVRALLAFKRGEPRVCAMVNPPSPEEEDRRRICRERKVLIAERVKHVNRIKGLLFGQGISGYEPLRKNRRKQLDELHTGDGRPLPTHLKTQISRELDRLELLLEQIKAVENERDTLLAAQKDSVAATATLIPAGAMLCDVKGIGLELAAVLWTEGLFRHFDNRRQAAAYAGLAPTPWQSGTIDHEQGVSKAGNPRLRTTMIQLSWLWLRHQPQSALSLWFTARVQSSGGRTKKSAIVALARKLLVALWKYVTAGVVIEGAVLKTA

SEQ ID NO: 84988 - protein, 348 aa, unidentified
MRFYTQQHRYTCGIDLHARSLYICILDDTGQKLVHKNIKASPEPLLKLVAEYQDDLIIGVECMFSWYWIADFCEDHGIEFVLGHALYMKAIHGGKAKNDKIDSEKIARLLKGGMFPYAYVYPRGLRSTRDLMRRRIKLARERGDLMAHIKNTLSQYNLPAHPENLRYEKQREPMRYAFPDPSVQRSIDLDLARIDFYDGQLAKLEWYLKRTAKSFDPKTVILLKSVHGIGDILSLVILYEIHDITRFPRVQDFVSYCRLVKCQRESAGKIHGTAGAKIGNPYLRWAFGEAAALFLRGNPDAQHWLEKKTRKHNKAKALTILAHKLGRAVYFMLRRENLFDQERFLASR

SEQ ID NO: 84989 - protein, 397 aa, unidentified
MIAVGIDISKAKSTFAVIDSDGTVLASPFTMAHTQPEMEAFVSYLKGLGEPTTILMEYTGHYHYPVLKKLQDEGFPVCIVNPYQMKKYGDVEIHKAKTDKKDALRIAAYALEKSYKLVPYSSMEQKYEDLKFLSRQYNQRISYVAKLKVQLIALLDQTMPGITRILPLNSRNPEKCALLLFIKRFKSFDEIQRIGKARFLASYDVLAKKASERSASSKGLSIYELAVDSITTRGEDPYIWLSQNQCVDLLSATQNAADEIISQMRNIAETIPEYKVLRAMHGVGDRLGPIILAEIGDVHRFHSGKALNSYAGNDAPPYQSGQFESRNRHISKRGSSALRKACYEVMQALKLIKPQDDPVYLFMLKKEQEGKPFNVAKMAGVNKFLRIYYARAMELYK

SEQ ID NO: 84990 - protein, 343 aa, unidentified
MYYIGLDVHKRTISYCVKDAAGHVHQEGKIGSTRRELDAWIKTLPQPRTIAMEATIFTGWIYDHLLPHAEKVKVAHPLMLRAIAAAKKKNDRIDAGKIADCLRCDFLPECYMTSTAIRDRRRTLRYRNLVLKQMVQMKNRISGLLMETGVSYNKQRLHKLGYFTELISGNEEVDESIRPLLKLSRETIVRSQRLDYALVSSLERDPLLGERLERLRTIPGVGPITALTWALEIGDVSRFQSIKQAISYCGLCSAERSSADKLVRMPISKQRNKHIQQVLVEAAKLAPRYNHELALVYEREQQRGNKNRATLAVARKMVAYMVAVERRKQNFVLKGEFSGTAAA

SEQ ID NO: 84991 - protein, 349 aa, unidentified
MNNMNYLGLDVHKKTISYCLRQADGTILREETIEATREALSALLESMPQPWSAGLEATMFSAWIYDHIRAQGGGTVKVAHSTMLKAIAAGKRKNDRLDARKIADLLRCDYFPECHMASPEIRNRRRVLRYRNLLVRQAVRMKTKVSGLLMETGIPYNKSKLHSKKYFYQMLEEQRSEMPESLPELLQLSRTSIETLTRMDYQLLSALEHDRLLAARVERLRTIPGVGTVVALTWALEIGDVHRFASLKKVVSCCGLCGAERSSAGKQRRTPISKQRNHHLQTVLVEAAKLAPRWHSELALVYDREKQRGNRNRATLAVARKLAAYLLAVDRGEREYQETAPSHEVCRVA

SEQ ID NO: 84992 - protein, 343 aa, unidentified
MGEVSTIGLDIAKSVFQVHGVDVDGAVVMRKRISRAKLLEFFATLPGCLVGVEACPTAHYWSRRLGALGHTVRLLPPSYVKAYLKRSKNDANDAAAICEAVTRPSMRFVATKSEQQQSGLMLHRSRQLLVCQRTMLSNAIRGHMAELGIISAKGRNGTAELLKIIADEQDDRIPAAARFSLNVLARQYAVVRTEIAAIERRIHAWHRSSEESRRLEEIPGVGPIVATALVAEVGDWKVFSSGRSLAAWIGLVPRQHSTGGKERLGRISKQGNRHLRWLLVAGAMAVIRYARQHGTKRPWLARLMDRRPIKVAAVALANKIARMAWAMMVRGERFKEPKLLPAA

SEQ ID NO: 84993 - protein, 355 aa, unidentified
MSGLKHQKEKRSMDHFAGLDVSVKETSVCIVDETGKIVREVKLASEPDALVAVLKNPSYHFKRIGLEAGPLSQWLYGALAEAELPVICVETRHMRAVLKAQINKTDRNDARGMAQMMRVGLYRPVHVKTLRSQKLRMLLTHRQLLLSKAIALENDLRGTLRNFGLKVGMVGKVKFEARIRELVENLPDLAVLVEPMLIVRRVLREQIVILHRRLLAIVRDDEVCQRLMTTPGVGPVVSLTYRATVDIPARFRKSKSVGAVFGLTCAKYQSGEVDWDGRISRCGDEMMRTMLYEAAQAMTRSKKWSWLKAWAMQIARRRGMKKAIVALARRLAVIMHRIWVDGTEFRWTREQAVAT

SEQ ID NO: 84994 - protein, 387 aa, unidentified
MPQPNDLSRSPIALNQDGTLIAIIEMSQASWLVAGIVPGSARHPLKKLAADAAALLGLLERWRGEATQAGRQITRVAVAFEAGRDGFWLARWLRARGIEAYVIHPTSVAVSREHRRAKTDRLDTALLKRVFLGWLRGEPGHCTMAAIPTLEEEDARRPNRERESLVGERTRIVNRIKANLARLGIRGFKPTVRGASERLEALRTPEGAALPPNTQAELRRDMARLGFIVGQIKEIEEARQKGLATQPDQGPHAMVRLLARVIGIGIETADMLVHEILSRNLRDRRAVARYAGLTGSPDESGSRRREKGLARAGNARVRRGMVQLAWRFLLFQKDSALAQWYRARTADARGGTRKTLIVALARKLLIALWRFAATGEAPEGVVLRPAS

SEQ ID NO: 84995 - protein, 452 aa, unidentified
MELDIINPNCAGIDIGSKSHFVAVGQALEDVKEFGVYADDLTAICLHLKDYGITSVAMESTGNYWQNLYVELERHGMEVTLCNGKFTKHAKGKKTDVKDCRWIQKLHALGLLTGSFLPDETTEHLRTYCRQRTNWIDIAAEASHKMQKYLRLLNFRLDVVVKDICGLTGLAIIADICKGNLDPEKLAEHRHGNCRKSQEEIAKALKGNNRIDFLFGLKQEYDSYLFFQKKIDACDVQINSFLKTEINTHPDKKKLQTDNKTYKKVNKNSLKGIDLNQAAYQYFNGVDLMKIEGLSHSTVLTIMSEVGPEGFPKFPSSKQFTSWLRLAPNNKISGGKILSNKIPKGSNRLKIALRHAANAIGNLKDTHLSDFFKRVAYRKGRATAVSATARKLAVILWNMITKKIAYNPPIEYLFLDQKRKLRLVTKIKKSITKFDLKPDDLGFADASLSASL

SEQ ID NO: 84996 - protein, 331 aa, unidentified
MEKKDFLGIDVSKLTIDCHLHMMQVAKQFKNAKSGFKSMERWLKQQTNLSLSELVICFEATGSYSFELTRYLADDNLEFTVDSGYRISRTLGLVRGKNDPVDALRIAEYAYRYADKLRVYQMPSDDLIQLHKLYNLRRKLKKDLAGYRTRLKEEKRIDFFNIPVLNDPQIAVIEALKQSVADVEKSMEAIIRGNSELQKNYDLLVSIKGVGFVTATLVIALTANFTLFDDPKKFASYSGTAPFSYQSGTSINKGKRVSKLANAEMRSILTQGAKSARQHDPELKAYADARAKAGKSPMSTINILRNKLISRMFAVIRKQKPYEIRVPNTAA

SEQ ID NO: 84997 - protein, 348 aa, unidentified
MNATIVAVDLAKNIFEFAVADADWHIAQRQRLNRAKFFSFFVQLAPCQVVMEACGSAHYWARRIAGLGHTVRLLPAHYVKAYVRRNKTDQADAAALIEAARCAEIRDVPVKTVEAQQIQSLHRLRSQWMSTRQRYVNTLRGILREFGSAIPLGVNVAKEQIGAALADPDSEVPQALRATLAEMLQEIRLLEEKILGVERQLNALTRADVRVQQLRQIPGIGALTSTALRAIVGDIQRFPSGRHFASWLGLTPNERSSAEKRRLGKISKQGDTYLRTLLVHGARSALLAAHRAERAGHSLDHLRRWAINCERERGHNKATVALANRLARIVWATWKHERPFDGNWSEAA

SEQ ID NO: 84998 - protein, 413 aa, unidentified
MDVLHPKCCGLDVHKNSISACILVQVAGRVQKHQRRFGAMTQDLQELANWLRQFEVAQVAMESSGVYWKPVWNILEGQFTVVLANAQHIKNVPGRKTDQKDAEWIAQLLQHGLLRPSYVPCEVIRDLRDLTRMRASLSQEASRISSRVQKVLEDANVKLASVATNTLGKSGRAMLEEIIAGQNDPEYLASLALGHLRAKTPQLRLALEGKIRPHHRFLLRRLLDQLRFVEHEIVLLDERLEDIGRERPELSQAVARWDTIPGIDRVAGWTLLAEVGHTMAQFPTAEQLASWACLCPGNHESAGKRLGGTTRKGSPWLRRMACQCAWAAARTKNTYLSAQFRRVAARRGSKRAIIAVAHSLVIIGYYLQKSQRNYEDLGGDHFDRIDSDGLKRYFIRRLEKLGHKVTLVPIKAA

SEQ ID NO: 84999 - protein, 397 aa, unidentified
MSAVVGIDVGAYKHAAAVCRSGEREAERNVLRLSADRAGFDELDRWLERQGPVERVVLESSGHYYWPLASHLHRRGYGVAVVNPLQAKYFAKSRLQRSKSDPADARTLAALGMSEEPRIKDPLLGAEAKEAARFWGGLVKEQAQLRQKLLRLVEIGFPELKECFEDPLCETALAVLREAPTARAAVRKRVSTLAETTRPGGRRRLGENKARRLHELAEKTIAPPELDAQMSFEVGMLIQQFDLLDKQIEVAEQRVAEVLDSELARRLQTIPGVGPALAATFIAEIGDIWRFEDFDQLASYAGVHPKEQSSGTKGQNPETSWHMAKTGNSYLRSAAYKMAVVGTQHNPVIRAHYLRKRAQGKTAMNALGHSMSKALAIVWGVWRSGGDFDPNLGGPRT

SEQ ID NO: 85000 - protein, 347 aa, unidentified
MNFYTQQHKHYCGIDLHARAMYVCMLDQAGTILIHKNLPTTPEAFLRVIAPYREDVVVAVECMFTWYWLADLCAKEGLAFVLGHALYMKAIHGGKAKNDKIDAHKIAVLLRGGMLPQAYVYPAEMRATRDLLRRRCHLVRKRAELLAHIQNTNSQYNLPEIGKQLAYKANRAGVEEHFLDPSVRKTIEVEVSLIDHSDQLLGEVELYLTRTAKAHDVQTFARLHSVPGIGKILALVLLYEIQDLPRFPRVQDFGSYCRLVKCAKESGGKRLGTSGKKIGNVHLRWAFAEAAVLFLRQNQPGKEYFAKLERNHGKGKALTVLAHKLARAVYYLLTRAQAFDLNRFVPA

SEQ ID NO: 85001 - protein, 343 aa, unidentified
MTIVADRYRFVTGVDTHSKKHQYALVDHTGRLVDERSFPTSPAGLARATRWLTDLTGGQTLLASIDGAGSYGKQLADVFTGTGVDVVEAPRVRYRPAGKDDRLDARTAATTVLPMDTDRLTDRKTGAERDAIQVLLTARAEMTRERTRTLNALTALTRRFDLGLDARKALTTRQITTIAGWRTRPTDPIDARTARAEAVRLATRARALTRELAENKTTLHHLTTGLVPHLLAEPGIGPVTAAQVYASWSHPGRVRSEAAFARLAGVAPKPASSGDRIRHRLDRSGDRRLNAALHRIVITRWRTHPETLAYIARRRTEGRTDRDIRRCLKRIIARHLYRLLEAG

SEQ ID NO: 85002 - protein, 367 aa, unidentified
MSSITYIGLDVHTSNYTICAYTIENDKTFAETTIKPDIKELEKYLNRLKELQGENSRFICGYEAGCLGYSLYHQLTVKGYECIIIAPTTMPKTPNEIKTDKRDARKIAKCLACGTYSKVFVPSSDDNAVKEYVRMRDDAKTMLKQTKQQIIALCTRHNKNYDGKTNWTQKHIDWLKHLELGNDILKETLTEYIITLEQLTDKVERFDKRIEEIAQQDKYRENVKKVQCFRGIKAHTALSFLVEIGDFKRFPTAQQFSSFLGLVPGEHSSGNTQHRMSITKAGNSHLRRLLIEAANSYSRGVAGAKSKAVKQRQEGNVPEVIAYADKANERLRRKYIKIALRSNSNVAKAAVARELACFIWGMMNNKI

SEQ ID NO: 85003 - protein, 353 aa, unidentified
MKKYIGCDLHKKYAVFVAMDESGRKESPVRVATDTLELREYLKTLEAGTPVSVEAGGSWYWFVDLLEEYRLDVRLANPVELKKRLPGRNKTDNSDAGGSAMLLRNGTLPEVWIPPAGLRDFRGLLRTRLSLRCHTTTLKNRIHGAIRRYGQYDEEEPKTLFEGKGRVCLSRYVGGLPPSTRLATRHEWDLVDTIERHIGELEKQIRGSIGQIGYVRLLKSLPGVGEILSATIYLEIGDVTRFPSCDRLASYAGLTPTVYASGGKSRLGHTSPVCNHYLKWAFVEAANAIVMRKALYAGTHAVQLYERLQKSKGHGKAATAVARHLAEASWWMLTKKQPYREPAPASTSSSKNG

SEQ ID NO: 85004 - protein, 398 aa, unidentified
MLHDHPSVGPTAIRTQFGAIFVSLELSRSKWVLTSLSPGNGEKMSQYSLTAGDVGGLLARFADLKRKAKERTGSDYPIITIHEAGLDGFWVHRVLQDEGIESHVVDAASIATSRRRRRAKTDKIDGEALLRALLAFKRGEPRVCAMVVAPSPEEEDRRRLCRERQTLLNERIVHTNRIKGLLFAQGITDYAPLRRDRRKRLEGLRTGDGRPLPVHLKTQISRELDRLELLIDQIRSVEAEHEALLAAESMAAPEAGPAKAGSEAEPRNAVAMLLTVKGIGDHSAAILWSEGLSRQFSNRRQVAAYAGLAATPWRSGAVMHEQGLSKAGNPRLRTLMVQLAWLWLRHQPQSALARWFNTRGERGRKGSIVALARKLLIALWKYVTQGVVIEGAALKPAA

SEQ ID NO: 85005 - protein, 367 aa, unidentified
MQKVSTRAAAQSRNISQQKLTVGLDLGDRNSWYCVLDESGQIQLEQRVRTNAKGLREVFGEMPHSRIALEIGTHSPWISRLLSELGHEVIVANARKVRLIGESRKKDDRLDAQTLARLARIDPELLYPVKHRSAQAQADLMMIRARAGLVRARTGLVNTARGLAKSYGERLRGCNVRNMNPEKAESLSPELQRALEPLLSAIEELSGRIVEYNERIEALGQASYPQVALLKQIKGVGTLIALTFLLTLEDPHRFRKSRDVGCYLGLQPGRRNSGQSEPQMHISKEGDPYLRTLLVQGAQHILGPFGVDCDLRRWGLKLAERGGRNGKKRAIVATARKLAVLLHHLWVSGEVYEPLHNRSRTTVAAAA

SEQ ID NO: 85006 - protein, 446 aa, unidentified
MKILALDIGKFNTMCCFYDSKTRKHSFLNAATDRNYLATLFKKHKCDLVVMEACGPSGWINDLAISLGHKTLVCSTNEDAWKWSNVKRKTDKDDALKLARMAAMGELKAVHMPSESHREFRSLVKYRKTLDGRINKMKCIIRAWFVNHGIAIDKGDKAWHTGRALINSYRKPLIECEPNELWKGELDMELTQMDALIVHMDVVIKRLELIGKNDPRIIRLRTIPGVGPRTAEILVACIDDPHRFENGRQVSAYFGLVPRQYQSGETDRNGRITKRGNPLARTILVECAWSSLRYNPWAKHVYERIQGKQKTRKKKAAIALARKIAVLAWALLRDEKDWDPKQMLEVTESFGRVSPALKETLTTMKPKENSDQRKIRLRKEAREANAVAAAVATKTTKKPTAKSPQSTKASTKRTKPRSAIPKSSARPVQRLKPTLTTASKKASIAV

SEQ ID NO: 85007 - protein, 405 aa, unidentified
MEVIYERCCGLDIHKASITACVIVGKKKEICTFGTMTDNLLQLTEFLKERDVQMTAMESTGSFWKPIFNIMEVEGVPAILVNAAHIKAVPGRKTDVKDAEWIADCLKHGLLRPSFVKPRDQRELCELIRYRGSLIEERAREYNRMGKVLEGANIKLTSVASKMDTVSGTNMIRALSEGVVDPALLASMAKGSLRNKTDNLKRALNGLVQPHQQMILKAMLGHIDQMSVLIDTLNTEIEIRMSQDVEFVEALDEITGVGKASAQTILAEIGTDMSRFPSANHLASWACICPGNNESAGKKKSGKTKKVNSTLKKTLVQCGRGAANSKDTYLNSLYHRIASRRGAKRATVAVGHAILVICYHLIKNRSRYNDLGSDYFHKRNKDALVRQSVKRLEALGYSVSIEVAA

SEQ ID NO: 85008 - protein, 314 aa, unidentified
MKAQPVFAGIDISKDRLDAFVRPEGASFSQAYTDKGIALLVERLHEVHPEVVLVEATGGYETRIVAALAHARLPVVLINPRQVRDFAKATGRLAKTDRIDAQVLAHFAEAVHPEVRLLGDRDQRELAALMSRHGQLVEMIVAEKNRTHTTTEIVRGRIEAHLGWLRTELESVDRELDDFIRQSPALQRKVEIVTSVPGVGPVLSKALISYLPELGAINRKEIAALVGVAPFNSDSGPHIGKRVVWGGRKQIRSILYMGALVGTRHNSAIRAFYQRLLAAGKEQKVALTACMRKLLTILNAMVRSDAVWCENYRG

SEQ ID NO: 85009 - protein, 452 aa, unidentified
MEQQSISMAIVNPHAGGIDVGSRSHWVAVGQKEEDIREFGVFNDDLFDMADWLEQRKVTTLAMESTGTYWQNLYAVLLSRGFKVILCNGKFTKNIQGKKTDVKDCQWIQKLHSLGLLSSSFLPDGETEQLRTYCRHRANLIYSAASMSKKMQKYLRLLNLRLDVVVKDICGLTGLAIIHAVCEGEADPHKLAALRHANCRKSEAEIARALQSNGRKDYLFALKQELETYQYLQVKIQECDKEIAELLENIIENDENKKQHYTDPKPHKRINKNTPKNIDLNLKGYQMLEGTDMLAIEGMSHATVLSLISEVGVKGIRSFPSAKHFTSWLRLAPNNKVSGGKILSSKVPKGSNRLKIALRQAANAIGNLKESTPLRDFFMRINFRKGRTSAISATARKLAVIIWNMVVKGVPYNNPSGYLFLDQKRKLGLVKRIKNQIDKFGLTNEELGITIN

SEQ ID NO: 85010 - protein, 352 aa, unidentified
MIHYSKILEDGEDIFIGVDMHRKQWHVTVMTTDLELFHASIPGSWRCLQQIMDRYKGCQIEVVYEAGYFGFWLYEKVREYGSECIVTPPSLLPQEYGNRVKTDRRDSRKLAYLLSKGMLKRVFVPSREQLYHRQLLRRRRQFITDRVRIQNRIKAELRFYGVDMPEPQGRWSMTYLMNLRQFRFGDRWIDQSFQALIDQYQFLSQKIDKQTELLRELSETDAYREKVKILRSVPGIGLIAAMELLLELGDITRFQRADQLAAYVGLTPSQYSSADKIRMGCITKAGKSNLRGILIEASWTLITKDLPMRVKYEKLKARSGAKRAIVAIARTLLLRIRRLLLDEQPYVMGLVA

SEQ ID NO: 85011 - protein, 435 aa, unidentified
MIDTILPGFAALDLGATKLFAATAETPVKVFGTFTGELRALCAWLEQHQVRAVAMEATGVYWIPVHDLLQAQGFKVTLFHGAHARNLPGRKSDVSDCQWHAMLHSHGLLRACFIPAEPIRKLRSFYRLREDHLSMAGAHIGHMQRALDLMNVRLHHVLSQLHGVSGLRVLDAILAGERDPVVLSLLCEAQVLKKKKAQVVASLEGDWQEHHLFALRQALEAYRFYQVQISACDGQIEALLHALTAQLPVQAPRPGQKIKIVRHNAPAITNLHGQLLTLAGGCDATLVPGLSPLGWMKLTGEVGTDLSAWADENHFTAWAGLAPQRHQSGRRRRRLPRPKPVVGQIFREAVLSIAKSKHLALGGFYRRIKGRRGAAVAVVATARKLAVLFYRAMTRGLEYVERGLAEYEAAYRKQSERHLRKMAARLGFTLQPKTT

SEQ ID NO: 85012 - protein, 416 aa, unidentified
MKLFIGLDVSSQKLDTCFLTDSKEILFEGSLSNDLIGASEVKQKILEYQETFGFYQIVIGMESTSVYSFHPSMFFYLDEDLKQLPVEVTVENPYRIKQYSRMFDQDKTDKIDAQIIADYLRVDLHTLSPIKEEIYVGLQRLTRSRYQLVTQMVEAKQHFLENLTYKCNTLSKELANEDNKTSVFGTTIMNLLTEDITLDEFSEMPLEEAAELLQKLGKGRFKNPEQLVKSIKKAVRSSYRLGKVTKNSIDLVLGIIANEIKFLKKQIKEIEKAIIALLETIPEAQCLLSVPGLGPVYTAGLIAEIGQIERFDDQSKLAKYAGLTWTKNQSGNSQSENTPLNRSGNRYFRYYLIEATNRVRITLPEFKEYYQKKKNEVPKHKHKRALVLTGRKFVRLIDVLLRNGQLYQPKKGVIEK

SEQ ID NO: 85013 - protein, 348 aa, unidentified
MDKITAVGLDLAKQIIQVHGIDVAGRVVLRKAVRRERLLALLAQLPRCVMGMEACSGAHHWARELEKLGHEPRIMPAEFVRPFRKSLAAKNDANDAEAICTAVVQPNMRFVSIKSVEQQALLSLHRVRQGLIAERTASINRLRGVLAEFGLVLPQSVAVVQRALPALLADDGRLAPLVQRSLQALLEHLRDLDSRIAGFDRDIAQHARSSAAAQRLGALSGVGPLTASAVVATVGNAQDYRNGRQFAAWLGLVPRQYSSGGKRKLGSITRRGDAYLRALLIQGARSTLQAALRRAPARHDRLSAWVVQLAQRVGYHKTLVAIANKHARIIWALLAREQTLNLARASTP

SEQ ID NO: 85014 - protein, 472 aa, unidentified
MGKGSSGTTRGDRRRNARRERLRGLLPRDGAVVGIDLAEDKQAIAVVDHDVRVLARKTVRVKAFRLGESLDWALAKAREKGFEQVTVACEPTGSRWLQVQRLCAERQVPLVCIQPLMSHIAREQQDLTLHKTDESDSVLISRLATELHCYIPEELDEAWAHLRHLGRRRSQLITAATASAQRIADFLSVAWPVAAEACARPLESLTWLTAVQLVTSRCGADPARLAGMGLEAFTALVRAGVGQWGGKKARGPIIARIFAALTDTEGVVGSSRRGLLRRCAEELGDLQRTRAQLRAVEADMAGVLDELGLSRLAGIPGLTAVGAAAILAETGDPRRYGSSSSLVKHSGMSPSDNASGAFYGQAHISRRGRPGLRLAVWRAVWPMLRHNPVMAVKYLRLTAAANAGAAEAAGRDGAAPGQVTAAAAAACARRAKARVACAAALLRWIYYLVVHDAEWDPAAASGAAAASPAEAA

SEQ ID NO: 85015 - protein, 356 aa, unidentified
MKKDQTTPQTVIGIDLGDKKHAVCVMNQAGKILRETSIPNNAASLKRLGGEFPAALAVIEVGTHSPWISRLLKDCGLTVLVANARKVKAIYANTRKSDRLDAVILARLGRLDPELLHPIEHNSEQAQRDLLPVKMRDTLVRQRTASITSLRGSMKSLGMRLPSCSSASFPKQARAMLGAEGRHDLLSIAEPLLLSIECLSKQIVAYDKIIEETAAERYPAAARLREIPGVGPITSLSFVLMIENADRFSDSRDVGAWLGLVPRRDQSGDSDKQMPISKAGNRYLRRLLVQSAQYILGHFGPDCDLKRYGHRIAARGGKAAKKRAIIAMARKLSVLMLALWKQEGTYEPFRGGLPVA

SEQ ID NO: 85016 - protein, 340 aa, unidentified
MKDSTYDHYIATDWSIKNMAIARMTKKSNKITTIDVPSDVAELQTYLKNLRGTKVLVIEETTTSQWLYTELKDYVERIIICDPHRNKLLSEGAKTDKIDATKLVQLLKADLIKEVYHSTEKFLYLRRVVSGYEDLVKAGVRLKNQRYALLRACGKMGNEKEGTKLGSRGEQFVLKCLDRQIKAYEEEKKGYEKEFTRLARKYPEIRHQKSLPGVGTINAVKIVSRVVSPYRFADKGHYLSYVGLIKLEKISGGRSYGRKNPCYCRQLKSVYKSGALAAIGGNNPINDYYKYLIQEKSYPEYNARHKASRRLAILSLGVFKSGKRFKPYRRDYVKSSQKVS

SEQ ID NO: 85017 - protein, 427 aa, unidentified
MTNRVQNNSYASWMAIDIAKDFNAVMVETRDGTIRKFRMSNSASDHERLVDLIHNLPQPCRIGFEATGNYHRTLGYRLAAEGFDICLLSSVAGARYREVMFNSWDKNDPKDAYVLLQLLKQGITQIYVDPLISGYHDLQELSKTYFHITLSRTRLQHSILTHYLPLYFPEMGKWWNSTRADWWINYLLYFPSPAAVTRYSLDEFRKVASPIVGRKVNKAAKLDELYMTAQASNGLPIQEDSLACQTFRLQLQRYQDLNAQRRKLEKLAESALSQYPDYAILKSIPGIGPIIALTILAEGGDLRRFAHHRQFLKYCGLDLAKNQSGTLRGQEKLSKRGNARLRQALWMAATTALRQRENSFRNKFHRYIQAAPNDADLRRKAMTAVTAKIARTIYGLIKSKQPYQSYFEALPSGSIPLCRAVEANRTS

SEQ ID NO: 85018 - protein, 379 aa, unidentified
MNFSSVALPPVDEKTATIFMALELSKSTWLVALHSPAVDKISLHRLQGGDTEGLMALIEHRREQAQAALTRPVRVMSCYEAGYDGFWLHRFLCDRGIDNRVLDAASILVDRRSRRAKTDSLDAAALLRTLMALERGEPRVCRVVRVPSLEQENDRRRSRERARLVNERGQHSSRVKGLLMTQGIRDFKPARRDWCEQLETLRTADGRDLPPCLKNEIKRECHRLWLVIEMIMEVEAEQRQTAETTAPEIVQLSQLRGIGLTIASVMTNEVFFRDFRNRREVAGYLGLASSPWSSGAVSRDQGIQRSGNPRARRTAIELAWLWLRHQPDSGLARWFYERVGTGKGRIRRTMIVALARKLIIALWRYLTQGLLPEGAMTKA

SEQ ID NO: 85019 - protein, 391 aa, unidentified
MSMYFIGIDISKYKHDCCIISAADQKVVSKVTIKNNKAGFNELLTIIHSLANPADIRIGFESTAHYALNLELFLENSLLTFMEVNPVLISEYKKSKTLRRTKTDSVDCESIARWLMTVEYKPHSKGFYHAYSLKSLTRLRDKLIRQRSFYLIKITNVLDHTFPEFKPFFNERLSKTALYLLENYGSAEKMARMNSASYEKLRSLSRGKFSPQQFLRLKELAANTVGVNNSIFDVELNSLLSLYKSLVKEINTIEKEINKLIEEVHPHYMSVPGIGPLSAAVIYSEYGDISNFTNPGQMLAFAGIEPGINESGTESHGGKMVKRGSSQLRYTLINCCLPLIRFDMTFATYYAKKRGEGKPHRVAITHVAKKLIRVIYALERQDIDFNAQKLR

SEQ ID NO: 85020 - protein, 432 aa, unidentified
MAKVKPMDVTLPIACGVDVHKRFIVAVVCDASDPLHPAYFKKRFSTFTNDLIRFDHWLLEHDCRHVCMESTGKYWIPVFNVLESDMEEVRIVNPKWVKAVRDEKDDDKDAMWIVNKYRQGETKKSFIPDWTIRKLRELTRLRSKYVQQCTQEKNRLINSLTCRNYKLDMVFSSVFSKSAQKIINLLIGEDPYTKEDILCCVDSRCRASQEDILEACNGFEFDAVEKKIIAHTRQHLQFLEEQIRTLDEEIDMLAAQYKKEIDLLMSVPGIGRTSAIKIIAEIGNNMDPFYTADKLARWAGLVPGRNESAGKKKSRHITKGGKYLKPVLVECAWAAIKTQNPYYRSKFNGIAGRQGKKRAIIAIARKILVSIWSMLKDGAEWHPKDMDDNGRPRELSLRKAKRNFKTVIRDLLDLGKTKEEIAIDLVTIINQS

SEQ ID NO: 85021 - protein, 326 aa, unidentified
MTVRPSTDNVFIGIDVGKTTLDVQWHRGDSAQYANRPDAIAELVRRLLAGPKVTRIAIEPTGGYEKPMVEALRQAKLPVELVHTSRFKGYRTMVGVKAKSDTSDARLLAAYAAAPDDVRGRKADRVELPQDALREELRELASRRDQLKHMIHAESCRLGITRHATLRQSILAHLETLRSEDKQVLQMMHALVRQRLDLRRDQKLLQTVKGLGVVSALTLIAAVPELGHLDNKQAAALIGVAPFVHKSGTLTAPARIHGGRAAVRRILYMAAVTASRYNPVLKSFYERLIAKGKPAKLALVALMRRLVVFANAVLRSGQPWKGAIPT

SEQ ID NO: 85022 - protein, 340 aa, unidentified
MTIVTIGLDLAKSVFQAHGVDETGATALAKRLHRKQMEPFFSKLPRCLIAMEACGTAHYWARTLAAMGHEVRLIPPSYVKAYVKRGKSDALDAEAICEAVQRPTMRFVPVKTVEQQSILMAHRARSLLVRQRTMLANALRAHLAELGLVTNPGIANLAKLAQQALSDENGLPSYAPTTLEALVRQIMTLSEEITTLDRKLLTWHAESEASQRLTAIPGLGIITATAIAATVTDPDQFRSGRQFAAWLGLTPQQHSTGGKTQLGGISKQGDRYLRRLLVVGATAVIRHTKDKPTPMANWIRKLLVKKPFRVVSVALANKLARIAWVVLTRKEAYRPYQLAA

SEQ ID NO: 85023 - protein, 354 aa, unidentified
MSQKHSSEVAVIGIDIGKNSFHLVGQDRGGALVLRQKWSRGQVEARLANLPPCLIGMEACVGAHHLSRKLRSLGHDARLMPAKYVRPYSKGEKNDYRDAEAIAEAVQRPTMKFVATKTAEQLDLQALHRVRERLVSQRTGIINQIRAFLLERGIAVRQGLHFLRVELPGILAKRTDVLSPRMLRVIEDLAGDWRRLDERIESLSAEITRLVEGDPACQRLMTVPGIGPLTSSAMVAAIGTGDVFSKGRDFGAWLGLVPKQMSTGDRTILGSISRRGNRYLRKLFVQAAWVVLVKVKPQQWERYGLKSWIEAAKKRLHRNVLAIALANKLARIAWAVLHNGRAFECVKTNAPRPA

SEQ ID NO: 85024 - protein, 449 aa, unidentified
MKILALDLGKFNTMCCFFDTKTRKHSFLNAPTERNYLNTLFKNHKIDLVVMEACGPSGWINDLASSHGLKTLVCSTNEDAWKWSNVKRKTDKDDALKLSRMAAMNELKAVHMPSETHREFRSLVKYRKTLDCRINKMKCTIRAWFVNHGIEIDTGEKAWHSGRERINSFRKPLVECQPNELWKGELDLELTQFDALTVQLESVVKKLEALGKADPRIQRIRTIPGVGPRTAEILVACIDDPHRFNNGREVSAYFGLVPRQYQSGETDRNGRITKRGNPLARTILVECAWASLRYNEWAKGVYDRICGKQKTRKKKAAVALARKIAVLAWAMLRDEKDWAPTHMIHVTESFGKMKRELKESLQSMKPKENSDQRKSRLRREAREAKAVADRPKKSVRTATAKRSRSKTTVVPNAAPPSNPTKRTTPKSTARTNLKPKPKPRRAGKLVSAV

SEQ ID NO: 85025 - protein, 475 aa, unidentified
MNIKGTKKKNQVVTANIFEQQELLKKAEVIKENLTASTWRELETNGKFDKNKKLSFISDDMLILGCDVGSETHYVRAIDTRGRELSKSAYSFNNDYEGFQSAKEWAVKIAAEHDKSQIVLGLEPTGHYWFCLATWMIANGISVVQVNPYAVKQTKEVEDNSQLKDDRKDPKLIANLVKDGNFGMPYLPEKIYAELRRLSMFRDQLNEDRIRTINRMHREMKIYFPEYKDALGKVDGAFSLELLKEAPFPDELTALGEEGIRQIWHAAKLRGRGYSRAREILQYAKASVGIKDGSIASKAAVKWFVQKIMELDVELAVIENQINQKCQEIPHTGNVLEISGIGENTLSGILAEMGDISRFDDVKEIQKLSGLGLVACSSGKHKGETKISHRGRKRLRYWLFQAAKSAVAHAEEFKELHMYYTTRADNPLKKMQSLIVIACKLLRIIYTILNTGTKYAPKKMLMDIRRPENKEAIVA

SEQ ID NO: 85026 - protein, 326 aa, unidentified
MGKSIQKLSSVTRLGLDLAKRVFQVHAVDANGEMVVARKLARGRLVGFFSQLPRCVVAMEACSSAHHWGRQLLALGFEVRLIPPAHVKPYVRRNKNDAVDAAAICEAAGRPGQRFVPVRSIENQAELMRHRARELLAGQRTAALNALRGHLAEIGVIAPQGVQHAYDLKRLAVDGFDQYGEVVVPDCVRVALRPLVSQIDALDAAIGAIDNEIAMSVKADETAKRLMTVPGVGPVTASAIVATVQDIGDFASGREFAAFLGLTPRQSSTGGKPRLGRITKMGDRYLRKLLVVGAYATLRHRKGHNDTLRLRASGMLERKTVKYSSS

SEQ ID NO: 85027 - protein, 500 aa, unidentified
MKTKKTTQLPASIYRNQNALLRTLFERAADPRKVLCVALDYAKRKHVALCCDGNGEILRAPFAVDNTVEGVAFLIEQISATARRRKIPQCDIFLGGEDEASYVANFTAALRARQYLVLRVNAAEAKENRENQIASTDLLDLLGIAKTLLSRRARSTGPLGLKDKKATQDIYFEIREITRCRRALVRQQTAASNRIHAYVDQLFPGFLEHSKSGLTPFCEASIALMRERFSVPEIAPRRPRTLATFLARHGVRQPDEVAAKLIALASGALPPAPHRLAALQRTLCATVDLRQCLTRNASELRCQAAILLASTPYVMLTSISGIGFTLAAGTAGELGDPSRLPGADSLCAFAGIVPRTFQSGGPDQPACQGHSPARCNHILKDWTVQSAQKILLYGPPELKDRITRWNANGQHGIFAGARRYLRLLRSLVLNRTPYLDPASRSSTASSALCADAALHAWLILIRKWRTIPGGIAIITNKDTPLGFWRSVVMESRDVILPLKP

SEQ ID NO: 85028 - protein, 377 aa, unidentified
MCGHDAERCPALILVEFGQLTITSEDTMERYIGLDVHTQSCTMAVIGSSGRRLRSMVLETNAKVLVESLRSIGGRCRLCMEEGMQCEWLYEVLEPHVEELVVIQPQPRQGTKNDAIDAWHLAEQLRTRSWTKRVIKSPSRFSMLREAVRAYDVATREVTRAKNRLRVLLRSRGIDVDDSIYEPKTRQVSLKQLKRPQLLRAGCLAAQIDALVPAKERAEAWLKEEAAKVPKVQRVMTTPGIGPVRAATIVAVVVTPERFRTKQQFWSYCGLGIVTRSSADWEQDDKTRSWRRRKHAQTRGLNRNRHPLLKNAFKGAAIKVLSMAKHPLCLAYEKMLENGTKPNLARLTIARRIASAVLAIWKHKEEYDPARHGQRAA

SEQ ID NO: 85029 - protein, 418 aa, unidentified
MESVVDDRGRDWFVGVDWASQTHHVFVIDAQGRKLGERGFTHGGEGLAEMAAWIEKQAGAAPDAVSVAIEVPHGPVVESLMERGFRVHAINPKQLDRFRDRFSPAGAKDDSRDAHVLADALRTDPRCLRRLEPLDPTIVELREWSRISDDLRHERNRLGNRVRELLWRYYPQMLELADDVAAPWFLEFWKLVPTPEKAKKIREGTVARLLKTHRIRRFTAAQALERLRATPVTVAPGTVSAATAHLEAVAKRLQLVYRQIADADAQLDRLTEKLAEAANAPGRDKEQRDVTILRSLPGVGRIVAATLLAEASEALQRRDYQALRCLSGVAPVTKRSGKSCIVLLRQAADVRLRNAVYHWARVAAQNDPICKARYKALRARGHGHARALRSVADRLLGVACAMLKSRSVFDPKLTAKTT

SEQ ID NO: 85030 - protein, 317 aa, unidentified
MPQPDLFVGIDVAKNELVVRLHPLGEERRFPNDKAGLKALERRLKALAARYHLLIGFEATGGYERKLAALLDRLGLTAYLLDPARVRNFARAERQLAKTDPLDAAVIARCLAALHPELTPYRHDPQAARLAEHVRMRDLAVAQRIQLGNHLETLDDPAMRRLVKAQVGKLKALALRIEKAIAALIAASPDLATRERLMRSAPGIGPIVAACLLAHMPELGALSSRQAAALVGVAPFDRQSGATRKPGRCAGGRPAVRRCLYLAALAIARSKKGHIAQTCQRLRDNGKPAKVALVATMRKLIITLNAMLKSQQTYRPA

SEQ ID NO: 85031 - protein, 347 aa, unidentified
MSTQPLIPYTLFVGVDIAAATATAVWQLGDASPSRPLTFDQTAAGMRAFQNQLSATAVQPAQTLIVMEATGSYGMTLATTLHAADYAVAVINPAQAHAFAKALLKRVKTDPIDAPTLTRLAAMLHPAPWEPPPAIYHELVQRLGQRNDLMTVRQQFRNQLHALVQHPVVVASVRQRLETLITTLSDEIVVLEAEIAPVLTQDATWAAAAERLQSIPGVGLLTASWMIVLTLNFRLCPRADAAAAYAGLAPNDYRSGTSVQKRACIGHTGNRRVRTALYLATLSGTQHNPILRAMYDRLRAAGKPMKVARCAVARTLVRIAWAVVTKEHVFDPTHHHVAGLPVVRGTA

SEQ ID NO: 85032 - protein, 318 aa, unidentified
MNVIGLDVSKDTIDATLIKTKGSKDYIKISNSTEGFENLINWIKTKRIRKIAISMEATGIYYEQAAEYLSALYTVYVINPLKIKEYAKSQFSNTKTDKADSKLIAEFASRHLDKLTPFRPSENPILYKLINLLQQLKEQQKETQNRLHTAKDIYIKSTHEAIIELLEEKIDQTSKRIDGMIKQKESLNIEYQNLQTIPAIGKETAVILLRHLTDKNFETANKFVAFAGLSPKIEQSGTSVNKKGRLSRYGHRQLKRALFMPALVAYRMNAFPQLVSNLEAAKKPKMIIIVALMRKLAKIAFYIHKTKKPFDKARHQTV

SEQ ID NO: 85033 - protein, 326 aa, unidentified
MKNFIIGIDVSKDTLDFCMLETDSRRKLQQGVIANKEKEILTWLKNLDKENVVVALEHTGHYGALLSWLLEEQLFTYYLINPLDLQRSLGLQRGKSDVVDAYRIADYIITSHHKLSPFKLPCESLRKLKALMTARERYVKMSVQIQNSLKAEMILSEKVALKQLIKLEQKQLKSIKNTIQDLEKQMMEIVKSSQDLNTTYTKISSVIGVGAITSIKCIIETDNFTRFTDARKFNCHCGLAPFPYQSGSSIKGRTKTHFLRDKTLKSILFKAAGSAIQHDPQLKKYYEQKLEKGKHKLTALNAVANKIVLRIFAVAKRNEPFVKLID

SEQ ID NO: 85034 - protein, 340 aa, unidentified
MNRIGLDAHSASFTMAVVNEAGKVTKCLSRPTSAENLIELVGAVSGPKELVVEESTVTQWVKDTVEPYVDRLVVCDPRHNRWIAKDDFADDRTSAIKLAQLLRGGYIKEIAHPDGEGAQLRRAFLHYGDLNEQLVRFKNKLKATYRQAGIAVSGDGIYEADAHGKWLARLGDSPALRRQAEHLFVLIDEVEAMKQEGLKDMVRAARKDPGYAVLLTMPGAGPVVTCGYVALIGTPHRFSRKNKLWRYAAFGNARHVSDDKVYQDRPSRSGSRPLKWVVLQHFMGAVERSKKDNVFKRRYARLLAQGLGRKAARRQVCRSLLSVARAIWMKGEPYRESPLS

SEQ ID NO: 85035 - protein, 366 aa, unidentified
MEKSSTAFVGMDVHKESIDVAIADAKEARHFGRIGGDAHSVDKLVRKLRSAHRVPVFVYEAGPCGFWLYRRLSAQGLQCMVVSPSMTPRNAADRVKTDRRDAMKLARLARAGELSPIYVPDALDEAMRDLVRAREDAISMQRQARQRLQALLLRNEIRYVGRSSWTRAHRRWISQVKLPNPAQQIAFEEYVQACEECERRVERFETAIATQLERWRWRPAVQEVQALRGISALHAVRIVAELGDFRRFETPRKLMGYLGMIPSEDSSGPRRRQGAITKAGNSSARRALIEAAQAYAHPARVSWVIARRQVRASKRACDIAWKAQLRLCTRFGRLTARRLPRNKVIVAVARELAGFVWAIAREIEPV

SEQ ID NO: 85036 - protein, 352 aa, unidentified
MTTYCGVDFHARQQLVKWCNTEDGEIHERQLWHQSIDEVREFYAQFKGPVIVGFETSGYSSWFEAMLERLGHQVWIGHATEIRRRARSRQKTDRRDAELILDLLLKDEFPRIHRVSAESREVLRQLRYRHRLVQQRTRSYNSLQAIALSAGVSLKAKLRTRKGKERLLGLVVSAAHGQQRQEWLDLIAQLDGYIERVEKELELIAAADERVQLVRTHPGVGLLTGLGLVHTLSPVSRFANSRKVAAYVGLEPREYSSGERQQFGGISKAGSRLLRFLLVEAGHKAINKDAQLKQLYYRVMHRREKAKAKVAVARHLLVRTYIMLRDGIDYAEFVRRGVAVPSARVGYRPESA

SEQ ID NO: 85037 - protein, 403 aa, unidentified
MRTIGLDVHRRFAEIAILEGKEERQLRISTEPQALRDFARTLGPDDQVVLEATANTWPIADLLAERAGRVVVSNPLRTKAIADAKIKTDKVDARTLAQLLAADFIPQVWVPDPETRVLRGRIARHRALVQQRTRLRNQIHAALIRALVSCPYSDLFGRAGRGWLEAVALPAHEREGVQISLRLHDSFEAEIAQVDRDLSRTALASADARLLCTISGIGAVTALALCALIGPVDRFSRPAKLVGYLGLDPTVRQSGERPARTGHISRAGQAHARGLLVEAAHDAVRSPGPLAAFHARIADRRGPAVAAVAVARKLAVIIWHLLSRRSEYRFAAPTRLAEKRRRMELAAGAERSRSRARSSRPRAERLRAERAELEQAERAYRALVRERIRTRRRDAAAATGERP

SEQ ID NO: 85038 - protein, 356 aa, unidentified
MVERGTEAKSSGEGVTSPYGRTEHCENIHEYRCDTSVGAIGIDISKDHLVTSKGRVRKFANNEKGYEEILTMKPNIIVIEPTGVYSTRPCQYFKERGVKVLLVSPTLLWKEKDVRGKKTDFYDAEKLENMVNKAREYVNNPLKELVSLYLFMKDVQTKQENRLRRALFLVSDEKLSEKRLEKFSKGDFSDVKLYQLEYTNTVLREIQVLARTLIQTREELKEVRKMIEGNVPQDHVLLTIPGIGKLAAGIIIGIVGDIKRFPRPESFVAYCGLDPIVERSGRIEVRKGISKRGNKYLRSLFYFLAETQCSRNPTLLKFYEAHKDKLKGRKLYTALARKLARIVWSVWYNNKPYEVK

SEQ ID NO: 85039 - protein, 356 aa, unidentified
MKYYTSTTQYNCGIDLHARQMYVCVMDRQGKKLVHTNVMRNDFEFFLKLIAPYRHDLTVCCECMFGWYWLADACQAAGLTFVLAHALYLKAIHGGKNKNDRIDSEKLTHLLRSNLIPPAYVYPAEKRPLRALLRQRLYYVWSRSELLARIHSHQLAHNRTPAKQTRHTRDPWEEQLLAAEDHPLRQIALKNDLAMIRHFDQQISQLQTELQRQTQQFAARDYALLQSVPGIGENLGLTILYEIGDIERFPTVKDFLSYCRLVKGTVASAGKIKGLRGAKLGNPYLRWAFGEAAVIAKRDHPVVRPLAQRLEARMGGNKFKANTVVAIKLARAVYFMLQNKTVFDPERLAAVLDKAA

SEQ ID NO: 85040 - protein, 381 aa, unidentified
MAKSRAGQGNDVGVDPHKRTSTATVLDSRGAVMGTRSFSVSGDGHRQLETWATSHGRVRRWGIEGASGLGRHTTVFLVRHGHDVRDVNPDRTAEQSRKRRQGKTDALGSLRIARELQADPDMPVAFKRAQGDAGPDERSELLALWHKARRWVVDQRRQLLNQAESLLCELPEQARASLPDQPDARARLAALAKRDRSATWDAPTALRLRLLDAHTEALGALEALEREAAGALAGLVEQSGSTLDELCGLAQRSVAELLVEVGDPRRFAGEGGFARFNGTAPLPASSAEGDDEPVRHRLNRGGNRRVNAVIYRMAVTQKRCSPKPRPFITTPERVGIPKRESMRVLKRHLSNVIYRRMLRDLAQIEQPRSVHPSPEIFSQAS

SEQ ID NO: 85041 - protein, 372 aa, unidentified
MSQSSTLYVGMDVHKESIAVAYVAQDHGAAVISLGTVGTRQCDIDKLIRQLQSKSKQLVFVYEAGPCGYWLYRYLTKKGYVCWVVAPSLIPKKAGDRVKTDRRDAMQLARLMRSGDLTPVYVPAVDDEAIRDLSRARADTLRDLKAAKLRLKAFLLRHDIRYSGRANWSPAHLRWLSEVVCPTPAQQIVFQEYVQTVTEQTERLGRLELELHEQVKTWRLAPVVEALQALRGVQCTVAVTTVAELGDLTRFENPRQLMNYLGLTPSEYSSRGRRQQGSIPKTGNTHARRALVEGAWAYRYPAKVSRHLQLRLEKLPTAIQAISWKAQVRLCQRYRQLMAKGKHAHQVVVAIAREVSAFMWAIAKQVIVPPKA

SEQ ID NO: 85042 - protein, 359 aa, unidentified
MMQLKNSKLDYRGQDIYIGIDVHLRSWSVTILTECFEHKTYTMTPNADGLSKYLHKYFPGGKYLCVYEAGFSGFWLQRQLTLAGISCIVVNAADVPQRDKDKKNKTDTVDSRKLAKSLRSKQIDSIYIPSEEDIDNRTLLRTRHLFVQNQTRSKNRIKSLLYYNGIEVRPATIQSYWSEKYIKQLETIEDIKPSTKESLLHLIRDLKHNKAILKDIDIKIKLLSQDHRFKQRVELLRTIPGIGLLTAMIILTELIDINRFRRDDDLCSFAGLIPTEHSSGPKVIKGDITPRRNKMLRHVIVESAWIAVRKDPALLQSYTDFLQRGIKKNVAIVKIAKKLLCRVAHVLRKNESYSLAVVS

SEQ ID NO: 85043 - protein, 362 aa, unidentified
MRIIGCDLHARQQTLAILDTATGEAMEKTLTHSGSSVREFYAALPAPVRVGIEATGTMQWFLSLMEELGIDCQVGDPAKIRAAEPRKQKHDRRDADLILQLLVENRFPSIWQPSQELADLRALLLHRHQWVRMRTRVQNALQAIALANGLRRGPGLWSREGQSTIASLPLAPYTAYRRTELQAMYARFEADLGKLNQRVEQEAGQRPGATLLMTHPGVGPITALATDVFLGHPGRFADGKALASYVGIIPSEYSSGGRQKLGGLSKQGNPLLRFLWCEAAAHAVRRDPELQRFYRRKLIQKGLGKARVAAARKLGIRLWIMLRDQIDYHEFCRRGQMQQRSGDACAGMPETPYGAKGHRPVD

SEQ ID NO: 85044 - protein, 401 aa, unidentified
MDPQIRVGIDVGCKAHRVAISDPHGSILEEFDISHTGAGFRDFFRRIDHHRQKLDLPVAVAMEGFNGYARPLDRLIQERGYILYNVNNLKLARFKEVFPGAAKTDPIDTRKILELFHLKDHLPLAKDVLQKVVLAPPVNDKLKRLSRRRRQLVNEKVRVANRLQSDMQAVCPELLAITNNVSNLRFLRFLTCRDDLTQLARLRRTTLLKIPSVGQKYARIIQEWQRKASFSTEVEYVGPMIIADGRRILELRKQIHALDEAMTELADQSELACRIGSIQGFGKTCVAELAGEIGTTERFAGERSLALYVGTSPLSRDSGQHHGSKCPRQVNHRAKAAMMTAVARHINCVPESRAYYEKKRAEGKSHNQAVRALGRHLVRVIWSMIENERDYELREVIPSVT

SEQ ID NO: 85045 - protein, 337 aa, unidentified
MDYFAGLDISMDETHICVVDRDGAVVYEGKSASTAEAIADKLSEGPSCHRIVFETGRMAPILFHGLSQLGLPVVCVESRQAYQALKSLATHKTDRNDARGLAHLARTGFFKPVHVKSLSAHAVRSLIIARKKLVGQRVTLENQIRGLAVVFGVRLPRALTAAFIEQALKASEGVAGLSAAMRGLIAARTAVMSAVAAIDADMRRMTRASEACRRLMTIPGVGQLTALAFVAAIDDPSRIRRSRDVGAYLGLVPKRYQSGEVDYVGGISKCGDRRVRTLLYEAANVMLTRYNGQLKLKDWAFAIARRSSMRKARIALARRLAIIMHAMLRDGTEFVAA

SEQ ID NO: 85046 - protein, 342 aa, unidentified
MSNSQSTVVYSLFVGVDIAATTATVSWMRPGEKANRPVTIEQTPDGYASLERKLRATGKAPAEVLVVMEATGSYWITLATQPVHAGFQVSVINPAQAHHFAKALLKRAKTDAIDAQTLAQLARLLQPTPWTPPPRIYYELQQRLAQRDALLDLQQQVCNQLHALDQLPEVIETVRERYEQWLSTFAAQLATVEAEITEAWQHDAAWALAAERLQSIKGIGWVTAAWTLVTTLNFTTCDTVESLTAYAGLAPMPRQSGTSVWHRPSIGHTGNGRLRTAFYMATLSAAQHNPMIKAFYTRLRAAGKPEKVARCAAARKLLHIAWAVVTKAQWFDPSYARQMQRT

SEQ ID NO: 85047 - protein, 319 aa, unidentified
MVIGIDVAKAELVVARGSRGEIATYANDEGAVRTLVQELAGRSVELIVLEATGGYEVLGASALASAGLPVVVVNPRQVRDFAKATGQLAKTDRLDARVLALFGERVRPAVRALPDEQTRELEAVLTRRRQLLEMRQAERNRLLQVVGHGARPIQHSLQKHIAYLERELELTETDLRRRLQESPMWRARDNLLQSAPGVGTVTSETLMAQLPELGQLDRRAIGKLVGVVPLNHDSGTWRGRRTIYSGRAQVRAVLYMATLAAKRCNPVIKAFYERLLAAGKPKKVALVACMRKLLTILNSMVRTSQHWRTPAHPVPTMAQ

SEQ ID NO: 85048 - protein, 401 aa, unidentified
MESPIVSIDVSNGNSHYMCFIKNNKRFGKVKKIDHDIEGFKRLLEDIQKLEAATNEKVCAVFEATGVYTKPLERFLSKNSIKTYIINPLESARKRKEEIHNKKTDKLDPISISKVYYDKEEMMELKKKDETYNWLRKKNRLYEDQLNHLRKYKVTFQNQLSICFPGYLDLFKDGYSDIPMTILKKYPHPDLLKNKKAETVARYLEKNTCHTHKVSLEYALKIIEFAKKTYPGCEKDDVEVEIFKILLDKVIETQRECEKTLNEMITVASTLEEYRYISSIDGIGPNLAARIIAEIGDIEEFKSREALVAYAGLDPHIYQSGDQDGKHLKISKKGNKYLRCLLFLAVGCSIRGAKDNPVNRFYQKKKQQSNPLNSKAAKTACTAKLLKIIYGICKNKTTYER

SEQ ID NO: 85049 - protein, 357 aa, unidentified
MDKVLKQCLGIDVSKLSLSLSLGFLTDKLVKEFLVHNDVTNDLSGYKELLKWLKESVDSSTNLLIVMEATGVYHQGIAHYLYELGYSVCVMQSGRVKRYAQSLDQRSKTDALDSKMLSMLGLERELRLWHPPSVELQQLKMLSRERSSLLKDKTTETNRQSAIVSGVYSDKRASKRHKQRLKLLKDQIVCIEQEMRELISNNEFLKKKLNLLESIPGISFISAATVIGETLGFESISNAKQLTSYAGYDIVLRESGNFKGKTRISKKGNSHIRAALHMPSMTCVRCNPSLKQFYNRLKPKKAKPLVALIAVQRKLLILMFTLWNNEEVYDANFEKKKQQKHKTLAAQDNKLINQFVS

SEQ ID NO: 85050 - protein, 430 aa, unidentified
MSYSNFVQISQSPSGTLFIGVDIAKKKHYAAPLCRCNPKPGKAVGFANNRKGFDLFYKLIGKWCRRYNCNRIVIGMEPTSGYWEPLFCWLKARKFEVRLVSSLKVKHSKDIMDNSPLKSDQKDAVVIARLLKDDNTLDYRVRPLDEREVKTLLYTVASLDKTAGVYKNQLEQFLGVFFPELSGLFDELASPSVIALLREYPFPRDLVKANIGEVESLLWKASRGQIKKEKVKLLIETARITVGKNQVNEADGFQLKTILDMLEAALRIFKEAKSKLEKKVETMEQFAILDSIEGIGVITAAAIIAVLGDLREYGNARQVLKKAGLNIYSLSSGKHQGRDHISKRGRSILRRYLYMAALQHTHKGKTFYPKYRSIADSGKKKKKSALVAVMRKLLKVAFALVRDNRLFVSDYAHNHGAKRDVTVIRRAEAA

SEQ ID NO: 85051 - protein, 427 aa, unidentified
MDFTQNERLKQINEHTLIIGIDIAKHKHVARAIDDRGIDLSKRLIFPNSKEGFKLLLEWAKELSAQTSRPNLLIGMEPTGHYWMNLAYFLKSHGERPVVVNPMKVKKSKELDDDSPTKNDTKDAKVIAQVMRAGRYHEPTLPEGLYADLREGVKLFDIIQEDLSSIKAQIHNALDRYFPEFLTVFKKWNGKTALYLLKRGYLPKDIQQKTEDELLKEVKTSVTKNVGIERMRQLKKAAASSIGLTVGLRMAREELRYLVDQYELLDARLESLKEELEELVRLVPGADSMIAIKGVGPMTVVGFFAEIGDLSNYRDPRQIIKLAGLNLMMNQSGKHKGQTTITKRGRRRLRTILYQVARPLAFHNKGFKALHNYYKHRRNNPLKGKQSYVALSRKLIKILFAMGTRKCAFSEDRMLRDIPHITDAQAA

SEQ ID NO: 85052 - protein, 387 aa, unidentified
MYFVGIDISKYKHDCFICTETGEVIESNFSFPNTSDGFEQLLNLLKSIDNFKEIRIGFEATGHYGMNLKLFLEKNNYSFMEFNPKLVKEFISGQTLRKTKTDKKEAYQITKYLISADYKPHPKQFYHKYSLKSLSRMREKLVKQRSYYEVALTNVLDHIFPEYKPFFNNTFSASSIFILSKYKSPDKIKNMKDYDSIRKISRGKFTSAQFFLLKDLAKNTIGTSNEIFELELETLLILRSQIEFEIKKLESNIEEIIKELNPPILSIKGIGYILGAGIVSEYGDVSRFKSADAMVAFAGIEPSICQSGTESHTGHMVKHGSGHLRYYLLNAADCIFLHEPIFTEFYYKKRNEGKSHRVALNHVAKKLIRIIYKLETENITFDSSKVK

SEQ ID NO: 85053 - protein, 373 aa, unidentified
MPRYSTAFGMDVHLRSTTVCALDAETGEAVTRRFRGNPWGEVAEWMSGFPGPSLAAYESGYLGFAPQRELSGLGVDCVVAAVSKVPRSAADLSSKNDRNDAARMAKAILAHDISPVWVPSPEVEGIRDLAGAHDAATARLAAAKQRLLAFLARRGYVYGGTTPAGNPRRYWTYGFLRWLDGIHPADDGGIRALAALRSEVEAAAETRDDLLAEYRAAVAAGPLSAEVEALQSIKGCGFALAAAFASEVGDFSRFRSGRQVTAYFGLAPKQRSSADSVRLGGISGAGNALVRKLAVEGSWCYAQAGHQPKLMPKGSGVPLEIRMHGRKGSERLLRRRGEMLERGMPQAKANAATAAELVRWLWALGTMCREAGE

SEQ ID NO: 85054 - protein, 427 aa, unidentified
MYEDDHNRIKLFRQFKKEIRGSRDYLIVGIDIGKITHHGFLGTATGKVLRRIVVENTASGFEHLVTTVQFFSDREGLKKVVFGVEPTSVYHKPLAEFLLEQGFLVVYVTNEAIKKNRALLDGRWDKNDIKDAANVADLLSQGKCQYYDLPDMNLRDVRSLLLLRTRLMKQQHSARIRIRNNLVAQYFPELDQFWNKAESENLAIVRWCLSPHKIRELPCEVFCRMVAPRQRGEKQQRRILKIWEMSPYSIGCRAGRAVEQEARILVEGLNHIHNHIVEVEETIEALCRCFDEYTLLLTIPGFGPYISAVVLAAIGNPHRFQSTKELIRLAGLDLSASRSGKKSASAVPVISKKGKADLRYALYQAALVATSSNTHFRAYFHSVLEGREREKGIRTKMRVKLAAKLLIIAWVMMKKKEPFNPDYLKVG

SEQ ID NO: 85055 - protein, 518 aa, unidentified
MALRAARSAVKTDLLLFAGGDQRFACSRRGQWRRITAGGPLTPVNCDRVRSCLSRVGGSRCGRFSVASSTRIRFRLSLAALAGHRWWCESDSEGVVVLQEDEQTEEIIARVAALDIGKAEVMCCVRVPHEEHPGRRLQEVRPYSTMTRSLLVMADRLAQLGVSRVVMEATSDYWKPVYYLLECHGFETWLVNARDVKHLPGRPKTDKLDAVWLCKVAERQMLRPSFVPPPQIRRLRDVTRYRTDLVEARTAEKQRVEKLLEDAQIKLSVVASDIFGVSGREMMGALISGQRDPKVLAAMARGRMRAKRPQLEEAFTGYFTDHHRLLLTKMLARIDALSADIAELETVIGEMIAPFADAVARLDEIPGIGPTAAAVVIAEIGMDMSRFPTAGHLGSWAKFTPGVKESAGKKKGTGATGHGNRYLAKVLGEATVTAGRTDTFLGERYRRIARRRGKKTAIVAVGRSMLVIIWHLLSDPEAHFIDLGSDYHDKHIDTERKKRTHIRQLEALGYRVTLDPAA

SEQ ID NO: 85056 - protein, 327 aa, unidentified
METQVASQWVGIDVSKAKLDIALRPANKVLQVTNQESGWQELSEQLKKYKIELIIIESTGGMERGVAHKLQKEEFKVAVINPKRARDFAKASGRLAKTDKIDAEVLAHFGEALQPSPKPLASESQVALSDLVNRRSQLVEMLNSEQKRAHSVRSSTAKADIETNIQWLKQRIKGMDEQIEQLRQDNEESKKQYELLTSVPGVGRVTAVTLLSMLPELGELPLKKLSSLVGIAPMNCDSGQMRGKRRIIGGRARVRAVLYMSALVAIQHNPVIKAFYQKLLQAGKAKKVALIACAHKRLGFLHAIVKSQKPWRCPENIETKEEKLQAC

SEQ ID NO: 85057 - protein, 339 aa, unidentified
MKKVFIGIDFSKLKFDAAIYSIDTKAIVSTEVFENEQSGFVEFLQWVKENTRCQKSALLFCGEHTGYYSGNLSLFLYESGYDMWLVSGLEMKLTEGIKRNKTDRVDACKIAEYAYRYQDKVVLFQPVSKSLEEIRELLSYRERLVETRKVLTTSAKEMKRVKNNASCDFIYRDSFEYIKSLNASIRDCEKRIEALMKQDISLKTNYKLVSSVVGIGLVNASLILVATDNFTKFSDARKFGCYCGVVPFEHSSGSSVRGKTRVSKMANKRIKTTLTLAARNSIRFDPELKEYYQRKIAEGKNSWLVLNNVKNKLIHRIFAVVRDGQMYEKQYVHPLKQAA

SEQ ID NO: 85058 - protein, 337 aa, unidentified
MNYSGIDLHSNNSVVSVIDETDRVVAEKRLPNDLAKILAFLAPWRAGMAGVVVESTFNWYWLVDGLQTAGYVVHLANTTAIKKYDGLKHSGDETDARYLAHLLRLGILPVGTILPARLREVRDLARKRMQLVRSCTSHILAVENITARQYGTRITSNQVKRLDEHAVNQMGLPDNVALAVRANVAVITTLREQIAIVERRLQKEVARHPDYVLLTTVPGIGQTLATVIMLETGTIERFANAGNFASYARCVDSQRMSNGKKKGQGNTRNGNPYLCWAFIEAANFAMHFSTEARRFYERKKARTNSVLARKALAHKLARACFHMLKERKPFDVTRCFA

SEQ ID NO: 85059 - protein, 337 aa, unidentified
MNYSGIDLHSTNSVIVVSDETDRILCKRRVPNELGVVLTTLEPYRKELAGVVVESTYNWYWLVDGLQAAGYRVHLANPAAMKRYEGLKHSDDDTDAAYLAQLLRLGILPTGYICPVEERALRDLARKRLQLTRSRTLHILSVESNLARQTGARINSRAVKQLTEETLESFGLLENVSAAMAANVAVIQTLNVQIEKLEARLRSQVRPQEPFGLLTTAPGIGEVLATTIMLETGTIERFAAVGNFASYARCVNSKRVSNGKKKGEGNVKNGNRYLAWAFIEAANFARRYCPEAKRFYERKKAQTNNIVATKALAHKLARACYHMLKERKPFEVKRCFG

SEQ ID NO: 85060 - protein, 334 aa, unidentified
MEQITTVGIDLAKNVFSLHGVDATGRTVLRRTVRRERLVETVASLSPCLIGMEACSGAHEWGRRFEQHGHTVRPMAPKFVAPYRKSDKNDGNDAEAVCEAVTRPNMRFVPVKSAEQQALLALHRVRQGFVVERTAVINRLRGLLAEFGVVLPLRSVTVRRQAAQAAEALPELARGAITDLLEQLRLLDARIDAYDAQIHAQAKLSEPARRLMQIRGIGATTALAIVATVGNAREFKNGRQFAAWIGLVPGQYSTGGKARLGHISKRGDAYLRNLLVQGARSVLQTASAHQDRLSRWALELQARRGYYRTLVAIANKNARIAWALLAKGDKLRIV

SEQ ID NO: 85061 - protein, 383 aa, unidentified
MLQLKDDLSRSLVALDQDRTLIAVVELSLATWLVGGVLPGIQREPLKKLPPDPEGLLKVLHRWREEAAKAGHKVTRIVVAFEAGRDGFWLARWLQARGIEAYVIHPTSVAVSREQRRAKTDRLDIALLKRSFLGWLRGEKKHCTMVAIPLSRKIKRPTREREQLVGKRTGIINRMKAALVRLGIRGFNVKLRKAPEQLATLLTPEGHPIPTNTLAELRREMAHLRFIDEQIKQIEDDRLQQLKQAPQRPLNARVLQLQRIVGVGTETADMLTHEVLSRDLRDHRAVARYAGLTGSPDESGSRRREKGLAKAGNARVRRGMIQLAWRFLLHQKDSAMTQWYQASVAAGKKRKTMVVALARKLLIALWRFVTMGDIPQGVVLRPA

SEQ ID NO: 85062 - protein, 409 aa, unidentified
MLFAGIDWSDKLLDFHLRTAESKVLAQGQVKPSVEGMADLFAELESHGPVSEIGIAIETAHGAWVQALLDRGYQVYPLNPKTVECFREALSANGVKTDKIDSKVLAMFLVTFHKENKPLRPDAPEIIQLRILCQDRLRVVEERSAKVNELGAILKCYYPAFMGFFGHLDSGIALDFLQQYPTQKQFQKLSERRLRNWLSRHRYSYPKRIDEMVSLLRQPALPVAEHLQQAKKTLICYLARSIKTLNAEMAQRDKQINDHLDSLAESDWIRSLPRAGKVLAPALLACLGRDPERFSSVGEARALMGTAPVTKASGKSRVVVFRWGCWKFARRTLQLFAEQSRHQCHWAQAFYEKQRNSGHKHHEALRALAHRWLKILLAMRRSGSLYDEDIFLNSQRRYQLKTPILKTFK

SEQ ID NO: 85063 - protein, 367 aa, unidentified
MKKVSTAAAKQSRNFSQQKLTIGLDLGDRNSWYCVLDASGQIQLEQPVRTTAKGLGEVFSGMPRSRVALETGTHSPWISRLLREFGHEVIVANARKVRLIGESRKKDDRLDAQTLARLARIDPELLCPVKHRSAQAQADLMMIRARAGLVRARTGLVNTARGLAKSYGERLRGCNVRNMNPEKAEGLSAELQAALEPLLAAIESVSERIAEYNQRIEKLAQESYPQVAVLKQVKGVGTLIALTFLLTLEDPHRFDKSRDVGCYLGLQPGRRNSGQSEPQLHISKEGDPYLRTLLVQGAQHILGPFGVDCDLRRWGLKLADRGGRNGKKRAIVATARKLAVLLHHLWVSGEVYEPLHNNSRVAVTAAA

SEQ ID NO: 85064 - protein, 339 aa, unidentified
MFIIGIDPHKGSHTAVAVDRSETVVDTIRVEADRHQRSRLLEWATRFEPRTWAVEGATGMGAMLAQQLVGAGEHVVDVPPKLSSRVRLLERGRIDKTDPNDARSAAIVAWRTPALNVVTTNDEHRVVLRLLADRDHQITAQRTRSICRLHAVLCLLIEGGTGRSLTVSGAEKLLASVDVDGPITTERIATARQLIDEVRALDTARGEVRRRHVAALEASKTTVTQVYGIGPLTAAIIVGRVGDVRRFPTSGHFARHNGTAPIEASSGPIKRHRLNPRGDRQLNHAMHMAAVTQVRHDTPGRAYYLRKQAEGKSRKEALRALKRRISDAVYQRLIADTHH

SEQ ID NO: 85065 - protein, 456 aa, unidentified
MEELFEDCHDVEVVYQRCCGLDVHKKVIIACLIILAADGKRRKQIRTFGTTTQALLELLDWLKAAGCTHVGMEATGVYWKPIYNLLEGHFELVVANARHIKAVPGHKTDVHDAQWIASLLQHGLLKASFVPSSEQRELRELTRYRTTLVEERARIVNRLQKTLEDTNLKLGDVVSDITGKSAQAILRGLLAGETDPKVLADLARGRLKAKRAALEEALVGTIKPHHHFLLTEHLDHIHRLDQSIERVGAEIEARMGPLLPPEPEEDSGKQPEAEQTASEQQTEPATKEPLSLAQAMVLLCSIPGISQRAAEGILAEIGVNMDRFQSAKHLASWAGMCPGNHESAGKRTSGRTTKGSPWLRKLLVQAALAAGRTKNTYLSAQYGRLAARRGKKRAAIAVGHTILVIIFHVLQDQKPYEELGGNFFDQRERQAVEKRLVQRLEKLGYDVSLQPAAHAA

SEQ ID NO: 85066 - protein, 346 aa, unidentified
MLYAGLDLSRQRLDVHVLDEEGRTIEVMAVHPDADALRTLAAHVLRHGQEVSAAIESMTGGRFVHDQLEFAGWDVAIADSAKVKGIAPLAAKTDKIDAWVLADLARRDLVPEIWLPDPRVRAERERARFRLHLVRHRTALKNRIHATLMTFGHSVPVSDLFGTAGRELLAGLALPAPWATTLTTSLCMVDELNIRIDACERDLVRLGADHPYIPLLLTVPGVGWVLAYTIASEIGDIARFASPKKLAGYTGLCPFVRQSGNHDLRGPLAKNGPKYLRWALVEAATHAARDAHYRARYERNKKRLGRQRGAKVARIDIARQLAEAIWHVLTKNEPFSPAGPAIALVA

SEQ ID NO: 85067 - protein, 359 aa, unidentified
MTTKTNKLDFSGQNIYIGLDTHKNSWKVTILTDTISHKTFSQNPDPEVLCNYLVRNFPGATYYSAYEASYCGFWIHNRLTELGIKSIIVNAGDIPTTNKEKVQKEDKRDSRKIAKCLRNGELLPIYIPSQRNLEDRNLMRIRLMIAKDTRRIKNRIRSLLFFYGISVPERFKDLTNPWTNKYIQWIESIDIIENNAKESLNILLTECKMLRSFDLETLQKIRGLSQTDKYREQVRLLLTIPGIGLKTAMLILTELFCIDRFKTLDQLCSYVGIIPSTRSTGDNEIVGDITPRGHNILRSAIIESAWIAVRADPALNLAYNTLCKKMKANKAITRIGKKLLNRIRYVLLNQHEYVGALVK

SEQ ID NO: 85068 - protein, 374 aa, unidentified
MKRPKDKLIAGIDLHSNNVMIGVINQDGKRVAHRKLDCDLKQVTEFLGPLKPQLQAMAVESTFNWYWLVDGLRAQGYPIDLANPAKIEQYSGLKHVDDEDDAFHLAELQRLNILPKSHVYDPELRPVRDLLRRRTNLVHQRTSLLLSFKSLYTRTTGRRLSLNDTKKLTPKDASELYEHPANQLIAQVQTEHIDALNQSVNRLDKAVLACAREIPLYEKLLTLPGIGRVLGMTITMEVGHVKRFKTDGDFASYCRMVDARRLSNGKCKADNNQKCGNKYLAWAFVEAANFARRYDEHCRRWYDRKAAKTSAIIATKALGCKLAKAAWHVMTAQTDYDAKRMFPELVVTKTTGLESGRRRPTRGLRPRMKTTKAN

SEQ ID NO: 85069 - protein, 374 aa, unidentified
MARLHELTGQHLGEDAEDAEVVIGIETDRGPWVAALVAAGYVVYAVNPLQASRYRERHGVSGAKSDRGDSHMLADMVRTDSHQLRAVAGDSAEAAAVKVLARTHKTLIWERTRQVQRLRYQLREYFPAALAAFEDLDAADALELLARAPDPARARRLTRAQVHAALKRARRRDIPAKATAILAALRSAQLGQPEAVTAAYAVTARSLIAVITVLNEQVKTLQGQVEAVFGRHPDAEIYLSQPGLGPILGARVLGEFGDDPHRYASGKARKNYAATSPLTRASGKKKVVAARFIRNDRLTDALMAQAFTALSTSPGARALYAAERARGTEHNPALRKVANRLVGILHGCLKTRTLYDEATAWSHRENLPQSSVAA

SEQ ID NO: 85070 - protein, 408 aa, unidentified
MEITSIYKRVVGLDVHPGKISACAVVEQADGSVAIEIREFGGFKRDRKALAQWVPTFAPEVVVMESTGIYWKSPYAALEAVGVRAWVVNARHVKSVPGRKTDISDAQWLATLARAGLVSPSFIPPADIRHLRHIARQRQKLGGMLASEKNRLHKLLADAGVRLHLLVSDIHGQAGRAMVKALIAGKPMSAVLDCAGRLRASREELFEAVQPETLSGAHLFVLNEVMAHIEYLEATMARFDAQLLSEFKPWQAQLTILQTLPGVDRMGAAMLLVEIGTDMTSFKSAERLASWVGICPGNNESAGKRKSGKTRKGNAWVRRLLCEFAQAAARSRSALKDKFAALAIRKGHKKSIVALAHKMLRIIYAMLTNNTPYQDRTVDYEALMVQRNAPRWLKMLVKHGFIPAPAAA

SEQ ID NO: 85071 - protein, 419 aa, unidentified
MSFKIFKFNCCGLDVHKTWIYACIGITDSNGRTEYKQARFSSFSNGLRDLADWLAKYSCSDVCMESTGKYWIPVFNILEKTCWVTLAHPKYTKPQKGNKTDRKDAKWICDLYMCGMVKPSFIPPPDIRQLRDLMRYRVKLTNMLTGEKNRAQNCLTVSNLKLDDVFSDVFGKSSRSIIQYILEHPGEQFDVTPFIHRRCKHPVEEIQAAVDGVVSREQAAKLKECLLHIDQLNAHRERIEAEILRLAEPYPYQLELIRTVPGFAAAPLTAVALISEIGVDMSVFPSAKHLASWAGCCPRNDQSNKKVKSTRISRAGCYLKPLLVQIANAVIKSDRHPECRERYRRIKARRGHKKAIIAVCRMLLTAIWNVLSKLEPYSAKGYLADKLTEHSVVISKAEGLALLRKRGYIFKDELAVESG

SEQ ID NO: 85072 - protein, 346 aa, unidentified
MGKVLKQVAGIDIAQKELVVTLGRIWDDFSIELFAYKVFRNSDSGFKLLVEWTDKLTDDSVNVRYVMEATGVYHQKFAYYLFDAKEEVSIVLPNKISNYIRTLELKTITDKTCSQAIAQFGLERKLDLWTKPQLLYKELQQLTRERDQIVQERSIIKNQMHAENTEADPNQRSMERMQARIRFLNSQEKEIKEDIASIVKENPNLKQILERLTTIPGVGELTAVIVLAETNGFELIRNKSQLSSYAGLDVKEKQSGTSVKGKPRISKKGNRNLRKSMHLPALTAVKWDDNFREIYARLVSKHGIKMKALVAIQRKILELIYILFKNETIYDKKEYITKNSVKAHKA

SEQ ID NO: 85073 - protein, 437 aa, unidentified
MIPVTFSELVIRNQQRSIAVTKSKSQKIKSVNKETMIVTLDIGKGSHYGYFRASDGQDVEPFVFYNTHDSFHSFWKKLSRFKKAHGCKQVVVGFESTGPYAEPITHFLKQRPVTLVQINPMHSKRVRELTGNSPNKTDRKDPRVIADVIMLGHSLRVVIPHGSSAHLRRLTQARERAIRDRTAMLNQLQHLLFVIFPEFLKVIKNISCKTGLYLLRHYPSRQAIAALGEEKLGRIIKQVSRAKLGQGHARELFQSAQRSVGINEGQESIVEEIGHLVDTIGRENDFIERLECQMRSHLEQIPYSSCLLSLPGVGLITVAGLIGEVGDFRQYSTVAEITKLAGLDLFEVSSGKHKGRRRISKRGRPLMRKLLYFAAINAVKSTGTMHRPYTRMVERGMPKTKALVAISRKLLRVMYALARDQSIYMENFASHRYQCAA

SEQ ID NO: 85074 - protein, 313 aa, unidentified
MSELYVGIDVCKARLDGALSEGEPFSVENDEAGHRQLCERFCAARPTLIVMEASGGLERALAGQLTAAGLPLRVVNPRQVRRFAQAAGILAKTDRLDAQVLVRFAQAMRLEPRPIVSEQMQALQAVIARRRQLQEMLTMERNRLHLAHQGVRKDLKQSIRWLEKRLKSTDEDIGGMLRESGIWRDQVQLLESVPGIAQVTSVKLLAALPELGKLNRRQISALAGVAPFNRDSGRWRGKRKIYGGRAEARTALYMAALVGSRHNPVLKAFYQRLRSAGKPAKVALVACMRKLLIIINTMLREGRPWSPQLNQAA

SEQ ID NO: 85075 - protein, 447 aa, unidentified
MDTESATQYAAYIGIDWADKDHAYALRATEDKKVEQGKVEAKPEAIEEFVAQLRQRFGGKAIAVALEQSRGSLLFTLSKYDHLVLYPVHSSTLDSYRKACHPSGAKSDPDDAALILDLLQKHPEWLQPFAPDTVPTRTLQFLTEERRDAVNDKTRYLNQLTAALKTYFPQMLEWLDVDSKVMCEMLQRWPTLEQLQQQKPSVVEEFLREHRYPVVRVKPLQEAMEKAIPATTDQAVIEAKKFTVQRTIAQLEALRANIAELDRRIEQITRLHEDYRVFASLPCAGKVMVPRLIAAMGTQRDRFQTASELQCQTGIAPVKEASGQREWIHWRWACPKFLRQTFVEWAWLSTRKSQWAREFYDRQRAKDKSHHAAVRALAFKWQRIIFRCWKDRCPYDEARYLATREQRARTAKASTDGSPQLKSSQAGGVEITWKNVSGFSRPDSISC

SEQ ID NO: 85076 - protein, 351 aa, unidentified
MPAASQTAIAVVGIDIGKNSFHVVGLDKRGAIVLRQKWSRGQVEARFANMLPCLVGMEACVGAHHLSRKLKTFGHDARLMPAKYVRPYSKGQKNDFRDAEAIAEAVQRPTMKFVATKTTDQLDLQALHRVRERLVSQRTGIINQIRAFLLERGVAVRQGLRFLRAELPRILAMPPDVLSPRMVGVIEGLAEDWRRLDQRIGHLSDEITALARQDAGCERLVSVPGIGPIISSAMVAAIGTGEAFSKGRDFAAWLGLVPKQISTGDRTILGKISKRGNRYLRVLFVQAAWVVLIKPQSWQRHGLKPWIEAAKRRLHRNVLAIALANKLARIAWSVLARGRAFEARSAMTPAA

SEQ ID NO: 85077 - protein, 421 aa, unidentified
MPNIEIGVDSMVKENFIYVGIDLHKETHTAVMIDCYNQKLGEITFPNRPADFPKLVTKVKKCNTDAKEVVYGLENAYGYGRPLAVWLIDKGYFVKDVNTAISHRQAKHRGAMYRKSDSDDAEAIALATLNMLDKLPDACPNDAYWSLGQLVHRRDNIMKQRTRLVNQLHEQLCIAYPSYKQFFNDISRPTALYFWEHYPSRKYLKGKSVEDLRAELVPVSHNKCSTKTCEKILDAVASDKVKNNAYQDARDMVTLSIVSDLQHYDKQLAEVDKMLEQMYKMLGCTLTTIPGVNVITAVKILSEIGDIERFANANKLAQFAGIAPLHLSFSGKGKDVATKQGNRRLQATIYFLAIQMVQVSSKGTPRNPVVRAYYEKRKAEGKTSQQALICISRRLISIIYGMLKHGTEYRMPVVESAGENR

SEQ ID NO: 85078 - protein, 397 aa, unidentified
MYIVGIDIAKRKHEAAVIDGEGTVIIKPFSFTNNCSGYNRLLAMLAKAKLPLDEVSFAMEATGHYWLALFTRLQKEGFRVQVINPVQTNSIRSFYIRQAKTDPRDALLIAEVIRFGHFSESTLHPENIYELRELCRGRHAIVSMQADVKRKVVALLDQVFPEYETAFTNLFGDTSMAILQTCPTPKELSEMRLEELSNLIEVSSHKRFRMAKAQELQALAHGSFGFAMAGDVFSTMIRLYAKHLDFLKQQVREMDRKIAEIMDTLDTPITTITGIGPTLGAYILSEIGDISRFSSAAKLAAYAGIDPTMRQSGEYNGVRNRMSKRGSPYLRHAIWLAASSAVLHDPALKLYFQKKRDEGKPYMASVGHACRKMVSIIYAVMRDNKAYTPCIPNEISA

SEQ ID NO: 85079 - protein, 316 aa, unidentified
MNHQNSPVHIGIDVAKSELVLDLLNVIHRLPNSTSAIGNLLKTLASRPDASRLHLICEPSGGYEQTLVRAALKAGFTISLVQPLRVRRYAQALGILAKSDPIDAKLLSRFGADLKPMPLAPQDEDRLKLTELLNRRDELINTLQRERNRAEHHRDPLCLRQHRALVKMLEKHLAQIKDACDRLIASSSSLKKTRALLCNVQGVGQQTSAILMAQLPELGHASRSQITALAGLAPYDRDSGSISKKRFIHGGRTKVRRILYMAALTASRFNPVLIPVYQNLLARGKSKKLALIAIARKLLIHLNSLLSRQLKSSLAF

SEQ ID NO: 85080 - protein, 385 aa, unidentified
MNQTSSCAISTNTLHCALELSKNSWLLAIQFPEREQPSLYPIEGGNTEKLMAKLAAARDCWAKVSGSPPAITVCYEVGYDAFWLARFLMGRSIECLVIDPGSLQVNRRGRRVKTDRVDVKMLLRTLIAWCRGERHVWSLVRIPSIDEEDLRRSHRERGRLVRERTAHINRIKGLLFGQGIRGINVKSQYKTLAVDNLVTGDGHRLPPRLACEIAREIQRLAMVQEQIAKIERERDTAPTRCEATERKRHLLLQLKSIGPAISALLSREVYYRQFTNRRQVGSFLGLAPSPYNSGAEERCQGISRAGSGHVRAIMIETAWLWIRHQPKSALTRWFVERTAGQSTRVRKILIVAVARKLAIALWRYVEHGMVPQGAILNPPTTGNAR

SEQ ID NO: 85081 - protein, 361 aa, unidentified
MVNEVRIYGLKHQKEKRSMDHFAGLDVSVKETSLCILDDAGRIVREARIASEPEALLAVLRNPAYCFKRIGLEAGPLSQWLFSALAEAGLPVICVETRHMRAVLKAQINKTDRNDARGIAQMMRAGLYRPVHVKTLRSQKLRMLLTHRKLLQSKAIAIENDLRATLRNFGLKVGVVGTVKFEARIKELVEGAPDLAVLVEPLLIVRQVLREQLSILHRRLLAIVRDDDVCRRLMTVPGVGPVVALTYRATVDVPARFRNSKAVGAVFGLTPSKYQSGENDRTGGISRCGDEMMRAMLYEAAQILLVRSTKWSWLKAWAMKIARHRGLKKAIVALARRLAVIMHRIWVDGTEFRWTREAAAA

SEQ ID NO: 85082 - protein, 392 aa, unidentified
MLYLGIDIGKNTHVASLIDETAKPLFKAFSFSNTTEGANNLLKKLSLHINNSSEIEIGMEATGHYWLSIYSFLVENDFLVHVVNPIQTDGWRHGTEIRKRKTDAIDSILIADLIRYGNFVETSLSDEDTMSLRNLSRFRSYLISSVGDLKRKVICVLDQVFPEYQSAFSNIFGETSKELLSHFQTADDFEHISSEQLETVLENVSLKRFARNKISQISQLAATSFGLKFCRDSFSLQLKLLIEQIRFIEAQASDVESEIKNILDKMDSPITTIPGIGYINAAVILGEIGNISRFSNASKLAAYAGIDASVSQSGEYQATNNKMSKRGSPHLRKALFQAALIAAFHDPVFSAFYQKKRSEGKHHLTAVGAVARKLCNTIFAVLKHNTPYIPQI

SEQ ID NO: 85083 - protein, 402 aa, unidentified
MNCVGIDVSKGKSMIAVMRPFGEVVVSPFEVRHTANELSELAGLLKSLDGETRVVMESTGNYHAPVAWLLHDAGLYVSVVNAMLVHDYGNNSLRRAKTDKKDAVKLANYGLDHWLTLPRYVPDEDTRLMLKTCYRQYQQYSKVQTMLKNNLISLLDIAFPDANRLFTSPPRADGSEKWVDFVATFWHCECVCGRSEKAFTTQYQKWCRKHGYNFSEDKALDIYASACRHFGVIPKTDTAKLLVEQAISQLQTTSSALAALKQEMQSLAASLPEYPVVMGMFGVGPTLGPQLLAEIGDVRRFHSKKALVAFAGIDAPPYQSGQIDVRSRSISKRGSASLRRTLFLVMSVILQRAPMDEPVYQFMNKKRSEGKPYRVYMMASANKFLRIYYASVKAYLDSLGHD

SEQ ID NO: 85084 - protein, 388 aa, unidentified
MEARTVNNPPSAASHDETVRCVLAIELSKKSWIVAVNTPLSDKVSRHTLEACDWKGLLELIARIRTRVMALNRPVEVVSCYEAGYDGFWLHRLLEAHGVCNYVIDPASVQVDRRARRVKTDKVDVGRLLRSLLAYLRGEPKVWSVVRAPSIAEEDDRRLHRERDRLINERVQHVNRIKGLCAVHGIYDYEPLRPNRLARLEQLRAADSQELPPRVKAEIVRELQRLELVLNMIKTIEAERDAIVSAGKSSMHANAKKIQDLIRLKSIGPEIGTALVGEVFYRQFNNRQQLGSYVGLTPSHFQSGPMSRDQGISKAGNPKARTVMIELAWLWLRHQPNSPLSIWFRERVGTAKGRIRRIAIVAMARKLLITLWRYLETGVAPTATVLKG

SEQ ID NO: 85085 - protein, 410 aa, unidentified
MTVFMGDDWAEDHHDVHLMDDGGKKLASRRLPEGLDGIRMFHELVADHIGDSAELIVGIETDRGLWVTALVAAGYQVYAINPLAASRYRDRHNVGGAKSDTGDARMLADLVRTDRHLHRQIAGDTAEAEAIRIMARGHQNLIWSRNRQTNALRSALREYYPAALEAFDDLADRDCLAVLAKAPTPAAGATLTRGQIQAVLKRGGRQRNIERRASEIQIALRAGQLIAPAAVADAFAATTRAAVAIISELNRQISELEATLTASFEQHPDSDIYHSLPGFGVVLGARALGEFGDDPNRYANAKSRRNYAGTSPLTVASGKKKAVLARHVRNRRLYDALDQAAFCALTQSPGCRAFYDQHRANGDLHHQALRALANRLVSILHGCLEHHSLYDENIAWNHRHTTTPKETQAA

SEQ ID NO: 85086 - protein, 405 aa, unidentified
MFYVGIDVAKEKHYVCILDDTKEIAIKPFWIYSDILGLRKLVTILGELSLNNDDFIIGVESTGAFSENLYEYITDADYKVILLNSYQTAKFRDFSTGRKIKNDSIDAYVIAELLSTGKYKESFISNDDYQSLKVLGRLKASLMDKIKTIKREISTVVATVNPEITKVFPNIFTKTAIATIKAYPTAVDISKSTPKKLTEIFRHIKGNNFNDEKAKFLIELSKSSIYGGRAQEARALMIRTNFKILELLSQEKDEIELQINSLLYNKIEDIDSSIENIKTIPGVSDKTISALLGECGDIKRFPSVKAFIGYLGLYPTQYQSGNSMRVGRLAKRGIPIAKHALYMAAVASVIHNEQLRKIFRDKVSAGKSKKEALIIISKKLAAIIYSVFKYNKPYEPSRVFTPRKR

SEQ ID NO: 85087 - protein, 367 aa, unidentified
MAKRITTVGLDVHKESIDVVVAEAGAEGEVRHYGTIGGDLAAVDRMVKQLRASGRRLRLVYEAGPCGFHLCRRLEAQGLECTVVSPSMMPKRSGDRIKTDRRDAEALARLHRAGELRAIYIPGVDDEAFRDLVRAREDAVTSQSRARHRLKALLLRHGYRYAGRAAWTFRYRQWLSNVKFPTPAQQIAFQEYIDTIGEAERRVQRLTEQIRVLLPEWKRAPVVAALQALRGVSMVTAATLVAEIGDITRFNNPRELMAYLGLVPSEYSSGAKTRRGAITKAGNGHVRRILAEAAWAYRGQARVGQALMCRQNGLPRPIIDIAWKAQLRLTGRFRRLAARGKSLPKVATAVARELTGFVWDIARHAAA

SEQ ID NO: 85088 - protein, 412 aa, unidentified
MEGETVIAGVDTHKDVHVLCLLDGLGRKIWSGSFGADPEGYDRLAEAIGDPGSCMVVGVEGTASYGAGLTRRLVELGYNVVEVLRPKRDKVRPGEGKSDPLDAERAARKAASGKGCSVPKSQDGWVEAVRQLYVARRLAVATSTSCVACAKSMLTTAPSALRERFRGRERPKDLMPLLARGRKAGDALEESVLASLRSVAAVWKEARSQVESLDERIRALLEANAPALLGVEGCGTTTAAALVVAAGDNPGRLKGEAAFSMMCGASPIPASSGKTDRHRLNRGGNRQANWALYEIAIKRMAYDERTRRYVARRTSEGKSRREAVRCLKRYIAREVYRVLMDPNPDGAAPEGPELAKMRKAMRVTQKKAAAELGLSAATLGHLERGKRRSTKLERRYYELLCELERALPQTAS

SEQ ID NO: 85089 - protein, 417 aa, unidentified
MEEGEKASTCRYIGLDIHKYYSVVAGVDREGKEILPACRVEHMDLEDWLKKHLLATDRAVIESTTNAWHVYDLLKPLVAEVLVANPIKVKQIACARVKTDKKDTFILARLLAANLVPTVWVPPKHVRELRQLISHRRRMAGMHTQVVNRMHSVAHRHHLNHPKGKDFQPKNTGWQRDESLSKLEKMQLELDMETREHLEKQIERMTRELGRMSHEEPWASEMLYLMQVPGCGVVTGMTILAAIGDITRFETPKALASYSGLTPGLEQSGVKLRGKGITKEGRRELRWVMVEVAWRAVKADPYWKKYFEELKRRMHPNQAIVAIARHLLTMVWYVLTRHEPYSHYSPERIAYKYLTWSWALDKEQRQGMTRPQFARYYLMRLGIGNELKRVALNPENPYKLAPMEEVLALWPELRPPD

SEQ ID NO: 85090 - protein, 408 aa, unidentified
MKTLHKRCAGLDVHKVEVVACLRLISKRKVEREVRRFPTTTQGLLALAEWLESAGCTHVAMEATGVYWKPVWHILEGRFALILANAAHVKNVPGRKSDVNDATWLADLLAHGLIQSSFVPPPAIQELRDLTRTRKQLTREIVQHVQRIQAVLEEANIKLCSVITDIMGASGRRMLKAMIAGETDAEKLAALGHERLGCTRAELVQVLTGCVREHHRFLLEQHLRTIEQLEDSIAAFDARIEAALLPFHDVVERLNEVPGLGATAVETVIAEIGIDMSQFPSAGHLLSWAGFVPRLDESAGKRRSTRIKKGAPWLKPVLLQSAWGAARKKNSYLQAQFLRLKARRGAKKAAIAVAASILTTVYHMLRDGTYYQDLGPEYFARRNPAKAAARLANRIRNLGYQVEIRAAA

SEQ ID NO: 85091 - protein, 387 aa, unidentified
MIAVGIDVAKRTHEACFMGQDGQQVGKSRRFRNTQPGVRALLDDVQRLPEPVTIGLEATGHYWLALHDALIRAGHSVQVLNPLQTHAYRKTTVRKVKSDRKDAWLIADVVRIGRGRAAYVPDETILQLRELTRFRWGLVDQIGDAKRRALSILDRVFPEYEELFSDVFIKSSRALLQQAATAADFAEADLSELTAVLKKTSRGRLGLVKAEAVQAAARDSLGLAKLGGVAGFELRALLDQIAFVEHQVAAVEQQIEVLLGTIEQHVTDIKGIGPVLSASLVAEIGDVSRFPRLESLVAYTGIDPAVFSSGEFTATETHMSKRGTPYLRRALWLAAVSASRSNPDLAAYLQRRLDQGKPWGTAMGAVARKLLSRIYVILKHNRSYEVR

SEQ ID NO: 85092 - protein, 421 aa, unidentified
MFKIVKFNCCGLDVHKTWIYACIGITDSQLRTEYYEARFSSFPKDLRRLAAWLQKYDCKEVCMESSGKYWIPVFNALEETCKVTLAHPKYTKPQKGNKTDRKDARWICDLFMCNMIKPSFIPPTDIRHLRDLVRYRIKLTNMLTGEKNRALNCLTVSNMKLDDVFSDVFGKSARSITEYILSHPGEKFNVAPFVDKRCKTPIDVIQDAVDGAISPEQAVKLRECLNHIDELIAHRNHIEKEILDLVKPFSAQLALIRTVPGLNKDPMTAITILSEIGSDMSVFPTAKNLVSWAGCCPRNDKSAKHVKSTRIAAAGSYLKPLLVQVANALLKSKQHPEFTERYRRIKSHRGHKKALIALCKMLLTAIWNILSSGEVYNPAGYILQTSRPAPEKKVLTQKQAFELLRLRGFVIKDDPAVLASA

SEQ ID NO: 85093 - protein, 355 aa, unidentified
MNSEKYIGLDVHQATISVAVMDGRGKIVMESILETKAATLLEFLAGLRGSLSVTFEEGTWAAWLHDLLKPHVQKLVVCNPRKTALLKHGNKSDRIDARKLANLLRLNDLEPVYHGETGVRMLRELARSYLTLVKDLTRVMNRLKAMYRSWAIPCAGRDVYYTRHRTEWLSKIREAGVRRRAEHLYQQLDMLQHLRQQARRELLVESRKHAITAKLRQIPSFGPIRAALAVALIQTPHRFRTKRQLWAYSGLALETRTSGEYCYVRGQLRRSKKQISIRGLNKDHNHDLKGLFKAAATRASVQPGPFQDFYQRSLAKGIKPTMVRLTLARKLAAITLTLWKKGENFDVEKLKSQAA

SEQ ID NO: 85094 - protein, 331 aa, unidentified
MTTAIHAGIDVSLASLTVALIVDEASEPRVTEFSNRPAGHRRLLSWLAQYGAPVQVCLEPTSTYHLAVCRALHEAAHCTVAVVNPRALRHFALGQMRRAKTDRCDALVLAQYGRLLTPPSWQPPREVELALRGVGRHLGSLTKRRTVLKNQLHSARHGEAPRMVLNDLRLELRALESRMAKLRQGALELVAADPMLSRRYQLLLSVKGIGPISALSLLAELSVLPPGMGKRQWIAAAGLDPQPRESGQSVAGPRRISKQGNARLRAALNIPALVASRYCPAVRAYYEKLQARGCSKLAALCAVMRKLLQSLWGMFSTNQPYNPALFYQPQP

SEQ ID NO: 85095 - protein, 348 aa, unidentified
MAHFVGLDVSVKATSVCVVDHAGKVILEQKVPTEPADIIALLTSIGVTFGRIGIEAGPLSQWLVNALTAAELPVICVETRHMKALLTAQQINKTDRNDARGIAQMMRVGLFKPVHVKTLVAQEQRMLLTSRKLLQRKLLDVESDLRGTLRNFGLKVGIVGGSRYEARVRELVAGFPRLAAIVEPLLSVRRVMRQQFAVLHKMLLDMVRSDPVCRRLMTAPGVGAVVALTYRATIDQPQRFVHSRAVGAHVGLTPKRYQSGEIDYDGGVSKCGDTLLRTMLYEAAHSLLTHSGKWSWLKAWGVRVAQRRGMRRAIVAVARRLAVVLHRMWVDGSEFRWRKGSATVPAVA

SEQ ID NO: 85096 - protein, 448 aa, unidentified
MLESSSSSSSASSEPQWAAFAAIDWADKKNYWRLLPAGSERSEVGELENTPEAVERWAATLQERFSGRPIALCLEQSRGPLVYMLTKYPHLVLFPVHSTTAARYRETFAPSKAKSDPSDTAMLLDLLLRHRERLRRLEPDTPETRLLHFLVEERRQTVDEKTRESNRLTACLKLYFPQILNWFDDVTSPLVGDLLERWPTLQQLQRAHPGTLRRFFHEHNCRSEELMQKRIDGIYHATPATKDQAVLEAGAIISRGLVRVLQTLRSNIAVFDSRIQELVSTHPDGAFFASLPGAGPVLVPRLIVAFGTDRQRYQSAYEMQCYSGIAPVKEASGKSIWIHFRFACPKFLRQTFHEFALHSIGQSGWAKAYYEHLRHDEKKDHHPAVRSLAFKWIRIIYRCWKDGKPYDESTYLKSLRRRGSLLPGFAELAAGAGWKTVGAFQKFCGNKS

SEQ ID NO: 85097 - protein, 445 aa, unidentified
MSDSLPSVSSKRDYAAFAAIDWADQKNFWRLHQAGSQKEERGELENTPEAVEVWAASLYERFGGRPIAICLEQSRGALVYMLAKYPHLVLFPVHPTTAARYRETFRTSGAKDDPSDTASLLDLLLRHPEQLRAQQPDTIHTRLLQFLVEQRRTMVDEKTRQGNRLTDCLKLYFPQLLRWLNDVSSPLVGALLERWPNLPALQRSHPGTLRKFFHEQNCRGEDKIEERIAAIYQAVPATGDAAVCEGVSLMARGLTAVIATLRTHIAEFDRRIAEVVATHPETPIFDSLPGAGKVLVPRLIVAFGTRRERFADAEEIQRYSGIAPVTKASGKTQLVLCRRACPKFLRQTFHEFALHSVGQSEWAKAYYVHLRNDEKKDHHAAVRSLAYKWIRIIYRCWKDGKPYDEQIYLRSLRRRGSPLGGAFAAATSAGWKSVGGFQKLSENNS

SEQ ID NO: 85098 - protein, 344 aa, unidentified
MWIIGCDFHSGFQQVAIFDNQTGEIEEKKLLHPAQATEFYRGLQGEVRVGMESGCGCQWFRRLLQECGHELWMGDAARIRAAETRQQKTDRRDAELILKLMLEERFPRIWVPTEAERDVRQLLMDRHHRMRMRTKVKNQLQAMALNQGMQKGRRLWTDEGLQQLRQLPLLEHAGRRRDQLLKLLTELNQQVAALDGLVRAEVEGREEARRLMTHPGVGPQTALGMVLTVGDVSRFAGSKQLASYLGLTPREHSSGGKQRLGHISKQGSSFMRFLLVEAGQTAVRGDDQLRRAYRRLAAKKSRGVAKVMVARRLAIRLYWMLRNQWTYAELARHAGKPGSSCGEQ

SEQ ID NO: 85099 - protein, 487 aa, unidentified
MRPRTTNSSTQTFDVYCFSFESAGALAFVNEYSGFAVQPARYIAFAECKLARPGSPIYHCRRCRVKPRSDPRFTAHVGIDWADAKHDVCLQAADSEQREFDRFAHQVGSIDQWAKSLHQRFGGPIAVALELAKGPIVYALQKYDFFVLFPINPATLAKYREAFKPSGAKDDPTDAELALDLLLRHPERFAPLKPQSVAMRTLLSLIEQRRELVDDKTRVTNRLGNALKQYYPQALDWFEQRDTILFCDFLSRWPTLSAVKRARKAGLKAFFYAHNGRRPKLIDDRIDSIRAATPLTDDMGVIAPYRLQVLVLVEQLRVTLQAIDRFDRQIAAVAATLPDYALFSPLPGAGPHLAPRLLAAFGEQRERFMSADELQKYSGIAPVTERSGKKRWVHWRWQCPTFVRQTFVEWAGQTINKSFWAGVYYRQQRDKGSSHQAAVRSLAFKWIRILYRCWQAGTPYDESTYLNALRQRGSPLLKHLHPTAQNA

SEQ ID NO: 85100 - protein, 340 aa, unidentified
MKSKRYLGVDLHRNCFTVYTRREDGSGESREWSIRSLKAFAKTVPASDEVAVEATGNTRLFCEALKDRGCRIVVVNPHQFQVISRSVKKTDEHDAKVLAEFLAKGMLPEVRMKDEMHARVASLAQTRDKLVKLRTTLKNKVNNLLAARGVLIRKESLASEKGLAEVLAAPVSELERLELDILVGEIRHLNESINKMEGLLRDQGPKLPGWENLTSIKGIGDTGASILLSTIGNIEDFADEGKLAAYFGIVPRVSHSNETERSGRITKRGCKLGRTALVQCALIAARYSPYLQAYYRRIAAHRGTGKAIIALARKLLGIIYKTLKNNWIFEDFPNFVLAKA

SEQ ID NO: 85101 - protein, 412 aa, unidentified
MKEIRDKVAGLDVHRDTVVACCRMPGPRGGVKVTKRSFRTTSKELAELAHWLTEAGVSTVVMEATGVYWKPVYYSLEGLFDELWLCNAQHVKNVPGRKTDLTDAEWLADVAAHGMVRPSFIPPADIRAVREMTRYRKTQVDARTKEIQRLEKVLQDAGIKLSCVASGVWSKSAKEILEAMIAGERDPKVLAEMAKSRMRTKIPQLEEALSGNFGPHHAVVCRQVIDHIDFLDRSIATLTTEIAALLAPFEATLTIICSITGVGRATAEVMVAEMGTDMSRFPTAGHLCAWAGVAPASRESAGKRRPTGTRHGSTWLQRALIEAARAAARTKGTYFSAQYARIARRRGPNKAAVAVAHSILNATWHLLTTGALYNDPGADYFSLRHDPAVEAKRLQKRIEALGFDVTVTAAAA

SEQ ID NO: 85102 - protein, 338 aa, unidentified
MKDIKYFIGLDVHKERTSYCVRDKLGNILTEAETATLYSELEPRLKPYLAYSLIALEASTSYYTLYQTFLKKGYRIKVANTIQLRQLIAKNDKLDAQRLAEMLRLGTLPCSYIPEERIQHLRSMVQMRHALMQEKVRCNNRIQAFLDRNGVVMPPVKAFSKKWKHALMQHLGTGTASMELRYEYNHYVYLEKTNEQADQEIIGYTKTYWKVEYNLLRSITGFGVLLPCYVIAFVHPIERFLSNRKLRRYAGVIPLSKESGDTTSPGRIPKTTSKALLRWALVQAANTIGKTNTRLGRYYRRKKNQKKKSGIAKIAVASTLVDIIYKVLTTKKPYVPTC

SEQ ID NO: 85103 - protein, 437 aa, unidentified
MDAVPRRDLHGRILSPSCREDGGTCSRARRAFYYHDVGLDVHKDSIKACVRKPGQGKKRDQHITTFGTKTEDILALREWLEQWKVTHVAMESTGEYWKPIYYLLEDRFHVLLANAAHIKNVPGRKTDAKDGAWIAQLLECGLVAKSFVPPGPIREIRDLTRYRKTLIRQRTEEVLRLHGVLQRAGIKLSSVASNIVGVSGRAILNALVEGKKDPAAMAELARGQLRKKIPQLKQALAGRFTNHHGKLVNHMLSHIDYLEEVIADLSTELDALMEPYAAQIALLETIPGVERRTAEVIIGEIGVDMGQFPEGRNLCSWAGVCPGNRRSAGKRKPEKIRKGGRWLKPALTEATWAAVKENKSYLSGQYHRLVPHKGKKKAAVAVSHSMLVCVYHVLKKATPYRDLGADYFLRRNQEATKRRCLRQLEQMGYAVALQEIA

SEQ ID NO: 85104 - protein, 343 aa, unidentified
MDYYVGLDVSLKQTSICVVNQAGSIVHEGVADSDPEAIASFVRSKAPGTLRIGIETGPTTTWLWTELKRLGLPVICIDARHAKAVLKMQINKSDRNDAAGIARIMQTGWFKEVRVKDLDSHAVKALLASRALLVKIKRDLENQIRGLLKNLGLVIGRAKFNVFAVRAEELIEDRPELVAAVRPLLDARKAIERQVGDLDRKVHKLARHDVQVRRFMTVPGVGPITALCFKATIDDPTRFRRSRSVGAYVGLTTRRHASGEVDWSGRISKCGDAMLRMYLFEAAGVLLTRVPKWSGLKAWGAKLTKRNGLRKAKVAVARKLAVILHRMWIDGTEFNWSTKKAAA

SEQ ID NO: 85105 - protein, 390 aa, unidentified
MKKNTTAKKNQRAHVNAGRKRLRQMAAEQRLTIGLDLGDLYSRYCIMGEAGEIVREGQLPTSKAGLDSLFAKMPSSRVALEVGTHSPWVSRHIAGLGHEVIVANPHKVKLISQSVRKNDRIDAQTLARLARADPQLLFPIRHRGEQAQADLAVIRARAELVETRTSLINCARGMAKPMGERLKKCDAEQVKESLADGLSEALQKVLRPLLKSVEAISQQIAVYDRQIEEISKRYPEIQLLKPVYGVGPVIALAFVLTLEDAQRFGHSRDVGPFLGLQPRQRESGKSQPELGISKAGDGLLRSLLVQGAHCILRKGAPESDLRDWGLEHLGRGGKNAKRRTVVAVARKLAVLLHVLWANGVVYDPLYNRKAAEAAKAKAEAQARAKGKAVA

SEQ ID NO: 85106 - protein, 393 aa, unidentified
MPLQQPPHRRHRQAQPQTTADHEHTTKRIAYLSTLDRQDDFGKLQAKHGTVLVVVDQPASIGALPLAVARDMGCPVAYLPGLTMRRIADLYPGEAKTDARDAFVIADAARVMPHTLRSVDLQDETVAELEMIVGFDDDLAGEATRISNRLRGLLTQIHPSLERVLGPRVQHPAVLTLFDQFGSPAQIRKAGRRRLIALIRPKAPRMAERLVEDIFTALDEQTVVVPGTDAAALIVPSLANSLRVVLDQRKLLATRIQELLENHPLSKVLTSMPGIGVRTGARILIDVGDGNSFPTAAHLAAYRGLAPTTRSSGSSIRGEQPSRRGNKQLKRAFFLSAFAALADPVSRAYYDKKISQGKHHTQALLCLARRRADVLFAMLRDGTLYDPQPAPSA

SEQ ID NO: 85107 - protein, 387 aa, unidentified
MIYYIGIDISKYKHDFCIISNTGKVIVENSSFENNKKGFQSFLELLKPYNKSDVRIAFEATGHYSKNLELFLINQDYSFMKMNPLVIHQFLKARSLRRTKTDKADSLAIANYLMSVPYKPNSGLLYNIFTLKSLCRSREQLIKERSKYQVLLTNELDLTFPELKQFLNDRISVTLLFILEKYVNTEHISLMRDYDSIKNISHGKFSYVKFTKLKELAKNSVGHHDKNTDLLISTYVSIIKTFNDKIDPIEKQISTIIKELNPRMLTIPGIGEISAATILSEYGDICNFSSSNKMLAFAGLEPSIIQSGTIENNGKMVKHGSGHLRYAIMNTAMSILRYSPAFYDYYLKKRSEGKCHRVALSHVCKKLLRVIYTLEKNNINFNPSLLK

SEQ ID NO: 85108 - protein, 452 aa, unidentified
MGRRQLQGLPLVRTKVAGIDLGSERHWVCAPTEDGGGREIADFGATTPELIRMAEWLKVRQVESVAMESTGVYWIAPHEILEAQGLAVLLVDTRQLARVPGRDKKTDPTDCEWIQRLHGCGLLQGSFRPPEDICMLRTLVRDKATLVAESSDWVRRMQKSLDQMNVRVHRAVSSIEGTTGMAILRAIVGGERDARKLAKLRDPHCRKSEAEIAEQLSGHWREDHLFSLKQALKMYDAILKRIAEYEEEILRRLGEMERPEQRGQSAPPPHNANKARAIRKRGQEAKRQALFRMSGVDATQIDAIGVETVEVVLSEYGPDLSRFPDEKHFVSHATLAPHMAKSGGKPVKKKKRNSSSTRVAGALRMAALALRHSDTALGAYYRHIAQRVGADVAVFASARKIATLIYRLLRWGQPYADEGTKAYEDRYRELRIRGLKSKAKQLGYQITPVTAS

SEQ ID NO: 85109 - protein, 436 aa, unidentified
MTSHCRSCTYKLSGGVSLAFKIFRFNCCGLDVHKTWIFACIGITDSNGLTEYKQKRFSSFSRGLRELAAWLASFNCADVCMESTGKYWIPVFNILEKTCNVILAHPKYTKPQKGNKTDRKDAKWICDLFMCDMIKPSFIPPARIRHLRDLVRYRLKLVNMLTGEKNRAQNCLTVSNLKLDDVFSDAFGKSSRSITEYILAHPGETFDVSPFVDSRCKSPIEEIQAAVDGAISSKQAVKLRQCLNHIDELENHKEKMEREILRFSDPYLDTLNLIRTVPGLGKNPFTAIQILSEIGDDMSVFPTDQHLVSWAGCCPRNDQSSFKIKSTRISRSGSYLKPVLVQVANALIKSKKHPEITERYRRIKSRRGHKKAIIAICRMLLTAIWHILTDSKPYTAEGYLSPRPVKIEKILTASQALNLLKLRGYVIKDDLPVTAS

SEQ ID NO: 85110 - protein, 312 aa, unidentified
MGGVNAAIEVGKQQLVVQLGSQGEQFTEANEPRAIKRIAKRLSQAGCERVLIEGGSYQSVLIAGLRAAELPVVIVNPRRVREFAKSIGQLAKTDKIDARILALYGEQTQPPLRELPDEQSQALRALWVRREQLIEMLGMEQNRLEHVAEKAKTVRHNLRSHIDYLRKQIKQADDDLDREVRNSSLWDKYEVLSSVPGVGLVSVALLSDLPELGRLNRGEIAALAGVAPFNCDSGTLRGKRKIDGGRSRLRRVLYIATVAAVRCNPVLKPFYLRLRAAGKPAKVALVAAARKLLTILKAMLKTKTAWRPPCPA

SEQ ID NO: 85111 - protein, 374 aa, unidentified
MNQFIKYVGLDTHKDTIAVAIADAAGGKPRYYGEIANTPTALTKLMKDVSPNGEVVSYCYEAGPCGYGIYRQISDSGHDCAVVAPSLIPTKPGDRVKTDRRDSENLARLHRAGELTPVWVPDQEQEAMRDLTRAREDMKHLERQARQRLCAFLLRHGQRYDSGKSKWTLTYWRWLERIKFGHRVQQTVFQEYIDSVKQQQQRVADLEQAMHEALADWALAPVVEGLMALRGCRLITAMTVVAEIGDITRFDSPRQLMSYLGLVPSESSSGPKTRRGGITKTGNGHVRRVLVEAAWCYRFPARKTAPLQRRAEQTSEEVQAIAWKAQKRLCGRYQALSKRGLLPQKISIAIARELAGFIWAIACEVTPKNISARS

SEQ ID NO: 85112 - protein, 348 aa, unidentified
MMIIGCDFHPSWQQVSWVDRETGETGEQKLVTAAGDAERFYRQVAAPALIGMEATGNCHWLVDLLSELGHELWVGDAAQIRVSVVRQQKTDKRDAAHILKLLVEGGFPRIWMPSSEVRDLRQLLVHRYKLVILRARVKNELQHLALNKGVQRKRKLWSQAGQQMLHELPLQPWASRRREDLLRLLEMFNQQIVPLDAAVKAEAERDPRARLLMTQPGVGPITSLAYVLTMGDVSRFARGKQVASYLGLIPREHSSGGRQKLGAISKQGNRMLRMLLVEAATIAVGYDPEFRKEYQHRCHSKPKAVAKVAAARKLAIRLYWMLRTQKPYPEVVPIESSPRVPLVLRHGG

SEQ ID NO: 85113 - protein, 411 aa, unidentified
MDVLVERCCGLDVHRDTVVATVRTPEDRGRRRQQTRTFRSTLSQLEELGDWLVDLGVTLVGMEATGVYWKPVFSTLERRLECWLLNAQHLHNVPGRKTDVADSAWICQLLEHGLVRPSFVPPPEIRDLRDLTRLRKAHTEERTRAIQRLEKVMQDAGVKLTSVASQAFSKSARAIVEAMLAGTTDPEVLAELARGRLRSKIPALREALANRFRIEHHGALAATLLAHIDAVDAALSVLDDRIAERTVPFAEVIELACTIPGVARRTAEVLLAECGPDMSRFVTSAHLASWAGICPGNNESGGKRGSGRSRPGSKWLRHALTEAAWAAARAKGTYLAAHHAQVRGRRGRAKAVGTTRHDILVAYFHVVRDRVPFHDLGPDWLAARFSIEHRTARLVRQLEALGHSVSLDPVA

SEQ ID NO: 85114 - protein, 404 aa, unidentified
MVFLGIDWAEEHHDAWLENEQGEMLGKARIANDVGGVRQLHKLVAEHAHDPSQVVVGIETDRGLLVSALVGAGYQIYAINPLSVSRYRDRHGTSGAKSDRADAKLLADLVRTDRHNHRPLAGDSELSEAIKVLAREHQDLVWTRKRFINRLRSTLREFYPAALEAFGTDLGALDALAVLERAPTPWQGRQLSHAKIVSMLRKAGRQRNLEPKAVEIQRALRSEQLQAPAQLQAAMAIVVSSCVGMIKSLNLQLERVATEMTASFEGHPDAEIYLSLPGLGVVLSARVLGEFGDDRARFADAKARKAYAGTAPVTQASGTKKIVLARFARNRRLADACYCWSFSSLTRSPGANRYYRTLRTRGKTHHQALRGLANRLVGILHACLAVGQTYSESLAWPQPYEIAA

SEQ ID NO: 85115 - protein, 372 aa, unidentified
MDRVCGLDVHKDSVFMCILTANGEKIEDVFGTLTPELDRLRDTLVSHGVGKVAMESTSIYWVPIWRILECDFDVKLVNPYFIRQLPGRKTDIKDAQWIATVLQKELIKGSYIPDSKIQELRQYSRRIFHLTRRKQQAESAIDLTLQRCNIRLSNYVSDIGCKSMRKVVNALICGETDSEVLALLVHKRIRNKHCHEVIKSSLTGIVSSSDRDMLKMSLEEVELYDRQLLECKEKMRIICEGHYAEELEILQTTPGIKEESAMRIIAEIGVDMKAFLTASALVGWAGLRPRNDQSAGKIKGRKTLHGNKYLRVMLTQCAWGACRTQTSKFYSRYHTLKKRMNHNKALMANARKLLVVIWNLLAKKQPYMPLVN

SEQ ID NO: 85116 - protein, 341 aa, unidentified
MRYIGLDVHKDNITACVLTSTGKPKFEKDFLKESGNWILDELLDFGDKEGFCVMMESGTYAYAPFRFFSDRGIEVHVVHAKALKVITDSDKKTDRKDALTIAKMLRLWKKGDIDLQMAYMPTREQCELKDICRYREEISKKIGDETRRIKSHMSRNCEYLPEEFDNFQTEKARQFVKSTYPKDRTLMRRMDCLIELFNERDLIKVDVESRLPCSREVELLCGIPGIGRQTAVQIMSMIVDVNRFADAEKLCAYFGMVPRVRDSGGKEHHGRMTKNGDRMMRMIMERVTESHVRNCNSSLTQYYKRKRDEMGTKKALITASRKMLSVIYAVLKSGRDFRIAA

SEQ ID NO: 85117 - protein, 313 aa, unidentified
MSNSKVLKEEQVSNHPQAIATVIAGIKEELSMSNDSLIICAEHTGQYTYPLICACKSVGSKLWLENASQIKYCSGVTRGKNDKVDARRIAVYAMRFFDKAKPYQRPTEELMRLKQLEAERSLYLTDLAKYKAQLSDQEGFMEDKIFKRKAKRLKEMIKSLEKTLKEIAQEMADVIYSSEELSRQMRLLKSVEGVGPVIAMNMIIATEAFTRFDNPRQFNCYVGVAPFAYTSGSSQHSRNRVSQRAVKYIKCLLHMAAVAIAHKKTGDLKTYFERKVAEGKNKMTVLNAVRAKLVARMFAVIRNNRVYQPILSV

SEQ ID NO: 85118 - protein, 346 aa, unidentified
MTNNIQFSSVCGIDIAKSVMQVYKVTSDGVVSNKAVKRADFLNEFRNIPASLIGMEACGGSQHWARELQSLGHTVRLMPPKLVKPYVTGLKNDKNDARGIYTALVMGVREVPVKSAAIRDLALLQTMRTKRQREKVAKINHIRGILTEYGLVMGKSVNAFLAKAASLIVELKERVDVSPVIVSELIALFQEVKEAIAKIKELETNIESIAKTLKQYELFQSAPGVGSITAATMLVLLCNPAVFKNGREFAAYIGLAPQSTGSGGKNIVTHIPKKYECNNEVRALLVQCAHSICRCRHKSDWVSSILARKPKKVAVIAIANKLARQLWIMAKKGEKFERRFILAAAQ

SEQ ID NO: 85119 - protein, 310 aa, unidentified
MDSKKTVTYIGVDISKETLEVCLPSGKRTLPFTAPGLACLRKALRTNESPHVVCEATGGYEKALLENLWENGLDVSLVNASRVRNFAKSEGLKAKSDPIDAYVLTRFGEEKRPPKCDPPSPERKKMIELLDRRTQVSGMIAQEKTRAQKAPYSLKVSFERIIQTLDQEILSIDQELEKCIQSNERLRQMDRIFQGVKGVGSVTSWTIIAYIGDLTQFSRNRLVALVGVAPFDQDSGTQKGRRRIEGGRAKVRRALYMAAQSAASYNPVIKTYVDGLKQRQKPHKVALTAAMRKILIHLHSLSKKENLSLA

SEQ ID NO: 85120 - protein, 349 aa, unidentified
MRFYTKQHRFYCGVDLHARTMYLCILDADGQVVFDKNLPARADAFLSAIAPFRDGLVVAVECLFCWYWLADLCAKEHIAFVLGHALYMKAIHGGKAKNDKIDAGKIARLLRGGNLPQAYVYPAGMRETRDLLRRRQYLVRKRTEALGHIQNTNSQYNHPPFGKQLGPAANRAELAVADRFTHPSVHKTIAIDLALIDYYEELIDDVERYLIDTAKVDDLQAYYHLQTIVGVGKILGLVLLYEIHDIRRFADVGHFLSYARLVRCAHTSAGKKQGSGGKKIGNPHLRWALGEAACMMVCHSARAKKWMQRQEKKRGKGKAMGILAAKLGRAVYQVLTKKVAFDERRFWAC

SEQ ID NO: 85121 - protein, 382 aa, unidentified
MDVLHACCAGLDVHKRTVVACVRRVDPAGKVFKNIKTFATMTQDLLNLSDWLAAQGVTTVAMESTGTYWKPVFNLLEPRFAVVLVNAHHIKQVPGRKTDVKDSEWIAQLLQHGLLRPSFIPPRPTRELRDLTRQRTQLTAEKTAVANRIQKVLEDANIKLGSVASDVLGVSGRDMIEAIIRGEFDPVKLADLARRRLRGKIPQLQLALEGSVTEHHRFLLRTQMDHLNHLERLIRRYDERIAEVLDPFAEQVGRLMTIPGIDHRVAEIVLAEIGLEMARFPTAGHLSSWAGLSSGNHESAGKRRSGGTTPGNRWLKSALVQSAWAAYRAKGTHLSRKFRRIAGNRGKKRAAVAVAHTPLVIIYHLLRDGTNYQEIAGDSEAA

SEQ ID NO: 85122 - protein, 353 aa, unidentified
MDVFIGVDTHKETHAIAVINGVGELLDTFTIDSNPDGFREAMERTAKYGVVIWGLEGTGSYGRPFANALIAGGCVVYEVPGTITRRQRRKLPGAGKSDARDARAIAEAVLREREHLPRHLESDAEEATRLLYSRRDRAVQERTVKVNRIRALAVQLQFRLPRDLTTKRSFKELIEALGLTKTRGYADFEALDEMRDLVADIQRLDKKISDIEVRLRPFVERLAPELLDIRGCAFVTAAGIIGNVGSTLNYRSADAFASHAGAAPVQCSSGKFSSVRLNTGGNRQLNRCLHNIANVQMRTEGHLGKAYYDRKRAEGNTHREAMRCLKRKLATVIFRTLCATDRRRWPTQTAAAA

SEQ ID NO: 85123 - protein, 354 aa, unidentified
MADQIAVVGGVDTHTDFHQAAVIDTIGRHLATASFPTTPDGYRRLLEWLRLHGDVLAVGVEGTGAYGSELARFLGRNEVSLVDVDRPDRKARRANGKSDPVDAYAAATAVLSGRAHGQPKTRDGIVEAIRSLRVVRRSAIKSRTQTINQIRTLIVSAPAGVRERLRGLPTYQLIAQLARSRPGADLADPTCAVRTALRRLARRYQHLTEEIAEADAELDPLVAQAAPGLVDLTGVGTETAAQLLITAGDNPDRLKSEASFAHLCGAAPISASSGRTNRHRLNRGGDRQANHALHTIALVRMRYDPRTRLYVARRTAEGMSKKDIFRCLKRFIAREVYKHLTSMNIPRLHLLQAA

SEQ ID NO: 85124 - protein, 334 aa, unidentified
MIITEKYVHLQKTIESMVEQIIFEQLVERGCGIDIHKSILVATIRGVGLTEETRSFDGFTESIEELRDWLKVNGITHVAMESTGVYWKPVFNILEADFEILLVNARHIKNVPGHKTDKKDSKWIAKLLLSGLLKGSFIPPLPIRELRDLTRYKRKIIEQISSDKNRIHKILEDANIKLSSVVSNLSGATATKIIDAMIEGEEDIDKLVRYRHGKMQTSVKDLALSLKGNLTNHHRFMLQTVKESIRSKEQIIAKLDEQIDMQLKDNELVLDAELLATIPGVGKEGAAYIIAEVGNNMNQFPDEQHLASWAGMSPGSNESAGKKKALELPMEINI

SEQ ID NO: 85125 - protein, 356 aa, unidentified
MLNKFNNFVDFSGHNVYAGLDVHGKSWTTTIIVDDIEHRRFTQPPEPMALYKYLSSNFPGANLFSAYEAGFCGYHHHRKLIELGIENIVINAADLPITNKEKVNKNDHIDSRRLAQALQRNELKAIHVFGPEHEQFRSLFRMRWTAAKEHRRAKNRIRSFMYYYGINPPSEFNPEHWSLGFIHWLDLIIMPTQAGTLSLKSLLKAYHNTREQLLEVTRQLRHEVKLHYPDLYKMIMTVPGIGPIVALCLIAEIGDITRFRSYRHLSSYAGFIPNSHQSGDKDPKGRLTYRSNKYIRSMLVEAAWVAMRHDPALLKYFKDRVIKQESKRVIIKVAHKLLNRVRQVWISNNPYQTGLI

SEQ ID NO: 85126 - protein, 456 aa, unidentified
MNTKMRIEIKEHGNYNLLRTLFVVTKNTLTGGVTTMLKKNDTRQIEKRQRITDKTLVIGMDIGCECNAMCLMNKEGTLLERYPRIYNSRKGFDYFHKSIETMKKKYGFTHVLIGMEPTGHYWRKIAFFAQDKGYEVRFIRTTALKHQRELDESSSAKNDMRDAYTIANIVREGKYIDTIIEDGIFRQLRTLAHTRERICRSTTGSKNALKGVLEDYFPELKNIFWSMKSRGLRALLEHCPFPEDVLTMGIEKLTHLIAKTTRRKVKAYEKARRVYEAAQHSVGLTHIGEADRLRVSSYLSDIKHSESQMKEIALQMGTLLKQIPSAEYILSIPGIGVLTCGVFLGELGNPYHFKDPKQIVKYAGYDPQEHDSGQRITRRIISRKGRWLLRKYLYFMAMRVVHISPFFSGYYENKQKTMEEKKKALCAVVIKLIKVIFALIRDKRMFVEPYCLKQAA

SEQ ID NO: 85127 - protein, 473 aa, unidentified
MQRRIVGLDLGVATDHTAVVLDESGAELARRRVQPTRASFEALRAAALSGAEEATVLEVVMEPTGPAWLPVAVFFGAAGDRVYRVSSQRASDLRRYFRRHHKTNRIDATTLARMAIVEGDALRPVELARGDAAALDREVRVTERLTEEIATRKVRIRDLARQLMPTSATALSKQLSRADLEVLRTWGNPKALVAAGVEAVDELVQSIGRGMHGRAKAEAFVAAATEALALYGDSDAVPFEALAADLATEIALLEAIEAARAPHERRREELYGRVDPEGLARSVPGIGDKGGPLAVAVVGRAGRFPNADAFCSYTGLVPKASETGETDHKGQAMTKAGNRKLRRMLYRAADTARKEDPQLARIYWTQMVERGANHTKALAVVAAHLARRLWRTLQRQSPYVVRDTDGNEVDRARAKVIIAERWTVDEETRRRRRSRKKVGKAPQQVLKGHAQNGARSASTRRPSPATIVDRAAS

SEQ ID NO: 85128 - protein, 371 aa, unidentified
MLTSAGREIGVDEIEVVIGVDAHKRTHTLVAADELGREMGQKTVAATSDGHMIALAWAARWPGRRWAVEDCRHLTRTLERDLLSVGEQLVRVPTKLMAGTRRSAREPGKSDPIDALSVARAAWREPDLPTARLDGPQRQLRLLVDHRDDLVRERTRVQSRLRWHLHELDPELHVRSRGLRSQRVVDGVEAHLQSRDGLLVQLARELLARVRELNHRARELEREIHLIVIRLAPSLLAIPGCGALTAAKIVGETAGARRFRSKSAYARWNGTAPQPVWSGNTRRFRLTRSGNRQVNAALHRIAVTQARNPTLGRQYLDRRIENGNTKTEALRLLRRRLSDVVYRTLLADEATGPHPGLDIHPHKITGITSTP

SEQ ID NO: 85129 - protein, 453 aa, unidentified
MEQPQEIEDQEYERTWERVAAIDVAKGSGVVCTRVPDEDRPGRRRTHVWTVKAAKRAVIELADHLRGLQIQVVTLESTSDYWRIWWVVLEAAGLKVQLVNARHVKNVPGRAKTDKKDAVWLAKLTERGLLQPSFVPPPEIRRLREFTRLRTDLVRERTRYWARLEKLLERAQIKISAVLSKLTTDTARAMIEALIGGQRNPKVLAELAIGKARSKRGELAEALDGDWQPHHSELARILLDQIDALTAQIDALTDRVSELIDQIPAAWGVDAGGVTGPQAGTGPDAVILPALARLDEITGCGIIAAQAVIAEIGLDMTVFGTSGRLVSWARRSPQTRQSGKKTTTGRAGKGNPYLNGMLGEIAASASRTDTFLGERYRRLARRRGKRKALAAIARSILVIIFHLLADPTARFTDLGPGWYDNQIDAQRKTRGLIRQLEALGHTVTLTPAGAAAA

SEQ ID NO: 85130 - protein, 360 aa, unidentified
MPTKTNTTNATRANITAKLYIGLDIHKRSWRVHTSTDLFDGKTVSSPPSPSSLKEYVLKNYPDHEVSIAYEAGCFGYAAHRAFSSYGWRSLVVNPADISKTGKSQYQKTDTLDARLICRELKDGRLDSIEIPTEEREQLRCLFRRRVALVKDFRSIKSRIKMQLLYLGIDIPEAFDKQAKWSKAFLEWIRSQSCGYDTATSTIQSELCHYEFIDGQIKPVSNQLRAYCRKHHKEDYFLLRSVPGIGKIVACGIISEMGDLRRFKNFKQLASYVGLCPGVHQSGDNYRSTGLSVRGNRIMRSYFVEASWIALRYDPVMQAYWRTHQGKDPKRILIKVARKLLSRTHAVIKTGIPYQPGVVA

SEQ ID NO: 85131 - protein, 443 aa, unidentified
MKPKRRTHLRGPRGQAFAERIRGVCPEHILCVSIDISKDFHVVLLHNGLGEIVTASFEIDIFRSGFERLCQAVNEASARTQAQVILVGLEPTGHYYENLARHIQATRQDVTLINSYSVKENRNQQMMAKEKDDDIDSAAIGDLLRRGEGTPFRPPTGIYLQLQQLDRARLGEVKIQTMVKNRIIGHLDRIFPGLILTKAAAKERYQPLFATDFWECQTLQHLVRVCPDPRALAAMSPAELRAAFHEQEYRLGPVTAQRIIAYAQKVLWPDPEVVAIRRQVLATDLQTLDEVSARVAHYTEQLEQLVAQTPYQILTRIKGLTPIQVASLAAAAGDPANYTHGGQLFRRSGLVSGRNDSGARQRRGQGQGVIKSGDVYLRRALNAMLNGLILHQPVLGRYYHRLKQSKPVGVARVATIRRINGILWATVRDQRADTLIGRGDQMT

SEQ ID NO: 85132 - protein, 392 aa, unidentified
MERPTSALHLSRITLDLRQLRAEPHTKEVGHDAVYSSDCVRSARRHHRGGGALTGQQTPALYTLASDSPTILRFVRRLQRDGPVACGYEAGPCGFELQRALAAHQIPCDVIAPALIPRRPGDRVKTDRRDAGQLAILYRAGALTAIHIPTEQEEAARDLLRCREDIRADLLRARHRLSKFLLRHGRRFTATKRAWTTRHAGWLQAQRWPLAALEQTHRAYVRAVDEAVGRLQAVDAELRDLLTLEPLRSRVERLRCFRGIDDLTALTIAAELGDARRFPSAPRVMAFAGLVPSEHSSGTKQARGAITKTGNAHLRRVLVESAWQYRHHPFLGPALRRRQQGAPTAVIDQAWHAQQRLHRRYRRLAARGKPTQHIVTAIARELSGFLWAALTH

SEQ ID NO: 85133 - protein, 375 aa, unidentified
MGHHSEAFIGIDTARLRNAVAVAEAGRRGEVRYLGEVDTSEAATRKLVAGLAAKYRKLTFCYEAGPTGYGLQRLIESLGHACYVVAPSLIPKKAGDRVKTNRRDAEGLAKLLRAGELTSVWVPDARHEAMRELTRARDAARQDLTRKRQQVSSMLLRLGRHYPGIRTWGARHRSWLANLKLDHREQRFALEEMLQAERQAGERIERLEQAIREAVADWSLAPIVPALMAMRGIDLVAAVTVLAEIGDLSRFESPRQLMAYLGLVPSERSTGESVKRGGITKAGNGRARRVLVEAAWAYRHPPRVGYEKQASVAAAPRAAREIAWKAQVRLCKRFRTLSRNGKKSTVVATAIARELAAFVWAIAREVPKASSVRAA

SEQ ID NO: 85134 - protein, 455 aa, unidentified
MKANKVSALRSKRGLHRVNGAEPQVVGLTPQTTDNRKTDTMKTYILRQIKAVEPEKSSRPPRLKPAAPAPPGVRLGRLAAAAKGPVLFIGLDVHNDSIAVSLAPSDPTEVRRYGIIGGEHDDVLKLAKKLATTHPGMVLKFCYEAGPRGFALCRCLRSHGWDCILVCPSKVPRKPGERVKTDRRDADDLARLYRAGELTGIYVPEPEDEAMRDLIRARFQVGKQQHRARQQLKMYLLRHNLRYGGQSSWTPAHLRYLAKIKMPFPVQQIVFQEMLEVISEATARLERYDQEIERAVPGWRWAPAVRALMSLRGMALLHAATLVAELGDFNRFEHPGQLMGYLGLVPSEHTTGKDRQQGGITKMGNGPARRALVEAAWQYRAPARLSPHLKKRQEGLPKAITDIAWEAQRRLHHRYTHLTRVGKKKSQVAVTAVARELTGFVWAIARQVKPVAAQT

SEQ ID NO: 85135 - protein, 386 aa, unidentified
MSQPSDLNRSRTALEQDCTLIAVVEMSLNSWLIAGIVPGIERHPLKKLPADEHALLKLLRRWQAEAVKAGHAVNRIVVAFEAGRDGFWLARWLRVRDVEAYVIHPSSVAVSREHRRAKTDRLDTELLKRAFIGWLRGEPHHCHMAAIPTIEEEDAKRANRERENLVCERSRIINRMKACLIRFGVRAFKPTLRKAPERLVKLQTPEGVPLPPNTIAEMRRDMARLLFVRTQIKEIQQARLQRLAQAPKEGAHAMVRLLARVIGVGIETADMLVHEVLSRKMRDRRAVARYAGITGSPDESGRKRREKGLARSGNARVRRGMIQLAWRFLKFQKGSALAQWYRERTANARRGTRNTMIVALARKILIALWRLVTAGEVPAGVVMRTA

SEQ ID NO: 85136 - protein, 350 aa, unidentified
MKTHIGVDLHQRFCYVTAVSARGNVLHHGQVLNEASVLQKWLGKLSGERQVVVEASSFWPAFQRAVRGHAERVVMVHPQRVKAIASAKLKNDRVDSATLAHLSRCDLLPEAWMADEATQQLRLRVRLRIALGRQRARAKNQLQSVLHQEGFKKPVADLFGKRGRGWLQQIDLSPAARMVVDTWLREVDHLETEIGTQTKALEQMAREDARARCLQTVPGIGAYGAMVILAELGDVNRFQNKRALASYAGLVPVVRESAGKQKRGGITHQGSNTLRWIMLQVAQVAARSSPAMGAWYAGLRRRKPAQVAKIALARKLLTAVWALLRHGVCFDEQAFAPKSKNRGTIGIAIG

SEQ ID NO: 85137 - protein, 367 aa, unidentified
MKKVSTAVAKQSRNIARQKLTIGLDLGDRNSRYCVLDEAGRIQLEQRVRTTAKALQEVFGAMPRSRVTLEIGTHSPWISRLLSALGHEVIVANARKVRLIGESRKKDDRLDAQTLARLARIDPELLYPVKHRSAQAQADLMMIRARAGLVRARTGLVNTARGLAKSYGERLRGCNVRNMDREKAEGLSPELQRALEPLLAAIEEVSERISECNERIEALAQASYPQVELLKQIKGVGTLIALTFLLTLEDPHRFRKIRDVGSYLGLQPGRRNSGQSEPQMHISKEGDPYLRTLLVQGAQHILGPFGIDCDLRRWGLKLAEHSGRNGKKRAIVATARKLAVLLHHLWVSGEVYEPLHNSSSVSVAAAA

SEQ ID NO: 85138 - protein, 318 aa, unidentified
MPQKTRFVGLDVAKSKVDACIRSEGLRLSAPSTPEGRAGLVAWVRANRVGRAVMEASGGYERGWAEALRAAGVEVRIVDPKRVRHFAKAAGRLAKNDPIDADTIAWFAEAFPDRQAQPHDPARDEIDRLVAARTALKDAEDRIKQQGEHRPPAVVAKALAAIAKTIRAELRKVEGAIAAKIKANPGFARRAEIIASVPGLAGQTAAGVIAWLPELGHVTNEAAAALIGAAPYDDDSGGRKGQRHIKGGRRKLRNLLYMPVMGAATRHNPMLKAHYQRLRARGKEAKVALIACMRKLIVILNTMLARDQTWNPPVRAAR

SEQ ID NO: 85139 - protein, 400 aa, unidentified
MISVGIDVSKTKSTICILKPYGEIISSPFEIQHTEKELTEVSNMLLRLDEEVRIVMESTGNYHYPILTFFLKKGLFVSVINSLAMHKYATCSLRAAKTDKIDSIKIANYGIDNWYHLKKYELQENEYRQLQILGRQYAHYIEMRVKEYLYFYSILDQTLPGIKKIIKSQNNDNFERDKLVDFAENYIHFDNISKMSESAFIEDYLNWNKKNGYQPSTTKALEIYNYAKNSIPTLDSQNPITSIMVSESVRVIKKINKTLNVILAQMNEYAKRTAEYSIVRNMGGVGNKLAVRLIAEVGDIRRFHSSKALIAYAGIDSPPYQSGQYLGLNRRISKRGSALLRSVGYEVMQSLKTHKPSGDAVYLYILKKEQEGKPKKVAKIAGLNKFLRIYYARVMEVYNS

SEQ ID NO: 85140 - protein, 480 aa, unidentified
MSSKCNVPSEKNQTAKYTKSLEIVNPCCAGLDIHKEKIWVCTSPFRDGVAPEVSTFATDTASLGKLALYLQERKITTVAMESTGVYWLSAFLMLRQENLNPILVNPCDIKNIKGRPKSDRADCVWICRLHSYGFLRASFVPADTVLDLRSLYYAHEKFTAESASTIQRMNDELVKMNIRVDLILTDLSGVSGVRLVEAILRGVRSPESLYQLLDKQIAKKDKNTILCYLKGRDQAGNISILCSWYRVYLKLREEISCINEQIYGILQSLPKKADAKDIPRVKKNYREDTLDFPYELRPIFFEIYGVDLTQLPGIGAGVLLALICMVGTDLSPWPTAKHFVSWLGLAPINKESAGHCKSSSTRRIHNLLGNAFKMAAMAAKRTKTYIGRTARQLASRILPKKAKVAMARKLAELVYNILQNGMDLKVKTEEQYEQRRKQRDIRFFVKGLCKYVVNGKFLPEVEEAYHEYCQGMKAASLTNA

SEQ ID NO: 85141 - protein, 360 aa, unidentified
MTTTAVKSTTAAGPILAIDLGKYKCVACVYDRKTGAAEFRSIDTSIAEVERLIRRTRPGVVVIEACALAGWVHDLCGRLGVRCKVAHTGAEAWKYKHAKRKSDRDDALRLAQLEALGQLPEVVIPAKPVREWRALIAHRQALVGQRIAAQNRIRAILVGQGLPAPRGSRAWSAVGLAGIGQLARPLAECAPDELWRGMLDLALTAYRQSEELVAQAEAKLNQLGKASPAVQLLDTMPGLGPRTAEAVVAHLDDPKRFRSGKQVGAYGGLVPRQYQSGEDDRRGRISKRGPAVLRKLLVQCAWAMLRYNPWARAVYDRLCRGKARKKQAVVALARKILIRCWAMLRDGAAWRADPIPAAAA

SEQ ID NO: 85142 - protein, 349 aa, unidentified
MTNIVKQVAGIDVAQNELVVSLGRMGHDTGIDIFAYKTFANNTKGFNELMIWVKKLAAGEIKVRYVMEATGVYHERLAYYLSDQQQEISIVLPNKISNYFRTLDVKTITDKTASQAICRFGLERKLENWQKPKKIFKDLKQLTRERDQLIDDRTALKNQLHAENAEAFPNDSSIKRITKRMQLINRQEQEIRAEIAQLVEKDAELVRKINTITTIPGVGKLTAVVVLAETNGFELIRSKKQLVSYSGLDVKLKDSGTSVKGKPKISKKGNRHLRKAMHMPALSAMRFNEHHKAVFVRLVSKHGIKMKAAVAVQRKILELIYTIFKTDIAFDKDYVEKGRQKELPLPKNG

SEQ ID NO: 85143 - protein, 354 aa, unidentified
MDIKYIGMDVHKEAIAIAVMKGDGKLVMESIIETKASTILQFIQGLRGDLHVTFEEGTWAAWLYDLLKPHVTKLVVCDPRKNALMKEGNKSDKIDARKLADLLRGGYLSSVYHGENGLRTLKELARSYLTISKDLTRVMNRIKALFRSWGILCGGQQVYAPRHRAEWLNKIGEVGVRRRAEFFYQQLDVLRALRQAVRRDLLAESRKQSATKLLRQIPSIGPIRTALLIALIQTPHRFRSKRQLWTYSGLAIETRDSAQYRYVDGQVQRSKKPQQLRGLNQNHNHDMKAIFKSAATMASSRGGPFHDFYQGLLTKGMKPAMARLTLARKIAAITLILWKKGAHFDAEQLKPQAA

SEQ ID NO: 85144 - protein, 334 aa, unidentified
MKNFFNFQHFVGCDVSKDTLDFALYARDTNMRSFPHIRVSNSPDGFKQMCKWLKTNKVKIKGCVVAMEHTGIYSQPLSQWCHKKKLAFVFLNPLDVKNACTTGRHKTDRDDACFIADYVYTNREKLKPSEPTPPVIDKLRELRNERTLAVKTRTAYRNHLATMTDPASRERMEQLIKELSAQIRKIEKDIEATMKSEESLGRNYKLLMTIPGIGMINSLQTIIATANFIRFQTARQYAKFCCVSPLSKESGKTIRCGDHVVKKGHNEIKACLTEGARSAVIKDPGIAAYYKRKRAEGKSHGTVMNAVKFKLICRMFAVINRQQPYVDTDKYRSK

SEQ ID NO: 85145 - protein, 435 aa, unidentified
MEEVTDEPLYRDRVCGIDIGKAGLVATIRVPSDRDPARRMQETRSFGTTRREVLALADWLRCWQVPAVVMEATSDYWKGPFYRLEAEGFECVLADAKQVKNLPGRPKRDPADSRWLAACFERGAVTACFVATPEFRIIRLHTRYRRDLTEERTREKQRAEKLLESAAIKISSVLTDLHGVTGRDIMDQLIAGQRNPKVLAQLARTAARRKIGQLEEALEGAEFFTPAHAALLATMLARIDRLSADIEDLTAVIEALLAPYEEQLQQAESMPGWARRAAQDAVAETGVDMSRFRTGPHLVSWGGRAPQDHQSGKRAGRAKAKKGNRYLGAVLGETAVAAGRTQTREGARHRRLARKRGAAKACVATGNTQLKVYHKLLSNPGTRYQDLGPDYYERQRDVRRQIAHHVGKLGYLGFEVTLCRIPEPHPDRTTPTQSA

SEQ ID NO: 85146 - protein, 315 aa, unidentified
MVDVPCFVGIDVAKAQLDIALRPAGERWAVPNDASGIAPLVDRLQALQPTLIVLEATGGLERAATVALAAAGLPVVVVNPRQARDFARATGQLAKTDALDARALAHFADVIRPTPRPLPNAQTQELRALLGRRQQLIVMRTAEQNRLAGASARLTKDITAHMTWLNADIATLDNDLETLLRASPLWRENDDLLQSAKGIGPVSAHTLLLELPELGTLTRQQIAALVGVAPLNCDSGTMRGKRTIWGGRAHVRTVLYMSTLVATRFNPQIKAFYERLLAAGKVKKVALTACMHKFLTILNAMLKHRTRWQPQEVQS

SEQ ID NO: 85147 - protein, 372 aa, unidentified
MNYNTVYVGMDVHKESFTLCSCKYEDEKASHYQRTPASYKNVLRYLAFLRTIYGEDTRFVCGYEAGCLGYSLYHQLENFNVECVILAPTTMLEQRSKRRIKTDKRDAEIIARSLAQHNYSPVHIPTETDNQTKEFIRMRDDHKAELKKIKQQILSFCLRQGYQYDGSGNWTAKHVKWLRSLKPAGLYKEILDEYLLTYTILTDKLNRLDQRIEELASKEEYTESVSKLTCFLGIKTHTALSVIVEVGDFQRFVSARKFAGYLGLVPGQHSSGDDRNGLGITKAGNTHVRRLLVESAQSHTRGKIGYKSRVLRSRQAGNSPQVINYADRANERLRRRYYKMVLKDGKKYNIAKTAIARELACFIWGMMTDNIY

SEQ ID NO: 85148 - protein, 412 aa, unidentified
MEVLYACCCGIDVHAKMLVACLLKAGKKEVRTFSTMTEDLLRLLDWLTQAGCTHVAIESTGVYWRPVFNILEGSLEVILTNARDAKGYKARKTDVIDAEWLADLLRHGLLKPSFIPPLPIRELRDLTRYRESLVREQTALANRIQKLIESANVKLGQVASDALGASGKVMLRALAAGETDAEQLSHLARGLLKRKQPQLQQALEGRFTQAQRWILAELLDQYAQVEAALQRAEARIKQEVENSADPFVSEVVQLLDTIPGIGETVAQIIVAEIGVDMARFPTAHDLASWAGMCPGNNESAGKRKSGKTTKGSRYLRAALVQAAWAASHQKETYLAAQYKRLVKRMGKKKALVAVGHSILVIAYHVVQKRTPYQDLGGNYFDRRNVDKQRKRLIRQLEGLGLKVTVEEVKEAA

SEQ ID NO: 85149 - protein, 342 aa, unidentified
MDHFAGLDVSVKETSVCIVDDTGKVIREVKVASEPNALLAALKNPAYHFKRIGLEAGPLSQWLCSALAEAELPVVCVETRHMQAVLKAQINKTDRNDARGIAQMMRVGLYRPVHVKTLRSQKLRMLLTHRKLLQSKAIAIENDLRGTLRNFGLKVGMVGKAKFEARIKELVENLPDLAILVEPLLIVRRALREQVVILHRRLLAIVRDDAVCRRLMTTPGVGPVVALTYRATVDVPARFRKSKSVGAVFGLTCSKYQSGEIDHSGRISRCGDEMMRVMLYEAAQSMLRSKKWSWLKAWAMQIARRRGMKKAIVALARRLAVIMHRIWVDGTEFRWTREAAAA

SEQ ID NO: 85150 - protein, 355 aa, unidentified
MTIVAHDHPFVIGVDTHARTHTLAIIAASGEQIALEQFPTTPAGLERAIAWAGRRTGADLAALWVIEGIGTYGARLAARVAGAGYAVAEAPRMSARARRGSGKSDPIDAAAIARAALALPARELRRPRQDDGTRQALRVLTAARDQMTQERTMNVNALTALLRVADLGIDARRPLTGQQIAQASRWRERRGELAAATTRAEASRLAQRILQLDQALKDNHDRLTALVQASPAAPLLEETGIGPVTAAIVITAWSHPGRIRSEAAFAALAGVNPIPASSGNTVRHRLNRGGDRRLNQALHIAALTRMTHDPTTRAYVRQRLAEGRTPREIRRCLKRYLARHLYRTLNALHTNPATT

SEQ ID NO: 85151 - protein, 369 aa, unidentified
MTSIIYVGMDVHTTNYTLCCYSFENDEVFAATQMQPDYRNILNYLDRIKTRYDDVHFLCGYEAGCLGYSLYHNLTNCGVDCVILAPSTMATTKKKGIKTDKRDAANIARCLAYNTYSAVNVPSTTDNAVKEYIRMRDDAKGTLKRYKQQLLSFCTRHGKHFTEGRNYWTLKHMSWLGKLDFGHPVLQETFQEYLTLYNQALDKVEIFDKRIEELAQREEYAKNVKKLSCFVGIKTHTALAILVETGDFGRFGKAENYSSFLGLVPGEDSSGDSIQRTGITKAGNTHLRRLLVEAAQSYSRGAAGKKSKALTARQAGNEPRVIAYADRANERLKRKIYRITFKSKRNIAIVAVARELACFVWGMMTDNVA

SEQ ID NO: 85152 - protein, 370 aa, unidentified
MGKSSTIYVGLDVHKDSIAVAYAPEDRDAEVSYLGPIGTRQCDIDQLVRKLQSKGGELIVAYEAGPCGYGLFRYLRKKGLRCLVVAPSLIPRKSGDRVKTDRRDAVQLARLLRSGDLTSVYVPEPGDEAIRDLCRAREDSMADRKAAKFRLKSFLLRHDIRYTGKADWRPAHLRWLAEVVCPIPAQQIVFQETVRALAQAFERVERLELLLRDQASSWRLAPVVEALQALRGVQFTVAVTTVAELGDITRFSRPAQLMSYLGLHPSEHTSGVNRRQGGIAKTGNGHARRVIVEGAWAYRYPAKVSRQIQERQESLPEPIRDIAWRAQVRLCQRFRTLIARGKHPNVAVTAVARELSAFMWSIAKQVPIAN

SEQ ID NO: 85153 - protein, 367 aa, unidentified
MMGWMAPLRHLSAKLLSVRISSEWELSMGEVTTIGLDLAKHVFQVHGVDANGATVLRKQLRRGQVLAFFSRLPSCLVGLEACATAHYWARELGALGHEVRLMPAQYVKAYVKRNKNDAADAAAICEAVRRPTMRFVPTKTADQQAAVLLHRGRERLVRQRTALVNALRAHLAEFGVIAPQGLRNVGKLIAIVRDEDDARLPDLARQVLQVLATQIEQLETAVAAIEKQLMAWHKSNPVSQRLATIPGIGPIIATAIAATVVEPTAFRSGREFAAWLGLVPRQNSTGGKTRLGRISKRGNQYLRRLMINGASANLLRSKATNADPWVIGLRRRRPSLVVAVALANKTARIAWAVMHRHENYQRMAAAA

SEQ ID NO: 85154 - protein, 370 aa, unidentified
MIVIGADTHKRSHTVAAVDAATGRLLGEQTIAARRRSFDALLIWARGHGGDRVWAIEDCRHVSGALERFLLARGEAVVRVAPKLTAGARSTAREPGKSDVIDAVAIARAALREGLDSLPVARLAGPELEVRLLVDHRERLIGQRTALINDLRWQLHDLWPETEIPPRALIRVGWQDRVAGRLARAEQSARVRIARDELRRIRELTRAINDLERELAALTAALAPQLRAERGCGALTAAKLIGEIAGADRFATDAKLARTAGSAPIPASSGQTQRHRLDRGGNRQLNSALHRLAITKGRLDPETIAYLARKQAEGKTRREAIRCLKRHLARRVWQLLQHDPATTIPTSTPRRRTRSVTIHCNTPTGTLDLT

SEQ ID NO: 85155 - protein, 337 aa, unidentified
MEKQYVAIDLHRRRSLIVRQNAHGEELGVVRIFNDPVALSLAMAEAGPDPEVAIEATYGWYWAVDVLQANGANVHLVHPNGLNWDDRRVKNDYLDCRELLDRLRLGILPESWIAPVGLRGLRELVRQRAKLVAMRSGLKVQVHAVLAKHGLHPPVGDLWGVAGSGWLEALDLGAPYAFKVNGLLELIDHLDTQVEDYQQAIHDWLADDVGYRAIQTLDGIGPTIAAILVAEIGDVTRFSSPGQLCSWAGLTPKHRESDTIARRGHVTKQGSTLVRWAAIEAISHVKGTPKIKADYARIAERRGRNIARVAAARKLLSLAYYGLRDGQIRCLAQAKAG

SEQ ID NO: 85156 - protein, 412 aa, unidentified
MQVIHERCAALDIGKSVVVACVRRPHAGGGREQEVRTFQAYLDALEALRDWLTAEQVTHVAMEATGSYWRPVWYVLEDAGFELELVNARHVKQLPGRKTDVKDAVWLAELLECGLLAGSFVPPPVIRELRDLTRYRKRLIQDRTRETQRVDKVLQDAAIKLGSVASETLGVSSRAMIEALIAGERDPAVLAELAKGRLRTKMPDLVRALHGRFGEHHAMLLRLHLDHIDHLDAAIAALDERVEQVIDPFATPILELLVTIPGVGRRVAEVIIAEIGVDMAVFPSDAHLASWAGVCPGNHSSAGKHYSGRRTRGDVWLLDALTQAAWAAARVKDDYLSAQFWRLARRIGKKKAVIAVAHSILVAAYHVIATGQPYHNLGADYFTTRIDPERRARHLTRQLADLGYHVTLTKAA

SEQ ID NO: 85157 - protein, 350 aa, unidentified
MAIVGGLDIHRKQITFDYVDTGTGELRRGQIAPADRRHLAAWLAGRFTGDTAEFALEGCTGWRYVAEELAAARITPHVGEPADTAALRGRKRHAKTDKTDSRHLRELLTDGRLPECWVPPPHVLECRALLELYHDLRVEHTAWVQRIHAVLFHQGARQLGEHSLRTSAGVAALRAIAAAELSAAGQLQVATALDMLAVLDGHLDVLRRRLLEAARHLAGARVLTARLYGVGPVTALALCCWLGGAGRFSSARKAVRFAGLDVTVYSSDGKRSPGHLARQGPEVLRWCAYEAGKAHARGSAPDHRYYASVKERIDGKRAAISEARKIIRQAAHILSELGDDALTTDANPAR

SEQ ID NO: 85158 - protein, 348 aa, unidentified
MIVIGIDSHKRTHTAVAVDGTGRKLAEKTLPATSAGHLELVRWATRFSERTWALEDCRHLSRRLSTDLLVAGEGVVRVPPKLMAGVRRSSREPGKSDPIDALAVARAALREDLPVATLDGPDRDVRLLVDHREDLVAERTRAQNRLRWHLHELDPGHEPVARGLDRAVVLVALERDLAAAPGTVGRIARELVVRIRDLTATINSLEREIERLVEDLAPSLLALVGCGPLTAAKLVGETAGIGRFRSRAAFARHNGSAPLPVWSGNTERHRLSRAGNRQLNVGLHRIAITQLQREGPGRTYFEHRRAQGATKTEAIRALRRRISDEVFRRMRHDEAARAASPSGFAAAA

SEQ ID NO: 85159 - protein, 337 aa, unidentified
MKYCGIDLHSNNSVVSVVDDEDHVVAEKRLPNDLGKIIGLIKPWQAELVGVVVESTFNWYWLVDGLKDAGFTVHLANTTAIKKYDGLKHSGDEADARYLAHLLRLGILPTGTILPPEHRAVRDLARKRMQLVRSRTSHILAVENITARQYGARITSNQVKQLTAEMVDEMPLPKDVGLAVKTNVAVIATLSAQIELLEKRLQSDMKVRPDYALLTSAPGIGKVLATTILLETGPIERFAGAGNFASYARCVDSVHTSNGKKKGEGNTKNGNKYLAWAFVEAAVYAMRFNAEAKRFYERKKAKTNNVVAIKALAHKLARACFHMLKEGKPFDAARCFA

SEQ ID NO: 85160 - protein, 468 aa, unidentified
MELTLGIDPACRAAHQASLARPDGTFVWTGRKFFTRPGELEKLWNDIGLGEKDTLRLVMEPTRNAWAPVASWFRHRGARISMVPTTQSADLRAYYSKHTKNDRLDSRLLARLPLLHPDGLREHTGDGPAELLRRIVKIRSSIIKRRTAIYQRLDAQLELLGPAWYVALGSNYGRAALALLTRCADPHSLIRLGHARLTRFLIRYSRGAWREAQATLVIAAARESLQLWGAGGDARIDFAELAADIAVEAEQAQVLTEQIEDLDERCANLYAEAAPTGIIASAPGTGPVTSAVIAGRIGDPHRFHSLAAIRAYSGLVPKLSQSGQAEHQHGLTKAGDPLLREAVFTAADQARKTDPQLAAKYKRFLATERHHDSAICHIATILLTRIATCWRTGEHCVLRDTDGRPLTPEQGRRIVRTRHAVDKQTRINAADTRQSQRRKGRTGREQQESPSAPIHRPVNLSIKPPKIA

SEQ ID NO: 85161 - protein, 352 aa, unidentified
MTRITTIGLDLAKKVFHVHGVDFAGNVVVARRLKRKEVLAFFAKLTPCLVGMEACGSAHYWAREIAKLGHTVKLMPPKYVKAYVKRGKTDPGDAAAICEAVTRPTMSFVPIKAVEQQGLSMLHSARSLLIGQRTQLINAARGHLSELGIVAARGLLGFAELAAIVRDESDRRLPATARAALMVLVRQIEAISTEIASLDRVLMKENKASELGPRLETIPSVGPVIASAFRARVTDAKLFENGRHLSAWIGLVPENDSTGGKVKQKGLSKKGDRYLRSLLVNGAMSVVRQAQKRPDKHPWVAKLLGRMSAKQAAIAIANKTARIAWAIMVHGGVYEAGHRAPRYRAQACAAAG

SEQ ID NO: 85162 - protein, 388 aa, unidentified
MFFLGIDIGKNTHVASLLDEKAKIIFKAYSFANTLDAAEALLVKLEPYKDSLEIGMEATGHYWLSLYSFLAEHKFIVHVLNPIQTDGWRKGIEIRKRKTDVIDSVLIADLIRYGDFLETSLADEDILSLRNLSRFRVYLVNSVSDLKRKAIAVLDQIFPEYVSVFSNVFGQTSKELLKSLSLPSDYENLSATKIEEVLSNITQKKKASKTISTLSDKARRSFGIAFCKDSFAFQLKLIIEQICFIEEQISSVELEIEQLMSKLGTNIKTIPGVGSVIGAVILGEIGDIERFDNPSKLVAYAGLDVSVSQSGEYESSSGKLSKRGSPYLRKALYMAAQRAEFCDPVFHAYYEKKRNEGKHHLVATNAVARKLCHTIYAILKKDIPYEVQ

SEQ ID NO: 85163 - protein, 370 aa, unidentified
MSVRRILAKTIDTDLEYEAIGIDLAKNCVSAALLTTDGEVVCIDRLDYSELEKSAQALSSTTFAMEPCTEMNYLVQKLEAWGHRCLVIGGKNVQNYVENHYSGQKTDLNDAQALAFLAQDTQLRTIKAKDVEQQKYASLTTLREQYIKQYRQTIVSLKGICQAWGLNISKGISGKARLKDLIENHAAFPEELKESLVDMVTHAQTAQKALNKITKTLELLAKNDKVCQLIQTIPGLGPICSCRLRATIGDIRRFKNPKDFPAYYGLVPRSIATGHNEKKGKITHRGDKTMRSLMVQGAGSVINMATKGKLKSKQLTKWILKKQKEKMPWGKLVCAVAAKLLRIVRAVLISNKPYNSKIAGVAKCSLPKGS

SEQ ID NO: 85164 - protein, 334 aa, unidentified
MSLELLAIDLGKRSFHLYGIDTDGVILSQKVSRAKLAEVVGKLAPTAIAMEACASAHHWGRCWLATGREVRLINPRFVKPFVKGSKNDAVDAEAIFEAAMRPTMRFVPVKSTDQQDLQSLHRARDRLICQRTALINHTRGLLAEYGIVLRQGQRQFVTQAATAIAGADLSELARVIFGELLDQLDNLDRRIKKLDATIVALCRKNAICRRLAKVPGVGPVVATAIVAAVNDGRQFRSGREMAAWIGLVPRQYTTGGKPRLGGIGRRANHYLRRQLIHGARAVVSRLPKHDDPRSTWLKALLARRGFNRTLVALANKTARIAWALLRRKEEYAVA

SEQ ID NO: 85165 - protein, 350 aa, unidentified
MMIIGVDYHPSFQEIAFLVEETGECDEGSLKHSNGEAEKFYRDLKARGISARVGMETTGYSRWFERLLAELGFEVWIGDAAEIKTRRAKKKKTDREDARLLLKLLLEDLFPRIWVPSPENRDLRQLLWHRHRLVQMRTRIMNQLQALAMNENRCWKGKLWSERGRAELERLPLALASHRRQGLLELLDRMNPAIDELTAAAEREAKKRPEAVRLMTHPGVGPLTALAFVLIIGTPERFGCAKQICNYVGLIPSEDSSGGRQRLGHISKQGSSLLRFLLVEAAQAAVRCNADWRRRYRHLAMRRQRNIAKVAMGRRLGARLYWMWRNGCEYSPSLEFGSHAGKLGTGNGGQ

SEQ ID NO: 85166 - protein, 339 aa, unidentified
MTAIDTLGVDIAKNIFQLHGADRRGRTVLKRRVMRDQLLAVVEEIDRCTIAIEACTGAFCWARKFEALGHRVKIVSPQYVKPFVRGQKNDGNDAEAICTAARQPHIPLVPKKSVEQQDIQALHRARQRIVNHRTATVCQIRGLLLDRGFAIAQSITRARRRIPEILSDLSNELTAMAREAIGELWDLFCDLDRRIASFDKKIEAVFRASSTCQRIAKIKGVGPKTATAVVAAVGDGAEFRNGRHMAAWLGLVPRQCSSGDKRVLLGISKRGNQQLRTLLIHGARAVVRTAPNKTGAMNTWVNELRERRGFNRATVAVANKNARIIWAVLRTGEPYRAAA

SEQ ID NO: 85167 - protein, 432 aa, unidentified
MEKMHFHAAGIDIGSRRIFVGLEEGPVRSFETFTSDLVALKDYLLEHKVSTVAMEATGVYWYVLYDILLEAGLDVWLVDGRQTRQLPGRKTDVKDSQWIQQLHSYGLLNRCYVSAGHIKELRSYQRLREDHLRSAAMHIQHMQKALIEMNIRLPEVLSQIHGVSGMALITAILAGERDTGKLVSLCHKSVRERKEEELLKALEGHYTAQGLFALNQALKAYQFYQDQILECDRQIDGVLQRINRDKHLPPGTEGGKRKAIRHNKPNIEGLGDHLLKIFGGRDATKLPGITDYNWLQLYAEVGSDLSKWPTEKHFTSWLGLSPGQDSSGKKNKSKSKGKPTVGQIFKQMAHGLLNSKYIGWGAFARRLRGRKGPAIAIKATARKMAAQYWRLIVKGSDFVEKGMEAYENILKQQKKRRLEKLALELNMELVPA

SEQ ID NO: 85168 - protein, 342 aa, unidentified
MNHYAGIDVSLECSSVCVVDASGKILREARVASAPEALIAWLRSSGFEFERIGLEAGPLSQWLFAGMREAGLAVELLETRHVRKAFEAMPVKSDRNDARGIAQLMRLGWFRPVHCKSMSAQETRSLLTARKLVQSKLHDVENSLRGILRGFGLKVGKTTGQKFAGRIEELVTGHPHLQMIAKALLAVRAVLRTEFAAFEKQTRRMVRSDMQARLLTSIPAVGPIVALTYASAIDDPTRFKSSKQAGAHFGLTPKKHQSGETDYTGRISKIGDASVRTALYEAANVMLTKPVKGCSQLKSWAMRIAKRAGMSKAKVALARRLAVIMHRMLADGTPFNAAAAAV

SEQ ID NO: 85169 - protein, 351 aa, unidentified
MKTEQTAKLKLYIGIDIHKRSWKVHCATDLFAGRSFSMKPSPEELYKYVNKHFADYEVTTAYEAGCCGYKAHRSFESYGWTSLVVNPADIHRKGKERYTKTDRIDAQLISRELKDGRLTGIPVPDKEREELRSLFRRRNDLVKDYRRIKSLIKMQLLYYGITIPEEYDNDHWSHNFRKWVDKLKFNHAPGKESLASKMRSFRFIDKEIRSVSNQLRAYCRKHHKKHYYLLKSIPGIGGIVACGILAELGDLKRFNNLKHLAGYVGIAPGVHQSGANYKTMGMNPRAHRLIRSYFVEASWQAIRCDPVMQDYYRKHLGKDSKKIVIKVARKLLSRTLAVIKTETPYEVGVVK

SEQ ID NO: 85170 - protein, 419 aa, unidentified
MKPLSDEFTAFIGIDWADRKHDICLQGAHGERREFSRIEHKVDAIDPWAISMRQRFGGPIAVALELTKGPLVYALQKYDFFVLFPINPATLAKYREAFKPSRAKDDPTDAEHALELLMHHRERLAALKPQSVPMRTLLHLVEQRRRVVDDKIRFTNRLGYALEQYFPQALDWFEHTDTIVFCDFLTRWPTLLQVKRARATSVRAFFWSHNVRHVNVIDERIQAIKVARPLTQDVAVIAAYRLQALVLVDQLRVTLKAIDRFDAQIAEIAPSLPDYALFKSLPGAGTHLTPRLLVAFGEQRERFATAAEIQKYSGVAPVTERSGNKCWIHWRWQCPTFLRQTFVEWAAQTINKSFWAGAFYRQQRDKGSSHQAAVRALAFKWLRILYRCWQTRTSYDESTYLNALKTRGSPLLNQLGTQT

SEQ ID NO: 85171 - protein, 411 aa, unidentified
MNPVVGLDISKGESQVQGFVDKGKPFRKSFKVSHTLEGLGLLVEFLDQVQKETGQKPPVILEATGHYQTPVVQYLDEHGYLLIIINPLISYKAKSSSLRKVKTDAVDAYLLCELYYKEELEPYKKRGIQLLNLRNLTRQHENITGVMIQTKLQFQAVLDQVFPEYRGVFGDLYSVVSLLMLQEFPSSEDILEASDETISNKIKELCKSRSIRWANEKALKLKDAAARNPFEKTVYQSHILSLGMYINIILQYKEHLSRLESEIDALAKEIEEYNIIKSIPGIGEKIAATIISEIGEIDRFNHPKKLVAFAGVDPSVFESGKFRATQNRITKRGSSRLRHALYMAVRCAIRDCRKKKTTDEILPRNKRMREFYDKKREEGKPFKVAVIACVNKLLHWIFALLKNRTIFQDIA

SEQ ID NO: 85172 - protein, 366 aa, unidentified
MREQDEGNRITIGLDLGDRRHRFCALDGKGQVVEEGTLSNKRESLSELSRRYRRALVVMEAGCHSPWISRHLEGAGCEVVVSNPRKTRAIYQHERKSDRRDALMLARIARMEPALLYPVQHGSAQAQQDLLRIKLRDSLVRARVGVINSLRFTLKSLGYAIANPSTERFHKVIQEQVPESVGSVIAPSVQALKELSLRIKLLDREIITLARSKYPETTWLEQISGVGPITALYFVLKIQDPGRFERVRDVGAFIGLCPRRDQSGENDPQLRISKRGDAYLRRLLVSAAQYILGPFGPPSALRQYGLALARGGTPRARKRAVVAVARKLAVLLLTLWKNKSVYQAFPLSRDGEKMRTSDLERLRCIA

SEQ ID NO: 85173 - protein, 384 aa, unidentified
MTKHNILFIGLDTHKTSTEVAYIEDQRGAKSIHLGKILSNKAAFKKLARQLQSKYPQATLHFVYEAGPCGYWIYRLLTSLNHCCYVIAPSLIPKKPGERIKTDKRDALKLAKLLKSEDLTPIYVPEPEDEAVRDLSRARETTMKDLKDAKYQLKALLLRNNINSKVKDNWSLQHLRWLAELVLPHPCQQIVLQEAVSTITERLKRLKRLDNELTHQVKKWRYYPVVKAIQAMRGVRLLVATGVIAELGDLTRFDHPRKLMSYLGLVPSEHSSGGKRRLGAITKCGNSRARRLLVEGAHSYKYNANISKEMQLRQEGLSKEIIDMAWQAQLRLCRRYSRLMHKGKHRNVVVTAIAREMIAYIWAISREVVLPHVNVRLRLARVPA

SEQ ID NO: 85174 - protein, 449 aa, unidentified
MLRKQDSEKVQKRTPLQGLPVIRRYVAGIDIGSEQHWVCAPTVDGKEREIASFGATTPELIRMAEWLKARQVESVAMESTGVYWIAPHEVLEGQGLQMLLVNARQLAQVPGRDKKSDPTDCEWIQRLHSCGLLGGSFRPAESVCMLRTLVRDKANLVAERGDWVRRMQKSLDQMNVRVHRAVSDIDGVTGMAILRAIVNGERDAQKLAKLRDPRCSKTEQEIAEQLSGHWREDHLFSLQQALKMYEAVEERIAAYEQEIVRKLGQMEQEQKRGQMPPPLNNANKAKMIKQRGQEAKREALFRMSGVDITQIDALGVETVEVVLSEYGADLSRFPTEKQFVSHVTLAPRVAKSGGKPLPKKKRNSASTRVATALRMAALSMRNSQTALGSALSPNRETDRRRCGCICYGQEISHSHLPVTAMGPAVRGRRRRGLRSPLSAAARRTFDSYG

SEQ ID NO: 85175 - protein, 423 aa, unidentified
MQIQSQEGYYMNAVGIDVSKKKSTVTIRQPGDIVLLPPRDFLHTQSSINELIATIKRLDGETKVCMEHTGRYYEPIASWLSNAGIFVSAVNPKLIKEYGNESIRAPKTDKADSKKIARFALDRWTKLGQYSPMEETRSQLKTMNRQFSFYTDQKTAMKNNLIALLDLTFPGANDFFDSPARNDGSQKWVDFIYTYWHVDCIRSKSLSAFTKHYKSWCNRKGYNFSAGKAEEIYRNVADLIAVFPMNNSSKRMIQQAVTLLNTTSQLVESLRAEMDQIASTLPEYPAVMAMNGVGPTLGPQLIAEIGDPTRFTHREALTAFAGVDPGADQSGDHNKKSNRTSKKGSPYLRRTLFLIMDGLIQRSPADSPVYAFMDKKRSQGKPYLVYMTAGANKFLRIYYGTVRDFLKQKGLWPDSESGEVDPV

SEQ ID NO: 85176 - protein, 370 aa, unidentified
MFVHRTSVGLDVHARSVRAAVIDTGTGEVIERTISPRTDHVVAFINDIAAGHGPSMVTYEAGPTGYGLARAVLEAGHGCQVAAPSKLLRPSGDRVKTDARDAMLLARLARNDDIVAVTIPSVFAESARDMVRAREDARVVLMSARHRLSKLLLRHGYVYDLADQAWTGRHDAWLRRTRKEHLLGGPAGTLVAFDDAYDAVTHAAARRDRLDRAIEAMAADSEFTDVTRRLGCLRGISTLTGFALAVEIGDWHRLSGASIGSYLGLVPSESSSGASRVQGGITKTGNKHARRLLIEAAWDHKKAYVVGKTMRDRWALAPAAAAARGDAGNRHLHRRWQVMTAHKKRHTVATTAIARELAGWCWSLAVMDDA

SEQ ID NO: 85177 - protein, 337 aa, unidentified
MCLDGDTGEVFQRRLCPDHGEIVAWLGELPGPVAVSYEAGPTGFGLARALAAAGITCEVAAPSKLIRPAGDRVKTDARDAAHLARLLHLGQITAVTIPSASQEAARDLVRARDDCRGDLMTARHRVLKLLLRQGIVYSGGKAWTGDHERWLRAQRFDDPALQLSYEAALDAMLACLDRRHRLDSAITAMAADSQFTPVVHRLGCIRGVATLTAFGLAVEIGDWYRLTGRTIGAYVGLVPSEYSSGEIRTQGGVTKTGNRHVRRLLVEAAWHHRSRYRPGAQLRRRWDLASPAARARGQAANRRLHGFDARQKRPVIANVAIARELAGWCWSLAVMPD

SEQ ID NO: 85178 - protein, 347 aa, unidentified
MTTYIGIDLHKRTQTWVALAENGKDTLFTREFPVTPAGVEAGIQLSKRCAKKIVVAIEPTCGWQWVVPLLRSCGMEVHISNPRKVKAIADSLQKTDENDATILAQLVRTGIMHESSEASPETQKLRALVRERVFLVRTRAGMKCRLEGIVTRNGRHRIEGSLSTKKGVRAITESGEAEWQRSVHSIADIGVYIAQLNREIAQHAKEEIPTLLMTLPGVGAVTAVSIWAEVGDFTKFPTAEKLCAFAGLVPTERSSGGVQRLGHITRAGSSILRYVLVEAAMRVRDTEKSSVLYQFYKRIKETQGRGAMRARVALARKLLTISWFIVKKNEAYQQRFPVEKKPETHNV

SEQ ID NO: 85179 - protein, 405 aa, unidentified
MFPRCAGLDVHKDTIVACVRIQTNSGVSQDVETFGATTNELLRLHGWLTEHDVSHVAMEATGVYWKPVWHILEDCFELILANAMHIKNVPGRKTDVNDATWISDLLAHGLIRASFVPESNIQDLRVLTRTRKQLVREKAQHVQRIHKTLEDANIKMGAVVSDILGTSGRAILEALIEGETEPEKLVKKTTGKLRASESEIIEALRGYVGSNHRFLLKLHLGQIKSLEASIESVDMEVGSLIDPFRGAVDLLVTMPGISDVAAQVIISEIGSDMSRFPSAGHLISWAGLCPKNDESAGKRRSTRIRKGAPWLKTVLVQAAWAATRAKATYLGAQFRRLKARRGPKKAIIAVAASMLTAVYFMLRDNVAYRDNGADYFDRVEKPKVVRRLVNRLAELGVNVEVPAAA

SEQ ID NO: 85180 - protein, 346 aa, unidentified
MIIVGCDFHPSWQQVAIFEAATGEIVERKLVNGNGEAEEFYRHLPAGSLVGMESCGNSQWFVELMEQLGHEVWIGDAAQIRASYVRRQKTDRRDAGHILKLLLEGRFPRLWRPDGEERDLRQLLIHRHRLVQIRTRVKNGLQHLAMNRGMQKKSKLWSAAGQRAFLQLPLPGWAGCRRQDLLALLGQLDERIKPLDAAVEKAALAHPQARLLMTQPGVGPVTALAFVVTIGDAHRFRRGKQVASYLGLIPREHSSGGKQRLGAISKQGNGFVRLLLVEAAQSVTRLDAGFRKQYQHRCHRKPKGVAKVAAARKLAVRLYWMLRSNIGYPEIVHNESSSRCPVAGAS

SEQ ID NO: 85181 - protein, 423 aa, unidentified
MEVIHERVAGLDVHKDSVVACFRCISGRAAKRECRTFDTSTEGLLALRDWLTEGGCQLVAMEATGVYWMPIYKILGDGDYCVVVANAAHIKAVPGRKTDMNDAMWIADLAAYGLIKASFVPDEEGHELRTLMRTRKQLVREQTRQVQRIQKTLTEANIRLDSVISDIMGLNGRRMIEAMIGGQRDPRKLAALADKRIKASAKELYDALHGRLTDHHRFLLKLHLGQWDALDLSVQTIDREVAARLVKLDEARKAGEARFSALIELLSTIPGVSRISALTILSEIGYDMSRFPTVGHLIAWAGLCPDQNESAGKRKRSRLRKGAPWLKTMLVQCAWAAKRATKSYYRAQFYRLQARRGPQKAICAVAASILTAIYHMLKTGTPHEDLGIDDFDRKTPETKAKRLAAQIAKLGYKVTLTPAAQAA

SEQ ID NO: 85182 - protein, 341 aa, unidentified
MTQFIGLDVSLKDTFISVREGGKRVWRGKCPSDPALIAEVIRKRAVNAERVVFETGPLSVWFYHALTTEGLPAICIDARHAKAALDMAPNKTDANDADGLAHLAEVGFYREVRVKSFDSMLVRTLIAARNQLVKMITQLANQIRGLMKTFGLVVPKGAGRVFEDHVRNLLATNAGLEQIIRPLLDAWRGMRARAAELSKQIVASARASEQCRLLASIPGVGAVTASSFVAAIEDPENFRKSRSVGAWIGLTTRRYQSGEVDYDGHISRRGDNHLRGLLYEAATVILTRTRADSALRAWGLKLKEKIGFKRAAVAVARKLAVIMHAMLRTGELFERSNSAEA

SEQ ID NO: 85183 - protein, 318 aa, unidentified
MVEDNIVTAGIDTAKDKLDVAVRGKDRVETFDNTPAGFQKLAEYLAAEAVKRVGIEATGGYERGVTRHLQKQGVEVVVLQPLQVRAFAKMRLQRAKNDAIDARLIADCTHLLDAHNKMPPDPRFDALADHLTFIEQIEADIVRIQTRREHIHQPRLRRLYAIDIERLQKRADAERRRLEAELRAHADLATRLDLVLSVPGIGAPTALCLVVRMPELGRVSREAAAAIAGLAPFVHQSGKYAGQTHIGGGRARLRRALYMAALPASFRWNPALVQMYKRMHDRGRCHKAALVACARKLLIYANAVVQRGTPWTDTIARP

SEQ ID NO: 85184 - protein, 332 aa, unidentified
MVVLGIDVAKAKLDAALWLPDAGRWRMHQTRNDATGCAELLRWVQRKAGVAPDAVRVVMEATGVYHERAAQAFFAAGCTVLVANPKRVHDFARGLGSLNKNDRADAKALVRYGEQRNEHEAPWQPLPPEIQALRALLKRLEAIDKDLQREKNRWEKVEASQAPEVVRASLQRGIASLQAEHKRLCAAIKDHHHQHPGLKIERKLLQTVPGVGPVTADHLLCLLHGHAFARGARQAAALSGLVPLEYTSGSSVHGRPRLSRQGGRRLRSTLYMASIVALKYNPSLRAIYDRLIASGKAKKAALCALMRHLVHIAYGILKHQAPFNPALVSKTA

SEQ ID NO: 85185 - protein, 417 aa, unidentified
MALELLVERCAGIDVHQAQLRVCVRVPDVQGERKRVEEFASFGTTTPDLLALADWLASHGVTQVAMEGTGVYWKCVYYVLEEQFELWLVNAQHVKNVPGRKTDTSDAAWLCRLLEHGLLRKSFVPPREIRELRDLTRYRKALIRERVSEVNRLHKVLEDAGVKLATVASDVMGVSGRRMLEALVAGTTDPEVLADLAKARLRSKLPELRKALDARFRDHHGFLVGQVLAHVDYLEEAIEAVSVRIDQGLLPFQAAMKVLVSIPGVQRRTAEVVIAEIGTDMSRFPTSRHLASWAGLCPGNNESAGKRKHGRTTKGSPWLRTALVEAALGATRPTGYLRSKYWRVRGRRGHQRAVIAVAHALLEIIHQLLTTGELYSDLGAEYFERRQAEQLTRRAIRQLERLGHQVILTEAATPQIA

SEQ ID NO: 85186 - protein, 523 aa, unidentified
MATSVSARKSSPVVQQRTKLRHSASELSVLVREVGVERFALVCVDPAKHRSRWRMADFLGKLLLAEATVEHTAGPLRAAVASVRHKMQQHDIRVVWVIVERTGQYHLPVQRAFADAGFETRVLHPCATKQYRGAVSPDVKTDDIDLAAQHLAAVAGFGLVELPLDETYRQLRLLARHRRDLVEKTSALCSQIREHLHLIMPGYAQCFEDLWLSTVALPMARHTGTPQAVLDLGRARLARKLQHDGLRVQERTVERVIAWARQASPPAPDAALQQRVWTALDDDRLSKRREIEALERDLAAALVRTPYVLLMAFPGINVVSAAELAGEMGPIAHYGNANAITGRAGLFPRRYQSDTVDLADGRLARRANRRLRAALMRIADNLVANNHYFRSLSDVWRKQKTDERVIRVRVAKKFTRLAYVVLAAQQVLRHDCCQPGDCILLKLSEFHRLHLTGPKQLLIDLQAVVDQLPKKAYTHEAQSLSKKLDVATSHRRIPMLLGELLPAVLARLTAKTTGEPSEAQASN

SEQ ID NO: 85187 - protein, 493 aa, unidentified
MPWEIEEPEGYVLTPRDKDLHHSVFGLVAIIPRRLAGKIEDILISTTVERRISMKSVQLQQKRSLINGKIIIGIDPAKTKHQAAIIDTHGVQLGKSFSFDVSLDGYTRTLWQKLTQILPTCSCETTVFAIETSCNLWLTLAFYLHHEGYHVLLVSPLTTYHSRPMVNHDFSRTDPKDALLVASNARQGFFDLYEDFPPLGNAMHRLTITYCKLRKELAQNRARLRASLEQLFPELLEIVEPDTQTALYLLKRYLFPRDFLDIDLASEANAILTISRKQFGLQTLLQLQKAARHSVGVLKSQEEAIAERLSVNCWLALIESLSAQMQTAFTALADYAARLPEYTIVRSLKGISDLTAALFLGELRDIHRFAHYKQLEKKAGLNLRLNQSGQYLGARHISHIGSKRLSWLLYTMTEETARWVPEIRAKYLRRQLHRRNHRKSIVASIPQLLKLIMVLVKEHREYQIHPDSVIQMQALEKQYCSLKAQRKTTKQAA

SEQ ID NO: 85188 - protein, 420 aa, unidentified
MKVVYNTCCGVDVHKKFLVATIIKTTKGIQPSYHKQRFSTFNSDIRRFKQWLLDNNCLDVCMESTGKYWVPVFNLLEDCISVTIANPKWVKAVKGNKDDTKDSKWIGDLFRLGLVHGSFIPSKKIRILREYTRYRFKLTSCKRSEKNRFQNAFTVCNVALDAVVSDMFGKSASSITDYLIHSNSFDPDTCKSFLQKSLKKKSDQVIESIEGYQMTSSQKERMSMIHDHLDFVSQMIEKLDEKLDQLVAPYENAITLLCTNPGIDRKSAITILSEIGTDMKQFNSSKRLCCWAGLTPGNNESAGKKKSVRITRAGVYLKPALVQCAHAAVRSKANPYYKNKYERIAKRRGKKRAIIAIARMILTAVYHMLSTGETWNPSDLYKIDMPQEMQEKQKQKAIKQAYKFLISVGELSADISPLQT

SEQ ID NO: 85189 - protein, 373 aa, unidentified
MRKNTTETPKKNRQSRSRRSQLSGNLTVGIDLGDRSSRYCILNQEGEVVAASAVATTKKDLSRVFGTLRPSRLALEVGTHSPWVSRHLKAMGHEVIVANPRRTRLIAESSNKQDRLDAETLARLARVDPKMLFPIRHRGEAAQADLAMIRARAALVEARTRLINTARGLTKSFGERLRACDAGYVDGRLAQDLPAALREAIEPLLEQAAELSARIQQYDERIQQMARKQYPETALLTAVAGVGVLIALTFILTLEDPHRFPKSRAVGAYLGMKPRRRQSGGRDPELGISKEGDVYLRKLLVQGAHVILGRNGSDSDLRRFGQRLISRGGKGAKKKARVAVARKLAVLLHHLWVTGEVYEAVHRKPAQPVPAAA

SEQ ID NO: 85190 - protein, 352 aa, unidentified
MAKIDFDELMSIGIAIGKDTFHIVGFNPSGQRVLRKQIKRLALVATFEKLPRCIVGMEACLSAHFVSRTLREMGFEPRIIPAIHVKPFNKGQKNDYNDAEAIAEAALRPNLKAVSEKTQDQLDLQALHRVRSRLVSRRTATINRIRAFLIEQGITVRKGLRALKNSFEAILQERKDEISPRMRSILIGLYGDWMWLDDRINTVSQDIEEISRTEENCVDVMTMPGIGPMISTAMVAAIGEGEAFDRGRDFAAWVGLVPRQYSTGGRTILGRISKRGSRYLRMLFVQAAKIIMMRPHRWPDFSFGEWLARASERMHRNKAAVALANKLARMAWSILRHKTAFDAPRDEVAIGV

SEQ ID NO: 85191 - protein, 430 aa, unidentified
MKSNTQNAKIEAITEKTLVLGIDVGSETHYARAFDYRGVEYSKKPFKFSNTEAGFVTFKAWVLDIKEKHGKDKVIPGMEPTGHYWFNLGKFLQDNEMKPVLVNPHHVKKSKELDDNHPTKNDRKDPKVIAGLVREGRYMIPYLPDGVYADLRTASNIRFQLQAELTRIQNRINRWFNIYFPEYKTVYGKPDAKSGILILKEAPLPEDILTLGIDGVNQIWRDAKLRAVGKARAKTLIEAAEHSVGSKEGAVSARMEIRMLLEDYESRNIRLQEVMGLIEGLVNQIPMAEKLLEIKGVGIKTVSGFLAEVGDIRCFNDPKELQKLAGLALVENSSGKHKGKTTISRRGRKRLRYLLFEVAMSLVAKNPEFRELHNYYTTRRLNPLKKMQSLMAIAAKLLRVFYAILTKGVGYDPKKMVNDIRRPAAYAQAA

SEQ ID NO: 85192 - protein, 342 aa, unidentified
MKQYVALDCSLKQISVCVMTEQRRIVKEAVIAADAGSIAEFVWSQVPDPELIGLESGPSSAWLFHALRAEGLPVVVIDARHARAVLSLRINKTDRNDAVGLAELLVSGWYKPVTVKSLESHRVRTVLTNRALLVGIRQDLENQVRSVLKTFGFVLGKGRGSFADRVSEILAGKRLLLRLVRPLLKAWAAIREQLLSVDKEALAIAAQDDTCRRLMSVPGVGAITALAFKTTIDNPWRFSSSDKVGAYLGLTPRRYASGETDRAGRISKCGDGLVRTYLVEAAGVLLTRSKAASDLKDWGLRLAKRASAAKARVGVARKLSVILLRLWTDNSVFQPRVSVTAG

SEQ ID NO: 85193 - protein, 312 aa, unidentified
MSSHEIVGIDVAARKLVAVGEEVALAAAYENTPAGRRALVAALRHSPRPVRVVLEATGIYFLDLACELAAAGIAVMVVNPKATHHFAEAILQRRKTDPVDAAMLREFGRRMDFVPWQPPRHELFAFRALTREAQALSKVVAAAKNRLHAITATKLAPHALIGALERQIAHNQALIDELVAAALAQAASDPELARLVARTDSAPGFAAKAAVLVVGELAVLPPMTARQWVAQAGLDVREETSGISLARRPRLSKRGNKRLREALFYPALNRGAVLPGGRRLCRAAGQARQDPAAGDRRADAQIAARIACPVAL

SEQ ID NO: 85194 - protein, 407 aa, unidentified
MDITPIYSRVIGLDVHQAKISACALIEEPDGSVTVEHREFGTFKRDLHALAEWASAVGPEVVVMESTGVYWKSPYAALERAGIRVWVVNARHVKTVPGRKTDIADAQWLAILARAGLLRGSFIPPVELRNLRLIARQRQKLGGMLASEKNRLHKILSDAGIRLTVLISDLHGQAGRAVVKAIIAGKPMAEILQHAGRLKASREDLFEALQTEDLSETHRFVLAEILSHIESLEAQMKRFEAQLLQGLAPWQSLLVLLQTVPGIDQIGAAMLLVEIGTDMRPFGSAEHLASWAGICPGNQESAGKRKSGKTRKGNASVRRLLCEFAQAAARSRCALKEKFTALSIRKGHKKSIMALAHKMLRIIYAMLSRHVPYQDRVVDYEALTVQRNAPRWMKMLVKHGYIKPATA

SEQ ID NO: 85195 - protein, 432 aa, unidentified
MKANRTNQRLEEITENTLIVGVDIAKTKQWARFVDYRGVEVGKAIYFSNDRGGFEFIIAKISELCNSKLYRNSFTKVIIGMEPTGHYWKPLANYLMKQGLRVVGVNPYHTKKAKELDDNSQTKSDKKDAITIARLVKDGRCFDPYMPQDIYAELRVLSNTRISIKKRSGAVKNTIIAVLDEYFPEIVKVFKNPLKGKASRRILKSCPFPAFILALGEEGVLAEIKKAVKKTVGLKKVRQLIEAAKESIGVDYGLESAKLRMNCLLAELDMIEHNLNEVEDSMQRMLEDTGYADKLLGIKGIGVVSAAMFLGEVGDPLRFDSDRQISRYAGYNLTEDSSGKNKSGTCISKRGRKQLRSILYKMAYTMVGQNAEMKELYNYLKTRQSNPLKTKQALVVISKKIITVIYSLLKKQETYKPELVLGPVRREMLLAA

SEQ ID NO: 85196 - protein, 392 aa, unidentified
MAEKNATLADRHEAYLELDVGKQSHWAYAVDSAGTVLLSRRVANTEAGLDEVIAECPDDTLVVVDQRRNIGALAIRRARAAGRPVAYLPGSAESELAKGFPGIAKTDAKDAQVIARVALGMPQTLRPVPEGDPALDGARIMSAQVAQVQKDRTACANALRSRLLESCPAFERACEMTAPWCAGMLSELGGPWNMLDAGRERFCAASHKHGASRGQRDRLWDAISGERPHEQAVAAEMRYVKHFAGRIAADNQEEAMLEEAIAESLSGNADFANLQTIPGIGPRTAAQLVVSVDISQFDSHDKLASYCGLAPSTQRSGTSVNYDKGHRGGNKPLKNLLVFSCNSLGRSKSYYGEYLRRCLGRGMKRRCALKATARKRMKVIYAVMRDGTPYSA

SEQ ID NO: 85197 - protein, 337 aa, unidentified
MQKSYLGIDVSKLSFDLSLLIVKKGVKQAVLTTKFENNKDGLKAFKKYLVDNGVGFTENSLLVIENTGIYHRLLWQFCSKQGLPIYIGNAADLKWSFGIARTKNDKVDSIRLCDYAYKNREDLKPTPALNKNFIILKDLLSNRSKLLRQLNGIRQTIKELKTSNDKGTQKLMDNMNKAAIEGSKISIKLIEVEMRKMIKADAEVLANYELMVSVPGIGEITAIFILCCTNNFAIKISGKQLASYAGVVPCEHSSGTSVKGRNKVSHMANKELKSILTMGALSAVQAYPEFGDYYERKKKEGKHHNKILNAIKNKMLLRVMSVVNSGTSYVNNYKKAS

SEQ ID NO: 85198 - protein, 470 aa, unidentified
MNHRRLVGIDLGVATAHTVRVLDGEGNVVAKRKAWPTVESLTAVEAAALAGCPKETRLEVVIEPTGPAWLPIAVFFSARGHRVFRVSSQKAADLRRFLSRHAKSNGIDADTLARLPLFDPAGLRPLVLPGAERAALDRRVRATDRLTRQGAEHKTRIKDLARQLLPASPLTGDLGAADLAVLERYADPRVLLRLGAARLTALIAKASHNHQGAERARQWLHAARASLDLYRGHPAVDFTGLAAEIATEVRLLRATCAELAAHAAERETRYQQVDPAALARSLPGLADVGGPALTACMGDPARFATGKRFRSFTGLTPKASETGDTDRKGQPMSKAGSSLLRTTLVRAADTARKQDPQLAAIYYLQMTERGKDHLGALCVVAASLAERAWTVMRRGTPYIIRDTDARPVTTAHATAIIAERWTVPPEIRARRRSKKTGKAPQKVLERQYARGSLPRPTTSSPRRRSVKPVS

SEQ ID NO: 85199 - protein, 351 aa, unidentified
MAAKKRTLIGGVDTHRDTHHAAIIDSTGGLLADAEFPATSDGYADLLAWMRSFGRLAAVGVEGTGSYGAGLARHLTSHKVAVIEVDRPDRRTRRTKGKSDPIDAIAAARATLAGTAMGIPKTRTGPVEAIRALRVARQGAVKARTAAINQMRGLVAAAPEGLRAQLTKLSAAVLVNRCANLTIDPTRLTDPKQATAAALAGLARRVSTLTEEIATLDRQLTPLVRQAAPRTSALFGVGTDVAAQLLTTAGDNPDRLRSEAALAHLCGAAPIPANSGRVRRHRLHRGGDRGANHALHTIALCRLRYDERTRAYQQRRITEGLSKQEILRCLKRYIVRDVYTALRADFAALTT

SEQ ID NO: 85200 - protein, 344 aa, unidentified
MDVTTVGVDLAKHVFQIHGVTQRGTVSIRRQLKRSQVEQFFANLPPCLVGMEACASAHYWARRIQSYGHTVKLMAPQFVKPYVKSNKNDAADAAAICEAVGRPSMRFVPIKNIEQQSVLALHRVRQGFIKARTAQANQIRGLLGEFGLIVPQGIAYVTQRVPALLEKASPDLPGGFVQLIRRLLEQLRLLITQVSEIDEQVQQWHRCTEASRRLEKIPGIGPITATALVATVGDAKNFDNGRQLAAWLGLVPRQHSSGGKPTLLGMSKRGDPYLRTMLIHGARSVIYRATLKANPQNWVFRVAARRNKNVAAVALANKNARIVWALLAHGRDFQGGYSTTAAAA

SEQ ID NO: 85201 - protein, 427 aa, unidentified
MNYNQNHKIAQITESTLIVGIDIAKDKHVARAQDYRGIEFGKRLIFENRIHDYQKLLDWVARLQEKNQKTHVMFGVEPTGHFWKSLAYYLNAKGYDFVLVNPMHVKKSKELDDNSPTKNDTKDARVIAQMVKDGRYSVPNLLDGVYAELREGIKLRDQLTKQLMIVEGRIQNAIQRYFPEFDDVFNDWNGKTAICTLREFPFPSDIQDMTPEDVLSTWKTVVKSGVGIKRANQLVQAAQKSIGVQIGLRFARQELQTLLDQYELYNQQLVSLDKEIETLITDLPGAKEMMAIKGIGPTTVATFFAEVGDLSNYSHPQQIVSMAGLSLKEHSSGKFKGQTRIDKRGRKRLRRAIYLAVRPLVAHNSTFKTLHHYYTTRPDRPLKKQQSLIALCGKLIRVLFAIGTKQCEFDGSKLLQGLPELQTSQVA

SEQ ID NO: 85202 - protein, 410 aa, unidentified
MEVVIGMDPHKQSATIEVLDKRERVLAQGRFLTDTAGYKAMLAAGRGWARRVWAVEGANGIGKHLAQRLIADGEQVVDVPAKLSARARVFSTGQGRKTDATDAHSIAVVALRTPGLRIVQVDGQAVALRLLADRRDELGVRRTETVNRIHRLLLELMPGGAKTFLTAPQARALLATVRPRDVAGRTRRALAAEMITDLAGLDKRIKSANKELTTLVTATGSGLMRLQGIGPSSAARLIGDVGDIARFPTKGHFASWNGTAPIDASSGENNRHRLSRSGNRRLNRVLHIMAIVQLRNDTEGRRYYDRKKAAGKSSMEALRCLKRRLSDLVYRQMVTDAAHRPTTPEPPAEPTTDNLEEAMTTGPGGHVGATTDSSAADSYPDAGPSEQSLPGPATTIVTTDNTTRKTPALT

SEQ ID NO: 85203 - protein, 423 aa, unidentified
MPVSTLYVGIDVSLKTNQVCPINFNQDVFFNEKFDNSPSGTERMTVKILDILNKNKDLNKVLFCMEATSVYHIHVSSILASDSRLLAYGCKVYAENAKSIQKYKETFLDREKTDPEDAYLCADYARIGKCKDSHPVIGYQKIALQRLTRQRKHIAEQLGKEKQYLSSNLFLKFSALKVNPEGNPFSNTFGKTSSVMFTDFLSNEEIVKADLGDLVVKISEVSNNRISDKDEVARKLKRMAQHSYHLDSYASDSVSMAMASSFRLIETYQNELKKLDKEILRLIEGYDNKYCAILTSVKGVGNVYAAGIIAEIDDIHYFRNDEHLASYCGLRWKKNDSGNKRSDHTRQPNTCNTYLRYYIVEATGSILRFNDEYASYYCRKKSEVKVNSHKRALVLTSRKFVRLVYGMLRDHKLFDDHYLAHRS

SEQ ID NO: 85204 - protein, 368 aa, unidentified
MKKTSTVRVNGNMIFKGHKLTLGLDLGDRWSCYCVLDEAGEILLEQKVATAPEAMKTDILFEKIPRSLIAVETGTHSPWVSRLLTELGYKEIVAHAQKVQLITKSNRKDDRHDARTLARLARIDPELLGPVRHRSAQAQIHLTVIRARAELVRARTALVNAARGLVKSYGQRLPKCGTQQVSRELGAGLHAELREVLEPLLQEIESLNERIKEYDVRMEKIARESYPQVELLKQVKGVGTQIALTYVLTLEDPHRFPKSREVGCFLGLRPGRRDSGESQPQMRISKEDDRYLRTMLVQGAHYILGPFGEDSDLRRWGLKLAARGGKSAKKRAVVAVARKLAVLLHRLWVSGEVYEPLRNSKKAMSTAA

SEQ ID NO: 85205 - protein, 407 aa, unidentified
MNAVGIDVSKEKSMVAALRPMGEVAFLPREFLHTEVGLEQMAYAILALGEDTRVIMEATGRYHEPVAAALHEYGIYVCVLNPLFIKQSGGGSIRKVKTDKADAIKIAKYGLDNWVDLREYTPMDTLRQQLKLCSRQYDLYMKTVISLQNNLISLTDKTFPGVNELFSSPERADGHQKWVDFVITFWHCDCICRVSEKAFTERYQKWCKRKGYHFSVEKALEVYAGSCGHFTTLPKNDNTKLLIISAAQQLLAGKMTLAALRAEMTRLARQLPEYDTVRAMYGVGDKTAPALMAEIGDVRRFPRRSSIVGFAGIDPGVDESGKHSAKSVPTTKRGSPHLRKTLYQIVCTYLKKSPADEPVYQFLDKKRSEGKPYFVYMTAAQNKFLRIYYARVKECLEAFDAQTTEQK

SEQ ID NO: 85206 - protein, 377 aa, unidentified
MAEITRALIARVGVDLAKTVIQVHAVDKAGRRVVSRALKRDQFLGWCTQLPSGCLVAMEACSGAHAWGRRLRAMGLDARLIAANFVSPYRMEGKSGKNDMTDAAAVCEAASRPTMRFVPIKTPEQQGVMALHRVREGLKEERTACINRIRGVLAEFDLVFGKSPKVLRAVLPDVVEDASNELSGRARLVVQRAFEHWRELDEHLRWCDRQIGEHVRSSVEARRAAKITGIGELGASALTASVSDFRQFKSGAQFGAWMGIVPRHNSSGGKIGLGRITKRGDDYLRTLLIQGAKSAVMSAAKRDDPTSRWLQALVERVGWQKACVAMANKNARILWAVMTREQAFEPGHVSDKPAAKCAKPAGGQAQDAVARPVASVA

SEQ ID NO: 85207 - protein, 404 aa, unidentified
MNNVAGVDVSKGKSMVSVLRPFGEVVAKPFSVGHTGSELKELADYLKSLDGETRVVMEHTGRYYEPVARFLHEEGIFVSAVNPKLVKDYGNNTLRKVKTDKADARKIARYGLDNWMELRQHTPMDTIRMQLKTLNRQQGLYSKMKTMMKNNLIALLDQTYPGVNSLFDSPVREDGSQKWVDFAASFWHVDCVRSMSLAAFTERYRKWCKRHGYNFSQSRAIEVHTKAQDLIAMLPRDALTKTMIRQAIDALNAVSASLERLKTEMRTLAAQLPEYPVVMAMRGVGNSLGPQLMAELGDVTRFTHRNAITAFAGVDPGADQSGTHEAKSTRASKSGPPELRKALFLLMDCLLKTMPSDDPVYRFMDKKRAEGKPYLVYMTAGANKFLRIYYGRVKEYLASLESAD

SEQ ID NO: 85208 - protein, 338 aa, unidentified
MKSLGLDAHSATFTLAVLTPKGKVCSCLSKSTSAQNLIEAVAAVRGPKALVVEESHMAAWVKRVLEPYVERLVICDPQRNAWIAKDEFNNDTSSAIKLAKLQLDGYIKEVVHPDEKGTQLRALFLHYFDLNQQIVRFKNKLKAVFRSEAIATGGKGIYEEEGREDWMKLLKGQRHLEHTAGQRFELIDKLEELKEQTYKAMVEMARKQKVFALIDGMPGAGPMIASGYIALIDTPHRFSRRNKLWRYANLANRYQESDGAVYMQGASPSGNRVLKWLVREHFLHAVERSRTENRFKRQYEALLKKGKGETAARRSVCRSLLSAVRAMWIKEEAYRDKP

SEQ ID NO: 85209 - protein, 403 aa, unidentified
MNAVGIDVSKGKSTVVALAPGGKLLARPFDVLHTKSGIKELVSFVRTLDGDTRIVMEHTGRYYEPLLQWLAASDLFVTAVNPKLIKDFGNNTLRKVKTDQADAKKIARYALDNWVDLRQHTGMDTTRAQLKTMNRQFAFCMKQKTACKNNLIALIDQVYPGANTYFESPARADGSQKWVDYVLTFWHVDYVCSMSLSAFTERYRKWCHRHGYNFQPDKPALLMEKAKDLIAMLPMDKTTKMLVQTSIAQLNVLSKTVEALRTQMIALAEQLPEYPVVIDMNGVGPTLASQLIAEIGDITRFPRRGSLTAFACVDPGAKQSGTMQMRSNKTSKADSPHLRRALFQIVSGLLMRSPDDAVYNFMDKKRSEGKPYYVYMTAGANKFLRIYYGRVREYLASLPKEQE

SEQ ID NO: 85210 - protein, 309 aa, unidentified
MEHFVGIDVAKDRLDVHLRPSGESFTVTRDGEGLVQLVDRLQRLAPRLIVMEATGGYETIVASAVAAAHLPLAVINPRQIRDFARATGKLAKTDAIDAAAIAHFAEAIRPPARPIADPEAQALGELVARRRQVIEMMVAERNRRRRVTQRRVVRGIDRHLELLQTELSELDRDIDGAIRGSPAWQADADLLASVPGVGPVTLRTLIAELPELGRLDRRKIAALVGVAPINRDSGSMRGRRSIAGGRPAVRTALFMAALVASKKNPVIAPYYAKLRAAGKTGKQALTACIRKLVVILNAILRDRKPWQPA

SEQ ID NO: 85211 - protein, 360 aa, unidentified
MEGNQERSAGRIVGGVDTHKDLHVAAVVDELDRVLASQCFATTRHGYRQMLAWMGAFGSLQRVGIEATGTYGAGLLRYMQKAGIEVLEVTTPDKHDRRKRGKNDDLDAQNAAHAAFAGKRTVTPKSRNGMIESLRVLKACRKTAVAARRVALQMIQNTIVCAPDELRELLRTMTRMQLIRTLAAWRPDLTDYRNVTSAYRITLKSLGRRYLELHDEIADLDTMIIAIVDELAPNLVARNSIGHESAAQLLLTAGDNVQRLRSEASFAALCGVSPVPASSGKTTRHRLSRGGDRAANSALHIIAIGRLRTDPRTQAYVAKRITEGHSKLEAIRCVKRYIAREVFSLIKQRPQESHQASTTA

SEQ ID NO: 85212 - protein, 428 aa, unidentified
MTVAILEPPHITVAVASPNTIFAGVDTHKDTHHVAIVDGLGRPIADREFLAVGSGYRQIIDFLHAHGIVEAVGVEGTGSYGAELARVLAGAGMRVLEVCRANRAERRLRGKSDPLDARQAALSVVAGRGLATPKQRDGDVESMRILLAERSSATKARTASINQIHSLLVSAPEAVRQDFRRFDGDKLTNTLARTRPAPGTTPELVVRASAKRLAQRHQALTADIAYIDQQLTVLAVRQNPALMAASGVGPFVAAHLLATAGDNPDRITTKAQFAALCGVAPIPASSGTRQRFRLSRGGDRQANAALHRIVLLRKRHKEPRTMAYIARRTAEGLSDRDIVRCLKRHVANEIFALLTQNHAVPLPSGPWLRQRRQTLGIVLTDAAKQLNVPYQRLRRLEIGQRADIDLETAFSAWLDGKAQHPNTAQRVA

SEQ ID NO: 85213 - protein, 400 aa, unidentified
MRSIGMDVHRSFAQVAVLERGKVTEEFRVELDYDAVVAFGQKLRKDDEVILEATGNTSAIVRLLTPFVAKVVIANPLQVKAIAHARVKTDKVDARILAQLHAAGFLPEVWAADDDTVNLRRLVSERAALVRSVRRVKSRVQAVLHANLVPKYSGHLFGKDGRDWLSTAPLPKAERDLLARHLDELDWLKGKLEKLDGSIARIALDDSRTRKLTTIAGINSVVATAVIAAIGDISRFPTPDRLASYFGLTPRVRQSGDRGAIHGRISKQGNATARTMLIEAAWSAASVPGPLRAFFLRIKDRKGINVAAVATARKIANLIWQLLTKEAPYRWARPAFVAMKMRKLELRAGAPKAHGPAGPARDYWIKEIRHREMELVAQAEAAYAAMVEAWRDRPPKPQKS

SEQ ID NO: 85214 - protein, 353 aa, unidentified
MKYYTSTTEFNCGIDLHARQMYVCVMDRTGKKLVHTNIRHNDFAYFLKLVAPYRHDLTVCAECMFGWYWLADACAAAGIHFVLAHALYLKAIHGGKNKNDRIDSEKICHLLRTNLIPPGYVYPAAKRPLRALLRQRLLYVWNRSELLSRIQSHQLAYNRPPTRQTLYNREPWQKHLLASEPDPVRQLALQNDLALIGHYDAQLTSLEKELLHLTKQTASRDFTLLKTTPGIGDYLGLTILHEIGDIARFPSVKDFLSYCRLVKGTVASAGKIKGLRGAKLGNPYLRWAFGEAAIIAKRDALLGPLAQRLEARLANKFKANTVLAIKLARAVYFMLKTKTVFDPERLVAALSHN

SEQ ID NO: 85215 - protein, 337 aa, unidentified
MRLYCGIDLHSNNHVVTVIDEEDRRRYERRLPNDLAITQAALEPFRAELVAVAVESTFNWYWLVDGLMDAGYEVRLVHTGAVVQYDGLKHTDDEHDAFWLAHLMRLGILPTGYIYPKGERGLRDLARQRMRLVQHRASHITSVQNQVWRSTAVRLRSETIKGHGKQSWPQLLDPDVALSVETGRAAIDALTAQIERLEELLLKRVGLTPQFQVLKTVTGIGPILALTIALEVGDIKRFPGVGEFASYCRCVDSQRLSNTKKKGEANRKNGNPYLAWAFMEAAHFAIRYLPAAQRFYERKRRQRNALLAVKALAHKLARACYYILRDQVPFAPDRLFV

SEQ ID NO: 85216 - protein, 420 aa, unidentified
MRNAGIHADSLLEVRRMYNAVGIDVSKGKSTVAVLQPGGTVIRKPFDVSHTSQNLNELADYLSSLDGTTKIVMECTGRYHEPMVKALSEAGLFVSIVNPHLIKNFGNNSLRKVKSDPADARKIARYTLDNWTELRQYSGMDNTRTQLKTLNSQFSFFMKQKVAAKANLIALLDNTYPGVNKLFDSPTREDGSEKWVDYAYSFWHADCVRKIGLKAFTERYKSFCKKHHYIFQQDKPEKLFNASKELVAVFPKEKTYKLLIQQSIQQSNLASEHVERLRREMNELASTLPEYSTVMGIYGVGKTYGPQLIAEIGDVSRFTHREALTAFAGVDPGVDESGQHKSKSNRASKVGSARLRKTLFQIMTTLLQNAPEADPVYRFLDKKRSQGKPYYVYMTAGANKFLRIYYGKVKECLRNLEQTE

SEQ ID NO: 85217 - protein, 317 aa, unidentified
MEVPLIFVGIDVCKAQLDVAIRPTTQILSVPNDKAGIKTLVKHLEKLRPTLVVLESTGGLERQVMLALVGAELSVVMANPRQVRDFAKSTGQLAKTDRIDAAVLAHYAEAIRPQPRPLPDELTLELRALTARRRQIIDMIVAEKNHLATASKAIKKRITAHITYLEQELDDADQDLDRFIGKNPLWKQNQEILCSTPSIGPVSSRTMLAELPELGTLGRKQISALVGVAPFPRDSGTLKGRRTIWGGRASVRGALFMATLSAIRFNSVIRDFYKRLKAKGKPSKVALVACMHKLLTILNAMIKNKTRWSENFFLKTT

SEQ ID NO: 85218 - protein, 354 aa, unidentified
MKLYVGLDVGLEETSLCIVDSDGNTVREVKVSTAPEAIRCALEGSADRLARAGIEASSLGIWLYRELQPAGVPIIVVEARHMRVSLSTMRNKTDRNDARGIAQMMRLGWYRAVHVKNIDMQRMRSLLGNRKLLKRKLIDIENHIRGTLRAYGLLMGSVGRGGYEARVRELLEHSDPIFSVMMETMLDVRRAIFEGYERLHKVLVQVVQHDAVCRRLMTVPGVGPVAALSFKVGVDDPRRFARSRTVGAHFGLAPRRHQSGTSIDYEGRISKQGDVAVREALCEAAASLLLRVRKWSALRAWGLRIAKRSSMLCAIVAVARKLAGILHRMWVSETDFHVGFGAKVTQRLRLKPAQ

SEQ ID NO: 85219 - protein, 416 aa, unidentified
MNAVGIDVSSRKSTVAVLRPLGEVVCLPFDVTHDIAGLASLVEKLKAIDGETRVVMEHTGRYYEAVAKALHEAGLFVCAVNPLLIKEYGANSLRRVKTDKADAIKIARYALDNWADLRDFTPMDAIRYDLKTLNRQFQLASKQRTASANNLIALLEQSFPGIRKCFDSPVRSDGTQKWVDFAHSFWHVDCVRKQPFAAFCERYRKWCKRHAYLFKLSNAEEVYALAKRAVVLTPKSKVVKVLVQEAANQLISISRSVEVYRAEMDRLAAMLPEYPVVMAMYGVGKSYGPQLMAEIGDVRRFERKQALVAFAGIDPMPNQSGDKNVRSNKSSKRGSPYLRKTLFNVIRTYLQCAPQDEPVFQFLNRKRAEGKPFYVYMLAAANKFLRRYYAKLRDYFASLDTLQSVDPIPTTLKASL

SEQ ID NO: 85220 - protein, 396 aa, unidentified
MSDARAQQVANDPVTNLFRERSKATAPGLAKEVWVGVDTHKDVNVAAAVDESGRTIGGDQPASISAPTTPEGNSDLLAWARGLGETVVAFAVEGTGSYGASLTRFLQGKSQIVVEATRPKREDKAVRRTLGKSDAIDALLAAQRLHRLELRISPKSRVGDVECLRMLRIARKTAVKARTQAINSMKALVVTAPDDLREQLSGLTKDTLPDKCASFRPKGYTPDAAAKTALRSLARRIHALEDEIKALDTEMAAIIKKAAPKLLARQGVGTDVAAALLVTAGDNPDRMKNESSFAAMAGVSPLPDGSGKTDGRHRLNTGGNRDANNALWRIVLTRMNHDPRTKAYVARRTLEGKDKKFIMRALKRYIAREIYAALMADQPGLPARSSPATALTPDAA

SEQ ID NO: 85221 - protein, 319 aa, unidentified
MAEELYVGIDVSKAELVVAMRPGTERMTVTNDRAGIKRLVGRLGELKPKLVVVEATGGLQRQVVAALWTAGIAVAAVNPSWVRSFAQGRGVRAKTDRKDAELLALYAQREQPDARPPADAETQALQELVMRREQLLEMLVAEKHRLDRAAGLLHKELRHHIAYLEGRIKDLERDIDKTVRRCDLWRRKSEIVRSVPGFGKTFCAMVLAKLPELGTLNRKQIGALVGVAPAPDDSGPRHGRRVIGGGRFEVRNKLYMCALVAARTNPVFKQFYARLLASGKPKKLALVAVMRKLIVTLNAMLKTNSLWRQPCATLAVAEN

SEQ ID NO: 85222 - protein, 370 aa, unidentified
MWLERGESIIDPNQECPPRFTVNEKGIVMTMIGIDPHKATHTAVAVDDDENVVDEFTLRASKVQAERLTDWAEGLGKREWAVESANGLGYLISQQLVACGETVFDVPPVLASRVRLLGSGKSQKNDPNDARSIAIAALRSDRLRVVEPDDHVTVLRLLVKRHRDMARLRNKHCSRLHALLLEVEAGGIGVKVSVANASGLLDAITVDDEATRYRVLIGREVVDDIARLDQSLKASKKRIAVAVTASGTSLTNIVGVGPIGAATIIGYTKDIARFPTRGHYATYNATAPIEVSSAGNTRHRLNLRGNRILNHAIHIAAVTQLRHDTIGRVYYQKKIAEGKTPKEAIRALKRRISDAVYKRLASDAATTATN

SEQ ID NO: 85223 - protein, 406 aa, unidentified
MSEQSFKWFAAVDWGSEKHQVCVLDADGGVVGEREFRHSGAGLTQLADWVQSITGPASTVAVAIEVPHGPVVDVLLDRGFGVHSINPKQLDRLRDRFSVAGAKDDRRDARAAADGLRTDRHLFRCLQIADPHIIELREWSRLAEELQQERVRLGNRLHHQLWRYYPQMLELTDDVAADWLLELWSKAPTPDQAKYLRRTAIERLLKQHRIRRVDAETVIMTLRQPAIKVADGVAEAACAHIRSLIVRLRPVNNELRAAERKLDELCAALEGSLQNDVAILRSLPGIGRINLAALLAEASGPLSRRDYPALRTLTGVAPVTKRSGKSCIVIMRYGAHARLRNTVYHWARVAVQHDSKCRSRYAALRQRGCSHGRAIRSVADRLLNVACVLLKRQTPFDPAYGETVAA

SEQ ID NO: 85224 - protein, 346 aa, unidentified
MMIIGCDFHPSWQQVSWLDSETGETGMQKLVHAAGEGKTFYQQLTVPALIGMEATGNSQWFIELVQDLGHEIWIGDAAQIRASYVRKQKTDKRDASHILKLVVEGRFPRLWTPDREQRDLRQLVLHRHKLVGIRSRVKNELQHLSLNKGMQKKRTLWSAAGQKLLRELPLKPWASCRREDLLGLLAMLDEQIGGLDRAVQQVADQHPQAKLLMTQPGVGPNTALAFVLTIGDASRFRRGKQVASYLGLIPREESSGGRQKLGAITKQGNRLVRSLLVEAAQIAVRYDPQFRREYLHRCHQKPKGVAKVAAARKLAVRLYWMLRTHKPYPEVVRIESSPRVPLVGAS

SEQ ID NO: 85225 - protein, 403 aa, unidentified
MSINGAPVVAASVVAVDVGKNKAALSATDADRHRLLGPVDFAMTAPALAAVLGRVCAVLPAGAVKVGIEAAGHYHRPLLVAAVWPAGWQVLELSPARVAEQRRVQGRRRVKTDAIDLEAITELVLAGHGVPVTARAAALTELTGWAAHRSRRVQTRTATKNQLLAQLDRCFPGVTLALPDVLGTQVGRLVAAEFADPHRLAGLGVTRFVRFAAHRGLRVRRSVADRLVAAARNALASPEAVVARQVLADDLTLLADLDAQILAAEAQMARWLPDTPFQPLTTVPGWGTVRAGNYGAAVGDPQRWPGASQLYRASGLSPAQYESAGKRRDGSISREGSVALRRALIDLGIGLWHADPAARRYGQALRARGKKGAVIGCAMAHRANKIAYALVRDQTGYDPTRWA

SEQ ID NO: 85226 - protein, 346 aa, unidentified
MNNSLSTFVPCGIEVSAQTLVVALGPPERPASLREFPNTPAGHQGVLRFLERAGQPVRVAMESTGLYGLDLALCLHQAGVAVMVANPRAVRHFAQAMMQRSKTDLLDAEVLRQFAVRMPFQAWRPPSPTALKLMAVARRLEALTEILAAEKNRRHAASLSQALPAIVRRDVERSIQTQQRAIERLTRAAQEFVLSDPQLARRFELLLSIPGFGVTSALHVLAELTLLPADLNVRQWVAQAGLDPRQHSSGSSVEKKPRISKAGNKHLRRALYMPALVAVRHDPHLRGFYEHLLARGKAKMQALVATMRKLLHAIFGMFKHDQPFDSAKVYAALPLQLPVPQEAACA

SEQ ID NO: 85227 - protein, 339 aa, unidentified
MKYTPVGVDIAKHLIQVHFINEHTGEVVDKQLRSKDFLTFFSNREPCLIGMEACGGSQHWARELKKLGHEVRLLQARFVKAFVMGNKNDVMDARAIWMAVQQPSKEIAVKTEEQQSVLVLHRSRRQPVKFRTAQINALHGTLLEFGETLHKGRAAMDRELLAALERMKTKLPPYLITVLEDQYTRLSELDMLIDDLEKQLNSVARQSETCKRLMEIPGVGPLIATAAVATMGKASAFKSGREFAAYVGLVPKQTGSGGKVRMLGISKRGDTYLRTLFIHGARSAALLTKEPDPWITELKKRRPTGVAIVAMANKLARTVWAIVAHDRKYDKNHVSIRPY

SEQ ID NO: 85228 - protein, 413 aa, unidentified
MSLALREAKFFTGIDWAAEIHAVCVMDAAGKIVAQFTIAHSADGIATLIRRLARFGDPAEVQAAIERPNGRLVDLLLDAGHPVVPVKPNAIKAWREGEVLSGAKSDAGDAAVIAEYLRLRQHKLTVAVPYSGQTRALRTVVRTRGDLVQTRVATANQLTALLEDSWPGAAVVFADIQSPIALAFLSRYRTPESARHLGEKRMAAFCASHHYTGRRTAAELLQRLRSAPAGILEQAHTAALYDAVLALVTVLTALGSAIKNLDRSAAARLGEHPDGAIFTSLPRSGQISAAQMLAEWGDCRQAYEHPDSVAALAGVTPVTRQSGKYRSVDFRWACNKRFRQAMTAFADNSRHASPWAAQIYAGAIAGGKDHPHAIRVLARAWIRVIYRCWLDGVPYDPARHGAARQLYASQQAA

SEQ ID NO: 85229 - protein, 409 aa, unidentified
MKLFVGLDVSSQDAKVCFLNGEGDRLESFTITNDLPGAIILKEKILNTASKLTCEVIKIGLESTSIYSYHPAMFLHNDKELRTYGSQVFMINPKQIANFKKSYPEMDKTDAIDAFVIADYVRFGRHTMSIVKEEQYIALQQLTRSRYQLVHALTKEKQHFLQHLGLKCSQFTQDVGSSVFGNAMMELFLERFSLEELAQMPLQDLALFLQEKGKNRFGNPEEIAKSIQKAVRGSYRLSKVVEDSIDLLLSTSIQIMRTYQAQIKEIEKGIESLMSSLPQTLESIPGIGPVFAAGIVAEIGQIERFTDETRIAKYAGLFWKKYQSGRFTAENTSLTRSGNQYLRYYLVEAANSVRRHVPEYRDYYVKKSAEVPKHKHKRALALTARKFVRLVDALLRNNQIYTPGRSVDR

SEQ ID NO: 85230 - protein, 359 aa, unidentified
MTTTATTTAAGPILALDLGKYKTVACAYDPGTTQARFDTLTTSREQLRALFARERPAAVVIEACLLAGWVHDLCHQLGLACHVANTASEAWKFKHTKRKTDKDDALRLAQLFALGQLPTVTVPPPATRQWRALIAARQALVGRRVAAQNRVRAILVGQGLPAPRGAKAWTELGLAGIGQHAKPLAGCGPDELWRGLLDLALTELRQVRPLADQAEARLDQLAKHSAAVQLLETTPGVGPRTAEAIVAYLYQPARFDSGKQVSAYAGLVPRQYQSGELDRRGRITRRGPALLRKLLVECAWVMLRYNRWARAVYQRLSRGKARKKQAIVALARKLLVRCWAMLRDKAPWRDGTPAEAAPA

SEQ ID NO: 85231 - protein, 406 aa, unidentified
MLEAMVRSCAGLDVHRRQVFCTVIRDGTKETREFATFHRELKELGNWLQREQVELAVMESTGIFWKAVYASLEEAGIEGRVVNARHVKQVPGRKTDVCDSEWLAELGRCGLLRASFIPPRDLRELRLLTRYRRKLSGMLAGEKNRLHKVLDDAGIRLGCVVSDIDGVSARAMVEALIKGGSTPGQIAEQALGRLQKKKDALQLALEGEISDRHRLVLQKILGHIKWLQRQMALIDGQIVAAMKPYQEEWKLLQTIPGLDALSAAMLLAEIGVDMSRFGSKDRLCSWAGMCPGNQESAGKRKSGRARKANAYVRSLLCEAANSARKTQSQFQGLYKGLVIRRGHKRAIVAVGHKILQVVYILISRKEPYKDPEIDYEALVVRRNAPRWLDALHKYGYLERLRTQTEP

SEQ ID NO: 85232 - protein, 344 aa, unidentified
MKHCKRLSIDLAKDVFQICGLSSNNKTQFNRKTTRAKLLFEVLNIKPDMIFMESCYSANYWGRLFESHGFKVKLIPAQHVKPFVKGNKNDKHDALAIVEASMRPNIHFVPIKTVDQQDIQCLHRVRQRLISHRTGLTNQIRGLLSDYGIIFSKGRHKILQSLPFLIEDMANNLSFSMRELLNDLLEELKNKNIQIKDIEGKIKLLSKKCKGFENLMNMPGIGLINSSALVSAIGDATQFSSARGFAAFLGLVPKHEQSGTKLKSMGISKNGNRYLRTLLIHGARSVVTRYKNTEDPLKIFAMKIKEKRGKHKAYVAVAHKMSRIIWAILTKDQAYNPDYILTKK

SEQ ID NO: 85233 - protein, 436 aa, unidentified
MSLAGTLSLAEVHVAALSHLQFTAYVGIDWADTKHDICLQAAGDTDHQFDCIPHQVARIDEWAKVLHQRYGGPIAIALELAKGPIVAALQKYDFFVLFPINPLTLAKYRAAFKPSRAKDDPTDAELALDLLLRHPERFTPLKPQSAAMRSLLSLIEHRRELVDDKTRFTNRLGNTLKQYYPQALDWFEQTDTVLFCDFLNRWPTLMAVKRARKTTLEAFFHAHNGRRAKLIEARLQSIRVATPLTEDPGIVAPCRLHVLALVEQLRTTLTAINLFDQEIAAVASTLPDYALFQSLPGAGPHLAPRLLAAFGEQRDRFQGAHELQKYSGIAPVTERSGKKSWVHWRWQCPTFLRQTFVEWAGQTINKSFWAGAYYRQQRAKGSSYQAAVRALAFKWIRIVYRCWQTRTPYDESTYLNALRKRGSSLLQNLDLQVQSP

SEQ ID NO: 85234 - protein, 341 aa, unidentified
MKNKSFIGIDISKNVIDASIFCEGTPIKDFPHAVFNNSHKGFGEMCTWLKKNHVVLSNSLFGMEFTGSYSMELEKFLNARKYQFCMLSTHVVKHHPMGPKDKSDKIDSAKIADFLYRYDGTECVKPYEMPDKTMQRLKELMNERKFLVEQRTSFMNRRQLCNTKENAQLYDGYIKKFSRDIENIELEVQKLLETDDSLFTTYKNLLTIPGIGFVNAMNVIVITRNFTAFDTARQYASYIGVAPHFHTSGTSVRWRPRPSARCDGQAKADLSMATTVAVQYDAELQSFYNRKLGGKQDSDTKRKALNAVKFKLVLRMFAIGKQNRKWEPLDSKSSKEKLAIS

SEQ ID NO: 85235 - protein, 403 aa, unidentified
MVNVGIDLHKTQFTICVRDRKGNGFAKYPTTQEGYQTFLTQAAEWQKKGEAVRVGVESTGNTRYFKNRMEEAGIGVTVINTLKMKVVNESVKKTDKHDAATIAEFLEKDMLPESQLCSRESEQLRRLLRARESLVTTEVVIKNQIHGLLTSEGMEDVKGSLQSKKGRQEVLDALKANKNGLVAQPLFETIDQLEENIKGIEKELRSLTKGDRMVELLMTIPGCGEICSWTIRAYTDDIKRFASAKKYASFAGLAPWVQNSNETIHHGSITKRGPKELRTAMVQVVMGLRRMKEKTFSWRFMQRYEAMKKSKGSGRAIIATARKMAVVIWNMLTENVEFDIGLMVDRKLAKKAESMSGMAGIVEQALNEAQEKPVITKEEKKSEGVKRTVKISGVAREKRKKVG

SEQ ID NO: 85236 - protein, 394 aa, unidentified
MLSSFSDQTTWKEDPVSTTATTRAIEGTAIEVGLFMSFELGEREWRIAWATSLGEKPRLRTLRARDTKRLLEEIEKARSAVNARRVVSCYEAGRDGFWLHRFLHAQGIENRIVDSASIEVNRRARRQKSDRLDAEKLLSMLLRESLGERDLWSRVNVPSAADEDARSLQREYRTLVKERTRSANRILGLLASQGLAPERIDAQLPEWLARVRLWDGSALLPGVRARILREFERWQFTHAQLLGIEKERRDRTRNLEERGLDQVRRLFALKGIGLGAAWTYGLEFFSWRRFRNGKQVGALAGLAPTPYQSGDLEHELGISRAGNRWVRGLSIEIAWGWLRHQPRSALSLWYQERFARGGPRARKVGIVALARKLLVELWRYVEMGVLPEGAQLKA

SEQ ID NO: 85237 - protein, 336 aa, unidentified
MSLYCGIDLHSNNHVVVVIDEEDKRLYEKRLPNDLCRTLQALEPFKDQLVSTIVESTFNWYWLVDGLNDHGYHVELANPTACAQQYSGLKYSDDKHDAFWLAHMRRLNILPTGHIYPPEQRAVRDLLRRRLQLVAMRSKQLTSIQNQVWRSTGVRVKTGDIKRKKFSIPYLEGLLLQAAQTNLTLYRTLEFEIKQLEKTILSEIELAPEFKVLKTIIGVGDVLGMTIMLETGDIGRFATMGNYASYCRCVKSVRISNNKIKGRGNAKSGNKYLSWAFSEAAHFTVRFDDRAKRFYQRKKAKTNGIIAIRAVAHKLARASFCMLTNQTEYDPKLAFG

SEQ ID NO: 85238 - protein, 389 aa, unidentified
MPQSNDLSRSFTAFNQDNTLIVVVEMSQLSWLVAGMVPGVERQPLKKLEPDEGLLLKLLNRWRHEALQAGHAIERVVVAYEAGRDGFWLARWLRERGVEAYVMHPSSVAVSREHRRAKTDRLDTQLLMRAFLGWLRGERRHCSMAAIPTIEEEDAKRPNREHEKLVGDRTRIVNRMKSTLARLGIRWFKPTLRKAEEKLSELHTAEGTPLPENTREELRRDMTRLRIVREQIKEIEEQRLRKLKAGSPAEKGPHAMIRLIARVMGIGVETADMLVNEILSRHLRSSKAVARYAGLTGSPDESGKRRREKGLARAGNARVRRGMIQMAWRFLRFEKDSRLAHWFSTRAADGRSGTRKTMIVALARKLLIALWRMATTGEIPEGVILRPAA

SEQ ID NO: 85239 - protein, 356 aa, unidentified
MNKRSKLNFSGQPIYIGLDVHKKSWSVSIFTQYGEYKTFSQPAKAEPLIQYLEHHFPSAQYHSVYEAGYCGFWIHDQLTAKGIHNIVANPADIPTRDKERRNKRDRVDCRKLARGLRGKEIEGIYTPPRWRLEDRSLIRTRLSMGRKQARCKNQIKSMLLFYGVDIPEQREMGHWSRRFIQWIEGVRMERTSGDLALKLHLEELCHLRQILAKLNRSIVALARTEMYRSWISLLRTIPGISTLTAMILLTELYEITRFRSIDQLCRYVGLIPDTQGSGEKEHVGGITRRHHSSLRWLLIEASWIAVRKDPVMMEAFQEYCKRMRKTKAIIKIARKLLNRIRYVLKNQAEYVTSVIE

SEQ ID NO: 85240 - protein, 323 aa, unidentified
MQGKVLPEARSANPVYVGIDVCKDHLDVYLHPLAQSRRVANSKDGLRLLKRLLTEHGANLIVMEATGKHHRLAHRSLSQNGFAVAVINPLRSHLFAKASGIHAKTDRVDAKMLALFGEALGPTARPPAPEAIEALQELVQAYNAATADHIALANRLTTVQLTLLRTEFTRRLKSLDHHLKRLAAEITKRIAADPVLARRYQILLSIPGIGATVAANLLANLAELGSLDRHAIAALVGVAPFADDSGETTGLRHISGGRASPRRALYWAALSASRCNPELHTFYKRLVDSGKKPKLALTAVMRKIIVMANSLLKDDRLWTAQRA

SEQ ID NO: 85241 - protein, 355 aa, unidentified
MSVYVGIDVHRKRSQVAVIDQDGEVLANRNVPNGVETILGVIGGLPPGTPAAFEAAFGWGWLVELLEDYGFDPHLVHPLQCKAIASARLKNDKVDAAILAQLLRADLLPEAWIAPPAVRQLRALLRHRAQLVRLRTLLRNRIHAVLADHGHDRPAGCWSGPGRGWLASLPLPAVSREVIEDDLALIDALQVPIDRLDIEVRQRARSDPRVKVLTQLPGVGHFTALVILAEVGDITRFGSARKLASWAGLTPTVRGSDRTVRHGHISKQGSAWLRWILCEAAQTARRHPDYAASYAAIARRRGKKIATTAIARKLLARAWHLLTDAERTAGLHATTTSAPPPRDAVNDREGSPSPG

SEQ ID NO: 85242 - protein, 343 aa, unidentified
MNLSRVGVDLAKNVFQLHGVDRHEKVVWKRRLSRAKWLQVLLEQVEPGCEIGMEACAGAHHWARELESRGYIVKLIPPQFVKPYVKSNKNDANDAEAICEAMSRPGMRFVTVKSVAQQDIQATHRIRSELMSQRTAKANQIRGLVAEYGLVAPRTLYALRAAIPDWLEDADNKLTDHFRSLLHGLWLDLVALDDRLRELDRAIEQLANSNPMTRRLQQLRGVGPMVATALIATVGDAGQYHKGRQMAASLGLTPRQCSSGDKQRLLGISKRGDVYLRTLLVHGARAVVSQAKHRDDRLSRWVTGIAQRRHPNVAAVALANKTARMAWAMLRNETDYDPDFTIS

SEQ ID NO: 85243 - protein, 353 aa, unidentified
MPRKTISLEAVATIGIDIGKNTFHLIGLDKMGAIVLRQKLSRNQVDTRLANMPRCLIGMEACVGAHHLSRQLKALGHDARLMPARYVRPYSKGQKNDFRDAEAIAEAVLRPTMKFVAIKTVEQLDLQGVHRVRERLVCQRTSVINQIRAFLLERGIAVRQGLRALRTAMPNVLAMTDKLSPRIIHMIEDLCTDWRYLDARIATVSNEIEALSEQDDGAKRLMTVPGIGPIISTATVAAIGSGDVFSKGRDFGAWLGLVPRQMSTGGRTVLGPISKRGNRYLRMLFVQAARSILLRPQSWQKYGLKSWIEAAARRLNRFKLAIALANKIARIAWGVLHGGRNFEVRSMRTAPQA

SEQ ID NO: 85244 - protein, 427 aa, unidentified
MICAAVERGAGIDVGKKWLSVCIMIGPLNGEPRVERQRFGVNVADLQRLREWLCKEAITHVVMESTGSYWKPVFNVLEDSVKVYLANPYEVKNRRGHKTDDKDGWWLAHLLRHAMIHPSFIPPRPIRGLRDLTRRRERLNGAGTAEKNRVQKILEDANIKLGNVLSDVFGASGQLMVDALLEGKGAPGQIAQFAKGRAKKKIPAIIAALEGHQMSEHHRQMIRYSLAHMKFVEEQIEEIDKDIAAKIHEAGLDRQWQILQTVPGVQERSAAKILAETGADMTQFPAPRNLSSWAGVCPGNNRSAGRNRSNRPTGGNPWLRAALTECAWAAAAQKNCFLKEKFWRLTTKSRGKKNLALVAVAHSILQLVYDVLRTGQPYRDRQAPALSEQQQERLIRHHVRRLGKLGVCVHSLRSGKAVKQTPIVVPN

SEQ ID NO: 85245 - protein, 425 aa, unidentified
MNEVQKKLLVHGDVIIVGIDVAKHNHWARIYNQIELDVVKPFKFHNSKEGYYRLVAKMEEAKEKARATRVVIGMEPTGHYWKPLAWFLQEQGYTVVIVNPYHVKRRKEEVGNSPTKNDRKDAGIIAKVVKDGNFLHCLLPKGKYAELRNLTVTRRQQRRKLNSALNQLQAILDEYFPELGQVFKNLLGKAAQWVLRNCPFPRLILAYKLEEIAAKLKEASNHRVGMKRAQALYQTAQESIGVTEGLTGAQHKLNACLDEIAFYQKQIEQTEAAMADILAGIDIAGNLLSIPGIGLVTVASFLGEIGDPQNYEHWKQIQKLAGLNLSEQSSGQKNGQSKISKRGRAELRNLLYQASLTLVAKNREFKALYHYFLTRRENPLKKKQALIAIAVKLLRVMYGLARKKENYDPDKVLGDYRRAQLQQAA

SEQ ID NO: 85246 - protein, 359 aa, unidentified
MQREFTKVTFTGQDVYAGIDIGKKSWTVCVYVGQEYHKRFVQPPHPEVLAEYLRRNFPGAVYHSVYEAGYFGFWIHEALVRCGIDSMVINPADVPTTDKERSTKTDRVDAGKLARALANQELRPLYVPEEWVQEDRSLVRMRMAFVRKQTRCKCQIKALLRFYGFKMPDPVAEQYWSRTYLRWLEGLRLTHESGTIALKALLNELFTLRTTIAELTRDIRRLADETRYRTQVELLRSIPGISTLSALVFLTEVISVDRFKNLDRLACFVGLVPGEKSSGEIEQDTGLSSRRNTFLRYTLIECAWVAQREDPALLQAFTQYCQRMPKSVAIVHVARKLLSRMRFVLKNNQPYVSGVLKAA

SEQ ID NO: 85247 - protein, 342 aa, unidentified
MQVTTIGLDIAKNVFQVHGIDASEKVVVRKQLRRSQVLELFKALPPCLIGMEACASAHYWARELTKLGHKVGLMPARDVKAYVKRNKNDAADAEAICEAVRRPTMRFVQVKSAEQQSQLMLHRTRDLLMRQRTQVINALRAHMAELGITAAQGNAGLRELLAIIAGAADERLPAEAHASLIVLAAELQAMRTLIASIEKRIIAQHRSDEASKRLRSIPGIGLVGATAIVATITDPKAFRSGRDMAAWIGLVPRQDSTGGKQKLGPISKQGDRYLRRILVVGAHAVLKLARQKPEKYPWLTQLLARKPFKVVAVALANKMARIAWALLVKGGPYRARALVAAA

SEQ ID NO: 85248 - protein, 431 aa, unidentified
MNRSVEFLSVGIDVGADFSLMASALPSQELLGKPYKIIHSSQRSLNGAVEKIKTLSQKYQLPARVFMESTGIYHYPLYHKMKDAGFDVFVLNPLVTHAGRDLNVRNIHNDKYDSQKIALLGLRPGLKTSLIPSDQVISMKVILREYYAVKKEISMYICRLKNQLRQAFPQFLPLFSKVNGVTAMAILCEYPNPESLLNAGEHAVADFMKSVSHNGPLKVQKKAAALIQAAQDARSFGHWNHGISILIRHYIEMIRLLDVRAKTLLAQAKALLAEQDSKTLAHQTELLQTIPGIGFLSALTLICELGDFSAFKRPKQLFSYFGLDPIVRQSGNYNGTNLKLSKRGSPFARRCIFVIALQSISLNIHKEPKNPVLRTFYEEKCMCKAKMTAIGAVMHKICNLIFAVLRNDAPFVLQTPEQHNAAYLSKTHSVA

SEQ ID NO: 85249 - protein, 350 aa, unidentified
MWIIGCDLHTRYQQVAALNTETGELVERRLEHAGEVVRAFYAARPTPAIVGIEATGHAQWFERLLGELGHQLWVGDAAEIRAAAVRQQKTDVRDAALLLQLLVEKRFPRIWRPSADNREMRRLLLHRVKLAQMRTTVRNQLHALAMSQGLCRGSRMWSRKGQRELEALSLGGWSHQQRQDLQALDGTLSARIEVLNRALIEQAHGYPAAARLMQQPGVGPMTALAFVLTLGPAQRFRRSKQVVSYLGLNPSEYSSGGRQRLGAISKQGNTLLRWLLVEAAQTAARLDPELHRQYLRLKHRRGARIAKVAVARKLAVKLYWMLRTFQNAAQPVSPQSSPCTVMVPQLGSNS

SEQ ID NO: 85250 - protein, 343 aa, unidentified
MTNISTIGLDLAKSVFQVHVADRDGRPVLRRKLRRSQVLGFFAKLPPCVIGIEACASAHYWARELQELGHSVRLIPPQYVKPFVKTNKNDASDAEAICEALSRPTMRYAAVKSAEQQSVLTLHRARELLVRQRTMLINAIRGHCAEFGIVVAQGASKVTALIGIIEDHQDDRLPALVRQALGSLIRQYEMVQEQILGLERQLTSWHRATEASRRLATIPGVGVITATALVATIGDASQFRSGRQLAAWLGLVPKQHSSAGKDRLGRISKRGDGYLRKLLVHGARTVLLWSRRKKEERSRWQEALLARRPTNVVLVAMANKTARIVWALLSRREVFCAKAHVTT

SEQ ID NO: 85251 - protein, 366 aa, unidentified
MEATEEQGEWNGRTESGNPVWVWFGLDVSKESFTAARFHGLTKEASRPKEKSFPLKKEGVAAFLKWRKSFGEKLLEDAVAMEATGPYTGRLCRLLLAAAPALRVSVCNPLSVSLYTKSHTPAKGDGTDAVYIAMFACDRQPREWRVPDRDQAHLRALENERKKLVELRTGLSNLGQTIEFKDVAKINREMIEEVEKRMERIEAAMKEIIKSRRDIAEEIALLDSVPGIGFTSAAAIYAMLGSLKQYTRKELSALSGVCPANAQSGKSLKKSRIDRRGPSHLRQILFCDSKWATRIPSVKALKDRLDAQENSSRMRSRCACMRKMLLVCRAVVVSGKPFDKSYNASNSLQESDEKSEKKSEIAVQTA

SEQ ID NO: 85252 - protein, 296 aa, unidentified
MKTIGAERQQTTEGGVILGVDTHLDLHVGVALDHLGRRLGEAREPPTANGYEELLIWAEGFGPVGCAGIEGTSSYGAGLARHLAAKGIEVLEVERPERRRRGSRRNFEKSDPSDAEAAARAVLAGEASGVPKSADGTVEMIRTLRSARRSAIKARTQAANQLQAFRVTAPEGLRRRLRGLWTKDLVSVAARFRLGDGPTDVPTATRFALRSVARRYEALSAEISELEAHLERLVAQGAPEILSLPGIGTDNAATLLIVAGDNPRRLKSEASFASLCGVSPIEASSGKVVRHRLNLE

SEQ ID NO: 85253 - protein, 406 aa, unidentified
MKTIIGIDWSESKHCVHIYNEAGSLLTRLEIPHSLEGFAQLRRRIAAINSEPSNCLIAIETSHNLLVDYLARCGYTLYILVPSVVKSNRGRQGSSGAKDDDRDAQLLGDILRTDRGRLIPWQADGPLVRQMRSLLSWVDDLTAAIIAQHNRLRANLLRYYPQPLVAFSSLTGQLALHFLTTYAAPADLEGLTLAQLTAFCRQHRYYQWARLPTMLANLLTPAPQLDQEVVPAYRQQTVFLAQQLLSLSQQKKEAIAQINQLFDQHPDGPIFASLPGAGELLAPKLLVMFGDHRSRYPHRAILPAIAGTCPVTVASGRSRYVKFRRACNHHFRQTAQQFAQASTRQSVWAATYFSQACCRGHSKSHAYRCLANRWLHLIWTLWQTHQLYDEDYHLRQVARHRRPERG

SEQ ID NO: 85254 - protein, 400 aa, unidentified
MISVGVDVSKGKSTVCILKPYGEVVSSPFEIHHVEKDMEDLDKLLSKLDGEVRIVMEATGIYHLPVVTFLHDKGYFVSVVNPFAMKKYAKDNSIRGAKTDRLDSIMIANYGIEKWFKLQRYEGTEETYAELKLLGRRYRYYMELHVKALQELTHVLDYVLPGIKKMFNSWNEANGKDKLSDFVERFWHFDLITSMSLEKFTEEYIAWAREKKYHRSRSKAEAVYELASSGIPTLSSSTPSTKMLVQEAVSVLRAVDSSLSLILTRMQELAKSLPEYSVVREMGGVGNVLAVKLIAEIGDVRKLHNAKALIAWAGIDPPPYESGQFIGSKRRITKRGSSTLRKVGYEVMRVLKSHSAPKDDAVYNYILKKESEGKSKKHAKIAGLNKFLRIYYARVMEVYQ

SEQ ID NO: 85255 - protein, 436 aa, unidentified
MRGCRCSMIMGFTKPIEHFNLQRKKVITMNTLYVGIDVSSKSNVVYLMLPNGDKHSNFSVANSHEGSTQLVKRILSALTSHSLDTVLIGLEATSIYGYNLVYFLREDATLAPFNRKIHVLNPKQVKKFHDAYNDLPKNDYVDSFVIADCLRFGRINKEVYMGDYRYKALQNLTRARFFDVQNLVKEKQRFMNVLFKKYSTMTQEKVFSDTFSTTALAVYDEFESAEALANMDLHELTDFIIEKGKNRFPDPDAVAKAIQKAARSSYRLPKTVNDSVNQVLSISITSMKALESQIKEFDKAIKAQMELLPNVLISIPGIGPVYSAGIMAEIGDINRFNSQAALAKYAGLAWKQHQSGGFESEVTRLIPSGNRFLKYYLCEAAFSLVRCDKEYSDFYHLKYKEVNRCQHKRALALTARKFVRLVFRLLKDNRLYCPAK

SEQ ID NO: 85256 - protein, 424 aa, unidentified
MKVTFQTCCGVDVHKSFLVATIIKTSSSIEPSYQKRRFSTFNNSILEFKKWLLENECLYVCMESTGKYWIPVFNLLEDEINVTIANPKWVKAVKGNKDHTKDSKWIGDLFRLGLVRGSYIPCKKIRILREFTRYRYKLVSCRSSEKNRYQNALTVCNVALDSVVSDVFGKSSTSIIDYLLEQSGTSIDHEVIASKLLKRLKAKEDAVIESIEGYQMTDSQKYRMHLVRAHMDYITAAINDVDSEIESLIASDPDYENAVELLCTIPGVKYDSAITIISEIGIDMSQFCSSKRLCCWAGLTPGSNESAGKKKSVRITRAGVYLKPALVQCAHAAVKSDKSPYYKKKYESLVKRRGKKRAIIAIARMILTAIFQMLTTGETWNPCDLYKIDMPEALLEKQKQKAIKQAQKLLIREGLLPPTEPIAS

SEQ ID NO: 85257 - protein, 344 aa, unidentified
MKTYAGIDLHSSNNYIGVINESDKRLYGKRLPNDIDLILGALEPFKSTLQGVVVESTYNWYWLIDGLEEKGYKLHLANPSAIQQYEGLKYTDDKWDSFWLAHLRRLGILPEGYIYPKEDRPIRDLLRRRMMFVRHRTSHLLSLQSMIDRNLGIRISSNNIKKLTNIETEQLFQSEYLNFTAVQHLDAINFFKTKVNKIEKKILKVAKLRKDYKLLVTTPGIGEVLALTIMMEVGDINRFLKVGNYSSYCRCVGSKRLSNGKKKGENNSKNGNKYLSWAYVEAANFMRRFCKDAQKFYQRKEAKTNKIVATKALANKISRATYYVILNQVPFDKDMLFNKKYLPK

SEQ ID NO: 85258 - protein, 321 aa, unidentified
MAMHVKKVILGCDVSQQWLDYCQYGDSRTTRILNQRRDIDRWLKALGGPAAIAVEATNTYHELLVERARHIGLTVYLISGYQLRHYGLSLNVRMRTDRVDAQLLARFLEREIDALRPYEPRSPKHQRLLRLMRRRTLLVRQRQQLRQSFVDLPELRNSAHSVARRQQQLIALIERRLHRLARELGWQQDLARLRSLPGVGPLNALALCAAYRSGHFPHRDPFIAFLGLDVRAKDSGQHKGRRKLTKKGNPEYRRLLYNAAMAATQDGRHFHPYYCTLQARGLSKTAALVAVARKIARLAFTLLKRQTTFDPSLDRRPCLTT

SEQ ID NO: 85259 - protein, 440 aa, unidentified
MSIDTTLTHNFRRNPTMKFKMQTKQNQLIERISVKHLVVGVDIAQQFHVARAVNFRGIVVGDPLTFKNSEEGFASFLKWIKNLQRLNNLDEAIVGMEPTGHYWINLSKWLSKQDIEVVTVNPHLVKRNKENRDNTQSKSDKKDALVIADMVKNGYYSEVRYTSEPFEKLRVLISNRDVVVKRLVSSINQLNRWVDIVFPELRQVFKDIKAKGAIATLRLFPSPMDLETLQPHEVIAGWKSIMKRQPGLKKALLLLQLAKKSVGTRQALDAYKFHLEQLLEEYDLAVTQLERVEQLVTEALNKIPFAKKLLTIKGISEISLAGILGEAGDLSGFSHGNSLLRHAGLHLAEASSGKWKGQIVISKRGRSRLRRFLYLATMSLVMNNPEFQALHSHNVKVKKMKKMKSIMKLIGKLARIFVGISRRNESYCPDKVKSFSPLAA

SEQ ID NO: 85260 - protein, 341 aa, unidentified
MNTLYAGIDLHSNNSVLVISNEKDVVLYGKRLKNDLDGILAALAPYRDDVAGVVVESTFNWYWLVDGLQAAGYTMHLASTVSIPQYSGLKYGDDMSDARWLARMLRLGILPEAYIYPAETRPVRDLLRKRSSLVRQRTAGILSIQNLFSRNTSRSISADKIGQLTPELMAEAGLSEDVVLAANASLALVQCATTQIKALEKVARQRVALTNEFKNLTTVDGIGLILGLTIMLETGDINRFRSVGNYASYARCVDGKRVSNGKKKGKTNTKNGNAYLSWAFSEAAQHATRYNDKAARFYQRKMAKKHMMVARRALAHKLARACFYILRDGVPFDEDKTFGNK

SEQ ID NO: 85261 - protein, 392 aa, unidentified
MYIVGIDISKNHHEASIVSPKGKQIGRSLRFATTHKGADSLMSFIFKNIGNSPCVFGMEATGHYWYPIYSFLKAKGYTIYVINLIQSDSLRKMYIRQTKNDSIDSFLIAEVIRFGQFGTTSMADENILAMRQLCRYRDSVISSRTEIKLRIGTIMEQIFPEYEKQFSSLWVSTSMGILEKYLTPENIENAPIDELFEIIKDKSHNRLTRAKAISIKEAAADTFGIKIAQDAFSFQLKQLIDRMNFLDKQIEALDCQILEYYEKFDCYLHTIPGIGMIAAATILAEIGDISRFKNSSSLIAFAGIDPTVRQSGEFNSTHNHMSKRGSPYLRHAIFLAATTCSFHNSPLNAYYKKKRDQGKHHLTATGAVARKLTTVIYAVLRDSKPYEPKSFC

SEQ ID NO: 85262 - protein, 361 aa, unidentified
MLYFKFQIMETPIKQTAGIDCGMQELVVSFGLLVSSGNFIYRLTKSFVNNIKGFKQLLQWINEISSKETSVLFVMEATGVYHEKLAYYLIANNCHVSIVLPNKINAFAKTCISKKQDDQQASKVLAEFGCIKNLDEWQLPHPLFASLKQLTREKRQLQQEMAIIKNQLHVEQTKAITASASIKRMKARCRLIEKQITDVEKEIIDMLNSDAAIKEKTEKVCTIPGVGLPTAVTVIAETNGFNLIRNARQLVSYAGLDVVQKQSGTSVRGRAHISKKGNPHLRHCLHLPSFTAVKYNIPMQNLHHRIVEKQAIKMKGYVAVQRKMLMLIYTLWKKNEAYNPSIKFLEQPVEAALTELDQVRS

SEQ ID NO: 85263 - protein, 317 aa, unidentified
MADPCGIGVDVAKATLDLACSMTPTRRWQTTNDEAGWAALVTHVRTLAPAVVVLEATGGYETGAASALVAAGLPVAIVNPRQVRDFAKALGLLEKTDALDAGVLAAFAARIQPTPRPLPDDLQADLHALVTRRRQLVEMLTAERNRVPLARGGVRKNLLAHIDWLAKQLGKTDRDLRTQIEASPIWRVRDQLLQSVPGIGPTTSACLLACLPELGTLTHRQISKLVGLAPLPDDSGTRRGYRRIQGGRGTVRTALYMATVTAITHNPTIRASYRRWRAAGKLPKVAVVAAMHKLLIHLNAMLKHQTPWHQIPTAPIA

SEQ ID NO: 85264 - protein, 412 aa, unidentified
MTNGMRRWFAGVDWGSEKHQVCLLDEAGTVVGERVFQHDAAGLAALCDWLVSVAGDTSSVAVAIEVPHGPVVDVLLDRGFAVHAINPKQLDRLRDRFSPAGAKDDRRDARVAAAGLRTDPHLFRPLQVGDPAVIELREWSRLAEELQQERVRLANRIRQQLWRYYPQLLALSDDLTAEWILALWTMAPTPAKAMRLHEATIAKLLSRHRIRRLDAAGVAEMLRQPAITVAAGVTEAAILHLRSLVARLRLANTEFHQAERKLDELCAQLSQNATAAADGPCDAAILRSVPGVGTVILATLLTEAGDPLARRDHTALRTLSGVAPVTKRSGKTCIVVMRYAAQARLRQAVFHWARVAVMHDPTSRSRYEALRARGHSYGRALRSVADRLLGVACVLLRRRTLFNPNHGTSAAA

SEQ ID NO: 85265 - protein, 483 aa, unidentified
MLAWQVIFILPAALWAFFHQLLILKTNAMAKTKVKKQNTKSKRIKSTKATLERIRLKAAGVDIGSSEIFIAILDMPVISFETFTCGIVLAIKYLKDHQITTVAMEATGIYWLPIYEMFDQAGIEVYVVNGGHVKNVPGRKTDVLDSEWLRELHTFGLVRSSFIPDEEIRKLRYFMRLRKDHITMGASHIQHIQKNMDTMNIKLHNVISNIMGVSGLKIIRAILAGERSAIKLMELCNEVIKGKKREEVIKSLEGNYKPECIFGMQQALEMWEMYQNKIQECDKEIGELLEKMTQDKPTPAELSKPKQINSHKPDIADLHLLMMKLTGENDATRIAGINDYSLLQLISEIGLDLTRWPTSNHFVSWLDLAPPMHQSGKSKRQRRIKRPNNAGQIFRELAKNVGNGKHNALVGFFRRLKSRSGAKVATKATARKIAVYYYNLMTKGIKFVAEGIAQYEERYKEQMLKSLTKRAKDMGLKLVPIAA

SEQ ID NO: 85266 - protein, 377 aa, unidentified
MHSENIAAYVGLDVHKETLAVAIAAPERLGEVRYYGTINNEAQAVRRLFQKLQGLYGNILSCYEAGPCGFGLYHQLTAMNIKCQVIAPSRIPKSPTDRIKNDHRDAISLARLLRAGELTPVWIPELTHEAMRDLIRARAAAKRDSRVARQRILSMLLRTDKHYAGKHWTGKHRTWLADQSFSQPSQQIAFQHYCQSLEQIEDRILQLDQEISRLLPEWFLCNLVCQLQALKGVGQLIAITLVAELGDFSRFSNPKQLMAFLGLVPDEYSSGNSIRPRGITKVGNSELRRLLYEAAWSYRTPAKVGAWLIYYRPDSVTQYSKDIAWKAQQRLCSRYRSLTAKGKKSQVAITAVARELTGFMWDIALAAQSSFSQQKQN

SEQ ID NO: 85267 - protein, 412 aa, unidentified
MKDLLEISCGLDVHKEKIVACILTGPLGKPTRSEIREFSTLIPDMIALRNWIVSKNCHHVAMESTGIYWMPIYEILEDAFSGDITLLVVNARHMKNVPGKKTDMRDSEWISTLLRAGLLNGSFIPEKRIREFRDLNRYRKSVIRDITSQKNRIEKFLQSSGFRLSSFISDIFGASGRNIILHLMEHGQIDKTALDSCLKTKTRNRIDEILMSVNGTLSEHQKAFLRILMTHYDSLKKHLAEIETSLEKDMAPFALQVEQLNSIYGISTTASCAIIAEIGIDMKPFKTAEHICSWAGLCPGNNESAGKRKSTSVTKGNPYIKSMLCEIAWVIAGKRNTYLSAWYWRIKQKKGAKKAIVALARKLLVIIYTMLKQGTLFDESCFETRRKHCEQKQLSRYIRELEKHGYHVEAQS

SEQ ID NO: 85268 - protein, 418 aa, unidentified
MAMKIVRFNCCGMDVHKNLVVATIGITDRKTNVTEYFQRSFSTLNSDLYRLKDWLRSHHCSDVCMESTGKYWIPIFNVLEDEINVHLTHPKYVKAIKGKKTDKKDSKWICDLFKHDLIKFSFIPPKEIRELREIARYRYKLVCMRSSERNRYQNCMTVSNVGLASVVSDPFGKTASNIMKEVMKSNVIDDDKILKLVHRNCKNKDKILDSLHGYHIESDQRFKMEKSLDHMEYLDQLIDSCEVELIKRAYPFRRSFQHITQIKGISVLSAILIISEIGIDMSQFGSDKQLVSWAGLSPANNESAGKKKSVRISKAGQYLKPLLVQCALSAIKDKTSYFGRKYSNIKKRRGHKKAIIAIARMMLVSIYHMILTGEEFQPCDYESFMDPKPNANPSLTVEKALNFLKQSGIDISSIPINL

SEQ ID NO: 85269 - protein, 343 aa, unidentified
MDVSTIGLDIAKSVFQVHGIDASGEVVVRRHLKRRQLLGFFEKLGPCLVGIEACATAHYWGREIAALGHEVRLMPAHYVKAYVKRGKNDAADAEAICEAVQRPTMRFVSLKSAEQQSVLMLHRTRELLVRQRTMLANALRAHMAEFGIVTGVGLPQIKELLAVIADEDDHRLPRDTRACLQSLGRQFLSLHEEICAADKRLHAWHRSSPVSQRLATIPGVGPVTASALAASIADPLVFTSGREMAAWIGLVPRQNSTGGKQRLGKISKQGDQYLRWLLVAGAMTMIRHAKRRGAPHQPWLGNLIARRPTKVAAVALANKMARMAWALLRHGGAYRQPTVTASL

SEQ ID NO: 85270 - protein, 408 aa, unidentified
MNPLFVGIDVSSKNNVAYLMKPDGSKHSSFSVQNNLGGAKLLSERIVSALGSMQLERVVIGLEATSIYGDSLVYALREDGRLGRFQRKIHVLNPKQVRKFKEAYSDLPKNDWVDAFVIADHLRFGRINREVYMDDYRYKALQTLTRARFDVIQNLTREKQRFANYLFLKCSGMAQDKDIQNTSATTIALMEHFETVDDLANADLEELTAFITETGRGKFADPDATAKAVRAAAKGSYRLPKTVNDTVNQAMAVSIASMRALKGQVKVLDKAIEQQFEIIPNTLTSIPGIGKVYSAGIIAEIGDIHRFDSQASVAKYAGLVWNRSQSGDFEAEHSRMIKSGNRYLRYYLLEAANSVRRCDSEFRRYYDLKFKEVNKYQHKRALALTARKLVRLVFRLLKDNRLYIPSEG

SEQ ID NO: 85271 - protein, 433 aa, unidentified
MAKELKPENVFAVGVDPSKDTLWVVGMKFPEVILFSRSIENVPEEYEKLDAVVQRLAVDLGLEAVYGLEDTGMYGKAFCDWLCARGRVVKEVNPIRTSRQKAFYGQDKSDEADAICAAAIVLRSLHALPDRKALDGAWQALKELSTFRDAKVKQRNQLLCRLHHYLGRTWLSLYQEFFSGLNQKAALAFFRRYPNPQALKGGSRGELARLLFEATGGRFRKRPPGTTPREAAEQKAKVILTGAARLWERPVDIEVEAVSVIIVEVVDPLVALNESVARIEAEIGRLVERLGVPLKSITGIGYVRAGVILGQTGDPGRFKSTHAYAKYNGTAPRQKGSGKIVRHVKNYSCNRRLRQEFRQLALYMASRDPMSKEYADRLIKEGKTKGQALNRLARRLSDIVFAIMCTGKDYDPEIARRNMHRKMSRKERLKLVS

SEQ ID NO: 85272 - protein, 373 aa, unidentified
MIHVGIDWSDKHHDFCILNELGEKLDSFSVSHEQDGFEIACKHIAKQADPEQVRIAIETKDSLLVDFFCEMGYTLYFLNPKQTDRFRDRHRMSHSKSDAFDAYVLADAVRTDAHLFNALSPLDEQSLMLRVLTRTRVGLVNRKVAVQNEITTYLKRYFPVALELFGGIDNFEAISFLLQYPTYEQARSVSKTRIASILGKHAGVSKAIAQRHAEQSCEKLRQSQPIPAAGVAHSYPLAVKSLLRQLKNIMDEIIALENDIRDAYDKHPNKDLIGSLPGVAETIGPVIAAELGTDIARFSDLKTLKAFGGSSPVTEQSGKFRSVHFRKACNGHLRRALHLAAQGAIRKAGWARERAPCRALCEYPTQSGEVRSK

SEQ ID NO: 85273 - protein, 392 aa, unidentified
MKEKLRFLGMDVHAETIAAAIAEPDGEVRSLGTIPNRMESVRKLIKKLGPVEKLRVCYEAGPTGYVLYWQLAELGVQCEVIAPSLVPMKAGDRVKTDRRDAERLARSHRSGDLTAVWVPDEGSEALRDLVRAREAAKQDELRARHRLGKFLLRSGHRPPTGVRSWTHLHLIWVSQIRCTQMAQESTRLDYLHEVEHMRERVLRLEQAIAEAVQLASPALQEVITDLQALRGIAHISAVTIAAELGQVSRFAGARELMGYCGTVPSENSSGKRIRRGSITKTGNAHLRRIVVEAAWSYQRPPAIWAGLRKRQQSASEEAKEIAWKAQHRLHKRYARLAATGKDKRKIVTAVGRELLGFIWAIGTKAEATVYPANGSLRKSKKLPDKEKAKRTH

SEQ ID NO: 85274 - protein, 366 aa, unidentified
MGKSSTTFVGMDVHKESIELATADEGEARHYARIGGEAAAVDRAVRKLRSVHRDLVFVYEAGPCGFWIYRRLRAQGLACMVVSPSMTPRRAGDRVKTDRRDCLMLARLARAGELEPIYVPDARDEAMRDLVRAREDAVCMQRQARQRLQALLLRNEIRYVGKTAWTAAHRRWIAHLKLPHPAQQIAFEEYVQAVQETGERLERLAASIAAELEHWRWRPVVQALQALRGIQVIHAVRLLAEIGDFARFQAPRKLMGYLGMIPSEDSSGSRRRQGSITKAGNSSARRALVEAAHAYAHPARVSWVIARRQTKLSKSVCDTAWKAQLRLCARFRRLAARGLNRNKIVVAIARELSGFVWAIAREIKPA

SEQ ID NO: 85275 - protein, 386 aa, unidentified
MKKNNTTKKSSKKAQTKEKNQIHRMAAKQKLTIGIDLGDQTSRYCIFADGKDPVSEDQLPTTKAGLDSLFAKMPASRIAIEVGTHSPWVSRHLRSLGHEVIVANARQVQLITHSVHKNDRVDARQLARLARADPGLLSPIQHRGEEAQLDLAVIRARAELMEARTKLINSARGLVKPLGERLKKCDADQVSAGLGKGLSEGAQAIIEPVLKAVEAISEQIGKYDEQLEQMEKRYPEVKLLKQVYGVGPVISLTFVLTLDDAQRFAHSRDVGPYLGLTPKQRDSGESQPELGISKAGDGLLRSLLVQGAHCILRKGAADSDLRAWGLGKIGNGGKRAKKCAVVAVARKLAVLLHHLWVTGEVYDPHYNSKAAEAAAAKSKSKAKVAA

SEQ ID NO: 85276 - protein, 439 aa, unidentified
MEVVYRRCCGLDVHKDSITACVLVLDGKGQREVRTKEFQTYWKELQRLKLWLYASKVECVAMESTGVYWKPVWNVLEGHFPLLLANPYHMHNIPGRKTDQKDSEWIADLLAHGLLRASFVPPRPVQELRDLTRYRVKLMGEYNRVHNRIAKVLEDANLKLGSVVSDILGGTGRAIIRAIIAGEDRPEWLADKALSSLRNKRERLRLVLRGQVSDHHRYLLQELMQDLERIEDKICRIEAEIVRRTQPQQETLERLTTIPGVDWITAWTLVAELGTDMSVFPDADHAASWAGLVPGNFESAGKRKSNRTRHGNCWLRRALCQSAWAVSHKRDCYLTAHFYRRAARAGVKKAIVATAHQILIVAFHILRDGTTYQEHGGDYFDRLNPHRTQRRLTNRLQRLGFEVVLKPHNAPDPQPLPSPRGRGRPCRCAERGIGCKHRH

SEQ ID NO: 85277 - protein, 341 aa, unidentified
MDHYAGIDVSLEYSSVCVVDGSGKIVREAKVASEPEALIAWFASLGFGLERVGLEAGPLSQWLFAAMREAGLAVELLETRHVRKAFEAMPVKSDRNDARGIAQLMRLGWFRPVHCKSMGAQETRATLTARKLVQSKLRDVENSLRGILRGFGLKVGKTTELGFAGRIRELVAGHPHLETIADALLAVHVVLRNEFKAFEKRVRKMARSDTRTRLLMSTPAVGPIVSLTYASAIDDPGRFKSSKQVGAHFGLTPRRYQSGETDYTGRISKIGDSSVRTALYEAAHIMLTKPVKGCSQLKSWAMRIARRAGMSKAKVALARKLAVIMHRMLVDGKPFKAVAAA

SEQ ID NO: 85278 - protein, 368 aa, unidentified
MVWMPHPGTGIKLCHSGDVESTKLEATMNEVTMIGVDLAKSVFQAHGATAVGEPVFRKKLSRGQFLKFLSEQQPCVVAMEACASSHYWGREILKLGHDVRLIPPIYVKPFVKRQKNDANDAEAIAEAAVRPTMRFVPVKSAEQQSRSMIFKTRDLFVRQRNSIINALRGHLMEYGIIAPPGRNFVKKLAEQIESPDCDLPSIVIELSRVHLDQLNVLTDKVVTIERRLKEESKSDPETIRLQTAPGIGPVSAMAIKAFSPPLEGFKRGRDFAAWLGLVPVQKSTGGRQVLGRTSKMGQRDIRRLLIIGAMTRIRWAIKNGPPKGSWLEQMLERKPRMLVAIALANKTARIIWAMMTKHEDYRDPIAVA

SEQ ID NO: 85279 - protein, 422 aa, unidentified
MKNTAARKRKQVPEGYLIVGVDPHKKKHAAVAIAQDLTIHARFKFDNTKEGLEFLLLRVKAEMVKSECRGVMLAIETGGHYWRNIAYYLDDKGIPFRFINQYTLKRRREGKDINKRKNDYRDSEVAAQLLCTGEFVESVIPQGVYAELRTAHNAYRRLVKERTRITNLLKGLLDSLFPEFVGVFKDPCGLTALSVLSTCSIPGVIAGMTDDEFIAVIEKEHHGKRLMRRKLGELHAIAKKSIGIEAGAHSLSVEVFFLVEKLKLIRGHIETIDQTLVKLVDEAEEGKYLLSIRGINYISVAGLLAELGCFKLYPSAKQMIKMAGSNPTESESAGKRKSRTPMSKHGRPVLRYCAWTAVIPMLRLNQDFRAWAKERRERPAHANPLAGREVVGAALNKLLRLSFALVKNKTYYRSPYMAEVVN

SEQ ID NO: 85280 - protein, 372 aa, unidentified
MKQNILHIGLDVDDTQYHGSALNHTTGEILDFKCRPNLKGLLGQLDKLHKYFPGSAFNLCYEASYIGYTLQRDLAEKSYHCDVVAPTSIPSPRGKQVKTDRIDATQLVQFYANDLLTLVTIPEPEQEQDRDLIRSRQKLLEQRTELRKHIQALLRRNGRHYKVETQNKTHWTLRHYCWLERTIEASSGSLKVNLELLVRQLKGINRILTEYGQQIEVLAKTPRYEKPVQALTCYKGIKNFFALTMITEIGDVKRFPHPRQLVSWIGMDIREYSSGGKHNRFGITKHGNRYLRTAFIEANQRGYRTARITKDLKARRKNTAPELISIADRCLRRLNKKGNRLLIAGKHPNKVKVACAREMVGFVWESLHKAAV

SEQ ID NO: 85281 - protein, 328 aa, unidentified
MSCWIGIDVAKAVLDGVVRTTGEVVQFPNDATGHTALVAWATPLAPTGLVLEATGGYERAVVLALAAAGLPVVVVHPRQVRDFARSTGHLAKTDRLDAAVLALFAERVQPAVRPLSDAATAALAELITRRRQVRDMLTMEKNRLPLVRTRVRRDVPAHSTWLERRLDDTDDALRRAIEASPVWRGQEELLRSVPGMGPVVSRTLLALLPELGHLNRKQIAALAGVAPLARESGTWHGRRTVGGAGPGAARAVHGRLGGESAPSGPPCAVHPAARGGEAGHGGAGGVHAQTPRHPQCHAPHRDTVADRRGLISKTVAERSEGSLCLEAW

SEQ ID NO: 85282 - protein, 350 aa, unidentified
MLIIGCDYHPGFQQIAFVDTETGDLQERRLEHREEAEKFYRELAARGKDIRVGMEASGHARWFERLLRELQCELWIGDAAEIRTKRVRKQKTDRQDAQLLLKLLLEDRFPRIWVPDAENRDLRQLLWHRHRLVQMRTRIMNQLHVVALNEGVRRKKALWRPAGRSELESLVLAPWALRRRQDLLDLFDQLTPKIRELTRALEEEVEKRPVARRLMTHPGVGVLTALAFELVIGTPERFGCGKQIASYVGLVPTEESSGDRRRLGHISKQGNALLRFLLVEAAQVTVRSQPQWRSKFFHLAMRRGRKIAKVAMARKLAVHLYWMWRQGRDYGQLEKLGSHAGEPGNPHGEQ

SEQ ID NO: 85283 - protein, 332 aa, unidentified
MSVYVGIDVHRKRSQVAVIDQDGQVLTNRNVNNGVAPILSVIGGLPAGTKAAFEAAYGWGWLVELLEDYGFEPHLVHPLQCKAIASARLKNDKVDAAILAQLLRADLLPEAWIAPLEVRQLRALLRHRIQLVRLRTLLRNRIHAVLADHGHGRPEGCWSGPGRAWIASLDLPAVSAEVIQDALALIDALESVTGRLDAEIRGHARSDPRVNVLTRLPGVGPFTALVLLAEIGDITRFASARKLASWAGLTPTVRGSDRTVRHGHISKQGSVWVRWILCEAAQKAKRHPDFAASYQAIAGRRGTKIATTAIARKLLTRAYHLLTDASSASAPS

SEQ ID NO: 85284 - protein, 375 aa, unidentified
MLSKRINQNEQSLRALFSAFSAYDHKVLVVVDQPNNIGRLTVAVAQDIGIDVRYLPGLAMRQLSRIHAGNAKTDIRDAYIIAHAAKNLPESLRSVDRVEEAFLQLKVLNGIDEDLARSYTRLINQIRSALVGCYPQFEQALRGQIIHRKWVLHLLARYGGPTKIKRLGKAKAAAFARRYKARNPEPVLDAIFAAISEQTVTIAGAHYAEMGVAMSAKDALLKLEHRQQIEKEVIELINDIPHTQFLLSMPGIGPKTAAQILMTAGDMSDFPSAGHLASYAGLSPRTNQSGTSIMSNSLNRAGNKKLKNALWQSSFASIRFHERSRQFYERKRREGKRHNAAVVALARRRLNVLYAMMRNHEHYHDPAPSQEDLAA

SEQ ID NO: 85285 - protein, 373 aa, unidentified
MSTNLRNVGLDVHAETIAVAVAEPGGEVRPLGIIPNRPEAVAKLVRKLSPREHLRVCYEAGPCGYVLYWQLTQLGVHCDVVAPTLVPTKPGDRVKTDRRDAAKLARCYRAGDLTPVWVPDAAHEALRDLVRAREAAKQDQLRARHRLGKFLLRQGVRPPLGLKPWTQRHRRWLDAVDFPLAAHQATLADHLYEIDHAAARVARLEGALDDAVQAAPAPMRAVIAALQTLRGIRQVIAATIVSEVGSLSRFPHPRELMGYSGTVPSEHSSGASVHRGAITKTGNAHLRRVLVEAAWAYRFPPKCGKALRTRQRGQPEGITALAWKAQQRLCTRYRRLLARGKPTPHVITAVARELVGFIWAIGVAVERQHALAA

SEQ ID NO: 85286 - protein, 357 aa, unidentified
MTSIPDPLRRRIVVGVDTHKYAHVAVALDQVGGVIGDLTIPVDRAGYTQLQHWAAQLGGRVDFGVEGSGSYGAGLVSHLRRHGHLVVDVNRPDRAVRHLRGKNDTIDAEAAARAVLSGAATAVPKTADGTVEMIRQVKIAKDTAVKSRSQAIITLKTIIVNAPAELRERLEPLPDKVLLEQCRALRYESMSGVGDAACYTLRALADRYHALDQEARLHDRILATLTERAAPAFTSVFGVGEDSAAELLLVVGDNPERIRSEAALAKLCGACPIPASSGKTSRHRLNRGGHRQANAALHRILIVRMRFHEPTISYVNRRTTEGKTKKEILRCLKRLLIREIYQIIVAPHKVNEVVCAA

SEQ ID NO: 85287 - protein, 341 aa, unidentified
MNGGKNVVGIDIAKRVFQLHWIDRETGEIVSLQLKRKKFLEHFANRQSCLIGKEACGGAQPWARKLTAMGHPVKLLPGKAVKPFVTGNKNDRQDARAIWTAVQERDVKAVAIKTEEQQAILALHRMRSQLVKFRTAQINGLRGLLTEYGEVMPQGKAGVRKDLAEALARLADRLPAMVIGTLREQWARIKKLDGEIAAIKQRIQLWLKQDDACKRIAEIPGVGPLTATAAEAILGDAGAFKSGREFAAFAVLAPRQIGTGGRIKLLGISKRGDTCLRTPLIHGARSVLTHAKDPGPWVTELRQRRLLNVAVVALANKMARTIWAMLAHERTHQKEFVSQPV

SEQ ID NO: 85288 - protein, 371 aa, unidentified
MSKEKTKSISLKQQVQPLKYSIGNDISKEKFDACISVIDSEQRVKVIASRTFDNLRWRFKEYYEWVNKKCKMSIPVVFIMEATGIYYECLAFFLHKKDCYLSVVLPNKSKKYMQSIGFKSKNDKIDAKGLSRMAAEQCLEKWEAPDETVMNLRSITRQRESLQEFKTQINNQLLAYQCSEFKNPTIINQMESTIALLDQQIKETEVLVNDEINKDEGLKTKVENITQIKGVGNITVATVLAETNCFKYFKNVRQLVSYSGYDVIENQSGKHVGKTKISKKGNSHIRRIMHLPAFCVVSSNEPIFKALYERVYKRTNMKMKGYVAVQRKLLELIYTLWKNGTKYDRNYLNKTSGNDEQKLLFPLGFEKTVIV

SEQ ID NO: 85289 - protein, 343 aa, unidentified
MEIRSVGIDLGKTTFHLVALGDNGKVLLKKKFTQRQLIAFTANLQTCLIGMEACSGAHFLGRTLRQQGHDVKLIPAQFVKPFVKSNKNDFIDAEAIAEAVDRENMRFVPIKTDDQLDLQALHRVRDRLIARRTSVINQLRAFLLERGLVFAKSPARLRERMPEILENADEDLTPRMRNLLALLWNEWKDLEQQLVDLNQEVERIASSDAACTRLRQIPGIGPLVATAIVAAIGNGAAFRKGREFAAWMGLVPKQYSTGGKAKLAGISKRGNRYLRKILIHGARAVVLRSKRDRIAMGEWMTALEARAPRNVLIVAMANKLARIAWAVLSSGQDYRAVQEPVAA

SEQ ID NO: 85290 - protein, 477 aa, unidentified
MSQRKRPPAPARPAPGPSRPPRAGPPALTVLNANAAGIDVHSDMHMVCVPADRVASPAESAPGGLPAHVRRFGANSCDLHAIADWLKECGVTTVALESTGVYWVPLFELLEARGFEVWLVEPGQLSRCGARPKTDVLDAQWIQRLHSYGLLQPSFRPPDSVMALRGYHRQRQMQVRYAASHTHHMQQALEQMNVKLTEVVSDITGLTGQRIIAAILAGERDPRRLAALRDPKCKNDRETIARALEGTWRPEHLFALQQAYDLHQFHHRQIAQCDERIEAELARLPSRSGGKPFAAKPRRCGRKPNDLGFDACGPLFRALGVDLTEVDGIDVGTALVILAEIGVDVSRFPTEKHFASWLGVCPRQHQSNRTSKKRGPRKGKNRVAIALRMAAQALGRSESPLGVFYRRIKSRLGGKGAITATAHKLACLVYRMLRYGTAYAKQSMEEYEQKVRRQVERSLRRKAAALGYELVPRPASG

SEQ ID NO: 85291 - protein, 401 aa, unidentified
MRFAGIDVGAERHMVAVVDEESQVLCRSSPFCEDASGYAHLFELLGQPEGCLLALEATGHYWRNLFVALLAKGYAVAVLNPLRTRRFAEEDLQRTKTDAIDALGIARFAAQKRPPAAQLPDSATEELRELARLRERLAEDFASRLRQLHRAVDLGFPEFTRYVRTLESQLATTILSRYPTAASFQGVLVKKLARIIYDGSHKVGEELARTLIEAAEKSVGSHHSEPYRLRIKYLCDDLDVLRRRLKDLARDIERKIDDHEVGKLLTTIDGVGALTAACLIAELGDPARFRSAGAIASYVGVAPRLRQSGKKRFSGSPTTPFGNARLRKALWMVVLNAVRCNPWLRQYYERLRAAGKPGKVAVIAAMRKLLAAVWSVATHRRPFVPHLQQSPRWPAQYQQKA

SEQ ID NO: 85292 - protein, 385 aa, unidentified
MGTQTFIPRDYDVFAGLDVDKKSISVTFTDHQGFLKSLNMPYKVEHLVNYVRKHYPDKKVAFAYEAGPTGYALYDGLEAQAYPCLIASPSMIPKAPGQRVKTNRLDSRGISENLRGGQLKGIHVPTPLYRELRHLTQLRDTLVSEMVRMKQRIKSLLLMEGLEFPPAPAGSQWSFLVKKKLRELSCSSTVRFKLDRLLDSLEFDEKQVLKATREIRRFCQADPELSQCIEYLKTLPGIGWIVASKLLARVGDWRQIKNIRQLPAFLGLVPTENSTGERTERGSITHTGDGRLRSKLIQASWSAIRQDGELREFFRSVAKKHPRHLGSRIAIVAVAHKLSVRAAVVLMKQRPYEVRQKVQSAPLTQEETVPQGTTRRLAVPGETNS

SEQ ID NO: 85293 - protein, 426 aa, unidentified
MTSPVVSECCHARTGASIELGAPPVAPLLCCALRWPHLCLGTSVILVGMAKDGMKRLAATARGGRSPTVVHAVVCRKRWRPAMEHLGIDVHKVESQICILTESGKVVERRIRTQRERFAAVLGERPRARILIEASTESEWVARCLEELGHEVVVADPNFAAMYATRSRKVKTDLRDARTLAEACNLGAYRAAHRTSDRQRHVRTQLSVREALVQTRARYISLIGALLRREGLRVASGSAASFVRRVAKLALPGQLKSEIAPLLAVFVSVDRQLAWIDTRLEHLARTDETVERLCTAPSVGPVTAAAFSSTVDDPRRFKSAHQVEAYLGLTPSEWSSGEKQSKGHITKAGNNRMRKLLVQVAVSILRLRSPRTEALRKWATGIAVRRGKKIAIVALARRMAGVLFAMMRDRTCYLQPALLAPAAQVA

SEQ ID NO: 85294 - protein, 343 aa, unidentified
MEAYAGKQFVGIDLHRRRTVIVRTTEAGEVLEAVRIVNDVQRLASVMARAGDCPEVVLEATYGWYWAVDALQAGGASVHLAHPLGVKAFEYRRVKNDFRDAQDLADLLRMGRLPEAWIAPPPTRELRELVRHRAKLVSLRSHCKAEVHAVLAKCGVQVLMSDLFGLAGTELLDRLELPAPYAARIASLRRLMDDLDFEINLFAGLIRGRMAHEPGYTAVQKIPGIGPTLAAVLVAEIGDITRFASASKLTCWAGLTPKHHESDTHVRRGRITKQGSRLVRWAAIESVKTISKASEVGVLRERVADRRGRNIGSVAAGRRQLELVFYALRDGHVRALEHLPRVA

SEQ ID NO: 85295 - protein, 407 aa, unidentified
MQIMYGVCCGLDVHKKEITAALMTGAEEVVVKTFITATKALREMVEWLKDADCEYVAMESTGVYWKPVYNILELEGIPAMVVNASHMKAIPGRKTDVSDAEWIADLLRHGLLRASFIPEKDQREYRELMRYRSSRTEERAREINRLQKMLEGMNIKLGDFVSDVTGKSASKLLDLALTTDELSDEQIAEASHGNLKSSLDELKESLSGIITPLQRELVTIVLDVITEQTRQIAKIELLIRKYTKDAYEEAAKKLEVMPGIGTKSAQAIIAEIGIDMSRFPTASHLCAWAGVVPGNNESAGKRKNAKSRKGNKHLKKTLTQCATSAVKNKNSFFHAQHQRLVVRKGSNKATIAVAHTMLIAIYHILSGKEFKDLGADYYTQFNTEKKIQSHLKQLQKLGWTPPDPKAA

SEQ ID NO: 85296 - protein, 306 aa, unidentified
MLFCGIDLHSNNCLVVVSDDNDKVVYSKRLPNDLAVICDALSPYQRELFGVVVESTYNWYWLVDGLAAAGYSLHLANTTAIKQYDGLKYRGDESDARHLAHILRLGLLPEGHIMPKADRTVRDLARRRMQLVGQRTTQIVSIQTSMAQHIGAAMSGNGIKLLSALDIDAMPIGTTVALGMKANLAILQALQVQIDCLEAALHHHCRRDKNYRLLRSVAGIGQVLATVILLETGDIGRFADVGNYASYCRCVGRAHISNGKKKGEGNTRNGNRFLAWAYIEAANFAIRYCEPARKFYQRKKAMPRSA

SEQ ID NO: 85297 - protein, 454 aa, unidentified
MAPRHQKTKKIVPAQLPVFHPHAAGIDIGAREIWVAVPPGSDPKPVRRFNTFTEDLLKLRDWLLACGVRTVAMESTGVYWIALYQILEAAGLEVCLVNARHCKNLPGRKTDIQDCQWLQYLHSVGLLRSSFRPPEHICAVRAILRHRSRLVRCAADQVRLMHKALTQMNVQIQHVISDLVGVTGEAILQAILEGERDPVKLAKLKDHRIKATCDTLARSLQGDWRPEHLFTLRQSYDTWQHYQRQITASDEQIERQLANWDARVDLNVNPLPPPKTSHRTAQRNEPQFQARTECYRVLGVDLTAVPAFQTSTVLVLLAELGPDFAHKFPSAKHFSSWLGVCPDNRITGGKIMSSATRDVKSRVAEALRLAAQSLWHAQNYFGELYRRWKARLGGPKAITAMAHKLARILWHLLKYRQPFNPDVFRKEEEKLRRKKLARLQNTATALGYRLIQTQ

SEQ ID NO: 85298 - protein, 324 aa, unidentified
MTPYLGIDIGKQTFSAALLTATGTRQREFPNRPAAFQALLRWLGSAAQPELHVCMEATGRYGEALAEFLYAQGLTVSLVNPHSTHHFAQSLQRHTKTDLSDALMLAHYARALQPRPWQPPAPEARQLQELVRHLDALQRAHDAVRNRLTAQAYQSAFVRADLEAQAADLAQRITATRQQMRDHVDRHPGLRTQRDLLVSIPGIAEDTAARLLGEVLDFARFDSAAALAAFAGVCPRLVQSGTSVHKRPRLSKRGNSLLRWVLYFPALNAIRHNPRVRALYERLLASGHSKMQALGAAMHKLLVLAYGVLKSGQPFDPHWHARHA

SEQ ID NO: 85299 - protein, 544 aa, unidentified
MAEVRAKLASGTPIEVWFQDEMRVGQKNKLTYRWARKGSRPRAAHDQRTQSTYLFGAVCPEHGTGAALVLPFCNTEAMQLHLDEIAARVTAGAHAILILDQAGWHGAKDLKIPSNLSLLPLPPRAPELNSQENIWQTVCSLSVRMWLVHAMRRARVASDRPAPSLTHRGRAMQENSKIFVGLDTSKMKISVALAEEGRQGEVRFLGDIDNTSDAIRRLVRKLTGKFCELLFCYEAGPTGYGLHRQITALGHACSVIAPSLIPKRPGEHVKTNRRDALTLARLHRAGELTTIWVPDPGHEAIRDLVRAREAAMEDLRKKRQQLQSFLLRHGRIYPGLRSWTLVHARWLSNLTFEHPAQYLVLREYRQAIEDAEARLERLTQQVADVVSTWSMAPVVEAYQAMRGVAFLTAVTFVAEIGDVRRFETPRQLMAYLGLVPSERSTGEQVRRGSITKAGNPRARRVLIEGAWTYRYPARLSRALQVRQERLPKTVRAIAWKAQMRLCARYRRLMAAGKRQTLVTTAIAREMAAFLWAIGHEVEPRSAAA

SEQ ID NO: 85300 - protein, 316 aa, unidentified
MDGSITTFVGIDVAKRSFDVCLLPEGKQLSLLYDRQGLKQLFSQLPDAGTCLIVMEATGGHQKRLVAELTDAGHLVAVVNPRQVRDFARGLGILAKTDRLDAQVIARFGQQTRPRCVAQVSEKQAELEQLVVRRRQLIQLRTAEKNRTEMCSSKAVRKSIKQVVDLLNKQIDHLDKEISAMLESDDDWKGKSQLLGSVPGVGAVTIASLLAELPELGLLNRQEIAALVGVAPFNRDSGRFRGKRSIWGGRAEVRSVLYMAALTARRFNPLIRTFAARLEAEGKAFKVVLTACMRKLLVILNTMVKNNTHWNPNLAY

SEQ ID NO: 85301 - protein, 354 aa, unidentified
MENVATIGLDIAKNVFQVYGADADGAPLFNRKLYRADVLNFFARLPRCLVGLEACGTAHYWARCIAKLGHDVRLIHTAYVKPYVKRGKTDAYDAQAIAEAVTRKTMRFVPIKSDDQQAVTMIFRTRSLFVRQRVQATNALRAHLAELGFIANTGLASFKLLAAVVRGADGTGLPKMARDALEDIVQQIELLSERVKKLDQEITARANRDEDMLRLMTIPGIGPQIAAAVKTIAPDLSGFESARHFAAWIGLTPKSHSSGGRKRLGHISKMGNRELRSLLYLAGATVLGTVKDDSAMVRWSKRLRARRPFKVAAVAVANKLARIIWALSIKGGVYVRAKIASSSEADPREVRECA

SEQ ID NO: 85302 - protein, 451 aa, unidentified
MPKERTRSKPTGLPIIHPYAAGIDIGSRFHVAAVSPDLCDEPVQTFQAFTADLERMADWLIATGTKTVVMESTGVYWVAAFEVLESHGLEVIFANAREARAVPGRKSDVNDAQWLQRLHACCLLRASFRPDRDIAELRAYLRAREKHTDYAAAHIQHMQKALTYMNIQLHHVIATITGVTGMRIIRAIVAGERDPDKLAAMRDVRCKEGIETIRGALVGNYQPEHLFALRQSLALYDFYQQCIDECDAEIEKAVAGLNIERPMPDAPLPKAKHRSKMPSDPNFNVRLAMYQLAGTDLTQIHGVGPFLALRLIGECGTDLSRWRTAKHFTSWLTLSPGCKISGGKVLSAHTRKTSSRLTVALRLAAVTVGRSNTALGAFYRRLAGRIGNAKAVTATARKIAVLFYNAMRYGMDYRDPGADHYEQQYRERVIKQLHRRAAQFGYSLQPEESPI

SEQ ID NO: 85303 - protein, 470 aa, unidentified
MSSTREVETEAKKRTPRRKKRGSCQQDRPVVEPNAAGIDVGAREMYVAIPPDRDSEPVRVFKTFTSDLECLVDWLIARGITTVAMESTGVYWIPLYQMLEDRGVRACLVNARHMKNVPGRRTDWHECQWLQYLHAAGLLRAAFRPEQDVCGVRTLLRHRNEMVRMAVQHVQHMQKALTQMNIHIHHVISDITGLTGLAIVDAILSGERDVAKLAELRHRSIQADEETIRKSLEGDWREEHLFTLNQSRQMYMNYRNNIEACDEKVAKLLGGFEAQVDIQLQPLPAPPGPSRKRRTKRTGDFRFEVRTEAYKLFGLDVTRIPGLNELAIPIFSEVGRDLAARFPTAGQFASWLGLCPDNDKSGGQVLWTGVRKINNRAAQMFRMAASSLHHNRSPVGDFLRRMKAKLGPAAGITATAHKIAIIFYTLVTKQIEYDDSIWATRDEHRQKRFEQKVKRQARLLGYELVPVQPA
